(19) United States
(12) Patent Application Publication
(10) Pub. No.: US 2023/0075314 A1
(43) Pub. Date: Mar. 9, 2023

(54) VECTORIZED ANTIBODIES (vAb) AND USES THEREOF

(71) Applicant: Voyager Therapeutics, Inc., Cambridge, MA (US)

(72) Inventors: Jinzhao Hou, Cambridge, MA (US); Yanqun Shu, Cambridge, MA (US); Todd Carter, Cambridge, MA (US); Dinah Wen-Yee Sah, Hopkinton, MA (US); Po-Jen Yen, Cambridge, MA (US); Donna T. Ward, Groton, MA (US); Johanna L. Crimins, Groton, MA (US)

(21) Appl. No.: 17/607,213

(22) PCT Filed: Apr. 29, 2020
(86) PCT No.: PCT/US2020/030360

§ 371 Date: Oct. 28, 2021

Related U.S. Application Data
(60) Provisional application No. 62/839,891, filed on Apr. 29, 2019.
(60) Provisional application No. 62/860,295, filed on Jun. 12, 2019.
(60) Provisional application No. 62/926,706, filed on Oct. 28, 2019.
(60) Provisional application No. 63/002,008, filed on Mar. 30, 2020.
(60) Provisional application No. 63/002,011, filed on Mar. 30, 2020.

(51) Int. Cl. C12N 15/86; C12N 15/113; C07K 16/00

(52) U.S. Cl. CPC C12N 15/86; C12N 15/113; C07K 16/00; C12N 2750/14143; C12N 2830/50; C07K 2317/24; A61K 2039/505; C12N 2310/14; C12N 2310/141; C07K 2319/095; C07K 2317/14; C12N 2750/14171; C07K 2317/31

(57) ABSTRACT

The present disclosure provides compositions and methods for the preparation, manufacture and therapeutic use of viral vectors, such as adeno-associated virus (AAV) particles having viral genomes encoding one or more antibodies or antibody fragments or antibody-like polypeptides, for the prevention and/or treatment of diseases and/or disorders.

### REFERENCE TO RELEVANT APPLICATIONS

[0001] This application claims the benefit of U.S. Provisional Patent Application No. 62/839,891, entitled “Compositions and Methods for the Treatment of Tauopathy”, filed Apr. 29, 2019, U.S. Provisional Patent Application No. 62/860,295, filed Jun. 12, 2019, entitled “Vectorized Antibodies (vAb) and Uses Thereof”, U.S. Provisional Patent Application No. 62/926,706, filed Oct. 28, 2019, entitled “Vectorized Antibodies (vAb) and Uses Thereof”, U.S. Provisional Patent Application No. 63/002,008, filed Mar. 30, 2020, entitled “Vectorized Antibodies (vAb) and Uses Thereof”, U.S. Provisional Patent Application No. 63/002,011, filed Mar. 30, 2020, entitled “Compositions and Methods for the Treatment of Tauopathy”; the contents of each of which are herein incorporated by reference in their entirety.

### SEQUENCE LISTING

[0002] The present application is being filed along with a Sequence Listing in electronic format. The Sequence Listing file, entitled 2057_1311PCT_SL, was created on Apr. 29, 2020, and is 27,502,408 bytes in size. The information in electronic format of the Sequence Listing is incorporated herein by reference in its entirety.

### FIELD OF THE DISCLOSURE

[0003] This disclosure relates to compositions of vectorized antibodies and methods for vectored antibody delivery (VAD).

### BACKGROUND OF THE DISCLOSURE

[0004] Antibody-based therapies have been developed for a wide variety of diseases, disorders and conditions, including infectious and non-infectious diseases. The U.S. Food and Drug Administration (FDA) has approved antibodies for treatment of cancers, autoimmune and immune system disorders, ocular diseases, nervous system diseases, inflammations, and infections, amongst many others. Naturally, antibodies are components of the adaptive immune response and they function by recognizing specific foreign antigens and stimulating humoral immunity responses. As a consequence, antibodies may be applied to the treatment, prevention, management, diagnosis and research of diseases, disorders and/or conditions.

[0005] Antibodies have relatively short half-lives and this presents an ongoing and long-felt challenge for antibody-based therapies. In order to achieve a sufficiently high concentration of an antibody for long lasting therapeutic effects, antibody therapies are traditionally delivered by repeated administration, e.g. by multiple injections. This dosing regimen results in an inconsistent level of antibody throughout the treatment period, limited efficiency per administration, high cost of administration and consumption of the antibody. Hence, there remains a need in the art for delivery of antibodies and antibody-based therapeutics through alternative routes or modalities of administration.

[0006] One such alternative route of administration is by expression vector (e.g. plasmid or viral vector), including but not limited to, adeno-associated viral vectors (AAVs). Adeno-associated viral vectors are widely used in gene therapy approaches due to a number of advantageous features. As dependoparvoviruses, AAV are non-replicating in infected cells and therefore not associated with any known disease. Further, AAVs may be introduced to a wide variety of host cells, do not integrate into the genome of the host cell, and are capable of infecting both quiescent and dividing cells. AAVs transduce non-replicating and long-lived cells in vivo, resulting in long term expression of the protein of interest. Further, AAVs can be manipulated with cellular and molecular biology techniques to produce non-toxic particles carrying a payload encoded in the AAV viral genome that can be delivered to a target tissue or set of cells with limited or no side-effects. Given the foregoing, the use of AAVs for vectored antibody delivery (VAD) would allow for longer lasting efficacy, fewer dose treatments, and more consistent levels of the antibody throughout the treatment period.

[0007] In vectored antibody delivery (VAD) an V is used as the delivery modality for a nucleic acid sequence encoding the antibody, which results in in vivo expression of the encoded payload, e.g., functional antibody.

[0008] The mechanism underlying VAD is thought to proceed through the following steps. First the AAV vector enters the cell via endocytosis, then escapes from the endosomal compartment and is transported to the nucleus wherein the viral genome is released and converted into a double-stranded episomal molecule of DNA by the host. The transcriptionally active episome results in the expression of encoded antibodies that may then be secreted from the cell into the circulation. VAD may therefore enable continuous, sustained and long-term delivery of antibodies administered by a single injection of an AAV particle.

[0009] Previous studies of an AAV-mediated antibody technique known as vectored immunoprophylaxis (VIP) have focused on neutralization of human immunodeficiency virus (HIV) (see, e.g. Johnson et al., 2009, Nature Med., 15, 901-906, Saunders et al., 2015, J. Virol., 89(16), 8334-8345, Balasz et al., 2012, Nature 481, 81-84, the contents of which are incorporated herein by reference in their entirety). Balasz et al. reported along-term, even lifelong, expression of monoclonal antibody at high concentration from a single intramuscular administration in mice that resulted in full protection against HIV infection. AAV-mediated VIP has also been demonstrated against influenza strains (see, e.g. Balasz, et al. Nat. Biotechnol., 2013, 31(7):647-52) and Plasmodium Falciparum, a sporozoite causing malaria infection (see, e.g. Deal at al., 2014, PNAS, 111 (34), 12528-12532), as well as cancer, RSV and drug addiction (see, e.g. review by Schnepp and Johnson, Microbiol. Spectrum 2(4), 2014). Though promising, these studies emphasize efforts to merely prevent disease. There still remains a need for improved methods of prevention, and new antibody-mediated therapies for research, diagnosis, and treatment of disease.

[0010] The present disclosure addresses this need by providing novel AAV particles having viral genomes engineered to encode antibodies and antibody-based compositions and methods of using these constructs (e.g., VAD) for the treatment, prevention, diagnosis and research of diseases, disorders and/or conditions. The present disclosure further embraces optimized AAV particles for delivery of nucleic acids (e.g., viral genomes) encoding antibodies and antibody-based compositions to a subject in need thereof.

### SUMMARY OF THE DISCLOSURE

[0011] The disclosure provides AAV particles comprising a capsid and a viral genome, said viral genome comprising a 5′ inverted terminal repeat (ITR) sequence region, at least one promoter sequence region, a polyA sequence region, a 3′ITR sequence region, and at least one payload region comprising a first nucleic acid sequence encoding an antibody, an antibody fragment or an antibody variant, wherein the 5′ITR sequence region may be, but is not limited to, SEQ ID NO: 13519 or 13520, wherein the 3′ITR sequence region may be, but is not limited to, SEQ ID NO: 13521 or 13522, wherein the at least one promoter sequence region may be, but is not limited to, one or more of SEQ ID NO: 13523-13534, and wherein the polyA sequence region may be, but is not limited to, SEQ ID NO: 13576, 13577, or 13578.

[0012] In one aspect, the viral genome comprises an 5′ITR sequence region may be, but is not limited to, SEQ ID NO: 13519, an 3′ITR sequence region may be, but is not limited to, SEQ ID NO: 13521, and a polyA sequence region may be, but is not limited to, SEQ ID NO: 13576. In one aspect, the viral genome comprises an 5′ITR sequence region may be, but is not limited to, SEQ ID NO: 13519, an 3′ITR sequence region may be, but is not limited to, SEQ ID NO: 13521, and a polyA sequence region may be, but is not limited to, SEQ ID NO: 13577. In one aspect, the viral genome comprises an 5′ITR sequence region may be, but is not limited to, SEQ ID NO: 13520, an 3′ITR sequence region may be, but is not limited to, SEQ ID NO: 13522, and a polyA sequence region may be, but is not limited to, SEQ ID NO: 13576. In one aspect, the viral genome comprises an 5′ITR sequence region may be, but is not limited to, SEQ ID NO: 13520, the 3′ITR sequence region may be, but is not limited to, SEQ ID NO: 13522, and a polyA sequence region may be, but is not limited to, SEQ ID NO: 13577.

[0013] In one aspect, the viral genome comprises at least one promoter sequence. The promoter sequence region may be, but is not limited to, SEQ ID NO: 13523, 13524, 13525, 13526, 13527, 13528, 13529, 13530, 13531, 13532, 13533, and/or 13534. In one aspect, the viral genome comprises at least two promoters which may be, but is not limited to, SEQ ID NO: 13524 and 13525.

[0014] In one aspect, the viral genome comprises at least one intron sequence region. The intron sequence region may independently be, but is not limited to, SEQ ID NO: 13540-13554. In one aspect, the viral genome also includes at least one exon region which may be, but is not limited to, SEQ ID NO: 13535-13539. In one aspect, the viral genome comprises two intron sequence regions and two exon sequence regions.

[0015] In one aspect, the viral genome comprises a filler sequence region. The filler sequence region may be, but is not limited to, SEQ ID NO: 13579 or 13580.

[0016] In one aspect, the viral genome comprises a tag sequence region. The tag sequence region may be, but is not limited to, SEQ ID NO: 13571-13575.

[0017] In one aspect, the viral genome comprises at least one signal sequence region. The signal sequence region may be, but is not limited to, SEQ ID NO: 13555-13570.

[0018] The disclosure also provides AAV particles comprising a capsid and a viral genome, said viral genome comprising at least one inverted terminal repeat (ITR) region and a payload region, said payload region comprising a regulatory sequence operably linked to at least a first nucleic acid segment, said first nucleic acid segment encoding one or more polypeptides given in Table 3-16, variants and fragments thereof. The capsid of the AAV particle may be any of the serotypes described herein and/or described in Table 1.

[0019] In one aspect, the first nucleic acid segment may encode one or more polypeptides such as, but not limited to, an antibody heavy chain, an antibody light chain, a linker, and combinations thereof. The first nucleic acid segment may encode one or more polypeptides which is humanized. As a non-limiting example, the first nucleic acid segment encodes from 5′ to 3′, an antibody heavy chain, a linker, and an antibody light chain. As another non-limiting example, the first nucleic acid segment encodes from 5′ to 3, an antibody light chain, a linker, and an antibody heavy chain. As yet another non-limiting example, the first nucleic acid segment encodes one or more antibody heavy chains. As yet another non-limiting example, the first nucleic acid segment encodes one or more antibody light chains.

[0020] In one aspect, the first nucleic acid segment includes an antibody, having at least 95% identity to any of the sequences of Table 3-16, including, SEQ ID NO. 1740-10916 and 13165-13518.

[0021] In one aspect, the first nucleic acid segment encodes an antibody, having at least 95% identity to any of the sequences of Table 3-16, including, SEQ ID NO: 1740-10916 and 13165-13518.

[0022] In one aspect, the regulatory sequence may comprise a promoter such as, but not limited to, human elongation factor 1α-subunit (EF1α), cytomegalovirus (CMV) immediate-early enhancer and/or promoter, chicken β-actin (CBA) and its derivative CAG, β glucuronidase (GUSB), or ubiquitin C (UBC). Tissue-specific expression elements can be used to restrict expression to certain cell types such as, but not limited to, muscle specific promoters, B cell promoters, monocyte promoters, leukocyte promoters, macrophage promoters, pancreatic acinar cell promoters, endothelial cell promoters, lung tissue promoters, astrocyte promoters, or nervous system promoters which can be used to restrict expression to neurons, astrocytes, or oligodendrocytes.

[0023] In one aspect, the linker in the viral genome is selected from one or more of the linkers given in Table 2.

[0024] In one aspect, the AAV particles described herein may comprise a viral genome which is single stranded.

[0025] In one aspect, the AAV particles described herein may comprise a viral genome which is self-complementary.

[0026] In one aspect, the AAV particles described herein may comprise a viral genome comprising at least one intron sequence.

[0027] In one aspect, the AAV particles described herein may comprise a viral genome comprising at least one stuffer sequence to adjust the length of the viral genome to increase efficacy and/or efficiency.

[0028] In one aspect, the AAV particles described herein may comprise at least one region which has been codon optimized. As a non-limiting example, the viral genome may be codon optimized. As another non-limiting example, the first nucleic acid segment is codon-optimized.

[0029] In one aspect, the AAV particles described herein may comprise a viral genome with two ITR regions. At least one of the ITR regions may be derived from the same or different parental serotype of the capsid. As a non-limiting example, at least one ITR region is derived from AAV2.

[0030] In one aspect, the AAV particles comprise a viral genome which comprises a second nucleic acid segment. The second nucleic acid segment may encode an aptamer, siRNA, saRNA, ribozyme, microRNA, mRNA or combination thereof.

[0031] In one aspect, the AAV particles comprise a viral genome which comprises a second nucleic acid segment encoding an siRNA designed to target the mRNA that encodes the target of the antibody encoded by the first nucleic acid segment.

[0032] In one aspect, the AAV particles comprise a viral genome which comprises a second nucleic acid segment encoding a microRNA, the microRNA is selected to target the mRNA that encodes the target of the antibody encoded by the first nucleic acid segment.

[0033] In one aspect, the AAV particles comprise a viral genome which comprises a second nucleic acid segment encoding an mRNA, the mRNA encodes one or more peptides inhibitors of the same target of the antibody encoded by the first nucleic acid segment.

[0034] In one aspect, the AAV particles comprise a viral genome which comprises a third nucleic acid segment. The third nucleic acid segment may encode a nuclear export signal, a polynucleotide or polypeptide which acts as a regulator of expression of the viral genome in which it is encoded, a polynucleotide or polypeptide which acts as a regulator of expression of the payload region of the viral genome in which it is encoded and/or a polynucleotide or polypeptide which acts as a regulator of expression of the first nucleic acid segment of the payload region of the viral genome in which it is encoded.

[0035] The disclosure provides AAV particles comprising a capsid and a viral genome, said viral genome comprising at least one inverted terminal repeat (ITR) region and a payload region comprising a regulatory sequence operably linked to at least a first nucleic acid segment, the first nucleic acid segment encoding a bispecific antibody derived from any of the sequences listed in Table 3-16 or portions or fragments thereof.

[0036] The disclosure provides methods of producing a functional antibody in a subject in need thereof, comprising administering to a subject the AAV particles described herein. The level or amount of the functional antibody in the target cell or tissue after administration to the subject may be from about 0.001 ug/mL to 100 mg/mL. The functional antibody may be encoded by a single first nucleic acid segment of a viral genome within the AAV particle. The functional antibody may be encoded by two different viral genomes, the two different viral genomes may be packaged in separate capsids.

[0037] The disclosure provides a pharmaceutical composition comprising an AAV particle described herein in a pharmaceutically acceptable excipient. As a non-limiting example, the pharmaceutically acceptable excipient is saline. As a non-limiting example, the pharmaceutically acceptable excipient is 0.001% pluronic in saline.

[0038] The disclosure provides methods of producing a functional antibody in a subject in need thereof, comprising administering to a subject the AAV particles described herein by a delivery route such as, but not limited to, enteral (into the intestine), gastroenteral, epidural (into the dura mater), oral (by way of the mouth), transdermal, intracerebral (into the cerebrum), intracerebroventricular (into the cerebral ventricles), epicutaneous (application onto the skin), intradermal, (into the skin itself), subcutaneous (under the skin), nasal administration (through the nose), intravenous (into a vein), intravenous bolus, intravenous drip, intra-arterial (into an artery), intramuscular (into a muscle), intracardiac (into the heart), intraosseous infusion (into the bone marrow), intrathecal (into the spinal canal), intraparenchymal (into brain tissue), intraperitoneal, (infusion or injection into the peritoneum), intravesical infusion, intravitreal, (through the eye), intracavernous injection (into a pathologic cavity) intracavitary (into the base of the penis), intravaginal administration, intrauterine, extra-amniotic administration, transdermal (diffusion through the intact skin for systemic distribution), transmucosal (diffusion through a mucous membrane), transvaginal, insufflation (snorting), sublingual, sublabial, enema, eye drops (onto the conjunctiva), or in ear drops, auricular (in or by way of the ear), buccal (directed toward the cheek), conjunctival, cutaneous, dental (to a tooth or teeth), electro-osmosis, endocervical, endosinusial, endotracheal, extracorporeal, hemodialysis, infiltration, interstitial, intra-abdominal, intra-amniotic, intra-articular, intrabiliary, intrabronchial, intrabursal, intracartilaginous (within a cartilage), intracaudal (within the cauda equine), intracisternal (within the cisterna magna cerebellomedularis), intracorneal (within the cornea), dental intracoronal, intracoronary (within the coronary arteries), intracorporus cavernosum (within the dilatable spaces of the corporus cavernosa of the penis), intradiscal (within a disc), intraductal (within a duct of a gland), intraduodenal (within the duodenum), intradural (within or beneath the dura), intraepidermal (to the epidermis), intraesophageal (to the esophagus), intragastric (within the stomach), intragingival (within the SUBSTITUTE SHEET (RULE 26) gingivae), intraileal (within the distal portion of the small intestine), intralesional (within or introduced directly to a localized lesion), intraluminal (within a lumen of a tube), intralymphatic (within the lymph), intramedullary (within the marrow cavity of a bone), intrameningeal (within the meninges), intramyocardial (within the myocardium), intraocular (within the eye), intraovarian (within the ovary), intrapericardial (within the pericardium), intrapleural (within the pleura), intraprostatic (within the prostate gland), intrapulmonary (within the lungs or its bronchi), intrasinal (within the nasal or periorbital sinuses), intraspinal (within the vertebral column), intrasynovial (within the synovial cavity of a joint), intratendinous (within a tendon), intratesticular (within the testicle), intrathecal (within the cerebrospinal fluid at any level of the cerebrospinal axis), intrathoracic (within the thorax), intratubular (within the tubules of an organ), intratumor (within a tumor), intratympanic (within the aurus media), intravascular (within a vessel or vessels), intraventricular (within a ventricle), iontophoresis (by means of electric current where ions of soluble salts migrate into the tissues of the body), irrigation (to bathe or flush open wounds or body cavities), laryngeal (directly upon the larynx), nasogastric (through the nose and into the stomach), occlusive dressing technique (topical route administration which is then covered by a dressing which occludes the area), ophthalmic (to the external eye), oropharyngeal (directly to the mouth and pharynx), parenteral, percutaneous, periarticular, peridural, perineural, periodontal, rectal, respiratory (within the respiratory tract by inhaling orally or nasally for local or systemic effect), retrobulbar (behind the pons or behind the eyeball), soft tissue, subarachnoid, subconjunctival, submucosal, topical, transplacental (through or across the placenta), transtracheal (through the wall of the trachea), transtympanic (across or through the tympanic cavity), ureteral (to the ureter), urethral (to the urethra), vaginal, caudal block, diagnostic, nerve block, biliary perfusion, cardiac perfusion, photopheresis and spinal.

[0039] The disclosure provides methods of treating and/or preventing a disease or disorder in a subject comprising administering to the subject an AAV particle described herein. The administration may be at a prophylactically effective dose such as, but not limited to, from about 1 ug/mL to about 500 ug/mL of expressed polypeptide or 1x10e4 to 1x10e16 VG/mL from the pharmaceutical composition. The pharmaceutical composition may be administered at least once. The pharmaceutical composition may be administered daily, weekly, monthly or yearly. The pharmaceutical composition may be co-administered as part of a combination therapy.

### DETAILED DESCRIPTION

### I. Compositions of the Disclosure

[0040] According to the present disclosure, compositions for delivering functional anti-tau antibodies and/or antibody-based compositions by adeno-associated viruses (AAVs) are provided. AAV particles may be provided via any of several routes of administration, to a cell, tissue, organ, or organism, in vivo, ex vivo, or in vitro.

[0041] As used herein, an “AAV particle” is a virus which comprises a viral genome with at least one payload region and at least one inverted terminal repeat (ITR) region.

[0042] As used herein, “viral genome” or “vector genome” refers to the nucleic acid sequence(s) encapsulated in an V particle. Viral genomes comprise at least one payload region encoding polypeptides, e.g., antibodies, antibody-based compositions or fragments thereof.

[0043] As used herein, a “payload” or “payload region” is any nucleic acid molecule which encodes one or more polypeptides. At a minimum, a payload region comprises nucleic acid sequences that encode an antibody, an antibody-based composition, or a fragment thereof, but may also optionally comprise one or more functional or regulatory elements to facilitate transcriptional expression and/or polypeptide translation.

[0044] As used herein, “VL” and “VH” refer to components of alight chain or heavy chain of an antibody, respectively, or a fragment thereof. In some embodiments “VL” and “VH” refer to the variable regions of the light or heavy chain of an antibody, respectively, or a fragment thereof. In another embodiment, “VL” and “VH” may also embrace a constant region of alight or heavy chain of an antibody, or a fragment thereof. In another embodiment, “VL” and “VH” may embrace the entirety of an antibody light chain or heavy chain, respectively.

[0045] In some embodiments, AAV particles, viral genomes and/or payloads, and the methods of their use may be as described in WO2017189963, the contents of which are herein incorporated by reference in their entirety.

[0046] The nucleic acid sequences and polypeptides disclosed herein may be engineered to contain modular elements and/or sequence motifs assembled to enable expression of the antibodies or antibody-based compositions. In some embodiments, the nucleic acid sequence comprising the payload region may comprise one or more of a promoter region, an intron, a Kozak sequence, an enhancer, or a polyadenylation sequence. Payload regions typically encode antibodies or antibody-based compositions, which may include an antibody heavy chain domain, an antibody light chain domain, both antibody heavy and light chain domains, or fragments of the foregoing in combination with each other or in combination with other polypeptide moieties. In some cases, payload regions may also encode one or more linkers or joining regions between antibody heavy and light chain domains or fragments. The order of expression, structural position, or concatemer count (heavy chain, light chain, or linker) may be different within or among different payload regions. The identity, position and number of linkers expressed by payload regions may also vary.

[0047] The payload regions may be delivered to one or more target cells, tissues, organs, or organisms within the viral genome of an AAV particle.

### Adeno-Associated Viruses (AAVs) and AAV Particles

[0048] Adeno-associated viruses (MV) are small non-enveloped icosahedral capsid viruses of the Parvoviridae family characterized by a single stranded DNA viral genome. Parvoviridae family viruses consist of two subfamilies: Parvovirinae, which infect vertebrates, and Densovirinae, which infect invertebrates. The Parvoviridae family comprises the Dependovirus genus which includes AAV, capable of replication in vertebrate hosts including, but not limited to, human, primate, bovine, canine, equine, and ovine species.

[0049] The parvoviruses and other members of the Parvoviridae family are generally described in Kenneth I. Berns, “Parvoviridae: The Viruses and Their Replication,” Chapter 69 in FIELDS VIROLOGY (3d Ed. 1996), the contents of which are incorporated by reference in their entirety.

[0050] AAV have proven to be useful as a biological tool due to their relatively simple structure, their ability to infect a wide range of cells (including quiescent and dividing cells) without integration into the host genome and without replicating, and their relatively benign immunogenic profile. The genome of the virus may be manipulated to contain a minimum of components for the assembly of a functional recombinant virus, or viral particle, which is loaded with or engineered to target a particular tissue and express or deliver a desired payload.

[0051] The wild-type AAV vector genome is a linear, single-stranded DNA (ssDNA) molecule approximately 5,000 nucleotides (nt) in length. Inverted terminal repeats (ITRs) traditionally cap the viral genome at both the 5′ and the 3′ end, providing origins of replication for the viral genome. While not wishing to be bound by theory, an AAV viral genome typically comprises two ITR sequences. These ITRs have a characteristic T-shaped hairpin structure defined by a self-complementary region (145nt in wild-type AAV) at the 5′ and 3′ ends of the ssDNA which form an energetically stable double stranded region. The double stranded hairpin structures comprise multiple functions including, but not limited to, acting as an origin for DNA replication by functioning as primers for the endogenous DNA polymerase complex of the host viral replication cell.

[0052] The wild-type AAV viral genome further comprises nucleotide sequences for two open reading frames, one for the four non-structural Rep proteins (Rep78, Rep68, Rep52, Rep40, encoded by Rep genes) and one for the three capsid, or structural, proteins (VP1, VP2, VP3, encoded by capsid genes or Cap genes). The Rep proteins are important for replication and packaging, while the capsid proteins are assembled to create the protein shell of the AAV, or AAV capsid. Alternative splicing and alternate initiation codons and promoters result in the generation of four different Rep proteins from a single open reading frame and the generation of three capsid proteins from a single open reading frame. Though it varies by AAV serotype, as a non-limiting example, for AAV9/hu.14 (SEQ ID NO: 123 of U.S. Pat. No. 7,906,111, the contents of which are herein incorporated by reference in their entirety) VP1 refers to amino acids 1-736, VP2 refers to amino acids 138-736, and VP3 refers to amino acids 203.736. In other words, VP1 is the full-length capsid sequence, while VP2 and VP3 are shorter components of the whole. As a result, changes in the sequence in the VP3 region, are also changes to VP1 and VP2, however, the percent difference as compared to the parent sequence will be greatest for VP3 since it is the shortest sequence of the three. Though described here in relation to the amino acid sequence, the nucleic acid sequence encoding these proteins can be similarly described. Together, the three capsid proteins assemble to create the AAV capsid protein. While not wishing to be bound by theory, the AAV capsid protein typically comprises a molar ratio of 1:1:10 of VP1:VP2:VP3. As used herein, an “AAV serotype” is defined primarily by the AAV capsid. In some instances, the ITRs are also specifically described by the AAV serotype (e.g., AAV219).

[0053] For use as a biological tool, the wild-type AAV viral genome can be modified to replace the rep/cap sequences with a nucleic acid sequence comprising a payload region with at least one ITR region. Typically, in recombinant AAV viral genomes there are two ITR regions. The rep/cap sequences can be provided in trans during production to generate AAV particles.

[0054] In addition to the encoded heterologous payload, AAV vectors may comprise the viral genome, in whole or in part, of any naturally occurring and/or recombinant AAV serotype nucleotide sequence or variant. AAV variants may have sequences of significant homology at the nucleic acid (genome or capsid) and amino acid levels (capsids), to produce constructs which are generally physical and functional equivalents, replicate by similar mechanisms, and assemble by similar mechanisms. Chiorini et al., J. Vir. 71: 6823-33(1997); Srivastava et al., J. Vir. 45:555-64 (1983); Chiorini et al., J. Vir. 73:1309-1319 (1999); Rutledge et al., J. Vir. 72:309-319 (1998); and Wu et al., J. Vir. 74: 8635-47 (2000), the contents of each of which are incorporated herein by reference in their entirety.

[0055] In some embodiments, AAV particles of the present disclosure are recombinant AAV viral vectors which are replication defective and lacking sequences encoding functional Rep and Cap proteins within their viral genome. These defective AAV vectors may lack most or all parental coding sequences and essentially carry only one or two AAV ITR sequences and the nucleic acid of interest for delivery to a cell, a tissue, an organ, or an organism.

[0056] In some embodiments, the viral genome of the AAV particles of the present disclosure comprise at least one control element which provides for the replication, transcription, and translation of a coding sequence encoded therein. Not all of the control elements need always be present as long as the coding sequence is capable of being replicated, transcribed, and/or translated in an appropriate host cell. Non-limiting examples of expression control elements include sequences for transcription initiation and/or termination, promoter and/or enhancer sequences, efficient RNA processing signals such as splicing and polyadenylation signals, sequences that stabilize cytoplasmic mRNA, sequences that enhance translation efficacy (e.g., Kozak consensus sequence), sequences that enhance protein stability, and/or sequences that enhance protein processing and/or secretion.

[0057] According to the present disclosure, AAV particles for use in therapeutics and/or diagnostics comprise a virus that has been distilled or reduced to the minimum components necessary for transduction of a nucleic acid payload or cargo of interest. In this manner, AAV particles are engineered as vehicles for specific delivery while lacking the deleterious replication and/or integration features found in wild-type viruses.

[0058] AAV vectors of the present disclosure may be produced recombinantly and may be based on adeno-associated virus (AAV) parent or reference sequences. As used herein, a “vector” is any molecule or moiety which transports, transduces, or otherwise acts as a carrier of a heterologous molecule such as the nucleic acids described herein.

[0059] In addition to single stranded AAV viral genomes (e.g., ssAAVs), the present disclosure also provides for self-complementary AAV (scAAVs) viral genomes. scAAV vector genomes contain DNA strands which anneal together to form double stranded DNA. By skipping second strand synthesis, scAAVs allow for rapid expression in the transduced cell.

[0060] In some embodiments, the AAV particle of the present disclosure is an scAAV.

[0061] In some embodiments, the AAV particle of the present disclosure is an ssAAV.

[0062] Methods for producing and/or modifying AAV particles are disclosed in the art such as pseudotyped AAV vectors (PCT Patent Publication Nos. WO200028004; WO200123001; WO2004112727; WO2005005610; and WO2005072364, the content of each of which is incorporated herein by reference in its entirety).

[0063] AAV particles may be modified to enhance the efficiency of delivery. Such modified AAV particles can be packaged efficiently and be used to successfully infect the target cells at high frequency and with minimal toxicity. In some embodiments, the capsids of the AAV particles are engineered according to the methods described in US Publication Number US20130195801, the contents of which are incorporated herein by reference in their entirety.

[0064] In some embodiments, the AAV particles comprising a payload region encoding the polypeptides may be introduced into mammalian cells.

### AAV Serotypes

[0065] AAV particles of the present disclosure may comprise or be derived from any natural or recombinant AAV serotype. According to the present disclosure, the AAV particles may utilize or be based on a serotype or include a peptide selected from any of the following VOY101, VOY201, AAVPHP.B (PHP.B), AAVPHP.A (PHP.A), AAVG2B-26, AAVG2B-13, AAVTH1.1-32, AAVTH1.1-35, AAVPHP.B2 (PHP.B2), AAVPHP.B3 (PHP.B3), AAVPHP.N/PHP.B-DGT, AAVPHP.B-EST, AAVPHP.B-GGT, AAVPHP.B-ATP, AAVPHP.B-ATT-T, AAVPHP.B-DGT-T, AAVPHP.B-GGT-T, AAVPHP.B-SGS, AAVPHP.B-AQP, AAVPHP.B-QQP, AAVPHP.B-SNP (3), AAVPHP.B-SNP, AAVPHP.B-QGT, AAVPHP.B-NQT, AAVPHP.B-EGS, AAVPHP.B-SGN, AAVPHP.B-EGT, AAVPHP.B-DST, AAVPHP.B-DST, AAVPHP.B-STP, AAVPHP.B-PQP, AAVPHP.B-SQP, AAVPHP.B-QLP, AAVPHP.B-TMP, AAVPHP.B-TTP, AAVPHP.S/G2A12, AAVG2A15/G2A3 (G2A3), AAVG2B4 (G2B4), AAVG2B5 (G2B5), PHP.S, AAV1, AAV2, AAV2G9, AAV3, AAV3a, AAV3b, AAV3-3, AAV4, AAV4-4, AAV5, AAV6, AAV6.1, AAV6.2, AAV6.1.2, AAV7, AAV7.2, AAV8, AAV9, AAV9 K449R, AAV9.11, AAV9.13, AAV9.16, AAV9.24, AAV9.45, AAV9.47, AAV9.61, AAV9.68, AAV9.84, AAV9.9, AAV10, AAV11, AAV2, AAV6.3, AAV24.1, AAV27.3, AAV42.12, AAV42-1b, AAV42-2, AAV42-3a, AAV42-3b, AAV42-4, AAV42-5a, AAV42-5b, AAV42-6b, AAV42-8, AAV42.10, AAV42-11, AAV42-12, AAV42-13, AAV42-15, AAV42-aa, AAV43-1, AAV43-12, AAV43-20, AAV43-21, AAV43-23, AAV43-25, AAV43-5, AAV44.1, AAV44.2, AAV44.5, AAV223.1, AAV223.2, AAV223.4, AAV223.5, AAV223.6, AAV223.7, AAV1-7/rh.48, AAV1-81rh.49, AAV2-15/rh.62, AAV2-3/rh.61, AAV2-4/rh.50, AAV2-5/rh.51, AAV3.1/hu.6, AAV3.1/hu.9, AAV3-9/rh.52, AAV3-11/rh.53, AAV4-8/r11.64, AAV4-9/rh.54, AAV4-19/rh.55, AAV5-3/rh.57, AAV5-22/rh.58, AAV7.3/hu.7, AAV16.8hu.10, AAV16.12/hu.11, AAV29.3/bb.1, AAV29.5/bb.2, AAV106.1/hu.37, AAV114.31hu.40, AAV127.2hu.41, AAV127.5/hu.42, AAV128.3/hu.44, AAV130.41hu.48, AAV145.1hu.53, AAV145.5/hu.54, AAV145.6/hu.55, AAV161.101hu.60, AAV161.6/hu.61, AAV33.12/hu.17, AAV33.4/hu.15, AAV33.8/hu.16, AAV52/hu.19, AAV52.1/hu.20, AAV58.2/hu.25, AAVA3.3, AAVA3.4, AAVA3.5, AAVA3.7, AAVC1, AAVC2, AAVC5, AAV-DJ, AAV-DJ8, AAVF3, AAVF5, AAVH2, AAVrh.72, AAVhu.8, AAVrh.68, AAVrh.70, AAVpi.1, AAVpi.3, AAVpi.2, AAVrh.60, AAVrh.44, AAVrh.65, AAVrh.55, AAVrh.47, AAVrh.69, AAVrh.45, AAVrh.59, AAVhu.12, AAVH6, AAVLK03, AAVH-1/hu.1, AAVH-5/hu.3, AAVLG-10/rh.40, AAVLG-4/rh.38, AAVLG-9/hu.39, AAVN721-8/rh.43, AAVCh.5, AAVCh.5R1, AAVcy.2, AAVcy.3, AAVcy.4, AAVcy.5, AAVCy.5R1, AAVCy.5R2, AAVCy.5R3, AAVCy.5R4, AAVcy.6, AAVhu.1, AAVhu.2, AAVhu.3, AAVhu.4, AAVhu.5, AAVhu.6, AAVhu.7, AAVhu.9, AAVhu.10, AAVhu.11, AAVhu.13, AAVhu.15, AAVhu.16, AAVhu.17, AAVhu.18, AAVhu.20, AAVhu.21, AAVhu.22, AAVhu.23.2, AAVhu.24, AAVhu.25, AAVhu.27, AAVhu.28, AAVhu.29, AAVhu.29R, AAVhu.31, AAVhu.32, AAVhu.34, AAVhu.35, AAVhu.37, AAVhu.39, AAVhu.40, AAVhu.41, AAVhu.42, AAVhu.43, AAVhu.44, AAVhu.44R1, AAVhu.44R2, AAVhu.44R3, AAVhu.45, AAVhu.46, AAVhu.47, AAVhu.48, AAVhu.48R1, AAVhu.48R2, AAVhu.48R3, AAVhu.49, AAVhu.51, AAVhu.52, AAVhu.54, AAVhu.55, AAVhu.56, AAVhu.57, AAVhu.58, AAVhu.60, AAVhu.61, AAVhu.63, AAVhu.64, AAVhu.66, AAVhu.67, AAVhu.14/9, AAVhu.t 19, AAVrh.2, AAVrh.2R, AAVrh.8, AAVrh.8R, AAVrh.10, AAVrh.12, AAVrh.13, AAVrh.13R, AAVrh.14, AAVrh.17, AAVrh.18, AAVrh.19, AAVrh.20, AAVrh.21, AAVrh.22, AAVrh.23, AAVrh.24, AAVrh.25, AAVrh.31, AAVrh.32, AAVrh.33, AAVrh.34, AAVrh.35, AAVrh.36, AAVrh.37, AAVrh.37R2, AAVrh.38, AAVrh.39, AAVrh.40, AAVrh.46, AAVrh.48, AAVrh.48.1, AAVrh.48.1.2, AAVrh.48.2, AAVrh.49, AAVrh.51, AAVrh.52, AAVrh.53, AAVrh.54, AAVrh.56, AAVrh.57, AAVrh.58, AAVrh.61, AAVrh.64, AAVrh.64R1, AAVrh.64R2, AAVrh.67, AAVrh.73, AAVrh.74, AAVrh8R, AAVrh8R A586R mutant, AAVrh8R R533A mutant, AAAV, BAAV, caprine AAV, bovine AAV, AAVhE1.1, AAVhEr1.5, AAVhER114, AAVhEr1.8, AAVhEr1.16, AAVhEr1.18, AAVhEr1.35, AAVhEr1.7, AAVhEr1.36, AAVhEr2.29, AAVhEr2.4, AAVhEr2.16, AAVhEr2.30, AAVhEr2.31, AAVhEr2.36, AAVhER1.23, AAVhEr3.1, AAV2.5T, AAV-PAEC, AAV-LK12, AAV-LK92, AAV-LK03, AAV-LK04, AAV-LK05, AAV-LK06, AAV-LK97, AAV-LK08, AAV-LK09, AAV-LK10, AAV-LK11, AAV-LK12, AAV-LK13, AAV-LK14, AAV-LK15, AAV-LK16, AAV-LK17, AAV-LK18, AAV-LK19, AAV-PAEC2, AAV-PAEC4, AAV-PAEC6, AAV-PAEC7, AAV-PAEC8, AAV-PAEC11, AAV-PAEC12, AAV-2-pre-miRNA-101, AAV-8h, AAV-8b, AAV-h, AAV-b, AAV SM 10-2, AAV Shuffle 100-1, AAV Shuffle 100-3, AAV Shuffle 100-7, AAV Shuffle 10-2, AAV Shuffle 10-6, AAV Shuffle 10-8, AAV Shuffle 100-2, AAV SM 10-1, AAV SM 10-8, AAV SM 100-3, AAV SM 100-10, BNP61 AAV, BNP62 AAV, BNP63 AAV, AAVrh.50, AAVrh.43, AAVrh.62, AAVrh.48, AAVhu.19, AAVhu.11, AAVhu.53, AAV4-8/rh.64, AAVLG-9/hu.39, AAV54.5/hu.23, AAV54.2/hu.22, AAV54.7/hu.24, AAV54.1/hu.21, AAV54.4R/hu.27, AAV46.2/hu.28, AAV46.6/hu.29, AAV128.1/hu.43, true type AAV (ttAAV), UPENN AAV 10, Japanese AAV 10 serotypes, AAV CBr-7.1, AAV CBr-7.10, AAV CBr-7.2, AAV CBr-7.3, AAV CBr-7.4, AAV CBr-75, AAV CBr-7.7, AAV CBr-7.8, AAV CBr-B7.3, AAV CBr-B7.4, AAV CBr-E1, AAV CBr-E2, AAV CBr-E3, AAV CBr-E4, AAV CBr-E5, AAV CBr-e5, AAV CBr-E6, AAV CBr-E7, AAV CBr-E8, AAV CHt, AAV CHt-2, AAV CHt-3, AAV CHt-6.1, AAV CHt-6.10, AAV CHt-6.5, AAV CHt-6.6, AAV CHt-6.7, AAV CHt-6.8, AAV CHt-P1, AAV CHt-P2, AAV CHt-P5, AAV CHt-P6, AAV CHt-P8, AAV CHt-P9, AAV CKd-1, AAV CKd-10, AAV CKd-2, AAV CKd-3, AAV CKd-4, AAV CKd-6, AAV CKd-7, AAV CKd-8, AAV CKd-B1, AAV CKd-B2, AAV CKd-B3, AAV CKd-B4, AAV CKd-5, AAV CKd-B6, AAV CKd-B7, AAV CKd-B8, AAV CKd-H1, AAV CKd-H2, AAV CKd-H3, AAV CKd-H4, AAV CKd-H5, AAV CKd-H6, AAV CKd-N3, AAV CKd-N4, AAV CKd-N9, AAV CLg-F1, AAV CLg-F2, AAV CLg-F3, AAV CLg-F4, AAV CLg-F5, AAV CLg-F6, AAV CLg-F7, AAV CLg-F8, AAV CLv1, AAV CLv1-1, AAV CLv1-10, AAV CLv1-2, AAV CLv12, AAV CLv1-3, AAV CLv-13, AAV CLv1-4, AAV Clv1-7, AAV Clv1-8, AAV Clv1-9, AAV CLv-2, AAV CLv-3, AAV CLv-4, AAV CLv-6, AAV CLv-8, AAV CLv-D1, AAV CLv-D2, AAV CLv-D3, AAV CLv-D4, AAV CLv-D5, AAV CLv-D6, AAV CLv-D7, AAV CLv-D8, AAV CLv-E1, AAV CLv-K1, AAV CLv-K3, AAV CLv-K6, AAV CLv-L4, AAV CLv-L5, AAV CLv-L6, AAV CLv-M1, AAV CLv-M11, AAV CLv-M2, AAV CLv-M5, AAV CLv-M6, AAV CLv-M7, AAV CLv-M8, AAV CLv-M9, AAV CLv-R1, AAV CLv-R2, AAV CLv-R3, AAV CLv-R4, AAV CLv-R5, AAV CLv-R6, AAV CLv-R7, AAV CLv-R8, AAV CLv-R9, AAV CSp-1, AAV CSp-10, AAV CSp-11, AAV CSp-2, AAV CSp-3, AAV CSp-4, AAV CSp-6, AAV CSp-7, AAV CSp-8, AAV CSp-8.10, AAV CSp-8.2, AAV CSp-8.4, AAV CSp-8.5, AAV CSp-8.6, AAV CSp-8.7, AAV CSp-8.8, AAV CSp-8.9, AAV CSp-9, AAV.hu.48R3, AAV.VR-355, AAV3B, AAV4, AAV5, AAVF1/HSC1, AAVF11/HSC11, AAVF12/HSC12, AAVF13/HSC13, AAVF14/HSC14, AAVF15/HSC15, AAVF16/HSC16, AAVF17/HSC17, AAVF2/HSC2, AAVF3/HSC3, AAVF4/HSC4, AAVF5/HSC5, AAVF6/HSC6, AAVF7/HSC7, AAVF8/HSC8, and/or AAVF9/HSC9 and variants thereof.

[0066] In some embodiments, the AAV serotype may be, or have, a sequence as described in United States Publication No. US20030138772, the contents of which are herein incorporated by reference in their entirety, such as, but not limited to, AAV1 (SEQ ID NO: 6 and 64 of US20030138772), AAV2 (SEQ ID NO: 7 and 70 of US20030138772), AAV3 (SEQ ID NO: 8 and 71 of US20030138772), AAV4 (SEQ ID NO: 63 of US20030138772), AAV5 (SEQ ID NO: 114 of US20030138772), AAV6 (SEQ ID NO: 65 of US20030138772), AAV7 (SEQ ID NO: 1-3 of US20030138772), AAV8 (SEQ ID NO: 4 and 95 of US20030138772), AAV9 (SEQ ID NO: 5 and 100 of US20030138772), AAV10 (SEQ ID NO: 117 of US20030138772), AAV11 (SEQ ID NO: 118 of US20030138772), AAV12 (SEQ ID NO: 119 of US20030138772), AAVrh10 (amino acids 1 to 738 of SEQ ID NO: 81 of US20030138772), AAV16.3 (US20030138772 SEQ ID NO: 10), AAV29.3/bb.1 (US20030138772 SEQ ID NO: 11), AAV29.4 (US20030138772 SEQ ID NO: 12), AAV29.5/bb.2 (US20030138772 SEQ ID NO: 13), AAV1.3 (US20030138772 SEQ ID NO: 14), AAV13.3 (US20030138772 SEQ ID NO: 15), AAV24.1 (US20030138772 SEQ ID NO: 16), AAV27.3 (US20030138772 SEQ ID NO: 17), AAV7.2 (US20030138772 SEQ ID NO: 18), AAVC1 (US20030138772 SEQ ID NO: 19), AAVC3 (US20030138772 SEQ ID NO: 20), AAVC5 (US20030138772 SEQ ID NO: 21), AAVF1 (US20030138772 SEQ ID NO: 22), AAVF3 (US20030138772 SEQ ID NO: 23), AAVF5 (US20030138772 SEQ ID NO: 24), AAVH6 (US20030138772 SEQ ID NO: 25), AAVH2 (US20030138772 SEQ ID NO: 26), AAV42-8 (US20030138772 SEQ ID NO: 27), AAV42-15 (US20030138772 SEQ ID NO: 28), AAV42-5b (US20030138772 SEQ ID NO: 29), AAV42-1b (US20030138772 SEQ ID NO: 30), AAV42-13 (US20030138772 SEQ ID NO: 31), AAV42-3a (US20030138772 SEQ ID NO: 32), AAV42-4 (US20030138772 SEQ ID NO: 33), AAV42. 5a (US20030138772 SEQ ID NO: 34), AAV42-10 (US20030138772 SEQ ID NO: 35), AAV42-3b (US20030138772 SEQ ID NO: 36), AAV42-11 (US20030138772 SEQ ID NO: 37), AAV42-6b (US20030138772 SEQ ID NO: 38), AAV43-1 (US20030138772 SEQ ID NO: 39), AAV43-5 (US20030138772 SEQ ID NO: 40), AAV43-12 (US20030138772 SEQ ID NO: 41), AAV43-20 (US20030138772 SEQ ID NO: 42), AAV43-21 (US20030138772 SEQ ID NO: 43), AAV43-23 (US20030138772 SEQ ID NO: 44), AAV43-25 (US20030138772 SEQ ID NO: 45), AAV44.1 (US20030138772 SEQ ID NO: 46), AAV44.5 (US20030138772 SEQ ID NO: 47), AAV223.1 (US20030138772 SEQ ID NO: 48), AAV223.2 (US20030138772 SEQ ID NO: 49), AAV223.4 (US20030138772 SEQ ID NO: 50), AAV223.5 (US20030138772 SEQ ID NO: 51), AAV223.6 (US20030138772 SEQ ID NO: 52), AAV223.7 (US20030138772 SEQ ID NO: 53), AAVA3.4 (US20030138772 SEQ ID NO: 54), AAVA3.5 (US20030138772 SEQ ID NO: 55), AAVA3.7 (US20030138772 SEQ ID NO: 56), AAVA3.3 (US20030138772 SEQ ID NO: 57), AAV42.12 (US20030138772 SEQ ID NO: 58), AAV44.2 (US20030138772 SEQ ID NO: 59), AAV42-2 (US20030138772 SEQ ID NO: 9), or variants thereof.

[0067] In some embodiments, the AAV serotype may be, or have, a sequence as described in United States Publication No. US20150159173, the contents of which are herein incorporated by reference in their entirety, such as, but not limited to, AAV2 (SEQ ID NO: 7 and 23 of US20150159173), rh20 (SEQ ID N: 1 of US20150159173), rh32133 (SEQ ID NO: 2 of US20150159173), rh39 (SEQ ID NO: 3, 20 and 36 of US20150159173), rh46 (SEQ ID NO: 4 and 22 of US20150159173), rh73 (SEQ ID NO: 5 of US20150159173), rh74 (SEQ ID NO: 6 of US20150159173), AAV6.1 (SEQ ID NO: 29 of US20150159173), rh.8 (SEQ ID NO: 41 of US20150159173), rh.48.1 (SEQ ID NO: 44 of US20150159173), hu.44 (SEQ ID NO: 45 of US20150159173), hu.29 (SEQ ID NO: 42 of US20150159173), hu.48 (SEQ ID NO: 38 of US20150159173), rh54 (SEQ ID NO: 49 of US20150159173), AAV2 (SEQ ID NO: 7 of US20150159173), cy.5 (SEQ ID NO: 8 and 24 of US20150159173), rh.10 (SEQ ID NO: 9 and 25 of US20150159173), rh.13 (SEQ ID NO: 10 and 26 of US20150159173), AAV1 (SEQ ID NO: 11 and 27 of US20150159173), AAV3 (SEQ ID NO: 12 and 28 of US20150159173), AAV6 (SEQ ID NO: 13 and 29 of US20150159173), AAV7 (SEQ ID NO: 14 and 30 of US20150159173), AAV8 (SEQ ID NO: 15 and 31 of US20150159173), hu.13 (SEQ ID NO: 16 and 32 of US20150159173), hu.26 (SEQ ID NO: 17 and 33 of US20150159173), hu.37 (SEQ ID N: 18 and 34 of US20150159173), hu.53 (SEQ ID NO: 19 and 35 of US20150159173), rh.43 (SEQ ID NO: 21 and 37 of US20150159173), rh2 (SEQ ID NO: 39 of US20150159173), rh.37 (SEQ ID NO: 40 of US20150159173), rh.64 (SEQ ID NO: 43 of US20150159173), rh.48 (SEQ ID NO: 44 of US20150159173), ch.5 (SEQ ID NO 46 of US20150159173), rh.67 (SEQ ID NO: 47 of US20150159173), rh.58 (SEQ ID NO: 48 of US20150159173), or variants thereof including, but not limited to Cy5R1, Cy5R2, Cy5R3, Cy5R4, rh.13R, rh.37R2, rh.2R, rh.8R, rh.48.1, rh.48.2, rh.48.1.2, hu.44R1, hu.44R2, hu.44R3, hu.29R, ch.5R1, rh64R1, rh64R2, AAV6.2, AAV6.1, AAV6.12, hu.48R1, hu.48R2, and hu.48R3.

[0068] In some embodiments, the AAV serotype may be, or have, a sequence as described in U.S. Pat. No. 7,198,951, the contents of which are herein incorporated by reference in their entirety, such as, but not limited to, AAV9 (SEQ ID NO: 1-3 of U.S. Pat. No. 7,198,951), AAV2 (SEQ ID NO: 4 of U.S. Pat. No. 7,198,951), AAV1 (SEQ ID NO: 5 of U.S. Pat. No. 7,198,951), AAV3 (SEQ ID NO: 6 of U.S. Pat. No. 7,198,951), and AAV8 (SEQ ID NO: 7 of U.S. Pat. No. 7,198,951).

[0069] In some embodiments, the AAV serotype may be, or have, a mutation in the AAV9 sequence as described by N Pulicherla et al. (Molecular Therapy 19(6):1070-1078 (2011), herein incorporated by reference in its entirety), such as but not limited to, AAV9.9, AAV9.11, AAV9.13, AAV9.16, AAV9.24, AAV9.45, AAV9.47, AAV9.61, AAV9.68, AAV9.84.

[0070] In some embodiments, the AAV serotype may be, or have, a sequence as described in U.S. Pat. No. 6,156,303, the contents of which are herein incorporated by reference in their entirety, such as, but not limited to, AAV3B (SEQ ID NO: 1 and 10 of U.S. Pat. No. 6,156,303), AAV6 (SEQ ID NO: 2, 7 and 11 of U.S. Pat. No. 6,156,303), AAV2 (SEQ ID NO: 3 and 8 of U.S. Pat. No. 6,156,303), AAV3A (SEQ ID NO: 4 and 9, of U.S. Pat. No. 6,156,303), or derivatives thereof.

[0071] In some embodiments, the AAV serotype may be, or have, a sequence as described in United States Publication No. US20140359799, the contents of which are herein incorporated by reference in their entirety, such as, but not limited to, AAV8 (SEQ ID NO: 1 of US20140359799), AAVDJ (SEQ ID NO: 2 and 3 of US20140359799), or variants thereof.

[0072] In some embodiments, the serotype may be AAVDJ or a variant thereof, such as AAVDJ8 (or AAV-DJ8), as described by Grimm et al. (Journal of Virology 82(12): 5887-5911 (2008), herein incorporated by reference in its entirety). The amino acid sequence of AAVDJ8 may comprise two or more mutations in order to remove the heparin binding domain (HBD). As a non-limiting example, the AAV-DJ sequence described as SEQ ID NO: 1 in U.S. Pat. No. 7,588,772, the contents of which are herein incorporated by reference in their entirety, may comprise two mutations: (1) R587Q where arginine (R; Arg) at amino acid 587 Is changed to glutamine (Q; Gln) and (2) R590T where arginine (R; Arg) at amino acid 590 is changed to threonine (T; Thr). As another non-limiting example, may comprise three mutations: (1) K406R where lysine (K; Lys) at amino acid 406 is changed to arginine (R; Arg), (2) R587Q where arginine (R; Arg) at amino acid 587 is changed to glutamine (Q; Gin) and (3) R590T where arginine (R; Arg) at amino acid 590 is changed to threonine (T; Thr).

[0073] In some embodiments, the AAV serotype may be, or have, a sequence of AAV4 as described in International Publication No. WO1998011244, the contents of which are herein incorporated by reference in their entirety, such as, but not limited to AAV4 (SEQ ID NO: 1-20 of WO1998011244).

[0074] In some embodiments, the AAV serotype may be, or have, a mutation in the AAV2 sequence to generate AAV2G9 as described in International Publication No. WO2014144229 and herein incorporated by reference in its entirety.

[0075] In some embodiments, the AAV serotype may be, or have, a sequence as described in International Publication No. WO2005033321, the contents of which are herein incorporated by reference in their entirety, such as, but not limited to AAV3-3 (SEQ ID NO: 217 of WO2005033321), AAV (SEQ ID NO: 219 and 202 of WO2005033321), AAV106.1/hu.37 (SEQ ID No: 10 of WO2005033321), AAV114.3/hu.40 (SEQ ID No: 11 of WO2005033321), AAV127.2/hu.41 (SEQ ID NO:6 and 8 of WO2005033321), AAV128.3/hu.44 (SEQ ID No: 81 of WO2005033321), AAV130.4/hu.48 (SEQ ID NO: 78 of WO2005033321), AAV145.11hu.53 (SEQ ID No: 176 and 177 of WO2005033321), AAV145.6/hu.56 (SEQ ID NO: 168 and 192 of WO2005033321), AAV16.12/hu.11 (SEQ ID NO: 153 and 57 of WO2005033321), AAV16.8/hu.10 (SEQ ID NO: 156 and 56 of WO2005033321), AAV161.10/hu.60 (SEQ ID No: 170 of WO2005033321), AAV161.6/hu.61 (SEQ ID No: 174 of WO2005033321), AAV1-7/rh.48 (SEQ ID NO: 32 of WO2005033321), AAV1-8/rh.49 (SEQ ID NOs: 103 and 25 of WO2005033321), AAV2 (SEQ ID NO: 211 and 221 of WO2005033321), AAV2-15/rh.62 (SEQ ID No: 33 and 114 of WO2005033321), AAV2-3/rh.61 (SEQ ID NO: 21 of WO2005033321), AAV2-4/rh.50 (SEQ ID No: 23 and 108 of WO2005033321), AAV2-5/rh.51 (SEQ ID NO: 104 and 22 of WO2005033321), AAV3.11hu.6 (SEQ ID NO: 5 and 84 of WO2005033321), AAV3.11hu.9 (SEQ ID NO: 155 and 58 of WO2005033321), AAV3-11/rh.53 (SEQ ID NO: 186 and 176 of WO2005033321), AAV3-3 (SEQ ID NO: 200 of WO2005033321), AAV33.12/hu.17 (SEQ ID NO:4 of WO2005033321), AAV33.41hu.15 (SEQ ID No: 50 of WO2005033321), AAV33.8/hu.16 (SEQ ID No: 51 of WO2005033321), AAV3-9/rh.52 (SEQ ID NO: 96 and 18 of WO2005033321), AAV4-19/rh.55 (SEQ ID NO: 117 of WO2005033321), AAV4-4 (SEQ ID NO: 201 and 218 of WO2005033321), AAV4-9/rh.54 (SEQ ID NO: 116 of WO2005033321), AAV5 (SEQ ID NO: 199 and 216 of WO2005033321), AAV52.1/hu.20 (SEQ ID NO: 63 of WO2005033321), AAV52/hu.19 (SEQ ID NO: 133 of WO2005033321), AAV5-22/rh.58 (SEQ ID No: 27 of WO2005033321), AAV5-3/rh.57 (SEQ ID NO: 105 of WO2005033321), AAV5-3/rh.57 (SEQ ID No: 26 of WO2005033321), AAV58.2/hu.25 (SEQ ID No: 49 of WO2005033321), AAV6 (SEQ ID NO: 203 and 220 of WO2005033321), AAV7 (SEQ ID NO: 222 and 213 of WO2005033321), AAV7.3/hu.7 (SEQ ID No: 55 of WO2005033321), AAV8 (SEQ ID NO: 223 and 214 of WO2005033321), AAVH-1/hu.1 (SEQ ID No: 46 of WO2005033321), AAVH-5/hu.3 (SEQ ID No: 44 of WO2005033321), AAVhu.1 (SEQ ID NO: 144 of WO2005033321), AAVhu.10 (SEQ ID NO: 156 of WO2005033321), AAVhu.11 (SEQ ID NO: 153 of WO2005033321), AAVhu.12 (WO2005033321 SEQ ID NO: 59), AAVhu.13 (SEQ ID NO: 129 of WO2005033321), AAVhu.14/AAV9 (SEQ ID NO: 123 and 3 of WO2005033321), AAVhu.15 (SEQ ID NO: 147 of WO2005033321), AAVhu.16 (SEQ ID NO: 148 of WO2005033321), AAVhu.17 (SEQ ID NO: 83 of WO2005033321), AAVhu.18 (SEQ ID NO: 149 of WO2005033321), AAVhu.19 (SEQ ID NO: 133 of WO2005033321), AAVhu.2 (SEQ ID NO: 143 of WO2005033321), AAVhu.20 (SEQ ID NO: 134 of WO2005033321), AAVhu.21 (SEQ ID NO: 135 of WO2005033321), AAVhu.22 (SEQ ID NO: 138 of WO2005033321), AAVhu.23.2 (SEQ ID NO: 137 of WO2005033321), AAVhu.24 (SEQ ID NO: 136 of WO2005033321), AAVhu.25 (SEQ ID NO: 146 of WO2005033321), AAVhu.27 (SEQ ID NO: 140 of WO2005033321), AAVhu.29 (SEQ ID NO: 132 of WO2005033321), AAVhu.3 (SEQ ID NO: 145 of WO2005033321), AAVhu.31 (SEQ ID NO: 121 of WO2005033321), AAVhu.32 (SEQ ID NO: 122 of WO2005033321), AAVhu.34 (SEQ ID NO: 125 of WO2005033321), AAVhu.35 (SEQ ID NO: 164 of WO2005033321), AAVhu.37 (SEQ ID NO: 88 of WO2005033321), AAVhu.39 (SEQ ID NO: 102 of WO2005033321), AAVhu.4 (SEQ ID NO: 141 of WO2005033321), AAVhu.40 (SEQ ID NO: 87 of WO2005033321), AAVhu.41 (SEQ ID NO: 91 of WO2005033321), AAVhu.42 (SEQ ID NO: 85 of WO2005033321), AAVhu.43 (SEQ ID NO: 160 of WO2005033321), AAVhu.44 (SEQ ID NO: 144 of WO2005033321), AAVhu.45 (SEQ ID NO: 127 of WO2005033321), AAVhu.46 (SEQ ID NO: 159 of WO2005033321), AAVhu.47 (SEQ ID NO: 128 of WO2005033321), AAVhu.48 (SEQ ID NO: 157 of WO2005033321), AAVhu.49 (SEQ ID NO: 189 of WO2005033321), AAVhu.51 (SEQ ID NO: 190 of WO2005033321), AAVhu.52 (SEQ ID NO: 191 of WO2005033321), AAVhu.53 (SEQ ID NO: 186 of WO2005033321), AAVhu.54 (SEQ ID NO: 188 of WO2005033321), AAVhu.55 (SEQ ID NO: 187 of WO2005033321), AAVhu.56 (SEQ ID NO: 192 of WO2005033321), AAVhu.57 (SEQ ID NO: 193 of WO2005033321), AAVhu.58 (SEQ ID NO: 194 of WO2005033321), AAVhu.6 (SEQ ID NO: 84 of WO2005033321), AAVhu.60 (SEQ ID NO: 184 of WO2005033321), AAVhu.61 (SEQ ID NO: 185 of WO2005033321), AAVhu.63 (SEQ ID NO: 195 of WO2005033321), AAVhu.64 (SEQ ID NO: 196 of WO2005033321), AAVhu.66 (SEQ ID NO: 197 of WO2005033321), AAVhu.67 (SEQ ID NO: 198 of WO2005033321), AAVhu.7 (SEQ ID NO: 150 of WO2005033321), AAVhu.8 (WO2005033321 SEQ ID NO: 12), AAVhu.9 (SEQ ID NO: 155 of WO2005033321), AAVLG-10/rh.40 (SEQ ID No: 14 of WO2005033321), AAVLG-4/rh.38 (SEQ ID NO: 86 of WO2005033321), AAVLG-4/rh.38 (SEQ ID No: 7 of WO2005033321), AAVN721-8/rh.43 (SEQ ID NO: 163 of WO2005033321), AAVN721-8/rh.43 (SEQ ID No: 43 of WO2005033321), AAVpi.1 (WO2005033321 SEQ ID NO: 28), AAVpi.2 (WO2005033321 SEQ ID NO: 30), AAVpi.3 (WO2005033321 SEQ ID NO: 29), AAVrh.38 (SEQ ID NO: 86 of WO2005033321), AAVrh.40 (SEQ ID NO: 92 of WO2005033321), AAVrh.43 (SEQ ID NO: 163 of WO2005033321), AAVrh.44 (WO2005033321 SEQ ID NO: 34), AAVrh.45 (WO2005033321 SEQ ID NO: 41), AAVrh.47 (WO2005033321 SEQ ID NO: 38), AAVrh.48 (SEQ ID NO: 115 of WO2005033321), AAVrh.49 (SEQ ID NO: 103 of WO2005033321), AAVrh.50 (SEQ ID NO: 108 of WO2005033321), AAVrh.51 (SEQ ID NO: 104 of WO2005033321), AAVrh.52 (SEQ ID NO: 96 of WO2005033321), AAVrh.53 (SEQ ID NO: 97 of WO2005033321), AAVrh.55 (WO2005033321 SEQ ID NO: 37), AAVrh.56 (SEQ ID NO: 152 of WO2005033321), AAVrh.57 (SEQ ID NO: 105 of WO2005033321), AAVrh.58 (SEQ ID NO: 106 of WO2005033321), AAVrh.59 (WO2005033321 SEQ ID NO: 42), AAVrh.60 (WO2005033321 SEQ ID NO: 31), AAVrh.61 (SEQ ID NO: 107 of WO2005033321), AAVrh.62 (SEQ ID NO: 114 of WO2005033321), AAVrh.64 (SEQ ID NO: 99 of WO2005033321), AAVrh.65 (WO2005033321 SEQ ID NO: 35), AAVrh.68 (WO2005033321 SEQ ID NO: 16), AAVrh.69 (WO2005033321 SEQ ID NO: 39), AAVrh.70 (WO2005033321 SEQ ID NO: 20), AAVrh.72 (WO2005033321 SEQ ID NO: 9), or variants thereof including, but not limited to, AAVcy.2, AAVcy.3, AAVcy.4, AAVcy.5, AAVcy.6, AAVrh.12, AAVrh.17, AAVrh.18, AAVrh.19, AAVrh.21, AAVrh.22, AAVrh.23, AAVrh.24, AAVrh.25, AAVrh.25/42 15, AAVrh.31, AAVrh.32, AAVrh.33, AAVrh.34, AAVrh.35, AAVrh.36, AAVrh.37, AAVrh14. Non limiting examples of variants include SEQ ID NO: 13, 15, 17, 19, 24, 36, 40, 45, 47, 48, 51-54, 60-62, 64-77, 79, 80, 82, 89, 90, 93-95, 98, 100, 101, 109-113, 118-120, 124, 126, 131, 139, 142, 151, 154, 158, 161, 162, 165-183, 202, 204-212, 215, 219, 224-236, of WO2005033321, the contents of which are herein incorporated by reference in their entirety.

[0076] In some embodiments, the AAV serotype may be, or have, a sequence as described in International Publication No. WO2015168666, the contents of which are herein incorporated by reference in their entirety, such as, but not limited to, AAVrh8R (SEQ ID NO: 9 of WO2015168666), AAVrh8R A586R mutant (SEQ ID NO: 10 of WO2015168666), AAVrh8R R533A mutant (SEQ ID NO: 11 of WO2015168666), or variants thereof.

[0077] In some embodiments, the AAV serotype may be, or have, a sequence as described in U.S. Pat. No. 9,233,131, the contents of which are herein incorporated by reference in their entirety, such as, but not limited to, AAVhE1.1 SEQ ID NO:44 of U.S. Pat. No. 9,233,131), AAVhEr1.5 (SEQ ID NO:45 of U.S. Pat. No. 9,233,131), AAVhER1.14 (SEQ ID NO:46 of U.S. Pat. No. 9,233,131), AAVhEr1.8 (SEQ ID NO:47 of U.S. Pat. No. 9,233,131), AAVhEr1.16 (SEQ ID NO:48 of U.S. Pat. No. 9,233,131), AAVhEr1.18 (SEQ ID NO:49 of U.S. Pat. No. 9,233,131), AAVhEr1.35 (SEQ ID NO:50 of U.S. Pat. No. 9,233,131), AAVhEr1.7 (SEQ ID NO:51 of U.S. Pat. No. 9,233,131), AAVhEr1.36 (SEQ ID NO:52 of U.S. Pat. No. 9,233,131), AAVhEr2.29 (SEQ ID NO:53 of U.S. Pat. No. 9,233,131), AAVhEr2.4 (SEQ ID NO:54 of U.S. Pat. No. 9,233,131), AAVhEr2.16 (SEQ ID NO:55 of U.S. Pat. No. 9,233,131), AAVhEr2.30 (SEQ ID NO:56 of U.S. Pat. No. 9,233,131), AAVhEr2.31 (SEQ ID NO:58 of U.S. Pat. No. 9,233,131), AAVhEr2.36 (SEQ ID NO:57 of U.S. Pat. No. 9,233,131), AAVhER1.23 (SEQ ID NO:53 of U.S. Pat. No. 9,233,131), AAVhEr3.1 (SEQ ID NO:59 of U.S. Pat. No. 9,233,131), AAV2.5T (SEQ ID NO:42 of U.S. Pat. No. 9,233,131), or variants thereof.

[0078] In some embodiments, the AAV serotype may be, or have, a sequence as described in United States Patent Publication No. US20150376607, the contents of which are herein incorporated by reference in their entirety, such as, but not limited to, AAV-PAEC (SEQ ID NO:1 of US20150376607), AAV-LK01 (SEQ ID NO:2 of US20150376607), AAV-LK02 (SEQ ID NO:3 of US20150376607), AAV-LK03 (SEQ ID NO:4 of US20150376607), AAV-LK04 (SEQ ID NO:5 of US20150376607), AAV-LK05 (SEQ ID NO:6 of US20150376607), AAV-LK06 (SEQ ID NO:7 of US20150376607), AAV-LK07 (SEQ ID NO:8 of US20150376607), AAV-LK08 (SEQ ID NO:9 of US20150376607), AAV-LK09 (SEQ ID NO:10 of US20150376607), AAV-LK10 (SEQ ID NO:11 of US20150376607), AAV-LK11 (SEQ ID NO:12 of US20150376607), AAV-LK12 (SEQ ID NO:13 of US20150376607), AAV-LK13 (SEQ ID NO:14 of US20150376607), AAV-LK14 (SEQ ID NO:15 of US20150376607), AAV-LK15 (SEQ ID N0:16 of US20150376607), AAV-LK16 (SEQ ID N:17 of US20150376607), AAV-LK17 (SEQ ID N:18 of US20150376607), AAV-LK18 (SEQ ID NO:19 of US20150376607), AAV-LK19 (SEQ ID NO:20 of US20150376607), AAV-PAEC2 (SEQ ID NO:21 of US20150376607), AAV-PAEC4 (SEQ ID NO:22 of US20150376607), AAV-PAEC6 (SEQ ID N:23 of US20150376607), AAV-PAEC7 (SEQ ID NO:24 of US20150376607), AAV-PAEC8 (SEQ ID NO:25 of US20150376607), AAV-PAEC11 (SEQ ID NO:26 of US20150376607), AAV-PAEC12 (SEQ ID NO:27, of US20150376607), or variants thereof.

[0079] In some embodiments, the AAV serotype may be, or have, a sequence as described in U.S. Pat. No. 9,163,261, the contents of which are herein incorporated by reference in their entirety, such as, but not limited to, AAV-2-pre-miRNA-101 (SEQ ID NO: 1 US9163261), or variants thereof.

[0080] In some embodiments, the AAV serotype may be, or have, a sequence as described in United States Patent Publication No. US20150376240, the contents of which are herein incorporated by reference in their entirety, such as, but not limited to, AAV-8h (SEQ ID NO: 6 of US20150376240), AAV-8b (SEQ ID NO: of US20150376240), AAV-h (SEQ ID NO: 2 of US20150376240), AAV-b (SEQ ID NO: 1 of US20150376240), or variants thereof.

[0081] In some embodiments, the AAV serotype may be, or have, a sequence as described in United States Patent Publication No. US20160017295, the contents of which are herein incorporated by reference in their entirety, such as, but not limited to, AAV SM 102 (SEQ ID NO: 22 of US20160017295), AAV Shuffle 100-1 (SEQ ID NO: 23 of US20160017295), AAV Shuffle 100-3 (SEQ ID NO: 24 of US20160017295), AAV Shuffle 100-7 (SEQ ID NO: 25 of US20160017295), AAV Shuffle 10-2 (SEQ ID NO: 34 of US20160017295), AAV Shuffle 10.6 (SEQ ID NO: 35 of US20160017295), AAV Shuffle 10-8 (SEQ ID NO: 36 of US20160017295), AAV Shuffle 100-2 (SEQ ID NO: 37 of US20160017295), AAV SM 101 (SEQ ID NO: 38 of US20160017295), AAV SM 10-8 (SEQ ID NO: 39 of US20160017295), AAV SM 100-3 (SEQ ID NO: 40 of US20160017295), AAV SM 100-10 (SEQ ID NO: 41 of US20160017295), or variants thereof.

[0082] In some embodiments, the AAV serotype may be, or have, a sequence as described in United States Patent Publication No. US20150238550, the contents of which are herein incorporated by reference in their entirety, such as, but not limited to, BNP61 AAV (SEQ ID NO: 1 of US20150238550), BNP62 AAV (SEQ ID NO: 3 of US20150238550), BNP63 AAV (SEQ ID NO: 4 of US20150238550), or variants thereof.

[0083] In some embodiments, the AAV serotype may be or may have a sequence as described in United States Patent Publication No. US20150315612, the contents of which are herein incorporated by reference in their entirety, such as, but not limited to, AAVrh.50 (SEQ ID NO: 108 of US20150315612), AAVrh.43 (SEQ ID NO: 163 of US20150315612), AAVrh.62 (SEQ ID NO: 114 of US20150315612), AAVrh.48 (SEQ ID NO: 115 of US20150315612), AAVhu.19 (SEQ ID NO: 133 of US20150315612), AAVhu.11 (SEQ ID NO: 153 of US20150315612), AAVhu.53 (SEQ ID NO: 186 of US20150315612), AAV4-8/rh.64 (SEQ ID No: 15 of US20150315612), AAVLG-9/hu.39 (SEQ ID No: 24 of US20150315612), AAV54.5/hu.23 (SEQ ID No: 60 of US20150315612), AAV5421hu.22 (SEQ ID No: 67 of US20150315612), AAV54.7/hu.24 (SEQ ID No: 66 of US20150315612), AAV54.1/hu.21 (SEQ ID No: 65 of US20150315612), AAV54.4R/hu.27 (SEQ ID No: 64 of US20150315612), AAV46.21hu.28 (SEQ ID No: 68 of US20150315612), AAV46.6/hu.29 (SEQ ID No: 69 of US20150315612), AAV128.1/hu.43 (SEQ ID No: 80 of US20150315612), or variants thereof.

[0084] In some embodiments, the AAV serotype may be, or have, a sequence as described in International Publication No. WO2015121501, the contents of which are herein incorporated by reference in their entirety, such as, but not limited to, true type AAV (ttAAV) (SEQ ID NO: 2 of WO2015121501), “UPenn AAV10” (SEQ ID NO: 8 of WO2015121501), “Japanese AAV10” (SEQ ID NO: 9 of WO2015121501), or variants thereof.

[0085] According to the present disclosure, AAV capsid serotype selection or use may be from a variety of species. In some embodiments, the AAV may be an avian AAV (AAAV). The AAAV serotype may be, or have, a sequence as described in U.S. Pat. No. 9,238,800, the contents of which are herein incorporated by reference in their entirety, such as, but not limited to, AAAV (SEQ ID NO: 1, 2, 4, 6, 8, 10, 12, and 14 of U.S. Pat. No. 9,238,800), or variants thereof.

[0086] In some embodiments, the AAV may be a bovine AAV (BAAV). The BAAV serotype may be, or have, a sequence as described in U.S. Pat. No. 9,193,769, the contents of which are herein incorporated by reference in their entirety, such as, but not limited to, BAAV (SEQ ID NO: 1 and 6 of U.S. Pat. No. 9,193,769), or variants thereof. The BAAV serotype may be or have a sequence as described in U.S. Pat. No. 7,427,396, the contents of which are herein incorporated by reference in their entirety, such as, but not limited to, BAAV (SEQ ID NO: 5 and 6 of U.S. Pat. No. 7,427,396), or variants thereof.

[0087] In some embodiments, the AAV may be a caprine AAV. The caprine AAV serotype may be, or have, a sequence as described in U.S. Pat. No. 7,427,396, the contents of which are herein incorporated by reference in their entirety, such as, but not limited to, caprine AAV (SEQ ID NO: 3 of U.S. Pat. No. 7,427,396), or variants thereof.

[0088] In other embodiments the AAV may be engineered as a hybrid AAV from two or more parental serotypes. In some embodiments, the AAV may be AAV2G9 which comprises sequences from AAV2 and AAV9. The AAV2G9 AAV serotype may be, or have, a sequence as described in United States Patent Publication No. US20160017005, the contents of which are herein incorporated by reference in its entirety.

[0089] In some embodiments, the AAV may be a serotype generated by the AAV9 capsid library with mutations in amino acids 390-627 (VP1 numbering) as described by Pulicherla et al. (Molecular Therapy 19(6):1070-1078 (2011), the contents of which are herein incorporated by reference in their entirety. The serotype and corresponding nucleotide and amino acid substitutions may be, but is not limited to, AAV9.1 (G1594C; D532H), AAV6.2 (T1418A and T1436X; V473D and 1479K), AAV9.3 (T1238A; F413Y), AAV9.4 (T1250C and A1617T; F4175), AAV9.5 (A1235G, A1314T, A1642G, C1760T; Q412R, T548A, A587V), AAV9.6 (T1231A; F4111), AAV9.9 (G1203A, G1785T; W595C), AAV9.10 (A1500G, T1676C; M559T), AAV9.11 (A1425T, A1702C, A1769T; T568P, Q590L), AAV9.13 (A1369C, A1720T; N457H, T574S), AAV9.14 (T1340A, T1362C, T1560C, G1713A; L447H), AAV9.16 (A1775T; Q592L), AAV9.24 (T1507C, T1521G; W503R), AAV9.26 (A1337G, A1769C; Y446C, Q590P), AAV9.33 (A1667C; D556A), AAV9.34 (A1534G, C1794T; N512D), AAV9.35 (A1289T, T1450A, C1494T, A1515T, C1794A, G1816A; Q430L, Y484N, N98K, V6061), AAV9.40 (A1694T, E565V), AAV9.41 (A1348T, T1362C; T4505), AAV9.44 (A1684C, A1701T, A1737G; N562H, K567N), AAV9.45 (A1492T, C1804T; N498Y, L602F), AAV9.46 (G1441C, T1525C, T1549G; G481R, W509R, L517V), 9.47 (G1241A, G1358A, A1669G, C1745T; S414N, G453D, K557E, T5821), AAV9.48 (C1445T, A1736T; P482L, Q579L), AAV9.50 (A1638T, C1683T, T1805A; Q546H, L602H), AAV9.53 (G1301A, A1405C, C1664T, G1811T; R134Q, 5469R, A555V, G604V), AAV9.54 (C1531A, T1609A; L5111, L537M), AAV9.55 (T1605A; F535L), AAV9.58 (C1475T, C1579A; T4921, H527N), AAV.59 (T1336C; Y446H), AAV9.61 (A1493T; N4981), AAV9.64 (C1531A, A1617T; 15111), AAV9.65 (C1335T, T1530C, C1568A; A523D), AAV9.68 (C1510A; P504T), AAV9.80 (G1441A; G481R), AAV9.83 (C1402A, A1500T; P468T, E500D), AAV9.87 (T1464C, T1468C; S490P), AAV9.90 (A1196T; Y399F), AAV9.91 (T1316G, A1583T, C1782G, T1806C; L439R, K5281), AAV9.93 (A1273G, A1421G, A1638C, C1712T, G1732A, A1744T, A1832T; S425G, Q474R, Q546H, P571L, G578R, T582S, D611V), AAV9.94 (A1675T; M559L) and AAV9.95 (T1605A; F535L).

[0090] In some embodiments, the AAV serotype may be, or have, a sequence as described in International Publication No. WO2016049230, the contents of which are herein incorporated by reference in their entirety, such as, but not limited to AAVF1/HSC1 (SEQ ID NO: 2 and 20 of WO2016049230), AAVF2/HSC2 (SEQ ID NO: 3 and 21 of WO2016049230), AAVF3/HSC3 (SEQ ID NO: 5 and 22 of WO2016049230), AAVF4/HSC4 (SEQ ID NO: 6 and 23 of WO2016049230), AAVF5/HSC5 (SEQ ID NO: 11 and 25 of WO2016049230), AAVF6/HSC6 (SEQ ID NO: 7 and 24 of WO2016049230), AAVF7/HSC7 (SEQ ID NO: 8 and 27 of WO2016049230), AAVF8/HSC8 (SEQ ID NO: 9 and 28 of WO2016049230), AAVF9/HSC9 (SEQ ID NO: 10 and 29 of WO2016049230), AAVF11/HSC11 (SEQ ID NO: 4 and 26 of WO2016049230), AAVF121HSC12 (SEQ ID NO: 12 and 30 of WO2016049230), AAVF13/HSC13 (SEQ ID NO: 14 and 31 of WO2016049230), AAVF14/HSC14 (SEQ ID NO: 15 and 32 of WO2016049230), AAVF15/HSC15 (SEQ ID NO: 16 and 33 of WO2016049230), AAVF16/HSC16 (SEQ ID NO: 17 and 34 of WO2016049230), AAVF171HSC17 (SEQ ID NO: 13 and 35 of WO2016049230), or variants or derivatives thereof.

[0091] In some embodiments, the V serotype may be, or have, a sequence as described in U.S. Pat. No. 8,734,809, the contents of which are herein incorporated by reference in their entirety, such as, but not limited to, AAV CBr-E1 (SEQ ID NO: 13 and 87 of U.S. Pat. No. 8,734,809), AAV CBr-E2 (SEQ ID NO: 14 and 88 of U.S. Pat. No. 8,734,809), V CBr-E3 (SEQ ID NO: 15 and 89 of U.S. Pat. No. 8,734,809), V CBr-E4 (SEQ ID NO: 16 and 90 of U.S. Pat. No. 8,734,809), V CBr-E5 (SEQ ID NO: 17 and 91 of U.S. Pat. No. 8,734,809), AAV CBr-e5 (SEQ ID NO: 18 and 92 of U.S. Pat. No. 8,734,809), AAV CBr-E6 (SEQ ID NO: 19 and 93 of U.S. Pat. No. 8,734,809), AAV CBr-E7 (SEQ ID NO: 20 and 94 of U.S. Pat. No. 8,734,809), AAV CBr-E8 (SEQ ID NO: 21 and 95 of U88734809), AAV CLv-D1 (SEQ ID NO: 22 and 96 of U.S. Pat. No. 8,734,809), AAV CLv-D2 (SEQ ID NO: 23 and 97 of U.S. Pat. No. 8,734,809), AAV CLv-D3 (SEQ ID NO: 24 and 98 of U88734809), MV CLv-D4 (SEQ ID NO: 25 and 99 of U.S. Pat. No. 8,734,809), AAV CLv-D5 (SEQ ID NO: 26 and 100 of U.S. Pat. No. 8,734,809), AAV CLv-D (SEQ ID NO: 27 and 101 of U.S. Pat. No. 8,734,809), V CLv. D7 (SEQ ID NO: 28 and 102 of U.S. Pat. No. 8,734,809), V CLv-D8 (SEQ ID NO: 29 and 103 of U.S. Pat. No. 8,734,809), V CLv-E1 (SEQ ID NO: 13 and 87 of U.S. Pat. No. 8,734,809), AAV CLv-R1 (SEQ ID NO: 30 and 104 of U88734809), AAV CLv-R2 (SEQ ID NO: 31 and 105 of U.S. Pat. No. 8,734,809), AAV CLv-R3 (SEQ ID NO: 32 and 106 of U.S. Pat. No. 8,734,809), V CLv-R4 (SEQ ID NO: 33 and 107 of U88734809), AAV CLv-R5 (SEQ ID NO: 34 and 108 of U88734809), V CLv-R6 (SEQ ID NO: 35 and 109 of U.S. Pat. No. 8,734,809), AAV CLv-R7 (SEQ ID NO: 36 and 110 of U.S. Pat. No. 8,734,809), AAV CLv-R (SEQ ID NO: X and X of U88734809), AAV CLv-R9 (SEQ ID NO: X and X of U.S. Pat. No. 8,734,809), AAV CLg-F1 (SEQ ID NO: 39 and 113 of U88734809), V CLg-F2 (SEQ ID NO: 40 and 114 of U.S. Pat. No. 8,734,809), V CLg-F3 (SEQ ID NO: 41 and 115 of U.S. Pat. No. 8,734,809), AAV CLg-F4 (SEQ ID NO: 42 and 116 of U88734809), AAV CLg-F5 (SEQ ID NO: 43 and 117 of U.S. Pat. No. 8,734,809), V CLg-F6 (SEQ ID NO: 43 and 117 of U.S. Pat. No. 8,734,809), AAV CLg-F7 (SEQ ID NO: 44 and 118 of U.S. Pat. No. 8,734,809), V CLg-F8 (SEQ ID NO: 43 and 117 of U.S. Pat. No. 8,734,809), V CSp. (SEQ ID NO: 45 and 119 of U88734809), V CSp-10 (SEQ ID NO: 46 and 120 of U88734809), V CSp-11 (SEQ ID NO: 47 and 121 of U88734809), AAV CSp-2 (SEQ ID NO: 48 and 122 of U88734809), AAV CSp-3 (SEQ ID NO: 49 and 123 of U.S. Pat. No. 8,734,809), AAV CSp-4 (SEQ ID NO: 50 and 124 of U88734809), AAV CSp-6 (SEQ ID NO: 51 and 125 of U88734809), AAV CSp-7 (SEQ ID NO: 52 and 126 of U.S. Pat. No. 8,734,809), MV CSp-8 (SEQ ID NO: 53 and 127 of U88734809), MV CSp-9 (SEQ ID NO: 54 and 128 of U.S. Pat. No. 8,734,809), AAV CHt-2 (SEQ ID NO: 55 and 129 of U88734809), MV CHt-3 (SEQ ID NO: 56 and 130 of U88734809), AAV CKd-1 (SEQ ID NO: 57 and 131 of U.S. Pat. No. 8,734,809), AAV CKd-10 (SEQ ID NO: 58 and 132 of U.S. Pat. No. 8,734,809), V CKd-2 (SEQ ID NO: 59 and 133 of U.S. Pat. No. 8,734,809), AAV CKd-3 (SEQ ID NO: 60 and 134 of U88734809), AAV CKd-4 (SEQ ID NO: 61 and 135 of U88734809), AAV CKd-6 (SEQ ID NO: 62 and 136 of U88734809), V CKd-7 (SEQ ID NO: 63 and 137 of U88734809), MV CKd-8 (SEQ ID NO: 64 and 138 of U.S. Pat. No. 8,734,809), AAV CLv-1 (SEQ ID NO: 35 and 139 of U.S. Pat. No. 8,734,809), AAV CLv-12 (SEQ ID NO: 66 and 140 of U88734809), AAV CLv13 (SEQ ID NO: 67 and 141 of U.S. Pat. No. 8,734,809), AAV CLv-2 (SEQ ID NO: 68 and 142 of U88734809), AAV CLv-3 (SEQ ID NO: 69 and 143 of U.S. Pat. No. 8,734,809), AAV CLv-4 (SEQ ID NO: 70 and 144 of U.S. Pat. No. 8,734,809), AAV CLv-6 (SEQ ID NO: 71 and 145 of U88734809), AAV CLv-8 (SEQ ID NO: 72 and 146 of U88734809), AAV CKd-B1 (SEQ ID NO: 73 and 147 of U.S. Pat. No. 8,734,809), AAV CKd-B2 (SEQ ID NO: 74 and 148 of U.S. Pat. No. 8,734,809), AAV CKd-B3 (SEQ ID NO: 75 and 149 of U.S. Pat. No. 8,734,809), AAV CKd-B4 (SEQ ID NO: 76 and 150 of U.S. Pat. No. 8,734,809), AAV CKd-B5 (SEQ ID NO: 77 and 151 of U88734809), AAV CKd-B6 (SEQ ID NO: 78 and 152 of U.S. Pat. No. 8,734,809), AAV CKd-B7 (SEQ ID NO: 79 and 153 of U88734809), AAV CKd-B8 (SEQ ID NO: 80 and 154 of U.S. Pat. No. 8,734,809), AAV CKd-H1 (SEQ ID NO: 81 and 155 of U.S. Pat. No. 8,734,809), AAV CKd-H2 (SEQ ID NO: 82 and 156 of U88734809), AAV CKd-H3 (SEQ ID NO: 83 and 157 of U88734809), AAV CKd-H4 (SEQ ID NO: 84 and 158 of U88734809), AAV CKd-H5 (SEQ ID NO: 85 and 159 of U88734809), AAV CKd-H6 (SEQ ID NO: 77 and 151 of U.S. Pat. No. 8,734,809), AAV CHt-1 (SEQ ID NO: 86 and 160 of U88734809), AAV CLv1-1 (SEQ ID NO: 171 of U88734809), AAV CLv1.2 (SEQ ID NO: 172 of U88734809), AAV CLv1-3 (SEQ ID NO: 173 of U88734809), AAV CLv1-4 (SEQ ID NO: 174 of U.S. Pat. No. 8,734,809), AAV Clv1-7 (SEQ ID NO: 175 of U88734809), AAV Clv1-8 (SEQ ID NO: 176 of U.S. Pat. No. 8,734,809), AAV Clv1-9 (SEQ ID NO: 177 of U.S. Pat. No. 8,734,809), AAV Clv1-10 (SEQ ID NO: 178 of U88734809), AAV.VR-355 (SEQ ID NO: 181 of U88734809), AAV.hu.48R3 (SEQ ID NO: 183 of U.S. Pat. No. 8,734,809), or variants or derivatives thereof.

[0092] In some embodiments, the AAV serotype may be, or have, a sequence as described in International Publication No. WO2016065001, the contents of which are herein incorporated by reference in their entirety, such as, but not limited to AAV CHt-P2 (SEQ ID NO: 1 and 51 of WO2016065001), AAV CHt-P5 (SEQ ID NO: 2 and 52 of WO2016065001), AAV CHt-P9 (SEQ ID NO: 3 and 53 of WO2016065001), AAV CBr-7.1 (SEQ ID NO: 4 and 54 of WO2016065001), AAV CBr-7.2 (SEQ ID NO: 5 and 55 of WO2016065001), AAV CBr-7.3 (SEQ ID NO: 6 and 56 of WO2016065001), AAV CBr-7.4 (SEQ ID NO: 7 and 57 of WO2016065001), AAV CBr-7.5 (SEQ ID NO: 8 and 58 of WO2016065001), AAV CBr-7.7 (SEQ ID NO: 9 and 59 of WO2016065001), AAV CBr-7.8 (SEQ ID NO: 10 and 60 of WO2016065001), AAV CBr-7.10 (SEQ ID NO: 11 and 61 of WO2016065001), AAV CKd-N3 (SEQ ID NO: 12 and 62 of WO2016065001), AAV CKd-N4 (SEQ ID NO: 13 and 63 of WO2016065001), AAV CKd-N9 (SEQ ID NO: 14 and 64 of WO2016065001), AAV CLv-L4 (SEQ ID NO: 15 and 65 of WO2016065001), AAV CLv-L5 (SEQ ID NO: 16 and 66 of WO2016065001), AAV CLv-L6 (SEQ ID NO: 17 and 67 of WO2016065001), AAV CLv-K1 (SEQ ID NO: 18 and 68 of WO2016065001), AAV CLv-K3 (SEQ ID NO: 19 and 69 of WO2016065001), AAV CLv-K6 (SEQ ID NO: 20 and 70 of WO2016065001), AAV CLv-M1 (SEQ ID NO: 21 and 71 of WO2016065001), AAV CLv-M11 (SEQ ID NO: 22 and 72 of WO2016065001), AAV CLv-M2 (SEQ ID NO: 23 and 73 of WO2016065001), AAV CLv-M5 (SEQ ID NO: 24 and 74 of WO2016065001), AAV CLv-M6 (SEQ ID NO: 25 and 75 of WO2016065001), AAV CLv-M7 (SEQ ID NO: 26 and 76 of WO2016065001), AAV CLv-M8 (SEQ ID NO: 27 and 77 of WO2016065001), AAV CLv-M9 (SEQ ID NO: 28 and 78 of WO2016065001), AAV CHt-P1 (SEQ ID NO: 29 and 79 of WO2016065001), AAV CHt-P6 (SEQ ID NO: 30 and 80 of WO2016065001), AAV CHt-P8 (SEQ ID NO: 31 and 81 of WO2016065001), AAV CHt-6.1 (SEQ ID NO: 32 and 82 of WO2016065001), AAV CHt-6.10 (SEQ ID NO: 33 and 83 of WO2016065001), AAV CHt-6.5 (SEQ ID NO: 34 and 84 of WO2016065001), AAV CHt-6.6 (SEQ ID NO: 35 and 85 of WO2016065001), AAV CHt-6.7 (SEQ ID NO: 36 and 86 of WO2016065001), AAV CHt-6.8 (SEQ ID NO: 37 and 87 of WO2016065001), AAV CSp-8.10 (SEQ ID NO: 38 and 88 of WO2016065001), AAV CSp-8.2 (SEQ ID NO: 39 and 89 of WO2016065001), AAV CSp-8.4 (SEQ ID NO: 40 and 90 of WO2016065001), AAV CSp-8.5 (SEQ ID NO: 41 and 91 of WO2016065001), AAV CSp-8.6 (SEQ ID NO: 42 and 92 of WO2016065001), AAV CSp-8.7 (SEQ ID NO: 43 and 93 of WO2016065001), AAV CSp-8.8 (SEQ ID NO: 44 and 94 of WO2016065001), AAV CSp-8.9 (SEQ ID NO: 45 and 95 of WO2016065001), AAV CBr-B7.3 (SEQ ID NO: 46 and 96 of WO2016065001), AAV CBr-B7.4 (SEQ ID NO: 47 and 97 of WO2016065001), AAV3B (SEQ ID NO: 48 and 98 of WO2016065001), AAV4 (SEQ ID NO: 49 and 99 of WO2016065001), AAV5 (SEQ ID NO: 50 and 100 of WO2016065001), or variants or derivatives thereof.

[0093] In some embodiments, the AAV particle may have, or may be a serotype selected from any of those found in Table 1.

[0094] In some embodiments, the AAV capsid may comprise a sequence, fragment or variant thereof, of any of the sequences in Table 1.

[0095] In some embodiments, the AAV capsid may be encoded by a sequence, fragment or variant as described in Table 1.

[0096] In any of the DNA and RNA sequences referenced and/or described herein, the single letter symbol has the following description: A for adenine; C for cytosine; G for guanine; T for thymine; U for Uracil; W for weak bases such as adenine or thymine; S for strong nucleotides such as cytosine and guanine; M for amino nucleotides such as adenine and cytosine; K for keto nucleotides such as guanine and thymine; R for purines adenine and guanine; Y for pyrimidine cytosine and thymine; B for any base that is not A (e.g., cytosine, guanine, and thymine); D for any base that is not C (e.g., adenine, guanine, and thymine); H for any base that is not G (e.g., adenine, cytosine, and thymine); V for any base that is not T (e.g., adenine, cytosine, and guanine); N for any nucleotide (which is not a gap); and Z is for zero.

[0097] In any of the amino acid sequences referenced and/or described herein, the single letter symbol has the following description: G (Gly) for Glycine; A (Ala) for Alanine; L (Leu) for Leucine; M (Met) for Methionine; F (Phe) for Phenylalanine; W (Trp) for Tryptophan; K (Lys) for Lysine; Q (Gin) for Glutamine; E (Glu) for Glutamic Acid; S (Ser) for Serine; P (Pro) for Proline; V (Val) for Valine; I (Ile) for Isoleucine; C (Cys) for Cysteine; Y (Tyr) for Tyrosine; H (His) for Histidine; R (Arg) for Arginine; N (Asn) for Asparagine; D (Asp) for Aspartic Acid; T (Thr) for Threonine; B (Asx) for Aspartic acid or Asparagine; J (Xle) for Leucine or Isoleucine; 0 (Pyl) for Pyrrolysine; U (Sec) for Selenocysteine; X (Xaa) for any amino acid; and Z (Glx) for Glutamine or Glutamic acid.

TABLE 1
AAV Serotypes

| | SEQ | |
|---|---|---|
| Serotype | ID NO: | Reference Information |
| VOY101 | 1 | — |
| VOY101 | 2 | — |
| VOY201 | 3 | — |
| VOY201 | 13140 | — |
| PHP.N/PHP.B-DGT | 4 | WO2017100671 SEQ ID NO: 46 |
| AAVPHP.B or G2B-26 | 5 | WO2015038958 SEQ ID NO: 8 and 13 |
| AAVPHP.B | 6 | WO2015038958 SEQ ID NO: 9 |
| AAVG2B-13 | 7 | WO2015038958 SEQ ID NO: 12 |
| AAVTH1.1-32 | 8 | WO2015038958 SEQ ID NO: 14 |
| AAVTH1.1-35 | 9 | WO2015038958 SEQ ID NO: 15 |
| PHP.S/G2A12 | 10 | WO2017100671 SEQ ID NO: 47 |
| AAV9/hu.14 K449R | 11 | WO2017100671 SEQ ID NO: 45 |
| AAV1 | 12 | US20150159173 SEQ ID NO: 11, US20150315612 SEQ ID NO: 202 |
| AAV1 | 13 | US20160017295 SEQ ID NO: 1, US20030138772 SEQ ID NO: 64, |
| | | US20150159173 SEQ ID NO: 27, US20150315612 SEQ ID NO: 219, |
| | | U.S. Pat. No. 7,198,951 SEQ ID NO: 5 |
| AAV1 | 14 | US20030138772 SEQ ID NO: 6 |
| AAV1.3 | 15 | US20030138772 SEQ ID NO: 14 |
| AAV10 | 16 | US20030138772 SEQ ID NO: 117 |
| AAV10 | 17 | WO2015121501 SEQ ID NO: 9 |
| AAV10 | 18 | WO2015121501 SEQ ID NO: 8 |
| AAV11 | 19 | US20030138772 SEQ ID NO: 118 |
| AAV12 | 20 | US20030138772 SEQ ID NO: 119 |
| AAV2 | 21 | US20150159173 SEQ ID NO: 7, US20150315612 SEQ ID NO: 211 |
| AAV2 | 22 | US20030138772 SEQ ID NO: 70, US20150159173 SEQ ID NO: 23, |
| | | US20150315612 SEQ ID NO: 221, US20160017295 SEQ ID NO: 2, |
| | | U.S. Pat. No. 6,156,303 SEQ ID NO: 4, U.S. Pat. No. 7,198,951 SEQ ID NO: 4, |
| | | WO2015121501 SEQ ID NO: 1 |
| AAV2 | 23 | U.S. Pat. No. 6,156,303 SEQ ID NO: 8 |
| AAV2 | 24 | US20030138772 SEQ ID NO: 7 |
| AAV2 | 25 | U.S. Pat. No. 6,156,303 SEQ ID NO: 3 |
| AAV2.5T | 26 | U.S. Pat. No. 9,233,131 SEQ ID NO: 42 |
| AAV223.10 | 27 | US20030138772 SEQ ID NO: 75 |
| AAV223.2 | 28 | US20030138772 SEQ ID NO: 49 |
| AAV223.2 | 29 | US20030138772 SEQ ID NO: 76 |
| AAV223.4 | 30 | US20030138772 SEQ ID NO: 50 |
| AAV223.4 | 31 | US20030138772 SEQ ID NO: 73 |
| AAV223.5 | 32 | US20030138772 SEQ ID NO: 51 |
| AAV223.5 | 33 | US20030138772 SEQ ID NO: 74 |
| AAV223.6 | 34 | US20030138772 SEQ ID NO: 52 |
| AAV223.6 | 35 | US20030138772 SEQ ID NO: 78 |
| AAV223.7 | 36 | US20030138772 SEQ ID NO: 53 |
| AAV223.7 | 37 | US20030138772 SEQ ID NO: 77 |
| AAV29.3 | 38 | US20030138772 SEQ ID NO: 82 |
| AAV29.4 | 39 | US20030138772 SEQ ID NO: 12 |
| AAV29.5 | 40 | US20030138772 SEQ ID NO: 83 |
| AAV29.5 (AAVbb.2) | 41 | US20030138772 SEQ ID NO: 13 |
| AAV3 | 42 | US20150159173 SEQ ID NO: 12 |
| AAV3 | 43 | US20030138772 SEQ ID NO: 71, US20150159173 SEQ ID NO: 28, |
| | | US20160017295 SEQ ID NO: 3, U.S. Pat. No. 7,198,951 SEQ ID NO: 6 |
| AAV3 | 44 | US20030138772 SEQ ID NO: 8 |
| AAV3.3b | 45 | US20030138772 SEQ ID NO: 72 |
| AAV3-3 | 46 | US20150315612 SEQ ID NO: 200 |
| AAV3-3 | 47 | US20150315612 SEQ ID NO: 217 |
| AAV3a | 48 | U.S. Pat. No. 6,156,303 SEQ ID NO: 5 |
| AAV3a | 49 | U.S. Pat. No. 6,156,303 SEQ ID NO: 9 |
| AAV3b | 50 | U.S. Pat. No. 6,156,303 SEQ ID NO: 6 |
| AAV3b | 51 | U.S. Pat. No. 6,156,303 SEQ ID NO: 10 |
| AAV3b | 52 | U.S. Pat. No. 6,156,303 SEQ ID NO: 1 |
| AAV4 | 53 | US20140348794 SEQ ID NO: 17 |
| AAV4 | 54 | US20140348794 SEQ ID NO: 5 |
| AAV4 | 55 | US20140348794 SEQ ID NO: 3 |
| AAV4 | 56 | US20140348794 SEQ ID NO: 14 |
| AAV4 | 57 | US20140348794 SEQ ID NO: 15 |
| AAV4 | 58 | US20140348794 SEQ ID NO: 19 |
| AAV4 | 59 | US20140348794 SEQ ID NO: 12 |
| AAV4 | 60 | US20140348794 SEQ ID NO: 13 |
| AAV4 | 61 | US20140348794 SEQ ID NO: 7 |
| AAV4 | 62 | US20140348794 SEQ ID NO: 8 |
| AAV4 | 63 | US20140348794 SEQ ID NO: 9 |
| AAV4 | 64 | US20140348794 SEQ ID NO: 2 |
| AAV4 | 65 | US20140348794 SEQ ID NO: 10 |
| AAV4 | 66 | US20140348794 SEQ ID NO: 11 |
| AAV4 | 67 | US20140348794 SEQ ID NO: 18 |
| AAV4 | 68 | US20030138772 SEQ ID NO: 63, US20160017295 SEQ ID NO: 4, |
| | | US20140348794 SEQ ID NO: 4 |
| AAV4 | 69 | US20140348794 SEQ ID NO: 16 |
| AAV4 | 70 | US20140348794 SEQ ID NO: 20 |
| AAV4 | 71 | US20140348794 SEQ ID NO: 6 |
| AAV4 | 72 | US20140348794 SEQ ID NO: 1 |
| AAV42.2 | 73 | US20030138772 SEQ ID NO: 9 |
| AAV42.2 | 74 | US20030138772 SEQ ID NO: 102 |
| AAV42.3b | 75 | US20030138772 SEQ ID NO: 36 |
| AAV42.3B | 76 | US20030138772 SEQ ID NO: 107 |
| AAV42.4 | 77 | US20030138772 SEQ ID NO: 33 |
| AAV42.4 | 78 | US20030138772 SEQ ID NO: 88 |
| AAV42.8 | 79 | US20030138772 SEQ ID NO: 27 |
| AAV42.8 | 80 | US20030138772 SEQ ID NO: 85 |
| AAV43.1 | 81 | US20030138772 SEQ ID NO: 39 |
| AAV43.1 | 82 | US20030138772 SEQ ID NO: 92 |
| AAV43.12 | 83 | US20030138772 SEQ ID NO: 41 |
| AAV43.12 | 84 | US20030138772 SEQ ID NO: 93 |
| AAV43.20 | 85 | US20030138772 SEQ ID NO: 42 |
| AAV43.20 | 86 | US20030138772 SEQ ID NO: 99 |
| AAV43.21 | 87 | US20030138772 SEQ ID NO: 43 |
| AAV43.21 | 88 | US20030138772 SEQ ID NO: 96 |
| AAV43.23 | 89 | US20030138772 SEQ ID NO: 44 |
| AAV43.23 | 90 | US20030138772 SEQ ID NO: 98 |
| AAV43.25 | 91 | US20030138772 SEQ ID NO: 45 |
| AAV43.25 | 92 | US20030138772 SEQ ID NO: 97 |
| AAV43.5 | 93 | US20030138772 SEQ ID NO: 40 |
| AAV43.5 | 94 | US20030138772 SEQ ID NO: 94 |
| AAV4-4 | 95 | US20150315612 SEQ ID NO: 201 |
| AAV4-4 | 96 | US20150315612 SEQ ID NO: 218 |
| AAV44.1 | 97 | US20030138772 SEQ ID NO: 46 |
| AAV44.1 | 98 | US20030138772 SEQ ID NO: 79 |
| AAV44.5 | 99 | US20030138772 SEQ ID NO: 47 |
| AAV44.5 | 100 | US20030138772 SEQ ID NO: 80 |
| AAV4407 | 101 | US20150315612 SEQ ID NO: 90 |
| AAV5 | 102 | U.S. Pat. No. 7,427,396 SEQ ID NO: 1 |
| AAV5 | 103 | US20030138772 SEQ ID NO: 114 |
| AAV5 | 104 | US20160017295 SEQ ID NO: 5, U.S. Pat. No. 7,427,396 SEQ ID NO: 2, |
| | | US20150315612 SEQ ID NO: 216 |
| AAV5 | 105 | US20150315612 SEQ ID NO: 199 |
| AAV6 | 106 | US20150159173 SEQ ID NO: 13 |
| AAV6 | 107 | US20030138772 SEQ ID NO: 65, US20150159173 SEQ ID NO: 29, |
| | | US20160017295 SEQ ID NO: 6, U.S. Pat. No. 6,156,303 SEQ ID NO: 7 |
| AAV6 | 108 | U.S. Pat. No. 6,156,303 SEQ ID NO: 11 |
| AAV6 | 109 | U.S. Pat. No. 6,156,303 SEQ ID NO: 2 |
| AAV6 | 110 | US20150315612 SEQ ID NO: 203 |
| AAV6 | 111 | US20150315612 SEQ ID NO: 220 |
| AAV6.1 | 112 | US20150159173 |
| AAV6.12 | 113 | US20150159173 |
| AAV6.2 | 114 | US20150159173 |
| AAV7 | 115 | US20150159173 SEQ ID NO: 14 |
| AAV7 | 116 | US20150315612 SEQ ID NO: 183 |
| AAV7 | 117 | US20030138772 SEQ ID NO: 2, US20150159173 SEQ ID NO: 30, |
| | | US20150315612 SEQ ID NO: 181, US20160017295 SEQ ID NO: 7 |
| AAV7 | 118 | US20030138772 SEQ ID NO: 3 |
| AAV7 | 119 | US20030138772 SEQ ID NO: 1, US20150315612 SEQ ID NO: 180 |
| AAV7 | 120 | US20150315612 SEQ ID NO: 213 |
| AAV7 | 121 | US20150315612 SEQ ID NO: 222 |
| AAV8 | 122 | US20150159173 SEQ ID NO: 15 |
| AAV8 | 123 | US20150376240 SEQ ID NO: 7 |
| AAV8 | 124 | US20030138772 SEQ ID NO: 4, US20150315612 SEQ ID NO: 182 |
| AAV8 | 125 | US20030138772 SEQ ID NO: 95, US20140359799 SEQ ID NO: 1, |
| | | US20150159173 SEQ ID NO: 31, US20160017295 SEQ ID NO: 8, |
| | | U.S. Pat. No. 7,198,951 SEQ ID NO: 7, US20150315612 SEQ ID NO: 223 |
| AAV8 | 126 | US20150376240 SEQ ID NO: 8 |
| AAV8 | 127 | US20150315612 SEQ ID NO: 214 |
| AAV-8b | 128 | US20150376240 SEQ ID NO: 5 |
| AAV-8b | 129 | US20150376240 SEQ ID NO: 3 |
| AAV-8h | 130 | US20150376240 SEQ ID NO: 6 |
| AAV-8h | 131 | US20150376240 SEQ ID NO: 4 |
| AAV9 | 132 | US20030138772 SEQ ID NO: 5 |
| AAV9 | 133 | U.S. Pat. No. 7,198,951 SEQ ID NO: 1 |
| AAV9 | 134 | US20160017295 SEQ ID NO: 9 |
| AAV9 | 135 | US20030138772 SEQ ID NO: 100, U.S. Pat. No. 7,198,951 SEQ ID NO: 2 |
| AAV9 | 136 | U.S. Pat. No. 7,198,951 SEQ ID NO: 3 |
| AAV9 (AAVhu.14) | 137 | U.S. Pat. No. 7,906,111 SEQ ID NO: 3; WO2015038958 SEQ ID NO: 11 |
| AAV9 (AAVhu.14) | 138 | U.S. Pat. No. 7,906,111 SEQ ID NO: 123; WO2015038958 SEQ ID NO: 2 |
| AAVA3.1 | 139 | US20030138772 SEQ ID NO: 120 |
| AAVA3.3 | 140 | US20030138772 SEQ ID NO: 57 |
| AAVA3.3 | 141 | US20030138772 SEQ ID NO: 66 |
| AAVA3.4 | 142 | US20030138772 SEQ ID NO: 54 |
| AAVA3.4 | 143 | US20030138772 SEQ ID NO: 68 |
| AAVA3.5 | 144 | US20030138772 SEQ ID NO: 55 |
| AAVA3.5 | 145 | US20030138772 SEQ ID NO: 69 |
| AAVA3.7 | 146 | US20030138772 SEQ ID NO: 56 |
| AAVA3.7 | 147 | US20030138772 SEQ ID NO: 67 |
| AAV29.3 (AAVbb.1) | 148 | US20030138772 SEQ ID NO: 11 |
| AAVC2 | 149 | US20030138772 SEQ ID NO: 61 |
| AAVCh.5 | 150 | US20150159173 SEQ ID NO: 46, US20150315612 SEQ ID NO: 234 |
| AAVcy.2 (AAV13.3) | 151 | US20030138772 SEQ ID NO: 15 |
| AAV24.1 | 152 | US20030138772 SEQ ID NO: 101 |
| AAVcy.3 (AAV24.1) | 153 | US20030138772 SEQ ID NO: 16 |
| AAV27.3 | 154 | US20030138772 SEQ ID NO: 104 |
| AAVcy.4 (AAV27.3) | 155 | US20030138772 SEQ ID NO: 17 |
| AAVcy.5 | 156 | US20150315612 SEQ ID NO: 227 |
| AAV7.2 | 157 | US20030138772 SEQ ID NO: 103 |
| AAVcy.5 (AAV7.2) | 158 | US20030138772 SEQ ID NO: 18 |
| AAV16.3 | 159 | US20030138772 SEQ ID NO: 105 |
| AAVcy.6 (AAV16.3) | 160 | US20030138772 SEQ ID NO: 10 |
| AAVcy.5 | 161 | US20150159173 SEQ ID NO: 8 |
| AAVcy.5 | 162 | US20150159173 SEQ ID NO: 24 |
| AAVCy.5R1 | 163 | US20150159173 |
| AAVCy.5R2 | 164 | US20150159173 |
| AAVCy.5R3 | 165 | US20150159173 |
| AAVCy.5R4 | 166 | US20150159173 |
| AAVDJ | 167 | US20140359799 SEQ ID NO: 3, U.S. Pat. No. 7,588,772 SEQ ID NO: 2 |
| AAVDJ | 168 | US20140359799 SEQ ID NO: 2, U.S. Pat. No. 7,588,772 SEQ ID NO: 1 |
| AAVDJ-8 | 169 | U.S. Pat. No. 7,588,772; Grimm et al 2008 |
| AAVDJ-8 | 170 | U.S. Pat. No. 7,588,772; Grimm et al 2008 |
| AAVF5 | 171 | US20030138772 SEQ ID NO: 110 |
| AAVH2 | 172 | US20030138772 SEQ ID NO: 26 |
| AAVH6 | 173 | US20030138772 SEQ ID NO: 25 |
| AAVhE1.1 | 174 | U.S. Pat. No. 9,233,131 SEQ ID NO: 44 |
| AAVhEr1.14 | 175 | U.S. Pat. No. 9,233,131 SEQ ID NO: 46 |
| AAVhEr1.16 | 176 | U.S. Pat. No. 9,233,131 SEQ ID NO: 48 |
| AAVhEr1.18 | 177 | U.S. Pat. No. 9,233,131 SEQ ID NO: 49 |
| AAVhEr1.23 (AAVhEr2.29) | 178 | U.S. Pat. No. 9,233,131 SEQ ID NO: 53 |
| AAVhEr1.35 | 179 | U.S. Pat. No. 9,233,131 SEQ ID NO: 50 |
| AAVhEr1.36 | 180 | U.S. Pat. No. 9,233,131 SEQ ID NO: 52 |
| AAVhEr1.5 | 181 | U.S. Pat. No. 9,233,131 SEQ ID NO: 45 |
| AAVhEr1.7 | 182 | U.S. Pat. No. 9,233,131 SEQ ID NO: 51 |
| AAVhEr1.8 | 183 | U.S. Pat. No. 9,233,131 SEQ ID NO: 47 |
| AAVhEr2.16 | 184 | U.S. Pat. No. 9,233,131 SEQ ID NO: 55 |
| AAVhEr2.30 | 185 | U.S. Pat. No. 9,233,131 SEQ ID NO: 56 |
| AAVhEr2.31 | 186 | U.S. Pat. No. 9,233,131 SEQ ID NO: 58 |
| AAVhEr2.36 | 187 | U.S. Pat. No. 9,233,131 SEQ ID NO: 57 |
| AAVhEr2.4 | 188 | U.S. Pat. No. 9,233,131 SEQ ID NO: 54 |
| AAVhEr3.1 | 189 | U.S. Pat. No. 9,233,131 SEQ ID NO: 59 |
| AAVhu.1 | 190 | US20150315612 SEQ ID NO: 46 |
| AAVhu.1 | 191 | US20150315612 SEQ ID NO: 144 |
| AAVhu.10 (AAV16.8) | 192 | US20150315612 SEQ ID NO: 56 |
| AAVhu.10 (AAV16.8) | 193 | US20150315612 SEQ ID NO: 156 |
| AAVhu.11 (AAV16.12) | 194 | US20150315612 SEQ ID NO: 57 |
| AAVhu.11 (AAV16.12) | 195 | US20150315612 SEQ ID NO: 153 |
| AAVhu.12 | 196 | US20150315612 SEQ ID NO: 59 |
| AAVhu.12 | 197 | US20150315612 SEQ ID NO: 154 |
| AAVhu.13 | 198 | US20150159173 SEQ ID NO: 16, US20150315612 SEQ ID NO: 71 |
| AAVhu.13 | 199 | US20150159173 SEQ ID NO: 32, US20150315612 SEQ ID NO: 129 |
| AAVhu.136.1 | 200 | US20150315612 SEQ ID NO: 165 |
| AAVhu.140.1 | 201 | US20150315612 SEQ ID NO: 166 |
| AAVhu.140.2 | 202 | US20150315612 SEQ ID NO: 167 |
| AAVhu.145.6 | 203 | US20150315612 SEQ ID No: 178 |
| AAVhu.15 | 204 | US20150315612 SEQ ID NO: 147 |
| AAVhu.15 (AAV33.4) | 205 | US20150315612 SEQ ID NO: 50 |
| AAVhu.156.1 | 206 | US20150315612 SEQ ID No: 179 |
| AAVhu.16 | 207 | US20150315612 SEQ ID NO: 148 |
| AAVhu.16 (AAV33.8) | 208 | US20150315612 SEQ ID NO: 51 |
| AAVhu.17 | 209 | US20150315612 SEQ ID NO: 83 |
| AAVhu.17 (AAV33.12) | 210 | US20150315612 SEQ ID NO: 4 |
| AAVhu.172.1 | 211 | US20150315612 SEQ ID NO: 171 |
| AAVhu.172.2 | 212 | US20150315612 SEQ ID NO: 172 |
| AAVhu.173.4 | 213 | US20150315612 SEQ ID NO: 173 |
| AAVhu.173.8 | 214 | US20150315612 SEQ ID NO: 175 |
| AAVhu.18 | 215 | US20150315612 SEQ ID NO: 52 |
| AAVhu.18 | 216 | US20150315612 SEQ ID NO: 149 |
| AAVhu.19 | 217 | US20150315612 SEQ ID NO: 62 |
| AAVhu.19 | 218 | US20150315612 SEQ ID NO: 133 |
| AAVhu.2 | 219 | US20150315612 SEQ ID NO: 48 |
| AAVhu.2 | 220 | US20150315612 SEQ ID NO: 143 |
| AAVhu.20 | 221 | US20150315612 SEQ ID NO: 63 |
| AAVhu.20 | 222 | US20150315612 SEQ ID NO: 134 |
| AAVhu.21 | 223 | US20150315612 SEQ ID NO: 65 |
| AAVhu.21 | 224 | US20150315612 SEQ ID NO: 135 |
| AAVhu.22 | 225 | US20150315612 SEQ ID NO: 67 |
| AAVhu.22 | 226 | US20150315612 SEQ ID NO: 138 |
| AAVhu.23 | 227 | US20150315612 SEQ ID NO: 60 |
| AAVhu.23.2 | 228 | US20150315612 SEQ ID NO: 137 |
| AAVhu.24 | 229 | US20150315612 SEQ ID NO: 66 |
| AAVhu.24 | 230 | US20150315612 SEQ ID NO: 136 |
| AAVhu.25 | 231 | US20150315612 SEQ ID NO: 49 |
| AAVhu.25 | 232 | US20150315612 SEQ ID NO: 146 |
| AAVhu.26 | 233 | US20150159173 SEQ ID NO: 17, US20150315612 SEQ ID NO: 61 |
| AAVhu.26 | 234 | US20150159173 SEQ ID NO: 33, US20150315612 SEQ ID NO: 139 |
| AAVhu.27 | 235 | US20150315612 SEQ ID NO: 64 |
| AAVhu.27 | 236 | US20150315612 SEQ ID NO: 140 |
| AAVhu.28 | 237 | US20150315612 SEQ ID NO: 68 |
| AAVhu.28 | 238 | US20150315612 SEQ ID NO: 130 |
| AAVhu.29 | 239 | US20150315612 SEQ ID NO: 69 |
| AAVhu.29 | 240 | US20150159173 SEQ ID NO: 42, US20150315612 SEQ ID NO: 132 |
| AAVhu.29 | 241 | US20150315612 SEQ ID NO: 225 |
| AAVhu.29R | 242 | US20150159173 |
| AAVhu.3 | 243 | US20150315612 SEQ ID NO: 44 |
| AAVhu.3 | 244 | US20150315612 SEQ ID NO: 145 |
| AAVhu.30 | 245 | US20150315612 SEQ ID NO: 70 |
| AAVhu.30 | 246 | US20150315612 SEQ ID NO: 131 |
| AAVhu.31 | 247 | US20150315612 SEQ ID NO: 1 |
| AAVhu.31 | 248 | US20150315612 SEQ ID NO: 121 |
| AAVhu.32 | 249 | US20150315612 SEQ ID NO: 2 |
| AAVhu.32 | 250 | US20150315612 SEQ ID NO: 122 |
| AAVhu.33 | 251 | US20150315612 SEQ ID NO: 75 |
| AAVhu.33 | 252 | US20150315612 SEQ ID NO: 124 |
| AAVhu.34 | 253 | US20150315612 SEQ ID NO: 72 |
| AAVhu.34 | 254 | US20150315612 SEQ ID NO: 125 |
| AAVhu.35 | 255 | US20150315612 SEQ ID NO: 73 |
| AAVhu.35 | 256 | US20150315612 SEQ ID NO: 164 |
| AAVhu.36 | 257 | US20150315612 SEQ ID NO: 74 |
| AAVhu.36 | 258 | US20150315612 SEQ ID NO: 126 |
| AAVhu.37 | 259 | US20150159173 SEQ ID NO: 34, US20150315612 SEQ ID NO: 88 |
| AAVhu.37 (AAV106.1) | 260 | US20150315612 SEQ ID NO: 10, US20150159173 SEQ ID NO: 18 |
| AAVhu.38 | 261 | US20150315612 SEQ ID NO: 161 |
| AAVhu.39 | 262 | US20150315612 SEQ ID NO: 102 |
| AAVhu.39 (AAVLG-9) | 263 | US20150315612 SEQ ID NO: 24 |
| AAVhu.4 | 264 | US20150315612 SEQ ID NO: 47 |
| AAVhu.4 | 265 | US20150315612 SEQ ID NO: 141 |
| AAVhu.40 | 266 | US20150315612 SEQ ID NO: 87 |
| AAVhu.40 (AAV114.3) | 267 | US20150315612 SEQ ID No. 11 |
| AAVhu.41 | 268 | US20150315612 SEQ ID NO: 91 |
| AAVhu.41 (AAV127.2) | 269 | US20150315612 SEQ ID NO: 6 |
| AAVhu.42 | 270 | US20150315612 SEQ ID NO: 85 |
| AAVhu.42 (AAV127.5) | 271 | US20150315612 SEQ ID NO: 8 |
| AAVhu.43 | 272 | US20150315612 SEQ ID NO: 160 |
| AAVhu.43 | 273 | US20150315612 SEQ ID NO: 236 |
| AAVhu.43 (AAV128.1) | 274 | US20150315612 SEQ ID NO: 80 |
| AAVhu.44 | 275 | US20150159173 SEQ ID NO: 45, US20150315612 SEQ ID NO: 158 |
| AAVhu.44 (AAV128.3) | 276 | US20150315612 SEQ ID NO: 81 |
| AAVhu.44R1 | 277 | US20150159173 |
| AAVhu.44R2 | 278 | US20150159173 |
| AAVhu.44R3 | 279 | US20150159173 |
| AAVhu.45 | 280 | US20150315612 SEQ ID NO: 76 |
| AAVhu.45 | 281 | US20150315612 SEQ ID NO: 127 |
| AAVhu.46 | 282 | US20150315612 SEQ ID NO: 82 |
| AAVhu.46 | 283 | US20150315612 SEQ ID NO: 159 |
| AAVhu.46 | 284 | US20150315612 SEQ ID NO: 224 |
| AAVhu.47 | 285 | US20150315612 SEQ ID NO: 77 |
| AAVhu.47 | 286 | US20150315612 SEQ ID NO: 128 |
| AAVhu.48 | 287 | US20150159173 SEQ ID NO: 38 |
| AAVhu.48 | 288 | US20150315612 SEQ ID NO: 157 |
| AAVhu.48 (AAV130.4) | 289 | US20150315612 SEQ ID NO: 78 |
| AAVhu.48R1 | 290 | US20150159173 |
| AAVhu.48R2 | 291 | US20150159173 |
| AAVhu.48R3 | 292 | US20150159173 |
| AAVhu.49 | 293 | US20150315612 SEQ ID NO: 209 |
| AAVhu.49 | 294 | US20150315612 SEQ ID NO: 189 |
| AAVhu.5 | 295 | US20150315612 SEQ ID NO: 45 |
| AAVhu.5 | 296 | US20150315612 SEQ ID NO: 142 |
| AAVhu.51 | 297 | US20150315612 SEQ ID NO: 208 |
| AAVhu.51 | 298 | US20150315612 SEQ ID NO: 190 |
| AAVhu.52 | 299 | US20150315612 SEQ ID NO: 210 |
| AAVhu.52 | 300 | US20150315612 SEQ ID NO: 191 |
| AAVhu.53 | 301 | US20150159173 SEQ ID NO: 19 |
| AAVhu.53 | 302 | US20150159173 SEQ ID NO: 35 |
| AAVhu.53 (AAV145.1) | 303 | US20150315612 SEQ ID NO: 176 |
| AAVhu.54 | 304 | US20150315612 SEQ ID NO: 188 |
| AAVhu.54 (AAV145.5) | 305 | US20150315612 SEQ ID No: 177 |
| AAVhu.55 | 306 | US20150315612 SEQ ID NO: 187 |
| AAVhu.56 | 307 | US20150315612 SEQ ID NO: 205 |
| AAVhu.56 (AAV145.6) | 308 | US20150315612 SEQ ID NO: 168 |
| AAVhu.56 (AAV145.6) | 309 | US20150315612 SEQ ID NO: 192 |
| AAVhu.57 | 310 | US20150315612 SEQ ID NO: 206 |
| AAVhu.57 | 311 | US20150315612 SEQ ID NO: 169 |
| AAVhu.57 | 312 | US20150315612 SEQ ID NO: 193 |
| AAVhu.58 | 313 | US20150315612 SEQ ID NO: 207 |
| AAVhu.58 | 314 | US20150315612 SEQ ID NO: 194 |
| AAVhu.6 (AAV3.1) | 315 | US20150315612 SEQ ID NO: 5 |
| AAVhu.6 (AAV3.1) | 316 | US20150315612 SEQ ID NO: 84 |
| AAVhu.60 | 317 | US20150315612 SEQ ID NO: 184 |
| AAVhu.60 (AAV161.10) | 318 | US20150315612 SEQ ID NO: 170 |
| AAVhu.61 | 319 | US20150315612 SEQ ID NO: 185 |
| AAVhu.61 (AAV161.6) | 320 | US20150315612 SEQ ID NO: 174 |
| AAVhu.63 | 321 | US20150315612 SEQ ID NO: 204 |
| AAVhu.63 | 322 | US20150315612 SEQ ID NO: 195 |
| AAVhu.64 | 323 | US20150315612 SEQ ID NO: 212 |
| AAVhu.64 | 324 | US20150315612 SEQ ID NO: 196 |
| AAVhu.66 | 325 | US20150315612 SEQ ID NO: 197 |
| AAVhu.67 | 326 | US20150315612 SEQ ID NO: 215 |
| AAVhu.67 | 327 | US20150315612 SEQ ID NO: 198 |
| AAVhu.7 | 328 | US20150315612 SEQ ID NO: 226 |
| AAVhu.7 | 329 | US20150315612 SEQ ID NO: 150 |
| AAVhu.7 (AAV7.3) | 330 | US20150315612 SEQ ID NO: 55 |
| AAVhu.71 | 331 | US20150315612 SEQ ID NO: 79 |
| AAVhu.8 | 332 | US20150315612 SEQ ID NO: 53 |
| AAVhu.8 | 333 | US20150315612 SEQ ID NO: 12 |
| AAVhu.8 | 334 | US20150315612 SEQ ID NO: 151 |
| AAVhu.9 (AAV3.1) | 335 | US20150315612 SEQ ID NO: 58 |
| AAVhu.9 (AAV3.1) | 336 | US20150315612 SEQ ID NO: 155 |
| AAV-LK01 | 337 | US20150376607 SEQ ID NO: 2 |
| AAV-LK01 | 338 | US20150376607 SEQ ID NO: 29 |
| AAV-LK02 | 339 | US20150376607 SEQ ID NO: 3 |
| AAV-LK02 | 340 | US20150376607 SEQ ID NO: 30 |
| AAV-LK03 | 341 | US20150376607 SEQ ID NO: 4 |
| AAV-LK03 | 342 | WO2015121501 SEQ ID NO: 12, US20150376607 SEQ ID NO: 31 |
| AAV-LK04 | 343 | US20150376607 SEQ ID NO: 5 |
| AAV-LK04 | 344 | US20150376607 SEQ ID NO: 32 |
| AAV-LK05 | 345 | US20150376607 SEQ ID NO: 6 |
| AAV-LK05 | 346 | US20150376607 SEQ ID NO: 33 |
| AAV-LK06 | 347 | US20150376607 SEQ ID NO: 7 |
| AAV-LK06 | 348 | US20150376607 SEQ ID NO: 34 |
| AAV-LK07 | 349 | US20150376607 SEQ ID NO: 8 |
| AAV-LK07 | 350 | US20150376607 SEQ ID NO: 35 |
| AAV-LK08 | 351 | US20150376607 SEQ ID NO: 9 |
| AAV-LK08 | 352 | US20150376607 SEQ ID NO: 36 |
| AAV-LK09 | 353 | US20150376607 SEQ ID NO: 10 |
| AAV-LK09 | 354 | US20150376607 SEQ ID NO: 37 |
| AAV-LK10 | 355 | US20150376607 SEQ ID NO: 11 |
| AAV-LK10 | 356 | US20150376607 SEQ ID NO: 38 |
| AAV-LK11 | 357 | US20150376607 SEQ ID NO: 12 |
| AAV-LK11 | 358 | US20150376607 SEQ ID NO: 39 |
| AAV-LK12 | 359 | US20150376607 SEQ ID NO: 13 |
| AAV-LK12 | 360 | US20150376607 SEQ ID NO: 40 |
| AAV-LK13 | 361 | US20150376607 SEQ ID NO: 14 |
| AAV-LK13 | 362 | US20150376607 SEQ ID NO: 41 |
| AAV-LK14 | 363 | US20150376607 SEQ ID NO: 15 |
| AAV-LK14 | 364 | US20150376607 SEQ ID NO: 42 |
| AAV-LK15 | 365 | US20150376607 SEQ ID NO: 16 |
| AAV-LK15 | 366 | US20150376607 SEQ ID NO: 43 |
| AAV-LK16 | 367 | US20150376607 SEQ ID NO: 17 |
| AAV-LK16 | 368 | US20150376607 SEQ ID NO: 44 |
| AAV-LK17 | 369 | US20150376607 SEQ ID NO: 18 |
| AAV-LK17 | 370 | US20150376607 SEQ ID NO: 45 |
| AAV-LK18 | 371 | US20150376607 SEQ ID NO: 19 |
| AAV-LK18 | 372 | US20150376607 SEQ ID NO: 46 |
| AAV-LK19 | 373 | US20150376607 SEQ ID NO: 20 |
| AAV-LK19 | 374 | US20150376607 SEQ ID NO: 47 |
| AAV-PAEC | 375 | US20150376607 SEQ ID NO: 1 |
| AAV-PAEC | 376 | US20150376607 SEQ ID NO: 48 |
| AAV-PAEC11 | 377 | US20150376607 SEQ ID NO: 26 |
| AAV-PAEC11 | 378 | US20150376607 SEQ ID NO: 54 |
| AAV-PAEC12 | 379 | US20150376607 SEQ ID NO: 27 |
| AAV-PAEC12 | 380 | US20150376607 SEQ ID NO: 51 |
| AAV-PAEC13 | 381 | US20150376607 SEQ ID NO: 28 |
| AAV-PAEC13 | 382 | US20150376607 SEQ ID NO: 49 |
| AAV-PAEC2 | 383 | US20150376607 SEQ ID NO: 21 |
| AAV-PAEC2 | 384 | US20150376607 SEQ ID NO: 56 |
| AAV-PAEC4 | 385 | US20150376607 SEQ ID NO: 22 |
| AAV-PAEC4 | 386 | US20150376607 SEQ ID NO: 55 |
| AAV-PAEC6 | 387 | US20150376607 SEQ ID NO: 23 |
| AAV-PAEC6 | 388 | US20150376607 SEQ ID NO: 52 |
| AAV-PAEC7 | 389 | US20150376607 SEQ ID NO: 24 |
| AAV-PAEC7 | 390 | US20150376607 SEQ ID NO: 53 |
| AAV-PAEC8 | 391 | US20150376607 SEQ ID NO: 25 |
| AAV-PAEC8 | 392 | US20150376607 SEQ ID NO: 50 |
| AAVpi.1 | 393 | US20150315612 SEQ ID NO: 28 |
| AAVpi.1 | 394 | US20150315612 SEQ ID NO: 93 |
| AAVpi.2 | 395 | US20150315612 SEQ ID NO: 30 |
| AAVpi.2 | 396 | US20150315612 SEQ ID NO: 95 |
| AAVpi.3 | 397 | US20150315612 SEQ ID NO: 29 |
| AAVpi.3 | 398 | US20150315612 SEQ ID NO: 94 |
| AAVrh.10 | 399 | US20150159173 SEQ ID NO: 9 |
| AAVrh.10 | 400 | US20150159173 SEQ ID NO: 25 |
| AAV44.2 | 401 | US20030138772 SEQ ID NO: 59 |
| AAVrh.10 (AAV44.2) | 402 | US20030138772 SEQ ID NO: 81 |
| AAV42.1B | 403 | US20030138772 SEQ ID NO: 90 |
| AAVrh.12 (AAV42.1b) | 404 | US20030138772 SEQ ID NO: 30 |
| AAVrh.13 | 405 | US20150159173 SEQ ID NO: 10 |
| AAVrh.13 | 406 | US20150159173 SEQ ID NO: 26 |
| AAVrh.13 | 407 | US20150315612 SEQ ID NO: 228 |
| AAVrh.13R | 408 | US20150159173 |
| AAV42.3A | 409 | US20030138772 SEQ ID NO: 87 |
| AAVrh.14 (AAV42.3a) | 410 | US20030138772 SEQ ID NO: 32 |
| AAV42.5A | 411 | US20030138772 SEQ ID NO: 89 |
| AAVrh.17 (AAV42.5a) | 412 | US20030138772 SEQ ID NO: 34 |
| AAV42.5B | 413 | US20030138772 SEQ ID NO: 91 |
| AAVrh.18 (AAV42.5b) | 414 | US20030138772 SEQ ID NO: 29 |
| AAV42.6B | 415 | US20030138772 SEQ ID NO: 112 |
| AAVrh.19 (AAV42.6b) | 416 | US20030138772 SEQ ID NO: 38 |
| AAVrh.2 | 417 | US20150159173 SEQ ID NO: 39 |
| AAVrh.2 | 418 | US20150315612 SEQ ID NO: 231 |
| AAVrh.20 | 419 | US20150159173 SEQ ID NO: 1 |
| AAV42.10 | 420 | US20030138772 SEQ ID NO: 106 |
| AAVrh.21 (AAV42.10) | 421 | US20030138772 SEQ ID NO: 35 |
| AAV42.11 | 422 | US20030138772 SEQ ID NO: 108 |
| AAVrh.22 (AAV42.11) | 423 | US20030138772 SEQ ID NO: 37 |
| AAV42.12 | 424 | US20030138772 SEQ ID NO: 113 |
| AAVrh.23 (AAV42.12) | 425 | US20030138772 SEQ ID NO: 58 |
| AAV42.13 | 426 | US20030138772 SEQ ID NO: 86 |
| AAVrh.24 (AAV42.13) | 427 | US20030138772 SEQ ID NO: 31 |
| AAV42.15 | 428 | US20030138772 SEQ ID NO: 84 |
| AAVrh.25 (AAV42.15) | 429 | US20030138772 SEQ ID NO: 28 |
| AAVrh.2R | 430 | US20150159173 |
| AAVrh.31 (AAV223.1) | 431 | US20030138772 SEQ ID NO: 48 |
| AAVC1 | 432 | US20030138772 SEQ ID NO: 60 |
| AAVrh.32 (AAVC1) | 433 | US20030138772 SEQ ID NO: 19 |
| AAVrh.32/33 | 434 | US20150159173 SEQ ID NO: 2 |
| AAVrh.33 (AAVC3) | 435 | US20030138772 SEQ ID NO: 20 |
| AAVC5 | 436 | US20030138772 SEQ ID NO: 62 |
| AAVrh.34 (AAVC5) | 437 | US20030138772 SEQ ID NO: 21 |
| AAVF1 | 438 | US20030138772 SEQ ID NO: 109 |
| AAVrh.35 (AAVF1) | 439 | US20030138772 SEQ ID NO: 22 |
| AAVF3 | 440 | US20030138772 SEQ ID NO: 111 |
| AAVrh.36 (AAVF3) | 441 | US20030138772 SEQ ID NO: 23 |
| AAVrh.37 | 442 | US20030138772 SEQ ID NO: 24 |
| AAVrh.37 | 443 | US20150159173 SEQ ID NO: 40 |
| AAVrh.37 | 444 | US20150315612 SEQ ID NO: 229 |
| AAVrh.37R2 | 445 | US20150159173 |
| AAVrh.38 (AAVLG-4) | 446 | US20150315612 SEQ ID NO: 7 |
| AAVrh.38 (AAVLG-4) | 447 | US20150315612 SEQ ID NO: 86 |
| AAVrh.39 | 448 | US20150159173 SEQ ID NO: 20, US20150315612 SEQ ID NO: 13 |
| AAVrh.39 | 449 | US20150159173 SEQ ID NO: 3, US20150159173 SEQ ID NO: 36, |
| | | US20150315612 SEQ ID NO: 89 |
| AAVrh.40 | 450 | US20150315612 SEQ ID NO: 92 |
| AAVrh.40 (AAVLG-10) | 451 | US20150315612 SEQ ID No: 14 |
| AAVrh.43 (AAVN721-8) | 452 | US20150315612 SEQ ID NO: 43, US20150159173 SEQ ID NO: 21 |
| AAVrh.43 (AAVN721-8) | 453 | US20150315612 SEQ ID NO: 163, US20150159173 SEQ ID NO: 37 |
| AAVrh.44 | 454 | US20150315612 SEQ ID NO: 34 |
| AAVrh.44 | 455 | US20150315612 SEQ ID NO: 111 |
| AAVrh.45 | 456 | US20150315612 SEQ ID NO: 41 |
| AAVrh.45 | 457 | US20150315612 SEQ ID NO: 109 |
| AAVrh.46 | 458 | US20150159173 SEQ ID NO: 22, US20150315612 SEQ ID NO: 19 |
| AAVrh.46 | 459 | US20150159173 SEQ ID NO: 4, US20150315612 SEQ ID NO: 101 |
| AAVrh.47 | 460 | US20150315612 SEQ ID NO: 38 |
| AAVrh.47 | 461 | US20150315612 SEQ ID NO: 118 |
| AAVrh.48 | 462 | US20150159173 SEQ ID NO: 44, US20150315612 SEQ ID NO: 115 |
| AAVrh.48.1 | 463 | US20150159173 |
| AAVrh.48.1.2 | 464 | US20150159173 |
| AAVrh.48.2 | 465 | US20150159173 |
| AAVrh.48 (AAV1-7) | 466 | US20150315612 SEQ ID NO: 32 |
| AAVrh.49 (AAV1-8) | 467 | US20150315612 SEQ ID NO: 25 |
| AAVrh.49 (AAV1-8) | 468 | US20150315612 SEQ ID NO: 103 |
| AAVrh.50 (AAV2-4) | 469 | US20150315612 SEQ ID NO: 23 |
| AAVrh.50 (AAV2-4) | 470 | US20150315612 SEQ ID NO: 108 |
| AAVrh.51 (AAV2-5) | 471 | US20150315612 SEQ ID No: 22 |
| AAVrh.51 (AAV2-5) | 472 | US20150315612 SEQ ID NO: 104 |
| AAVrh.52 (AAV3-9) | 473 | US20150315612 SEQ ID NO: 18 |
| AAVrh.52 (AAV3-9) | 474 | US20150315612 SEQ ID NO: 96 |
| AAVrh.53 | 475 | US20150315612 SEQ ID NO: 97 |
| AAVrh.53 (AAV3-11) | 476 | US20150315612 SEQ ID NO: 17 |
| AAVrh.53 (AAV3-11) | 477 | US20150315612 SEQ ID NO: 186 |
| AAVrh.54 | 478 | US20150315612 SEQ ID NO: 40 |
| AAVrh.54 | 479 | US20150159173 SEQ ID NO: 49, US20150315612 SEQ ID NO: 116 |
| AAVrh.55 | 480 | US20150315612 SEQ ID NO: 37 |
| AAVrh.55 (AAV4-19) | 481 | US20150315612 SEQ ID NO: 117 |
| AAVrh.56 | 482 | US20150315612 SEQ ID NO: 54 |
| AAVrh.56 | 483 | US20150315612 SEQ ID NO: 152 |
| AAVrh.57 | 484 | US20150315612 SEQ ID NO: 26 |
| AAVrh.57 | 485 | US20150315612 SEQ ID NO: 105 |
| AAVrh.58 | 486 | US20150315612 SEQ ID NO: 27 |
| AAVrh.58 | 487 | US20150159173 SEQ ID NO: 48, US20150315612 SEQ ID NO: 106 |
| AAVrh.58 | 488 | US20150315612 SEQ ID NO: 232 |
| AAVrh.59 | 489 | US20150315612 SEQ ID NO: 42 |
| AAVrh.59 | 490 | US20150315612 SEQ ID NO: 110 |
| AAVrh.60 | 491 | US20150315612 SEQ ID NO: 31 |
| AAVrh.60 | 492 | US20150315612 SEQ ID NO: 120 |
| AAVrh.61 | 493 | US20150315612 SEQ ID NO: 107 |
| AAVrh.61 (AAV2-3) | 494 | US20150315612 SEQ ID NO: 21 |
| AAVrh.62 (AAV2-15) | 495 | US20150315612 SEQ ID No: 33 |
| AAVrh.62 (AAV2-15) | 496 | US20150315612 SEQ ID NO: 114 |
| AAVrh.64 | 497 | US20150315612 SEQ ID No: 15 |
| AAVrh.64 | 498 | US20150159173 SEQ ID NO: 43, US20150315612 SEQ ID NO: 99 |
| AAVrh.64 | 499 | US20150315612 SEQ ID NO: 233 |
| AAVRh.64R1 | 500 | US20150159173 |
| AAVRh.64R2 | 501 | US20150159173 |
| AAVrh.65 | 502 | US20150315612 SEQ ID NO: 35 |
| AAVrh.65 | 503 | US20150315612 SEQ ID NO: 112 |
| AAVrh.67 | 504 | US20150315612 SEQ ID NO: 36 |
| AAVrh.67 | 505 | US20150315612 SEQ ID NO: 230 |
| AAVrh.67 | 506 | US20150159173 SEQ ID NO: 47, US20150315612 SEQ ID NO: 113 |
| AAVrh.68 | 507 | US20150315612 SEQ ID NO: 16 |
| AAVrh.68 | 508 | US20150315612 SEQ ID NO: 100 |
| AAVrh.69 | 509 | US20150315612 SEQ ID NO: 39 |
| AAVrh.69 | 510 | US20150315612 SEQ ID NO: 119 |
| AAVrh.70 | 511 | US20150315612 SEQ ID NO: 20 |
| AAVrh.70 | 512 | US20150315612 SEQ ID NO: 98 |
| AAVrh.71 | 513 | US20150315612 SEQ ID NO: 162 |
| AAVrh.72 | 514 | US20150315612 SEQ ID NO: 9 |
| AAVrh.73 | 515 | US20150159173 SEQ ID NO: 5 |
| AAVrh.74 | 516 | US20150159173 SEQ ID NO: 6 |
| AAVrh.8 | 517 | US20150159173 SEQ ID NO: 41 |
| AAVrh.8 | 518 | US20150315612 SEQ ID NO: 235 |
| AAVrh.8R | 519 | US20150159173, WO2015168666 SEQ ID NO: 9 |
| AAVrh.8R A586R mutant | 520 | WO2015168666 SEQ ID NO: 10 |
| AAVrh.8R R533A mutant | 521 | WO2015168666 SEQ ID NO: 11 |
| BAAV (bovine AAV) | 522 | U.S. Pat. No. 9,193,769 SEQ ID NO: 8 |
| BAAV (bovine AAV) | 523 | U.S. Pat. No. 9,193,769 SEQ ID NO: 10 |
| BAAV (bovine AAA) | 524 | U.S. Pat. No. 9,193,769 SEQ ID NO: 4 |
| BAAV (bovine AAV) | 525 | U.S. Pat. No. 9,193,769 SEQ ID NO: 2 |
| BAAV (bovine AAV) | 526 | U.S. Pat. No. 9,193,769 SEQ ID NO: 6 |
| BAAV (bovine AAV) | 527 | U.S. Pat. No. 9,193,769 SEQ ID NO: 1 |
| BAAV (bovine AAV) | 528 | U.S. Pat. No. 9,193,769 SEQ ID NO: 5 |
| BAAV (bovine AAV) | 529 | U.S. Pat. No. 9,193,769 SEQ ID NO: 3 |
| BAAV (bovine AAV) | 530 | U.S. Pat. No. 9,193,769 SEQ ID NO: 11 |
| BAAV (bovine AAA) | 531 | U.S. Pat. No. 7,427,396 SEQ ID NO: 5 |
| BAAV (bovine AAV) | 532 | U.S. Pat. No. 7,427,396 SEQ ID NO: 6 |
| BAAV (bovine AAV) | 533 | U.S. Pat. No. 9,193,769 SEQ ID NO: 7 |
| BAAV (bovine AAV) | 534 | U.S. Pat. No. 9,193,769 SEQ ID NO: 9 |
| BNP61 AAV | 535 | US20150238550 SEQ ID NO: 1 |
| BNP61 AAV | 536 | US20150238550 SEQ ID NO: 2 |
| BNP62 AAV | 537 | US20150238550 SEQ ID NO: 3 |
| BNP63 AAV | 538 | US20150238550 SEQ ID NO: 4 |
| caprine AAV | 539 | U.S. Pat. No. 7,427,396 SEQ ID NO: 3 |
| caprine AAV | 540 | U.S. Pat. No. 7,427,396 SEQ ID NO: 4 |
| true type AAV (ttAAV) | 541 | WO2015121501 SEQ ID NO: 2 |
| AAAV (Avian AAV) | 542 | U.S. Pat. No. 9,238,800 SEQ ID NO: 12 |
| AAAV (Avian AAV) | 543 | U.S. Pat. No. 9,238,800 SEQ ID NO: 2 |
| AAAV (Avian AAV) | 544 | U.S. Pat. No. 9,238,800 SEQ ID NO: 6 |
| AAAV (Avian AAV) | 545 | U.S. Pat. No. 9,238,800 SEQ ID NO: 4 |
| AAAV (Avian AAV) | 546 | U.S. Pat. No. 9,238,800 SEQ ID NO: 8 |
| AAAV (Avian AAV) | 547 | U.S. Pat. No. 9,238,800 SEQ ID NO: 14 |
| AAAV (Avian AAV) | 548 | U.S. Pat. No. 9,238,800 SEQ ID NO: 10 |
| AAAV (Avian AAV) | 549 | U.S. Pat. No. 9,238,800 SEQ ID NO: 15 |
| AAAV (Avian AAV) | 550 | U.S. Pat. No. 9,238,800 SEQ ID NO: 5 |
| AAAV (Avian AAV) | 551 | U.S. Pat. No. 9,238,800 SEQ ID NO: 9 |
| AAAV (Avian AAV) | 552 | U.S. Pat. No. 9,238,800 SEQ ID NO: 3 |
| AAAV (Avian AAV) | 553 | U.S. Pat. No. 9,238,800 SEQ ID NO: 7 |
| AAAV (Avian AAV) | 554 | U.S. Pat. No. 9,238,800 SEQ ID NO: 11 |
| AAAV (Avian AAV) | 555 | U.S. Pat. No. 9,238,800 SEQ ID NO: 13 |
| AAAV (Avian AAV) | 556 | U.S. Pat. No. 9,238,800 SEQ ID NO: 1 |
| AAV Shuffle 100-1 | 557 | US20160017295 SEQ ID NO: 23 |
| AAV Shuffle 100-1 | 558 | US20160017295 SEQ ID NO: 11 |
| AAV Shuffle 100-2 | 559 | US20160017295 SEQ ID NO: 37 |
| AAV Shuffle 100-2 | 560 | US20160017295 SEQ ID NO: 29 |
| AAV Shuffle 100-3 | 561 | US20160017295 SEQ ID NO: 24 |
| AAV Shuffle 100-3 | 562 | US20160017295 SEQ ID NO: 12 |
| AAV Shuffle 100-7 | 563 | US20160017295 SEQ ID NO: 25 |
| AAV Shuffle 100-7 | 564 | US20160017295 SEQ ID NO: 13 |
| AAV Shuffle 10-2 | 565 | US20160017295 SEQ ID NO: 34 |
| AAV Shuffle 10-2 | 566 | US20160017295 SEQ ID NO: 26 |
| AAV Shuffle 10-6 | 567 | US20160017295 SEQ ID NO: 35 |
| AAV Shuffle 10-6 | 568 | US20160017295 SEQ ID NO: 27 |
| AAV Shuffle 10-8 | 569 | US20160017295 SEQ ID NO: 36 |
| AAV Shuffle 10-8 | 570 | US20160017295 SEQ ID NO: 28 |
| AAV SM 100-10 | 571 | US20160017295 SEQ ID NO: 41 |
| AAV SM 100-10 | 572 | US20160017295 SEQ ID NO: 33 |
| AAV SM 100-3 | 573 | US20160017295 SEQ ID NO: 40 |
| AAV SM 100-3 | 574 | US20160017295 SEQ ID NO: 32 |
| AAV SM 10-1 | 575 | US20160017295 SEQ ID NO: 38 |
| AAV SM 10-1 | 576 | US20160017295 SEQ ID NO: 30 |
| AAV SM 10-2 | 577 | US20160017295 SEQ ID NO: 10 |
| AAV SM 10-2 | 578 | US20160017295 SEQ ID NO: 22 |
| AAV SM 10-8 | 579 | US20160017295 SEQ ID NO: 39 |
| AAV SM 10-8 | 580 | US20160017295 SEQ ID NO: 31 |
| AAVF1/HSC1 | 581 | WO2016049230 SEQ ID NO: 20 |
| AAVF2/HSC2 | 582 | WO2016049230 SEQ ID NO: 21 |
| AAVF3/HSC3 | 583 | WO2016049230 SEQ ID NO: 22 |
| AAVF4/HSC4 | 584 | WO2016049230 SEQ ID NO: 23 |
| AAVF5/HSC5 | 585 | WO2016049230 SEQ ID NO: 25 |
| AAVF6/HSC6 | 586 | WO2016049230 SEQ ID NO: 24 |
| AAVF7/HSC7 | 587 | WO2016049230 SEQ ID NO: 27 |
| AAVF8/HSC8 | 588 | WO2016049230 SEQ ID NO: 28 |
| AAVF9/HSC9 | 589 | WO2016049230 SEQ ID NO: 29 |
| AAVF11/HSC11 | 590 | WO2016049230 SEQ ID NO: 26 |
| AAVF12/HSC12 | 591 | WO2016049230 SEQ ID NO: 30 |
| AAVF13/HSC13 | 592 | WO2016049230 SEQ ID NO: 31 |
| AAVF14/HSC14 | 593 | WO2016049230 SEQ ID NO: 32 |
| AAVF15/HSC15 | 594 | WO2016049230 SEQ ID NO: 33 |
| AAVF16/HSC16 | 595 | WO2016049230 SEQ ID NO: 34 |
| AAVF17/HSC17 | 596 | WO2016049230 SEQ ID NO: 35 |
| AAVF1/HSC1 | 597 | WO2016049230 SEQ ID NO: 2 |
| AAVF2/HSC2 | 598 | WO2016049230 SEQ ID NO: 3 |
| AAVF3/HSC3 | 599 | WO2016049230 SEQ ID NO: 5 |
| AAVF4/HSC4 | 600 | WO2016049230 SEQ ID NO: 6 |
| AAVF5/HSC5 | 601 | WO2016049230 SEQ ID NO: 11 |
| AAVF6/HSC6 | 602 | WO2016049230 SEQ ID NO: 7 |
| AAVF7/HSC7 | 603 | WO2016049230 SEQ ID NO: 8 |
| AAVF8/HSC8 | 604 | WO2016049230 SEQ ID NO: 9 |
| AAVF9/HSC9 | 605 | WO2016049230 SEQ ID NO: 10 |
| AAVF11/HSC11 | 606 | WO2016049230 SEQ ID NO: 4 |
| AAVF12/HSC12 | 607 | WO2016049230 SEQ ID NO: 12 |
| AAVF13/HSC13 | 608 | WO2016049230 SEQ ID NO: 14 |
| AAVF14/HSC14 | 609 | WO2016049230 SEQ ID NO: 15 |
| AAVF15/HSC15 | 610 | WO2016049230 SEQ ID NO: 16 |
| AAVF16/HSC16 | 611 | WO2016049230 SEQ ID NO: 17 |
| AAVF17/HSC17 | 612 | WO2016049230 SEQ ID NO: 13 |
| AAV CBr-E1 | 613 | U.S. Pat. No. 8,734,809 SEQ ID NO: 13 |
| AAV CBr-E2 | 614 | U.S. Pat. No. 8,734,809 SEQ ID NO: 14 |
| AAV CBr-E3 | 615 | U.S. Pat. No. 8,734,809 SEQ ID NO: 15 |
| AAV CBr-E4 | 616 | U.S. Pat. No. 8,734,809 SEQ ID NO: 16 |
| AAV CBr-E5 | 617 | U.S. Pat. No. 8,734,809 SEQ ID NO: 17 |
| AAV CBr-e5 | 618 | U.S. Pat. No. 8,734,809 SEQ ID NO: 18 |
| AAV CBr-E6 | 619 | U.S. Pat. No. 8,734,809 SEQ ID NO: 19 |
| AAV CBr-E7 | 620 | U.S. Pat. No. 8,734,809 SEQ ID NO: 20 |
| AAV CBr-E8 | 621 | U.S. Pat. No. 8,734,809 SEQ ID NO: 21 |
| AAV CLv-D1 | 622 | U.S. Pat. No. 8,734,809 SEQ ID NO: 22 |
| AAV CLv-D2 | 623 | U.S. Pat. No. 8,734,809 SEQ ID NO: 23 |
| AAV CLv-D3 | 624 | U.S. Pat. No. 8,734,809 SEQ ID NO: 24 |
| AAV CLv-D4 | 625 | U.S. Pat. No. 8,734,809 SEQ ID NO: 25 |
| AAV CLv-D5 | 626 | U.S. Pat. No. 8,734,809 SEQ ID NO: 26 |
| AAV CLv-D6 | 627 | U.S. Pat. No. 8,734,809 SEQ ID NO: 27 |
| AAV CLv-D7 | 628 | U.S. Pat. No. 8,734,809 SEQ ID NO: 28 |
| AAV CLv-D8 | 629 | U.S. Pat. No. 8,734,809 SEQ ID NO: 29 |
| AAV CLv-E1 | 630 | U.S. Pat. No. 8,734,809 SEQ ID NO: 13 |
| AAV CLv-R1 | 631 | U.S. Pat. No. 8,734,809 SEQ ID NO: 30 |
| AAV CLv-R2 | 632 | U.S. Pat. No. 8,734,809 SEQ ID NO: 31 |
| AAV CLv-R3 | 633 | U.S. Pat. No. 8,734,809 SEQ ID NO: 32 |
| AAV CLv-R4 | 634 | U.S. Pat. No. 8,734,809 SEQ ID NO: 33 |
| AAV CLv-R5 | 635 | U.S. Pat. No. 8,734,809 SEQ ID NO: 34 |
| AAV CLv-R6 | 636 | U.S. Pat. No. 8,734,809 SEQ ID NO: 35 |
| AAV CLv-R7 | 637 | U.S. Pat. No. 8,734,809 SEQ ID NO: 36 |
| AAV CLv-R8 | 638 | U.S. Pat. No. 8,734,809 SEQ ID NO: 37 |
| AAV CLv-R9 | 639 | U.S. Pat. No. 8,734,809 SEQ ID NO: 38 |
| AAV CLg-F1 | 640 | U.S. Pat. No. 8,734,809 SEQ ID NO: 39 |
| AAV CLg-F2 | 641 | U.S. Pat. No. 8,734,809 SEQ ID NO: 40 |
| AAV CLg-F3 | 642 | U.S. Pat. No. 8,734,809 SEQ ID NO: 41 |
| AAV CLg-F4 | 643 | U.S. Pat. No. 8,734,809 SEQ ID NO: 42 |
| AAV CLg-F5 | 644 | U.S. Pat. No. 8,734,809 SEQ ID NO: 43 |
| AAV CLg-F6 | 645 | U.S. Pat. No. 8,734,809 SEQ ID NO: 43 |
| AAV CLg-F7 | 646 | U.S. Pat. No. 8,734,809 SEQ ID NO: 44 |
| AAV CLg-F8 | 647 | U.S. Pat. No. 8,734,809 SEQ ID NO: 43 |
| AAV CSp-1 | 648 | U.S. Pat. No. 8,734,809 SEQ ID NO: 45 |
| AAV CSp-10 | 649 | U.S. Pat. No. 8,734,809 SEQ ID NO: 46 |
| AAV CSp-11 | 650 | U.S. Pat. No. 8,734,809 SEQ ID NO: 47 |
| AAV CSp-2 | 651 | U.S. Pat. No. 8,734,809 SEQ ID NO: 48 |
| AAV CSp-3 | 652 | U.S. Pat. No. 8,734,809 SEQ ID NO: 49 |
| AAV CSp-4 | 653 | U.S. Pat. No. 8,734,809 SEQ ID NO: 50 |
| AAV CSp-6 | 654 | U.S. Pat. No. 8,734,809 SEQ ID NO: 51 |
| AAV CSp-7 | 655 | U.S. Pat. No. 8,734,809 SEQ ID NO: 52 |
| AAV CSp-8 | 656 | U.S. Pat. No. 8,734,809 SEQ ID NO: 53 |
| AAV CSp-9 | 657 | U.S. Pat. No. 8,734,809 SEQ ID NO: 54 |
| AAV CHt-2 | 658 | U.S. Pat. No. 8,734,809 SEQ ID NO: 55 |
| AAV CHt-3 | 659 | U.S. Pat. No. 8,734,809 SEQ ID NO: 56 |
| AAV CKd-1 | 660 | U.S. Pat. No. 8,734,809 SEQ ID NO: 57 |
| AAV CKd-10 | 661 | U.S. Pat. No. 8,734,809 SEQ ID NO: 58 |
| AAV CKd-2 | 662 | U.S. Pat. No. 8,734,809 SEQ ID NO: 59 |
| AAV CKd-3 | 663 | U.S. Pat. No. 8,734,809 SEQ ID NO: 60 |
| AAV CKd-4 | 664 | U.S. Pat. No. 8,734,809 SEQ ID NO: 61 |
| AAV CKd-6 | 665 | U.S. Pat. No. 8,734,809 SEQ ID NO: 62 |
| AAV CKd-7 | 666 | U.S. Pat. No. 8,734,809 SEQ ID NO: 63 |
| AAV CKd-8 | 667 | U.S. Pat. No. 8,734,809 SEQ ID NO: 64 |
| AAV CLv-1 | 668 | U.S. Pat. No. 8,734,809 SEQ ID NO: 65 |
| AAV CLv-12 | 669 | U.S. Pat. No. 8,734,809 SEQ ID NO: 66 |
| AAV CLv-13 | 670 | U.S. Pat. No. 8,734,809 SEQ ID NO: 67 |
| AAV CLv-2 | 671 | U.S. Pat. No. 8,734,809 SEQ ID NO: 68 |
| AAV CLv-3 | 672 | U.S. Pat. No. 8,734,809 SEQ ID NO: 69 |
| AAV CLv-4 | 673 | U.S. Pat. No. 8,734,809 SEQ ID NO: 70 |
| AAV CLv-6 | 674 | U.S. Pat. No. 8,734,809 SEQ ID NO: 71 |
| AAV CLv-8 | 675 | U.S. Pat. No. 8,734,809 SEQ ID NO: 72 |
| AAV CKd-B1 | 676 | U.S. Pat. No. 8,734,809 SEQ ID NO: 73 |
| AAV CKd-B2 | 677 | U.S. Pat. No. 8,734,809 SEQ ID NO: 74 |
| AAV CKd-B3 | 678 | U.S. Pat. No. 8,734,809 SEQ ID NO: 75 |
| AAV CKd-B4 | 679 | U.S. Pat. No. 8,734,809 SEQ ID NO: 76 |
| AAV CKd-B5 | 680 | U.S. Pat. No. 8,734,809 SEQ ID NO: 77 |
| AAV CKd-B6 | 681 | U.S. Pat. No. 8,734,809 SEQ ID NO: 78 |
| AAV CKd-B7 | 682 | U.S. Pat. No. 8,734,809 SEQ ID NO: 79 |
| AAV CKd-B8 | 683 | U.S. Pat. No. 8,734,809 SEQ ID NO: 80 |
| AAV CKd-H1 | 684 | U.S. Pat. No. 8,734,809 SEQ ID NO: 81 |
| AAV CKd-H2 | 685 | U.S. Pat. No. 8,734,809 SEQ ID NO: 82 |
| AAV CKd-H3 | 686 | U.S. Pat. No. 8,734,809 SEQ ID NO: 83 |
| AAV CKd-H4 | 687 | U.S. Pat. No. 8,734,809 SEQ ID NO: 84 |
| AAV CKd-H5 | 688 | U.S. Pat. No. 8,734,809 SEQ ID NO: 85 |
| AAV CKd-H6 | 689 | U.S. Pat. No. 8,734,809 SEQ ID NO: 77 |
| AAV CHt-1 | 690 | U.S. Pat. No. 8,734,809 SEQ ID NO: 86 |
| AAV CLv1-1 | 691 | U.S. Pat. No. 8,734,809 SEQ ID NO: 171 |
| AAV CLv1-2 | 692 | U.S. Pat. No. 8,734,809 SEQ ID NO: 172 |
| AAV CLv1-3 | 693 | U.S. Pat. No. 8,734,809 SEQ ID NO: 173 |
| AAV CLv1-4 | 694 | U.S. Pat. No. 8,734,809 SEQ ID NO: 174 |
| AAV Clv1-7 | 695 | U.S. Pat. No. 8,734,809 SEQ ID NO: 175 |
| AAV Clv1-8 | 696 | U.S. Pat. No. 8,734,809 SEQ ID NO: 176 |
| AAV Clv 1-9 | 697 | U.S. Pat. No. 8,734,809 SEQ ID NO: 177 |
| AAV Clv1-10 | 698 | U.S. Pat. No. 8,734,809 SEQ ID NO: 178 |
| AAV.VR-355 | 699 | U.S. Pat. No. 8,734,809 SEQ ID NO: 181 |
| AAV.hu.48R3 | 700 | U.S. Pat. No. 8,734,809 SEQ ID NO: 183 |
| AAV CBr-E1 | 701 | U.S. Pat. No. 8,734,809 SEQ ID NO: 87 |
| AAV CBr-E2 | 702 | U.S. Pat. No. 8,734,809 SEQ ID NO: 88 |
| AAV CBr-E3 | 703 | U.S. Pat. No. 8,734,809 SEQ ID NO: 89 |
| AAV CBr-E4 | 704 | U.S. Pat. No. 8,734,809 SEQ ID NO: 90 |
| AAV CBr-E5 | 705 | U.S. Pat. No. 8,734,809 SEQ ID NO: 91 |
| AAV CBr-e5 | 706 | U.S. Pat. No. 8,734,809 SEQ ID NO: 92 |
| AAV CBr-E6 | 707 | U.S. Pat. No. 8,734,809 SEQ ID NO: 93 |
| AAV CBr-E7 | 708 | U.S. Pat. No. 8,734,809 SEQ ID NO: 94 |
| AAV CBr-E8 | 709 | U.S. Pat. No. 8,734,809 SEQ ID NO: 95 |
| AAV CLv-D1 | 710 | U.S. Pat. No. 8,734,809 SEQ ID NO: 96 |
| AAV CLv-D2 | 711 | U.S. Pat. No. 8,734,809 SEQ ID NO: 97 |
| AAV CLv-D3 | 712 | U.S. Pat. No. 8,734,809 SEQ ID NO: 98 |
| AAV CLv-D4 | 713 | U.S. Pat. No. 8,734,809 SEQ ID NO: 99 |
| AAV CLv-D5 | 714 | U.S. Pat. No. 8,734,809 SEQ ID NO: 100 |
| AAV CLv-D6 | 715 | U.S. Pat. No. 8,734,809 SEQ ID NO: 101 |
| AAV CLv-D7 | 716 | U.S. Pat. No. 8,734,809 SEQ ID NO: 102 |
| AAV CLv-D8 | 717 | U.S. Pat. No. 8,734,809 SEQ ID NO: 103 |
| AAV CLv-E1 | 718 | U.S. Pat. No. 8,734,809 SEQ ID NO: 87 |
| AAV CLv-R1 | 719 | U.S. Pat. No. 8,734,809 SEQ ID NO: 104 |
| AAV CLv-R2 | 720 | U.S. Pat. No. 8,734,809 SEQ ID NO: 105 |
| AAV CLv-R3 | 721 | U.S. Pat. No. 8,734,809 SEQ ID NO: 106 |
| AAV CLv-R4 | 722 | U.S. Pat. No. 8,734,809 SEQ ID NO: 107 |
| AAV CLv-R5 | 723 | U.S. Pat. No. 8,734,809 SEQ ID NO: 108 |
| AAV CLv-R6 | 724 | U.S. Pat. No. 8,734,809 SEQ ID NO: 109 |
| AAV CLv-R7 | 725 | U.S. Pat. No. 8,734,809 SEQ ID NO: 110 |
| AAV CLv-R8 | 726 | U.S. Pat. No. 8,734,809 SEQ ID NO: 111 |
| AAV CLv-R9 | 727 | U.S. Pat. No. 8,734,809 SEQ ID NO: 112 |
| AAV CLg-F1 | 728 | U.S. Pat. No. 8,734,809 SEQ ID NO: 113 |
| AAV CLg-F2 | 729 | U.S. Pat. No. 8,734,809 SEQ ID NO: 114 |
| AAV CLg-F3 | 730 | U.S. Pat. No. 8,734,809 SEQ ID NO: 115 |
| AAV CLg-F4 | 731 | U.S. Pat. No. 8,734,809 SEQ ID NO: 116 |
| AAV CLg-F5 | 732 | U.S. Pat. No. 8,734,809 SEQ ID NO: 117 |
| AAV CLg-F6 | 733 | U.S. Pat. No. 8,734,809 SEQ ID NO: 117 |
| AAV CLg-F7 | 734 | U.S. Pat. No. 8,734,809 SEQ ID NO: 118 |
| AAV CLg-F8 | 735 | U.S. Pat. No. 8,734,809 SEQ ID NO: 117 |
| AAV CSp-1 | 736 | U.S. Pat. No. 8,734,809 SEQ ID NO: 119 |
| AAV CSp-10 | 737 | U.S. Pat. No. 8,734,809 SEQ ID NO: 120 |
| AAV CSp-11 | 738 | U.S. Pat. No. 8,734,809 SEQ ID NO: 121 |
| AAV CSp-2 | 739 | U.S. Pat. No. 8,734,809 SEQ ID NO: 122 |
| AAV CSp-3 | 740 | U.S. Pat. No. 8,734,809 SEQ ID NO: 123 |
| AAV CSp-4 | 741 | U.S. Pat. No. 8,734,809 SEQ ID NO: 124 |
| AAV CSp-6 | 742 | U.S. Pat. No. 8,734,809 SEQ ID NO: 125 |
| AAV CSp-7 | 743 | U.S. Pat. No. 8,734,809 SEQ ID NO: 126 |
| AAV CSp-8 | 744 | U.S. Pat. No. 8,734,809 SEQ ID NO: 127 |
| AAV CSp-9 | 745 | U.S. Pat. No. 8,734,809 SEQ ID NO: 128 |
| AAV CHt-2 | 746 | U.S. Pat. No. 8,734,809 SEQ ID NO: 129 |
| AAV CHt-3 | 747 | U.S. Pat. No. 8,734,809 SEQ ID NO: 130 |
| AAV CKd-1 | 748 | U.S. Pat. No. 8,734,809 SEQ ID NO: 131 |
| AAV CKd-10 | 749 | U.S. Pat. No. 8,734,809 SEQ ID NO: 132 |
| AAV CKd-2 | 750 | U.S. Pat. No. 8,734,809 SEQ ID NO: 133 |
| AAV CKd-3 | 751 | U.S. Pat. No. 8,734,809 SEQ ID NO: 134 |
| AAV CKd-4 | 752 | U.S. Pat. No. 8,734,809 SEQ ID NO: 135 |
| AAV CKd-6 | 753 | U.S. Pat. No. 8,734,809 SEQ ID NO: 136 |
| AAV CKd-7 | 754 | U.S. Pat. No. 8,734,809 SEQ ID NO: 137 |
| AAV CKd-8 | 755 | U.S. Pat. No. 8,734,809 SEQ ID NO: 138 |
| AAV CLv-1 | 756 | U.S. Pat. No. 8,734,809 SEQ ID NO: 139 |
| AAV CLv-12 | 757 | U.S. Pat. No. 8,734,809 SEQ ID NO: 140 |
| AAV CLv-13 | 758 | U.S. Pat. No. 8,734,809 SEQ ID NO: 141 |
| AAV CLv-2 | 759 | U.S. Pat. No. 8,734,809 SEQ ID NO: 142 |
| AAV CLv-3 | 760 | U.S. Pat. No. 8,734,809 SEQ ID NO: 143 |
| AAV CLv-4 | 761 | U.S. Pat. No. 8,734,809 SEQ ID NO: 144 |
| AAV CLv-6 | 762 | U.S. Pat. No. 8,734,809 SEQ ID NO: 145 |
| AAV CLv-8 | 763 | U.S. Pat. No. 8,734,809 SEQ ID NO: 146 |
| AAV CKd-B1 | 764 | U.S. Pat. No. 8,734,809 SEQ ID NO: 147 |
| AAV CKd-B2 | 765 | U.S. Pat. No. 8,734,809 SEQ ID NO: 148 |
| AAV CKd-B3 | 766 | U.S. Pat. No. 8,734,809 SEQ ID NO: 149 |
| AAV CKd-B4 | 767 | U.S. Pat. No. 8,734,809 SEQ ID NO: 150 |
| AAV CKd-B5 | 768 | U.S. Pat. No. 8,734,809 SEQ ID NO: 151 |
| AAV CKd-B6 | 769 | U.S. Pat. No. 8,734,809 SEQ ID NO: 152 |
| AAV CKd-B7 | 770 | U.S. Pat. No. 8,734,809 SEQ ID NO: 153 |
| AAV CKd-B8 | 771 | U.S. Pat. No. 8,734,809 SEQ ID NO: 154 |
| AAV CKd-H1 | 772 | U.S. Pat. No. 8,734,809 SEQ ID NO: 155 |
| AAV CKd-H2 | 773 | U.S. Pat. No. 8,734,809 SEQ ID NO: 156 |
| AAV CKd-H3 | 774 | U.S. Pat. No. 8,734,809 SEQ ID NO: 157 |
| AAV CKd-H4 | 775 | U.S. Pat. No. 8,734,809 SEQ ID NO: 158 |
| AAV CKd-H5 | 776 | U.S. Pat. No. 8,734,809 SEQ ID NO: 159 |
| AAV CKd-H6 | 777 | U.S. Pat. No. 8,734,809 SEQ ID NO: 151 |
| AAV CHt-1 | 778 | U.S. Pat. No. 8,734,809 SEQ ID NO: 160 |
| AAV CHt-P2 | 779 | WO2016065001 SEQ ID NO: 1 |
| AAV CHt-P5 | 780 | WO2016065001 SEQ ID NO: 2 |
| AAV CHt-P9 | 781 | WO2016065001 SEQ ID NO: 3 |
| AAV CBr-7.1 | 782 | WO2016065001 SEQ ID NO: 4 |
| AAV CBr-7.2 | 783 | WO2016065001 SEQ ID NO: 5 |
| AAV CBr-7.3 | 784 | WO2016065001 SEQ ID NO: 6 |
| AAV CBr-7.4 | 785 | WO2016065001 SEQ ID NO: 7 |
| AAV CBr-7.5 | 786 | WO2016065001 SEQ ID NO: 8 |
| AAV CBr-7.7 | 787 | WO2016065001 SEQ ID NO: 9 |
| AAV CBr-7.8 | 788 | WO2016065001 SEQ ID NO: 10 |
| AAV CBr-7.10 | 789 | WO2016065001 SEQ ID NO: 11 |
| AAV CKd-N3 | 790 | WO2016065001 SEQ ID NO: 12 |
| AAV CKd-N4 | 791 | WO2016065001 SEQ ID NO: 13 |
| AAV CKd-N9 | 792 | WO2016065001 SEQ ID NO: 14 |
| AAV CLv-L4 | 793 | WO2016065001 SEQ ID NO: 15 |
| AAV CLv-L5 | 794 | WO2016065001 SEQ ID NO: 16 |
| AAV CLv-L6 | 795 | WO2016065001 SEQ ID NO: 17 |
| AAV CLv-K1 | 796 | WO2016065001 SEQ ID NO: 18 |
| AAV CLv-K3 | 797 | WO2016065001 SEQ ID NO: 19 |
| AAV CLv-K6 | 798 | WO2016065001 SEQ ID NO: 20 |
| AAV CLv-M1 | 799 | WO2016065001 SEQ ID NO: 21 |
| AAV CLv-M11 | 800 | WO2016065001 SEQ ID NO: 22 |
| AAV CLv-M2 | 801 | WO2016065001 SEQ ID NO: 23 |
| AAV CLv-M5 | 802 | WO2016065001 SEQ ID NO: 24 |
| AAV CLv-M6 | 803 | WO2016065001 SEQ ID NO: 25 |
| AAV CLv-M7 | 804 | WO2016065001 SEQ ID NO: 26 |
| AAV CLv-M8 | 805 | WO2016065001 SEQ ID NO: 27 |
| AAV CLv-M9 | 806 | WO2016065001 SEQ ID NO: 28 |
| AAV CHt-P1 | 807 | WO2016065001 SEQ ID NO: 29 |
| AAV CHt-P6 | 808 | WO2016065001 SEQ ID NO: 30 |
| AAV CHt-P8 | 809 | WO2016065001 SEQ ID NO: 31 |
| AAV CHt-6.1 | 810 | WO2016065001 SEQ ID NO: 32 |
| AAV CHt-6.10 | 811 | WO2016065001 SEQ ID NO: 33 |
| AAV CHt-6.5 | 812 | WO2016065001 SEQ ID NO: 34 |
| AAV CHt-6.6 | 813 | WO2016065001 SEQ ID NO: 35 |
| AAV CHt-6.7 | 814 | WO2016065001 SEQ ID NO: 36 |
| AAV CHt-6.8 | 815 | WO2016065001 SEQ ID NO: 37 |
| AAV CSp-8.10 | 816 | WO2016065001 SEQ ID NO: 38 |
| AAV CSp-8.2 | 817 | WO2016065001 SEQ ID NO: 39 |
| AAV CSp-8.4 | 818 | WO2016065001 SEQ ID NO: 40 |
| AAV CSp-8.5 | 819 | WO2016065001 SEQ ID NO: 41 |
| AAV CSp-8.6 | 820 | WO2016065001 SEQ ID NO: 42 |
| AAV CSp-8.7 | 821 | WO2016065001 SEQ ID NO: 43 |
| AAV CSp-8.8 | 822 | WO2016065001 SEQ ID NO: 44 |
| AAV CSp-8.9 | 823 | WO2016065001 SEQ ID NO: 45 |
| AAV CBr-B7.3 | 824 | WO2016065001 SEQ ID NO: 46 |
| AAV CBr-B7.4 | 825 | WO2016065001 SEQ ID NO: 47 |
| AAV3B | 826 | WO2016065001 SEQ ID NO: 48 |
| AAV4 | 827 | WO2016065001 SEQ ID NO: 49 |
| AAV5 | 828 | WO2016065001 SEQ ID NO: 50 |
| AAV CHt-P2 | 829 | WO2016065001 SEQ ID NO: 51 |
| AAV CHt-P5 | 830 | WO2016065001 SEQ ID NO: 52 |
| AAV CHt-P9 | 831 | WO2016065001 SEQ ID NO: 53 |
| AAV CBr-7.1 | 832 | WO2016065001 SEQ ID NO: 54 |
| AAV CBr-7.2 | 833 | WO2016065001 SEQ ID NO: 55 |
| AAV CBr-7.3 | 834 | WO2016065001 SEQ ID NO: 56 |
| AAV CBr-7.4 | 835 | WO2016065001 SEQ ID NO: 57 |
| AAV CBr-7.5 | 836 | WO2016065001 SEQ ID NO: 58 |
| AAV CBr-7.7 | 837 | WO2016065001 SEQ ID NO: 59 |
| AAV CBr-7.8 | 838 | WO2016065001 SEQ ID NO: 60 |
| AAV CBr-7.10 | 839 | WO2016065001 SEQ ID NO: 61 |
| AAV CKd-N3 | 840 | WO2016065001 SEQ ID NO: 62 |
| AAV CKd-N4 | 841 | WO2016065001 SEQ ID NO: 63 |
| AAV CKd-N9 | 842 | WO2016065001 SEQ ID NO: 64 |
| AAV CLv-L4 | 843 | WO2016065001 SEQ ID NO: 65 |
| AAV CLv-L5 | 844 | WO2016065001 SEQ ID NO: 66 |
| AAV CLv-L6 | 845 | WO2016065001 SEQ ID NO: 67 |
| AAV CLv-K1 | 846 | WO2016065001 SEQ ID NO: 68 |
| AAV CLv-K3 | 847 | WO2016065001 SEQ ID NO: 69 |
| AAV CLv-K6 | 848 | WO2016065001 SEQ ID NO: 70 |
| AAV CLv-M1 | 849 | WO2016065001 SEQ ID NO: 71 |
| AAV CLv-M11 | 850 | WO2016065001 SEQ ID NO: 72 |
| AAV CLv-M2 | 851 | WO2016065001 SEQ ID NO: 73 |
| AAV CLv-M5 | 852 | WO2016065001 SEQ ID NO: 74 |
| AAV CLv-M6 | 853 | WO2016065001 SEQ ID NO: 75 |
| AAV CLv-M7 | 854 | WO2016065001 SEQ ID NO: 76 |
| AAV CLv-M8 | 855 | WO2016065001 SEQ ID NO: 77 |
| AAV CLv-M9 | 856 | WO2016065001 SEQ ID NO: 78 |
| AAV CHt-P1 | 857 | WO2016065001 SEQ ID NO: 79 |
| AAV CHt-P6 | 858 | WO2016065001 SEQ ID NO: 80 |
| AAV CHt-P8 | 859 | WO2016065001 SEQ ID NO: 81 |
| AAV CHt-6.1 | 860 | WO2016065001 SEQ ID NO: 82 |
| AAV CHt-6.10 | 861 | WO2016065001 SEQ ID NO: 83 |
| AAV CHt-6.5 | 862 | WO2016065001 SEQ ID NO: 84 |
| AAV CHt-6.6 | 863 | WO2016065001 SEQ ID NO: 85 |
| AAV CHt-6.7 | 864 | WO2016065001 SEQ ID NO: 86 |
| AAV CHt-6.8 | 865 | WO2016065001 SEQ ID NO: 87 |
| AAV CSp-8.10 | 866 | WO2016065001 SEQ ID NO: 88 |
| AAV CSp-8.2 | 867 | WO2016065001 SEQ ID NO: 89 |
| AAV CSp-8.4 | 868 | WO2016065001 SEQ ID NO: 90 |
| AAV CSp-8.5 | 869 | WO2016065001 SEQ ID NO: 91 |
| AAV CSp-8.6 | 870 | WO2016065001 SEQ ID NO: 92 |
| AAV CSp-8.7 | 871 | WO2016065001 SEQ ID NO: 93 |
| AAV CSp-8.8 | 872 | WO2016065001 SEQ ID NO: 94 |
| AAV CSp-8.9 | 873 | WO2016065001 SEQ ID NO: 95 |
| AAV CBr-B7.3 | 874 | WO2016065001 SEQ ID NO: 96 |
| AAV CBr-B7.4 | 875 | WO2016065001 SEQ ID NO: 97 |
| AAV3B | 876 | WO2016065001 SEQ ID NO: 98 |
| AAV4 | 877 | WO2016065001 SEQ ID NO: 99 |
| AAV5 | 878 | WO2016065001 SEQ ID NO: 100 |
| GPV | 879 | U.S. Pat. No. 9,624,274B2 SEQ ID NO: 192 |
| B19 | 880 | U.S. Pat. No. 9,624,274B2 SEQ ID NO: 193 |
| MVM | 881 | U.S. Pat. No. 9,624,274B2 SEQ ID NO: 194 |
| FPV | 882 | U.S. Pat. No. 9,624,274B2 SEQ ID NO: 195 |
| CPV | 883 | U.S. Pat. No. 9,624,274B2 SEQ ID NO: 196 |
| AAV6 | 884 | U.S. Pat. No. 9,546,112B2 SEQ ID NO: 5 |
| AAV6 | 885 | U.S. Pat. No. 9,457,103B2 SEQ ID NO: 1 |
| AAV2 | 886 | U.S. Pat. No. 9,457,103B2 SEQ ID NO: 2 |
| ShH10 | 887 | U.S. Pat. No. 9,457,103B2 SEQ ID NO: 3 |
| ShH13 | 888 | U.S. Pat. No. 9,457,103B2 SEQ ID NO: 4 |
| ShH10 | 889 | U.S. Pat. No. 9,457,103B2 SEQ ID NO: 5 |
| ShH10 | 890 | U.S. Pat. No. 9,457,103B2 SEQ ID NO: 6 |
| ShH10 | 891 | U.S. Pat. No. 9,457,103B2 SEQ ID NO: 7 |
| ShH10 | 892 | U.S. Pat. No. 9,457,103B2 SEQ ID NO: 8 |
| ShH10 | 893 | U.S. Pat. No. 9,457,103B2 SEQ ID NO: 9 |
| rh74 | 894 | U.S. Pat. No. 9,434,928B2 SEQ ID NO: 1, US2015023924A1 SEQ ID NO: 2 |
| rh74 | 895 | U.S. Pat. No. 9,434,928B2 SEQ ID NO: 2, US2015023924A1 SEQ ID NO: 1 |
| AAV8 | 896 | U.S. Pat. No. 9,434,928B2 SEQ ID NO: 4 |
| rh74 | 897 | U.S. Pat. No. 9,434,928B2 SEQ ID NO: 5 |
| rh74 (RHM4-1) | 898 | US2015023924A1 SEQ ID NO: 5, US20160375110A1 SEQ ID NO: 4 |
| rh74 (RHM15-1) | 899 | US2015023924A1 SEQ ID NO: 6, US20160375110A1 SEQ ID NO: 5 |
| rh74 (RHM15-2) | 900 | US2015023924A1 SEQ ID NO: 7, US20160375110A1 SEQ ID NO: 6 |
| rh74 (RHM15-3/RHM15-5) | 901 | US2015023924A1 SEQ ID NO: 8, US20160375110A1 SEQ ID NO: 7 |
| rh74 (RHM15-4) | 902 | US2015023924A1 SEQ ID NO: 9, US20160375110A1 SEQ ID NO: 8 |
| rh74 (RHM15-6) | 903 | US2015023924A1 SEQ ID NO: 10, US20160375110A1 SEQ ID NO: 9 |
| rh74 (RHM4-1) | 904 | US2015023924A1 SEQ ID NO: 11 |
| rh74 (RHM15-1) | 905 | US2015023924A1 SEQ ID NO: 12 |
| rh74 (RHM15-2) | 906 | US2015023924A1 SEQ ID NO: 13 |
| rh74 (RHM15-3/RHM15-5) | 907 | US2015023924A1 SEQ ID NO: 14 |
| rh74 (RHM15-4) | 908 | US2015023924A1 SEQ ID NO: 15 |
| rh74 (RHM15-6) | 909 | US2015023924A1 SEQ ID NO: 16 |
| AAV2 (comprising lung | 910 | US20160175389A1 SEQ ID NO: 9 |
| specific polypeptide) | | |
| AAV2 (comprising lung | 911 | US20160175389A1 SEQ ID NO: 10 |
| specific polypeptide) | | |
| Anc80 | 912 | US20170051257A1 SEQ ID NO: 1 |
| Anc80 | 913 | US20170051257A1 SEQ ID NO: 2 |
| Anc81 | 914 | US20170051257A1 SEQ ID NO: 3 |
| Anc80 | 915 | US20170051257A1 SEQ ID NO: 4 |
| Anc82 | 916 | US20170051257A1 SEQ ID NO: 5 |
| Anc82 | 917 | US20170051257A1 SEQ ID NO: 6 |
| Anc83 | 918 | US20170051257A1 SEQ ID NO: 7 |
| Anc83 | 919 | US20170051257A1 SEQ ID NO: 8 |
| Anc84 | 920 | US20170051257A1 SEQ ID NO: 9 |
| Anc84 | 921 | US20170051257A1 SEQ ID NO: 10 |
| Anc94 | 922 | US20170051257A1 SEQ ID NO: 11 |
| Anc94 | 923 | US20170051257A1 SEQ ID NO: 12 |
| Anc113 | 924 | US20170051257A1 SEQ ID NO: 13 |
| Anc113 | 925 | US20170051257A1 SEQ ID NO: 14 |
| Anc126 | 926 | US20170051257A1 SEQ ID NO: 15 |
| Anc126 | 927 | US20170051257A1 SEQ ID NO: 16 |
| Anc127 | 928 | US20170051257A1 SEQ ID NO: 17 |
| Anc127 | 929 | US20170051257A1 SEQ ID NO: 18 |
| Anc80L27 | 930 | US20170051257A1 SEQ ID NO: 19 |
| Anc80L59 | 931 | US20170051257A1 SEQ ID NO: 20 |
| Anc80L60 | 932 | US20170051257A1 SEQ ID NO: 21 |
| Anc80L62 | 933 | US20170051257A1 SEQ ID NO: 22 |
| Anc80L65 | 934 | US20170051257A1 SEQ ID NO: 23 |
| Anc80L33 | 935 | US20170051257A1 SEQ ID NO: 24 |
| Anc80L36 | 936 | US20170051257A1 SEQ ID NO: 25 |
| Anc80L44 | 937 | US20170051257A1 SEQ ID NO: 26 |
| Anc80L1 | 938 | US20170051257A1 SEQ ID NO: 35 |
| Anc80L1 | 939 | US20170051257A1 SEQ ID NO: 36 |
| AAV-X1 | 940 | U.S. Pat. No. 8,283,151B2 SEQ ID NO: 11 |
| AAV-X1b | 941 | U.S. Pat. No. 8,283,151B2 SEQ ID NO: 12 |
| AAV-X5 | 942 | U.S. Pat. No. 8,283,151B2 SEQ ID NO: 13 |
| AAV-X19 | 943 | U.S. Pat. No. 8,283,151B2 SEQ ID NO: 14 |
| AAV-X21 | 944 | U.S. Pat. No. 8,283,151B2 SEQ ID NO: 15 |
| AAV-X22 | 945 | U.S. Pat. No. 8,283,151B2 SEQ ID NO: 16 |
| AAV-X23 | 946 | U.S. Pat. No. 8,283,151B2 SEQ ID NO: 17 |
| AAV-X24 | 947 | U.S. Pat. No. 8,283,151B2 SEQ ID NO: 18 |
| AAV-X25 | 948 | U.S. Pat. No. 8,283,151B2 SEQ ID NO: 19 |
| AAV-X26 | 949 | U.S. Pat. No. 8,283,151B2 SEQ ID NO: 20 |
| AAV-X1 | 950 | U.S. Pat. No. 8,283,151B2 SEQ ID NO: 21 |
| AAV-X1b | 951 | U.S. Pat. No. 8,283,151B2 SEQ ID NO: 22 |
| AAV-X5 | 952 | U.S. Pat. No. 8,283,151B2 SEQ ID NO: 23 |
| AAV-X19 | 953 | U.S. Pat. No. 8,283,151B2 SEQ ID NO: 24 |
| AAV-X21 | 954 | U.S. Pat. No. 8,283,151B2 SEQ ID NO: 25 |
| AAV-X22 | 955 | U.S. Pat. No. 8,283,151B2 SEQ ID NO: 26 |
| AAV-X23 | 956 | U.S. Pat. No. 8,283,151B2 SEQ ID NO: 27 |
| AAV-X24 | 957 | U.S. Pat. No. 8,283,151B2 SEQ ID NO: 28 |
| AAV-X25 | 958 | U.S. Pat. No. 8,283,151B2 SEQ ID NO: 29 |
| AAV-X26 | 959 | U.S. Pat. No. 8,283,151B2 SEQ ID NO: 30 |
| AAVrh8 | 960 | WO2016054554A1 SEQ ID NO: 8 |
| AAVrh8VP2FC5 | 961 | WO2016054554A1 SEQ ID NO: 9 |
| AAVrh8VP2FC44 | 962 | WO2016054554A1 SEQ ID NO: 10 |
| AAVrh8VP2ApoB100 | 963 | WO2016054554A1 SEQ ID NO: 11 |
| AAVrh8VP2RVG | 964 | WO2016054554A1 SEQ ID NO: 12 |
| AAVrh8VP2Angiopep-2 VP2 | 965 | WO2016054554A1 SEQ ID NO: 13 |
| AAV9.47VP1.3 | 966 | WO2016054554A1 SEQ ID NO: 14 |
| AAV9.47VP2ICAMg3 | 967 | WO2016054554A1 SEQ ID NO: 15 |
| AAV9.47VP2RVG | 968 | WO2016054554A1 SEQ ID NO: 16 |
| AAV9.47VP2Angiopep-2 | 969 | WO2016054554A1 SEQ ID NO: 17 |
| AAV9.47VP2A-string | 970 | WO2016054554A1 SEQ ID NO: 18 |
| AAVrh8VP2FC5 VP2 | 971 | WO2016054554A1 SEQ ID NO: 19 |
| AAVrh8VP2FC44 VP2 | 972 | WO2016054554A1 SEQ ID NO: 20 |
| AAVrh8VP2ApoB100 VP2 | 973 | WO2016054554A1 SEQ ID NO: 21 |
| AAVrh8VP2RVG VP2 | 974 | WO2016054554A1 SEQ ID NO: 22 |
| AAVrh8VP2Angiopep-2 VP2 | 975 | WO2016054554A1 SEQ ID NO: 23 |
| AAV9.47VP2ICAMg3 VP2 | 976 | WO2016054554A1 SEQ ID NO: 24 |
| AAV9.47VP2RVG VP2 | 977 | WO2016054554A1 SEQ ID NO: 25 |
| AAV9.47VP2Angiopep-2 VP2 | 978 | WO2016054554A1 SEQ ID NO: 26 |
| AAV9.47VP2A-string VP2 | 979 | WO2016054554A1 SEQ ID NO: 27 |
| rAAV-B1 | 980 | WO2016054557A1 SEQ ID NO: 1 |
| rAAV-B2 | 981 | WO2016054557A1 SEQ ID NO: 2 |
| rAAV-B3 | 982 | WO2016054557A1 SEQ ID NO: 3 |
| rAAV-B4 | 983 | WO2016054557A1 SEQ ID NO: 4 |
| rAAV-B1 | 984 | WO2016054557A1 SEQ ID NO: 5 |
| rAAV-B2 | 985 | WO2016054557A1 SEQ ID NO: 6 |
| rAAV-B3 | 986 | WO2016054557A1 SEQ ID NO: 7 |
| rAAV-B4 | 987 | WO2016054557A1 SEQ ID NO: 8 |
| rAAV-L1 | 988 | WO2016054557A1 SEQ ID NO: 9 |
| rAAV-L2 | 989 | WO2016054557A1 SEQ ID NO: 10 |
| rAAV-L3 | 990 | WO2016054557A1 SEQ ID NO: 11 |
| rAAV-L4 | 991 | WO2016054557A1 SEQ ID NO: 12 |
| rAAV-L1 | 992 | WO2016054557A1 SEQ ID NO: 13 |
| rAAV-L2 | 993 | WO2016054557A1 SEQ ID NO: 14 |
| rAAV-L3 | 994 | WO2016054557A1 SEQ ID NO: 15 |
| rAAV-L4 | 995 | WO2016054557A1 SEQ ID NO: 16 |
| AAV9 | 996 | WO2016073739A1 SEQ ID NO: 3 |
| rAAV | 997 | WO2016081811A1 SEQ ID NO: 1 |
| rAAV | 998 | WO2016081811A1 SEQ ID NO: 2 |
| rAAV | 999 | WO2016081811A1 SEQ ID NO: 3 |
| rAAV | 1000 | WO2016081811A1 SEQ ID NO: 4 |
| rAAV | 1001 | WO2016081811A1 SEQ ID NO: 5 |
| rAAV | 1002 | WO2016081811A1 SEQ ID NO: 6 |
| rAAV | 1003 | WO2016081811A1 SEQ ID NO: 7 |
| rAAV | 1004 | WO2016081811A1 SEQ ID NO: 8 |
| rAAV | 1005 | WO2016081811A1 SEQ ID NO: 9 |
| rAAV | 1006 | WO2016081811A1 SEQ ID NO: 10 |
| rAAV | 1007 | WO2016081811A1 SEQ ID NO: 11 |
| rAAV | 1008 | WO2016081811A1 SEQ ID NO: 12 |
| rAAV | 1009 | WO2016081811A1 SEQ ID NO: 13 |
| rAAV | 1010 | WO2016081811A1 SEQ ID NO: 14 |
| rAAV | 1011 | WO2016081811A1 SEQ ID NO: 15 |
| rAAV | 1012 | WO2016081811A1 SEQ ID NO: 16 |
| rAAV | 1013 | WO2016081811A1 SEQ ID NO: 17 |
| rAAV | 1014 | WO2016081811A1 SEQ ID NO: 18 |
| rAAV | 1015 | WO2016081811A1 SEQ ID NO: 19 |
| rAAV | 1016 | WO2016081811A1 SEQ ID NO: 20 |
| rAAV | 1017 | WO2016081811A1 SEQ ID NO: 21 |
| rAAV | 1018 | WO2016081811A1 SEQ ID NO: 22 |
| rAAV | 1019 | WO2016081811A1 SEQ ID NO: 23 |
| rAAV | 1020 | WO2016081811A1 SEQ ID NO: 24 |
| rAAV | 1021 | WO2016081811A1 SEQ ID NO: 25 |
| rAAV | 1022 | WO2016081811A1 SEQ ID NO: 26 |
| rAAV | 1023 | WO2016081811A1 SEQ ID NO: 27 |
| rAAV | 1024 | WO2016081811A1 SEQ ID NO: 28 |
| rAAV | 1025 | WO2016081811A1 SEQ ID NO: 29 |
| rAAV | 1026 | WO2016081811A1 SEQ ID NO: 30 |
| rAAV | 1027 | WO2016081811A1 SEQ ID NO: 31 |
| rAAV | 1028 | WO2016081811A1 SEQ ID NO: 32 |
| rAAV | 1029 | WO2016081811A1 SEQ ID NO: 33 |
| rAAV | 1030 | WO2016081811A1 SEQ ID NO: 34 |
| rAAV | 1031 | WO2016081811A1 SEQ ID NO: 35 |
| rAAV | 1032 | WO2016081811A1 SEQ ID NO: 36 |
| rAAV | 1033 | WO2016081811A1 SEQ ID NO: 37 |
| rAAV | 1034 | WO2016081811A1 SEQ ID NO: 38 |
| rAAV | 1035 | WO2016081811A1 SEQ ID NO: 39 |
| rAAV | 1036 | WO2016081811A1 SEQ ID NO: 40 |
| rAAV | 1037 | WO2016081811A1 SEQ ID NO: 41 |
| rAAV | 1038 | WO2016081811A1 SEQ ID NO: 42 |
| rAAV | 1039 | WO2016081811A1 SEQ ID NO: 43 |
| rAAV | 1040 | WO2016081811A1 SEQ ID NO: 44 |
| rAAV | 1041 | WO2016081811A1 SEQ ID NO: 45 |
| rAAV | 1042 | WO2016081811A1 SEQ ID NO: 46 |
| rAAV | 1043 | WO2016081811A1 SEQ ID NO: 47 |
| rAAV | 1044 | WO2016081811A1 SEQ ID NO: 48 |
| rAAV | 1045 | WO2016081811A1 SEQ ID NO: 49 |
| rAAV | 1046 | WO2016081811A1 SEQ ID NO: 50 |
| rAAV | 1047 | WO2016081811A1 SEQ ID NO: 51 |
| rAAV | 1048 | WO2016081811A1 SEQ ID NO: 52 |
| rAAV | 1049 | WO2016081811A1 SEQ ID NO: 53 |
| rAAV | 1050 | WO2016081811A1 SEQ ID NO: 54 |
| rAAV | 1051 | WO2016081811A1 SEQ ID NO: 55 |
| rAAV | 1052 | WO2016081811A1 SEQ ID NO: 56 |
| rAAV | 1053 | WO2016081811A1 SEQ ID NO: 57 |
| rAAV | 1054 | WO2016081811A1 SEQ ID NO: 58 |
| rAAV | 1055 | WO2016081811A1 SEQ ID NO: 59 |
| rAAV | 1056 | WO2016081811A1 SEQ ID NO: 60 |
| rAAV | 1057 | WO2016081811A1 SEQ ID NO: 61 |
| rAAV | 1058 | WO2016081811A1 SEQ ID NO: 62 |
| rAAV | 1059 | WO2016081811A1 SEQ ID NO: 63 |
| rAAV | 1060 | WO2016081811A1 SEQ ID NO: 64 |
| rAAV | 1061 | WO2016081811A1 SEQ ID NO: 65 |
| rAAV | 1062 | WO2016081811A1 SEQ ID NO: 66 |
| rAAV | 1063 | WO2016081811A1 SEQ ID NO: 67 |
| rAAV | 1064 | WO2016081811A1 SEQ ID NO: 68 |
| rAAV | 1065 | WO2016081811A1 SEQ ID NO: 69 |
| rAAV | 1066 | WO2016081811A1 SEQ ID NO: 70 |
| rAAV | 1067 | WO2016081811A1 SEQ ID NO: 71 |
| rAAV | 1068 | WO2016081811A1 SEQ ID NO: 72 |
| rAAV | 1069 | WO2016081811A1 SEQ ID NO: 73 |
| rAAV | 1070 | WO2016081811A1 SEQ ID NO: 74 |
| rAAV | 1071 | WO2016081811A1 SEQ ID NO: 75 |
| rAAV | 1072 | WO2016081811A1 SEQ ID NO: 76 |
| rAAV | 1073 | WO2016081811A1 SEQ ID NO: 77 |
| rAAV | 1074 | WO2016081811A1 SEQ ID NO: 78 |
| rAAV | 1075 | WO2016081811A1 SEQ ID NO: 79 |
| rAAV | 1076 | WO2016081811A1 SEQ ID NO: 80 |
| rAAV | 1077 | WO2016081811A1 SEQ ID NO: 81 |
| rAAV | 1078 | WO2016081811A1 SEQ ID NO: 82 |
| rAAV | 1079 | WO2016081811A1 SEQ ID NO: 83 |
| rAAV | 1080 | WO2016081811A1 SEQ ID NO: 84 |
| rAAV | 1081 | WO2016081811A1 SEQ ID NO: 85 |
| rAAV | 1082 | WO2016081811A1 SEQ ID NO: 86 |
| rAAV | 1083 | WO2016081811A1 SEQ ID NO: 87 |
| rAAV | 1084 | WO2016081811A1 SEQ ID NO: 88 |
| rAAV | 1085 | WO2016081811A1 SEQ ID NO: 89 |
| rAAV | 1086 | WO2016081811A1 SEQ ID NO: 90 |
| rAAV | 1087 | WO2016081811A1 SEQ ID NO: 91 |
| rAAV | 1088 | WO2016081811A1 SEQ ID NO: 92 |
| rAAV | 1089 | WO2016081811A1 SEQ ID NO: 93 |
| rAAV | 1090 | WO2016081811A1 SEQ ID NO: 94 |
| rAAV | 1091 | WO2016081811A1 SEQ ID NO: 95 |
| rAAV | 1092 | WO2016081811A1 SEQ ID NO: 96 |
| rAAV | 1093 | WO2016081811A1 SEQ ID NO: 97 |
| rAAV | 1094 | WO2016081811A1 SEQ ID NO: 98 |
| rAAV | 1095 | WO2016081811A1 SEQ ID NO: 99 |
| rAAV | 1096 | WO2016081811A1 SEQ ID NO: 100 |
| rAAV | 1097 | WO2016081811A1 SEQ ID NO: 101 |
| rAAV | 1098 | WO2016081811A1 SEQ ID NO: 102 |
| rAAV | 1099 | WO2016081811A1 SEQ ID NO: 103 |
| rAAV | 1100 | WO2016081811A1 SEQ ID NO: 104 |
| rAAV | 1101 | WO2016081811A1 SEQ ID NO: 105 |
| rAAV | 1102 | WO2016081811A1 SEQ ID NO: 106 |
| rAAV | 1103 | WO2016081811A1 SEQ ID NO: 107 |
| rAAV | 1104 | WO2016081811A1 SEQ ID NO: 108 |
| rAAV | 1105 | WO2016081811A1 SEQ ID NO: 109 |
| rAAV | 1106 | WO2016081811A1 SEQ ID NO: 110 |
| rAAV | 1107 | WO2016081811A1 SEQ ID NO: 111 |
| rAAV | 1108 | WO2016081811A1 SEQ ID NO: 112 |
| rAAV | 1109 | WO2016081811A1 SEQ ID NO: 113 |
| rAAV | 1110 | WO2016081811A1 SEQ ID NO: 114 |
| rAAV | 1111 | WO2016081811A1 SEQ ID NO: 115 |
| rAAV | 1112 | WO2016081811A1 SEQ ID NO: 116 |
| rAAV | 1113 | WO2016081811A1 SEQ ID NO: 117 |
| rAAV | 1114 | WO2016081811A1 SEQ ID NO: 118 |
| rAAV | 1115 | WO2016081811A1 SEQ ID NO: 119 |
| rAAV | 1116 | WO2016081811A1 SEQ ID NO: 120 |
| rAAV | 1117 | WO2016081811A1 SEQ ID NO: 121 |
| rAAV | 1118 | WO2016081811A1 SEQ ID NO: 122 |
| rAAV | 1119 | WO2016081811A1 SEQ ID NO: 123 |
| rAAV | 1120 | WO2016081811A1 SEQ ID NO: 124 |
| rAAV | 1121 | WO2016081811A1 SEQ ID NO: 125 |
| rAAV | 1122 | WO2016081811A1 SEQ ID NO: 126 |
| rAAV | 1123 | WO2016081811A1 SEQ ID NO: 127 |
| rAAV | 1124 | WO2016081811A1 SEQ ID NO: 128 |
| AAV8 E532K | 1125 | WO2016081811A1 SEQ ID NO: 133 |
| AAV8 E532K | 1126 | WO2016081811A1 SEQ ID NO: 134 |
| rAAV4 | 1127 | WO2016115382A1 SEQ ID NO: 2 |
| rAAV4 | 1128 | WO2016115382A1 SEQ ID NO: 3 |
| rAAV4 | 1129 | WO2016115382A1 SEQ ID NO: 4 |
| rAAV4 | 1130 | WO2016115382A1 SEQ ID NO: 5 |
| rAAV4 | 1131 | WO2016115382A1 SEQ ID NO: 6 |
| rAAV4 | 1132 | WO2016115382A1 SEQ ID NO: 7 |
| rAAV4 | 1133 | WO2016115382A1 SEQ ID NO: 8 |
| rAAV4 | 1134 | WO2016115382A1 SEQ ID NO: 9 |
| rAAV4 | 1135 | WO2016115382A1 SEQ ID NO: 10 |
| rAAV4 | 1136 | WO2016115382A1 SEQ ID NO: 11 |
| rAAV4 | 1137 | WO2016115382A1 SEQ ID NO: 12 |
| rAAV4 | 1138 | WO2016115382A1 SEQ ID NO: 13 |
| rAAV4 | 1139 | WO2016115382A1 SEQ ID NO: 14 |
| rAAV4 | 1140 | WO2016115382A1 SEQ ID NO: 15 |
| rAAV4 | 1141 | WO2016115382A1 SEQ ID NO: 16 |
| rAAV4 | 1142 | WO2016115382A1 SEQ ID NO: 17 |
| rAAV4 | 1143 | WO2016115382A1 SEQ ID NO: 18 |
| rAAV4 | 1144 | WO2016115382A1 SEQ ID NO: 19 |
| rAAV4 | 1145 | WO2016115382A1 SEQ ID NO: 20 |
| rAAV4 | 1146 | WO2016115382A1 SEQ ID NO: 21 |
| AAV11 | 1147 | WO2016115382A1 SEQ ID NO: 22 |
| AAV12 | 1148 | WO2016115382A1 SEQ ID NO: 23 |
| rh32 | 1149 | WO2016115382A1 SEQ ID NO: 25 |
| rh33 | 1150 | WO2016115382A1 SEQ ID NO: 26 |
| rh34 | 1151 | WO2016115382A1 SEQ ID NO: 27 |
| rAAV4 | 1152 | WO2016115382A1 SEQ ID NO: 28 |
| rAAV4 | 1153 | WO2016115382A1 SEQ ID NO: 29 |
| rAAV4 | 1154 | WO2016115382A1 SEQ ID NO: 30 |
| rAAV4 | 1155 | WO2016115382A1 SEQ ID NO: 31 |
| rAAV4 | 1156 | WO2016115382A1 SEQ ID NO: 32 |
| rAAV4 | 1157 | WO2016115382A1 SEQ ID NO: 33 |
| AAV2/8 | 1158 | WO2016131981A1 SEQ ID NO: 47 |
| AAV2/8 | 1159 | WO2016131981A1 SEQ ID NO: 48 |
| ancestral AAV | 1160 | WO2016154344A1 SEQ ID NO: 7 |
| ancestral AAV variant C4 | 1161 | WO2016154344A1 SEQ ID NO: 13 |
| ancestral AAV variant C7 | 1162 | WO2016154344A1 SEQ ID NO: 14 |
| ancestral AAV variant G4 | 1163 | WO2016154344A1 SEQ ID NO: 15 |
| consensus amino acid sequence | 1164 | WO2016154344A1 SEQ ID NO: 16 |
| of ancestral AAV variants, C4, | | |
| C7 and G4 | | |
| consensus amino acid sequence | 1165 | WO2016154344A1 SEQ ID NO: 17 |
| of ancestral AAV variants, C4 | | |
| and C7 | | |
| AAV8 (with a AAV2 | 1166 | WO2016150403A1 SEQ ID NO: 13 |
| phospholipase domain) | | |
| AAV VR-942n | 1167 | US20160289275A1 SEQ ID NO: 10 |
| AAV5-A (M569V) | 1168 | US20160289275A1 SEQ ID NO: 13 |
| AAV5-A (M569V) | 1169 | US20160289275A1 SEQ ID NO: 14 |
| AAV5-A (Y585V) | 1170 | US20160289275A1 SEQ ID NO: 16 |
| AAV5-A (Y585V) | 1171 | US20160289275A1 SEQ ID NO: 17 |
| AAV5-A (L587T) | 1172 | US20160289275A1 SEQ ID NO: 19 |
| AAV5-A (L587T) | 1173 | US20160289275A1 SEQ ID NO: 20 |
| AAV5-A (Y585V/L587T) | 1174 | US20160289275A1 SEQ ID NO: 22 |
| AAV5-A (Y585V7L587T) | 1175 | US20160289275A1 SEQ ID NO: 23 |
| AAV5-B (D652A) | 1176 | US20160289275A1 SEQ ID NO: 25 |
| AAV5-B (D652A) | 1177 | US20160289275A1 SEQ ID NO: 26 |
| AAV5-B (T362M) | 1178 | US20160289275A1 SEQ ID NO: 28 |
| AAV5-B (T362M) | 1179 | US20160289275A1 SEQ ID NO: 29 |
| AAV5-B (Q359D) | 1180 | US20160289275A1 SEQ ID NO: 31 |
| AAV5-B (Q359D) | 1181 | US20160289275A1 SEQ ID NO: 32 |
| AAV5-B (E350Q) | 1182 | US20160289275A1 SEQ ID NO: 34 |
| AAV5-B (E350Q) | 1183 | US20160289275A1 SEQ ID NO: 35 |
| AAV5-B (P533S) | 1184 | US20160289275A1 SEQ ID NO: 37 |
| AAV5-B (P533S) | 1185 | US20160289275A1 SEQ ID NO: 38 |
| AAV5-B (P533G) | 1186 | US20160289275A1 SEQ ID NO: 40 |
| AAV5-B (P533G) | 1187 | US20160289275A1 SEQ ID NO: 41 |
| AAV5-mutation in loop VII | 1188 | US20160289275A1 SEQ ID NO: 43 |
| AAV5 -mutation in loop VII | 1189 | US20160289275A1 SEQ ID NO: 44 |
| AAV8 | 1190 | US20160289275A1 SEQ ID NO: 47 |
| Mut A (LK03/AAV8) | 1191 | WO2016181123A1 SEQ ID NO: 1 |
| Mut B (LK03/AAV5) | 1192 | WO2016181123A1 SEQ ID NO: 2 |
| Mut C (AAV8/AAV3B) | 1193 | WO2016181123A1 SEQ ID NO: 3 |
| Mut D (AAV5/AAV3B) | 1194 | WO2016181123A1 SEQ ID NO: 4 |
| Mut E (AAV8/AAV3B) | 1195 | WO2016181123A1 SEQ ID NO: 5 |
| Mut F (AAV3B/AAV8) | 1196 | WO2016181123A1 SEQ ID NO: 6 |
| AAV44.9 | 1197 | WO2016183297A1 SEQ ID NO: 4 |
| AAV44.9 | 1198 | WO2016183297A1 SEQ ID NO: 5 |
| AAVrh8 | 1199 | WO2016183297A1 SEQ ID NO: 6 |
| AAV44.9 (S470N) | 1200 | WO2016183297A1 SEQ ID NO: 9 |
| rh74 VP1 | 1201 | US20160375110A1 SEQ ID NO: 1 |
| AAV-LK03 (L125I) | 1202 | WO2017015102A1 SEQ ID NO: 5 |
| AAV3B (S663V + T492V) | 1203 | WO2017015102A1 SEQ ID NO: 6 |
| Anc80 | 1204 | WO2017019994A2 SEQ ID NO: 1 |
| Anc80 | 1205 | WO2017019994A2 SEQ ID NO: 2 |
| Anc81 | 1206 | WO2017019994A2 SEQ ID NO: 3 |
| Anc81 | 1207 | WO2017019994A2 SEQ ID NO: 4 |
| Anc82 | 1208 | WO2017019994A2 SEQ ID NO: 5 |
| Anc82 | 1209 | WO2017019994A2 SEQ ID NO: 6 |
| Anc83 | 1210 | WO2017019994A2 SEQ ID NO: 7 |
| Anc83 | 1211 | WO2017019994A2 SEQ ID NO: 8 |
| Anc84 | 1212 | WO2017019994A2 SEQ ID NO: 9 |
| Anc84 | 1213 | WO2017019994A2 SEQ ID NO: 10 |
| Anc94 | 1214 | WO2017019994A2 SEQ ID NO: 11 |
| Anc94 | 1215 | WO2017019994A2 SEQ ID NO: 12 |
| Anc113 | 1216 | WO2017019994A2 SEQ ID NO: 13 |
| Anc13 | 1217 | WO2017019994A2 SEQ ID NO: 14 |
| Anc126 | 1218 | WO2017019994A2 SEQ ID NO: 15 |
| Anc126 | 1219 | WO2017019994A2 SEQ ID NO: 16 |
| Anc127 | 1220 | WO2017019994A2 SEQ ID NO: 17 |
| Anc127 | 1221 | WO2017019994A2 SEQ ID NO: 18 |
| Anc80L27 | 1222 | WO2017019994A2 SEQ ID NO: 19 |
| Anc80L59 | 1223 | WO2017019994A2 SEQ ID NO: 20 |
| Anc80L60 | 1224 | WO2017019994A2 SEQ ID NO: 21 |
| Anc80L62 | 1225 | WO2017019994A2 SEQ ID NO: 22 |
| Anc80L65 | 1226 | WO2017019994A2 SEQ ID NO: 23 |
| Anc80L33 | 1227 | WO2017019994A2 SEQ ID NO: 24 |
| Anc80L36 | 1228 | WO2017019994A2 SEQ ID NO: 25 |
| Anc80L44 | 1229 | WO2017019994A2 SEQ ID NO: 26 |
| Anc80L1 | 1230 | WO2017019994A2 SEQ ID NO: 35 |
| Anc80L1 | 1231 | WO2017019994A2 SEQ ID NO: 36 |
| AAVrh10 | 1232 | WO2017019994A2 SEQ ID NO: 41 |
| Anc110 | 1233 | WO2017019994A2 SEQ ID NO: 42 |
| Anc110 | 1234 | WO2017019994A2 SEQ ID NO: 43 |
| AAVrh32.33 | 1235 | WO2017019994A2 SEQ ID NO: 45 |
| AAVrh74 | 1236 | WO2017049031A1 SEQ ID NO: 1 |
| AAV2 | 1237 | WO2017053629A2 SEQ ID NO: 49 |
| AAV2 | 1238 | WO2017053629A2 SEQ ID NO: 50 |
| AAV2 | 1239 | WO2017053629A2 SEQ ID NO: 82 |
| Parvo-like virus | 1240 | WO2017070476A2 SEQ ID NO: 1 |
| Parvo-like virus | 1241 | WO2017070476A2 SEQ ID NO: 2 |
| Parvo-like virus | 1242 | WO2017070476A2 SEQ ID NO: 3 |
| Parvo-like virus | 1243 | WO2017070476A2 SEQ ID NO: 4 |
| Parvo-like virus | 1244 | WO2017070476A2 SEQ ID NO: 5 |
| Parvo-like virus | 1245 | WO2017070476A2 SEQ ID NO: 6 |
| AAVrh.10 | 1246 | WO2017070516A1 SEQ ID NO: 7 |
| AAVrh.10 | 1247 | WO2017070516A1 SEQ ID NO: 14 |
| AAV2tYF | 1248 | WO2017070491A1 SEQ ID NO: 1 |
| AAV-SPK | 1249 | WO2017075619A1 SEQ ID NO: 28 |
| AAV2.5 | 1250 | US20170128528A1 SEQ ID NO: 13 |
| AAV1.1 | 1251 | US20170128528A1 SEQ ID NO: 15 |
| AAV6.1 | 1252 | US20170128528A1 SEQ ID NO: 17 |
| AAV6.3.1 | 1253 | US20170128528A1 SEQ ID NO: 18 |
| AAV2i8 | 1254 | US20170128528A1 SEQ ID NO: 28 |
| AAV2i8 | 1255 | US20170128528A1 SEQ ID NO: 29 |
| ttAAV | 1256 | US20170128528A1 SEQ ID NO: 30 |
| ttAAV-S312N | 1257 | US20170128528A1 SEQ ID NO: 32 |
| ttAAV-S312N | 1258 | US20170128528A1 SEQ ID NO: 33 |
| AAV6 (Y705, Y731, and T492) | 1259 | WO2016134337A1 SEQ ID NO: 24 |
| AAV2 | 1260 | WO2016134375A1 SEQ ID NO: 9 |
| AAV2 | 1261 | WO2016134375A1 SEQ ID NO: 10 |
| AAV2 variant | 10928 | WO2018071831 SEQ ID NO: 1 |
| AAV2 variant | 10929 | WO2018071831 SEQ ID NO: 2 |
| AAV2 variant | 10930 | WO2018071831 SEQ ID NO: 3 |
| AAV2 variant | 10931 | WO2018071831 SEQ ID NO: 4 |
| AAV2 variant | 10932 | WO2018071831 SEQ ID NO: 5 |
| AAV2 variant | 10933 | WO2018071831 SEQ ID NO: 6 |
| AAV2 variant | 10934 | WO2018071831 SEQ ID NO: 7 |
| AAV2 variant | 10935 | WO2018071831 SEQ ID NO: 8 |
| AAV2 variant | 10936 | WO2018071831 SEQ ID NO: 9 |
| AAV2 variant | 10937 | WO2018071831 SEQ ID NO: 10 |
| AAV2 variant | 10938 | WO2018071831 SEQ ID NO: 11 |
| AAV2 variant | 10939 | WO2018071831 SEQ ID NO: 12 |
| AAV2 variant | 10940 | WO2018071831 SEQ ID NO: 13 |
| AAV2 variant | 10941 | WO2018071831 SEQ ID NO: 14 |
| AAV2 variant | 10942 | WO2018071831 SEQ ID NO: 15 |
| AAV2 variant | 10943 | WO2018071831 SEQ ID NO: 16 |
| AAV2 variant | 10944 | WO2018071831 SEQ ID NO: 17 |
| AAV2 variant | 10945 | WO2018071831 SEQ ID NO: 18 |
| AAV2 variant | 10946 | WO2018071831 SEQ ID NO: 19 |
| AAV2 variant | 10947 | WO2018071831 SEQ ID NO: 20 |
| AAV2 variant | 10948 | WO2018071831 SEQ ID NO: 21 |
| AAV2 variant | 10949 | WO2018071831 SEQ ID NO: 22 |
| AAV2 variant | 10950 | WO2018071831 SEQ ID NO: 23 |
| AAV2 variant | 10951 | WO2018071831 SEQ ID NO: 24 |
| AAV2 variant | 10952 | WO2018071831 SEQ ID NO: 25 |
| AAV2 variant | 10953 | WO2018071831 SEQ ID NO: 26 |
| AAV2 variant | 10954 | WO2018071831 SEQ ID NO: 27 |
| AAV2 variant | 10955 | WO2018071831 SEQ ID NO: 28 |
| AAV2 variant | 10956 | WO2018071831 SEQ ID NO: 29 |
| AAV2 variant | 10957 | WO2018071831 SEQ ID NO: 30 |
| AAV2 variant | 10958 | WO2018071831 SEQ ID NO: 31 |
| AAV2 variant | 10959 | WO2018071831 SEQ ID NO: 32 |
| AAV2 variant | 10960 | WO2018071831 SEQ ID NO: 33 |
| AAV2 variant | 10961 | WO2018071831 SEQ ID NO: 34 |
| AAV2 variant | 10962 | WO2018071831 SEQ ID NO: 35 |
| AAV2 variant | 10963 | WO2018071831 SEQ ID NO: 36 |
| AAV2 variant | 10964 | WO2018071831 SEQ ID NO: 37 |
| AAV2 variant | 10965 | WO2018071831 SEQ ID NO: 38 |
| AAV2 variant | 10966 | WO2018071831 SEQ ID NO: 39 |
| AAV2 variant | 10967 | WO2018071831 SEQ ID NO: 40 |
| AAV2 variant | 10968 | WO2018071831 SEQ ID NO: 41 |
| AAV2 variant | 10969 | WO2018071831 SEQ ID NO: 42 |
| AAV2 variant | 10970 | WO2018071831 SEQ ID NO: 43 |
| AAV2 variant | 10971 | WO2018071831 SEQ ID NO: 44 |
| AAV2 variant | 10972 | WO2018071831 SEQ ID NO: 45 |
| AAV2 variant | 10973 | WO2018071831 SEQ ID NO: 46 |
| AAV2 variant | 10974 | WO2018071831 SEQ ID NO: 47 |
| AAV2 variant | 10975 | WO2018071831 SEQ ID NO: 48 |
| AAV2 variant | 10976 | WO2018071831 SEQ ID NO: 49 |
| AAV2 variant | 10977 | WO2018071831 SEQ ID NO: 50 |
| AAV2 variant | 10978 | WO2018071831 SEQ ID NO: 51 |
| AAV2 variant | 10979 | WO2018071831 SEQ ID NO: 52 |
| AAV2 variant | 10980 | WO2018071831 SEQ ID NO: 53 |
| AAV2 variant | 10981 | WO2018071831 SEQ ID NO: 54 |
| AAV2 variant | 10982 | WO2018071831 SEQ ID NO: 55 |
| AAV2 variant | 10983 | WO2018071831 SEQ ID NO: 56 |
| AAV2 variant | 10984 | WO2018071831 SEQ ID NO: 57 |
| AAV2 variant | 10985 | WO2018071831 SEQ ID NO: 58 |
| AAV2 variant | 10986 | WO2018071831 SEQ ID NO: 59 |
| AAV2 variant | 10987 | WO2018071831 SEQ ID NO: 60 |
| AAV2 variant | 10988 | WO2018071831 SEQ ID NO: 61 |
| AAV2 variant | 10989 | WO2018071831 SEQ ID NO: 62 |
| AAV2 variant | 10990 | WO2018071831 SEQ ID NO: 63 |
| AAV2 variant | 10991 | WO2018071831 SEQ ID NO: 64 |
| AAV2 variant | 10992 | WO2018071831 SEQ ID NO: 65 |
| AAV2 variant | 10993 | WO2018071831 SEQ ID NO: 66 |
| AAV2 variant | 10994 | WO2018071831 SEQ ID NO: 67 |
| AAV2 variant | 10995 | WO2018071831 SEQ ID NO: 68 |
| AAV2 variant | 10996 | WO2018071831 SEQ ID NO: 69 |
| AAV2 variant | 10997 | WO2018071831 SEQ ID NO: 70 |
| AAV2 variant | 10998 | WO2018071831 SEQ ID NO: 71 |
| AAV2 variant | 10999 | WO2018071831 SEQ ID NO: 72 |
| AAV2 variant | 11000 | WO2018071831 SEQ ID NO: 73 |
| AAV2 variant | 11001 | WO2018071831 SEQ ID NO: 74 |
| AAV2 variant | 11002 | WO2018071831 SEQ ID NO: 75 |
| AAV2 variant | 11003 | WO2018071831 SEQ ID NO: 76 |
| AAV2 variant | 11004 | WO2018071831 SEQ ID NO: 77 |
| AAV2 variant | 11005 | WO2018071831 SEQ ID NO: 78 |
| AAV2 variant | 11006 | WO2018071831 SEQ ID NO: 79 |
| AAV2 variant | 11007 | WO2018071831 SEQ ID NO: 80 |
| AAV2 variant | 11008 | WO2018071831 SEQ ID NO: 81 |
| AAV2 variant | 11009 | WO2018071831 SEQ ID NO: 82 |
| AAV2 variant | 11010 | WO2018071831 SEQ ID NO: 83 |
| AAV2 variant | 11011 | WO2018071831 SEQ ID NO: 84 |
| AAV2 variant | 11012 | WO2018071831 SEQ ID NO: 85 |
| AAV2 variant | 11013 | WO2018071831 SEQ ID NO: 86 |
| AAV2 variant | 11014 | WO2018071831 SEQ ID NO: 87 |
| AAV2 variant | 11015 | WO2018071831 SEQ ID NO: 88 |
| AAV2 variant | 11016 | WO2018071831 SEQ ID NO: 89 |
| AAV2 variant | 11017 | WO2018071831 SEQ ID NO: 90 |
| AAV2 variant | 11018 | WO2018071831 SEQ ID NO: 91 |
| AAV2 variant | 11019 | WO2018071831 SEQ ID NO: 92 |
| AAV2 variant | 11020 | WO2018071831 SEQ ID NO: 93 |
| AAV2 variant | 11021 | WO2018071831 SEQ ID NO: 94 |
| AAV2 variant | 11022 | WO2018071831 SEQ ID NO: 95 |
| AAV2 variant | 11023 | WO2018071831 SEQ ID NO: 96 |
| AAV2 variant | 11024 | WO2018071831 SEQ ID NO: 97 |
| AAV2 variant | 11025 | WO2018071831 SEQ ID NO: 98 |
| AAV2 variant | 11026 | WO2018071831 SEQ ID NO: 99 |
| AAV2 variant | 11027 | WO2018071831 SEQ ID NO: 100 |
| AAV2 variant | 11028 | WO2018071831 SEQ ID NO: 101 |
| AAV2 variant | 11029 | WO2018071831 SEQ ID NO: 102 |
| AAV2 variant | 11030 | WO2018071831 SEQ ID NO: 103 |
| AAV2 variant | 11031 | WO2018071831 SEQ ID NO: 104 |
| AAV2 variant | 11032 | WO2018071831 SEQ ID NO: 105 |
| AAV2 variant | 11033 | WO2018071831 SEQ ID NO: 106 |
| AAV2 variant | 11034 | WO2018071831 SEQ ID NO: 107 |
| AAV2 variant | 11035 | WO2018071831 SEQ ID NO: 108 |
| AAV2 variant | 11036 | WO2018071831 SEQ ID NO: 109 |
| AAV2 variant | 11037 | WO2018071831 SEQ ID NO: 110 |
| AAV2 variant | 11038 | WO2018071831 SEQ ID NO: 111 |
| AAV2 variant | 11039 | WO2018071831 SEQ ID NO: 112 |
| AAV2 variant | 11040 | WO2018071831 SEQ ID NO: 113 |
| AAV2 variant | 11041 | WO2018071831 SEQ ID NO: 114 |
| AAV2 variant | 11042 | WO2018071831 SEQ ID NO: 115 |
| AAV2 variant | 11043 | WO2018071831 SEQ ID NO: 116 |
| AAV2 variant | 11044 | WO2018071831 SEQ ID NO: 117 |
| AAV2 variant | 11045 | WO2018071831 SEQ ID NO: 118 |
| AAV2 variant | 11046 | WO2018071831 SEQ ID NO: 119 |
| AAV2 variant | 11047 | WO2018071831 SEQ ID NO: 120 |
| AAV2 variant | 11048 | WO2018071831 SEQ ID NO: 121 |
| AAV2 variant | 11049 | WO2018071831 SEQ ID NO: 122 |
| AAV2 variant | 11050 | WO2018071831 SEQ ID NO: 123 |
| AAV2 variant | 11051 | WO2018071831 SEQ ID NO: 124 |
| AAV2 variant | 11052 | WO2018071831 SEQ ID NO: 125 |
| AAV2 variant | 11053 | WO2018071831 SEQ ID NO: 126 |
| AAV2 variant | 11054 | WO2018071831 SEQ ID NO: 127 |
| AAV2 variant | 11055 | WO2018071831 SEQ ID NO: 128 |
| AAV2 variant | 11056 | WO2018071831 SEQ ID NO: 129 |
| AAV2 variant | 11057 | WO2018071831 SEQ ID NO: 130 |
| AAV2 variant | 11058 | WO2018071831 SEQ ID NO: 131 |
| AAV2 variant | 11059 | WO2018071831 SEQ ID NO: 132 |
| AAV2 variant | 11060 | WO2018071831 SEQ ID NO: 133 |
| AAV2 variant | 11061 | WO2018071831 SEQ ID NO: 134 |
| AAV2 variant | 11062 | WO2018071831 SEQ ID NO: 135 |
| AAV2 variant | 11063 | WO2018071831 SEQ ID NO: 136 |
| AAV2 variant | 11064 | WO2018071831 SEQ ID NO: 137 |
| AAV2 variant | 11065 | WO2018071831 SEQ ID NO: 138 |
| AAV2 variant | 11066 | WO2018071831 SEQ ID NO: 139 |
| AAV2 variant | 11067 | WO2018071831 SEQ ID NO: 140 |
| AAV2 variant | 11068 | WO2018071831 SEQ ID NO: 141 |
| AAV2 variant | 11069 | WO2018071831 SEQ ID NO: 142 |
| AAV2 variant | 11070 | WO2018071831 SEQ ID NO: 143 |
| AAV2 variant | 11071 | WO2018071831 SEQ ID NO: 144 |
| AAV2 variant | 11072 | WO2018071831 SEQ ID NO: 145 |
| AAV2 variant | 11073 | WO2018071831 SEQ ID NO: 146 |
| AAV2 variant | 11074 | WO2018071831 SEQ ID NO: 147 |
| AAV2 variant | 11075 | WO2018071831 SEQ ID NO: 148 |
| AAV2 variant | 11076 | WO2018071831 SEQ ID NO: 149 |
| AAV2 variant | 11077 | WO2018071831 SEQ ID NO: 150 |
| AAV2 variant | 11078 | WO2018071831 SEQ ID NO: 151 |
| AAV2 variant | 11079 | WO2018071831 SEQ ID NO: 152 |
| AAV2 variant | 11080 | WO2018071831 SEQ ID NO: 153 |
| AAV2 variant | 11081 | WO2018071831 SEQ ID NO: 154 |
| AAV2 variant | 11082 | WO2018071831 SEQ ID NO: 155 |
| AAV2 variant | 11083 | WO2018071831 SEQ ID NO: 156 |
| AAV2 variant | 11084 | WO2018071831 SEQ ID NO: 157 |
| AAV2 variant | 11085 | WO2018071831 SEQ ID NO: 158 |
| AAV2 variant | 11086 | WO2018071831 SEQ ID NO: 159 |
| AAV2 variant | 11087 | WO2018071831 SEQ ID NO: 160 |
| AAV2 variant | 11088 | WO2018071831 SEQ ID NO: 161 |
| AAV2 variant | 11089 | WO2018071831 SEQ ID NO: 162 |
| AAV2 variant | 11090 | WO2018071831 SEQ ID NO: 163 |
| AAV2 variant | 11091 | WO2018071831 SEQ ID NO: 164 |
| AAV2 variant | 11092 | WO2018071831 SEQ ID NO: 165 |
| AAV2 variant | 11093 | WO2018071831 SEQ ID NO: 166 |
| AAV2 variant | 11094 | WO2018071831 SEQ ID NO: 167 |
| AAV2 variant | 11095 | WO2018071831 SEQ ID NO: 168 |
| AAV2 variant | 11096 | WO2018071831 SEQ ID NO: 169 |
| AAV2 variant | 11097 | WO2018071831 SEQ ID NO: 170 |
| AAV2 variant | 11098 | WO2018071831 SEQ ID NO: 171 |
| AAV2 variant | 11099 | WO2018071831 SEQ ID NO: 172 |
| AAV2 variant | 11100 | WO2018071831 SEQ ID NO: 173 |
| AAV2 variant | 11101 | WO2018071831 SEQ ID NO: 174 |
| AAV2 variant | 11102 | WO2018071831 SEQ ID NO: 175 |
| AAV2 variant | 11103 | WO2018071831 SEQ ID NO: 176 |
| AAV2 variant | 11104 | WO2018071831 SEQ ID NO: 177 |
| AAV2 variant | 11105 | WO2018071831 SEQ ID NO: 178 |
| AAV2 variant | 11106 | WO2018071831 SEQ ID NO: 179 |
| AAV2 variant | 11107 | WO2018071831 SEQ ID NO: 180 |
| AAV2 variant | 11108 | WO2018071831 SEQ ID NO: 181 |
| AAV2 variant | 11109 | WO2018071831 SEQ ID NO: 182 |
| AAV2 variant | 11110 | WO2018071831 SEQ ID NO: 183 |
| AAV2 variant | 11111 | WO2018071831 SEQ ID NO: 184 |
| AAV2 variant | 11112 | WO2018071831 SEQ ID NO: 185 |
| AAV2 variant | 11113 | WO2018071831 SEQ ID NO: 186 |
| AAV2 variant | 11114 | WO2018071831 SEQ ID NO: 187 |
| AAV2 variant | 11115 | WO2018071831 SEQ ID NO: 188 |
| AAV2 variant | 11116 | WO2018071831 SEQ ID NO: 189 |
| AAV2 variant | 11117 | WO2018071831 SEQ ID NO: 190 |
| AAV2 variant | 11118 | WO2018071831 SEQ ID NO: 191 |
| AAV2 variant | 11119 | WO2018071831 SEQ ID NO: 192 |
| AAV2 variant | 11120 | WO2018071831 SEQ ID NO: 193 |
| AAV2 variant | 11121 | WO2018071831 SEQ ID NO: 194 |
| AAV2 variant | 11122 | WO2018071831 SEQ ID NO: 195 |
| AAV2 variant | 11123 | WO2018071831 SEQ ID NO: 196 |
| AAV2 variant | 11124 | WO2018071831 SEQ ID NO: 197 |
| AAV2 variant | 11125 | WO2018071831 SEQ ID NO: 198 |
| AAV2 variant | 11126 | WO2018071831 SEQ ID NO: 199 |
| AAV2 variant | 11127 | WO2018071831 SEQ ID NO: 200 |
| AAV2 variant | 11128 | WO2018071831 SEQ ID NO: 201 |
| AAV2 variant | 11129 | WO2018071831 SEQ ID NO: 202 |
| AAV2 variant | 11130 | WO2018071831 SEQ ID NO: 203 |
| AAV2 variant | 11131 | WO2018071831 SEQ ID NO: 204 |
| AAV2 variant | 11132 | WO2018071831 SEQ ID NO: 205 |
| AAV2 variant | 11133 | WO2018071831 SEQ ID NO: 206 |
| AAV2 variant | 11134 | WO2018071831 SEQ ID NO: 207 |
| AAV2 variant | 11135 | WO2018071831 SEQ ID NO: 208 |
| AAV2 variant | 11136 | WO2018071831 SEQ ID NO: 209 |
| AAV2 variant | 11137 | WO2018071831 SEQ ID NO: 210 |
| AAV2 variant | 11138 | WO2018071831 SEQ ID NO: 211 |
| AAV2 variant | 11139 | WO2018071831 SEQ ID NO: 212 |
| AAV2 variant | 11140 | WO2018071831 SEQ ID NO: 213 |
| AAV2 variant | 11141 | WO2018071831 SEQ ID NO: 214 |
| AAV2 variant | 11142 | WO2018071831 SEQ ID NO: 215 |
| AAV2 variant | 11143 | WO2018071831 SEQ ID NO: 216 |
| AAV2 variant | 11144 | WO2018071831 SEQ ID NO: 217 |
| AAV2 variant | 11145 | WO2018071831 SEQ ID NO: 218 |
| AAV2 variant | 11146 | WO2018071831 SEQ ID NO: 219 |
| AAV2 variant | 11147 | WO2018071831 SEQ ID NO: 220 |
| AAV2 variant | 11148 | WO2018071831 SEQ ID NO: 221 |
| AAV2 variant | 11149 | WO2018071831 SEQ ID NO: 222 |
| AAV2 variant | 11150 | WO2018071831 SEQ ID NO: 223 |
| AAV2 variant | 11151 | WO2018071831 SEQ ID NO: 224 |
| AAV2 variant | 11152 | WO2018071831 SEQ ID NO: 225 |
| AAV2 variant | 11153 | WO2018071831 SEQ ID NO: 226 |
| AAV2 variant | 11154 | WO2018071831 SEQ ID NO: 227 |
| AAV2 variant | 11155 | WO2018071831 SEQ ID NO: 228 |
| AAV2 variant | 11156 | WO2018071831 SEQ ID NO: 229 |
| AAV2 variant | 11157 | WO2018071831 SEQ ID NO: 230 |
| AAV2 variant | 11158 | WO2018071831 SEQ ID NO: 231 |
| AAV2 variant | 11159 | WO2018071831 SEQ ID NO: 232 |
| AAV2 variant | 11160 | WO2018071831 SEQ ID NO: 233 |
| AAV2 variant | 11161 | WO2018071831 SEQ ID NO: 234 |
| AAV2 variant | 11162 | WO2018071831 SEQ ID NO: 235 |
| AAV2 variant | 11163 | WO2018071831 SEQ ID NO: 236 |
| AAV2 variant | 11164 | WO2018071831 SEQ ID NO: 237 |
| AAV2 variant | 11165 | WO2018071831 SEQ ID NO: 238 |
| AAV2 variant | 11166 | WO2018071831 SEQ ID NO: 239 |
| AAV2 variant | 11167 | WO2018071831 SEQ ID NO: 240 |
| AAV2 variant | 11168 | WO2018071831 SEQ ID NO: 241 |
| AAV2 variant | 11169 | WO2018071831 SEQ ID NO: 242 |
| AAV2 variant | 11170 | WO2018071831 SEQ ID NO: 243 |
| AAV2 variant | 11171 | WO2018071831 SEQ ID NO: 244 |
| AAV2 variant | 11172 | WO2018071831 SEQ ID NO: 245 |
| AAV2 variant | 11173 | WO2018071831 SEQ ID NO: 246 |
| AAV2 variant | 11174 | WO2018071831 SEQ ID NO: 247 |
| AAV2 variant | 11175 | WO2018071831 SEQ ID NO: 248 |
| AAV2 variant | 11176 | WO2018071831 SEQ ID NO: 249 |
| AAV2 variant | 11177 | WO2018071831 SEQ ID NO: 250 |
| AAV2 variant | 11178 | WO2018071831 SEQ ID NO: 251 |
| AAV2 variant | 11179 | WO2018071831 SEQ ID NO: 252 |
| AAV2 variant | 11180 | WO2018071831 SEQ ID NO: 253 |
| AAV2 variant | 11181 | WO2018071831 SEQ ID NO: 254 |
| AAV2 variant | 11182 | WO2018071831 SEQ ID NO: 255 |
| AAV2 variant | 11183 | WO2018071831 SEQ ID NO: 256 |
| AAV2 variant | 11184 | WO2018071831 SEQ ID NO: 257 |
| AAV2 variant | 11185 | WO2018071831 SEQ ID NO: 258 |
| AAV2 variant | 11186 | WO2018071831 SEQ ID NO: 259 |
| AAV2 variant | 11187 | WO2018071831 SEQ ID NO: 260 |
| AAV2 variant | 11188 | WO2018071831 SEQ ID NO: 261 |
| AAV2 variant | 11189 | WO2018071831 SEQ ID NO: 262 |
| AAV2 variant | 11190 | WO2018071831 SEQ ID NO: 263 |
| AAV2 variant | 11191 | WO2018071831 SEQ ID NO: 264 |
| AAV2 variant | 11192 | WO2018071831 SEQ ID NO: 265 |
| AAV2 variant | 11193 | WO2018071831 SEQ ID NO: 266 |
| AAV2 variant | 11194 | WO2018071831 SEQ ID NO: 267 |
| AAV2 variant | 11195 | WO2018071831 SEQ ID NO: 268 |
| AAV2 variant | 11196 | WO2018071831 SEQ ID NO: 269 |
| AAV2 variant | 11197 | WO2018071831 SEQ ID NO: 270 |
| AAV2 variant | 11198 | WO2018071831 SEQ ID NO: 271 |
| AAV2 variant | 11199 | WO2018071831 SEQ ID NO: 272 |
| AAV2 variant | 11200 | WO2018071831 SEQ ID NO: 273 |
| AAV2 variant | 11201 | WO2018071831 SEQ ID NO: 274 |
| AAV2 variant | 11202 | WO2018071831 SEQ ID NO: 275 |
| AAV2 variant | 11203 | WO2018071831 SEQ ID NO: 276 |
| AAV2 variant | 11204 | WO2018071831 SEQ ID NO: 277 |
| AAV2 variant | 11205 | WO2018071831 SEQ ID NO: 278 |
| AAV2 variant | 11206 | WO2018071831 SEQ ID NO: 279 |
| AAV2 variant | 11207 | WO2018071831 SEQ ID NO: 280 |
| AAV2 variant | 11208 | WO2018071831 SEQ ID NO: 281 |
| AAV2 variant | 11209 | WO2018071831 SEQ ID NO: 282 |
| AAV2 variant | 11210 | WO2018071831 SEQ ID NO: 283 |
| AAV2 variant | 11211 | WO2018071831 SEQ ID NO: 284 |
| AAV2 variant | 11212 | WO2018071831 SEQ ID NO: 285 |
| AAV2 variant | 11213 | WO2018071831 SEQ ID NO: 286 |
| AAV2 variant | 11214 | WO2018071831 SEQ ID NO: 287 |
| AAV2 variant | 11215 | WO2018071831 SEQ ID NO: 288 |
| AAV2 variant | 11216 | WO2018071831 SEQ ID NO: 289 |
| AAV2 variant | 11217 | WO2018071831 SEQ ID NO: 290 |
| AAV2 variant | 11218 | WO2018071831 SEQ ID NO: 291 |
| AAV2 variant | 11219 | WO2018071831 SEQ ID NO: 292 |
| AAV2 variant | 11220 | WO2018071831 SEQ ID NO: 293 |
| AAV2 variant | 11221 | WO2018071831 SEQ ID NO: 294 |
| AAV2 variant | 11222 | WO2018071831 SEQ ID NO: 295 |
| AAV2 variant | 11223 | WO2018071831 SEQ ID NO: 296 |
| AAV2 variant | 11224 | WO2018071831 SEQ ID NO: 297 |
| AAV2 variant | 11225 | WO2018071831 SEQ ID NO: 298 |
| AAV2 variant | 11226 | WO2018071831 SEQ ID NO: 299 |
| AAV2 variant | 11227 | WO2018071831 SEQ ID NO: 300 |
| AAV2 variant | 11228 | WO2018071831 SEQ ID NO: 301 |
| AAV2 variant | 11229 | WO2018071831 SEQ ID NO: 302 |
| AAV2 variant | 11230 | WO2018071831 SEQ ID NO: 303 |
| AAV2 variant | 11231 | WO2018071831 SEQ ID NO: 304 |
| AAV2 variant | 11232 | WO2018071831 SEQ ID NO: 305 |
| AAV2 variant | 11233 | WO2018071831 SEQ ID NO: 306 |
| AAV2 variant | 11234 | WO2018071831 SEQ ID NO: 307 |
| AAV2 variant | 11235 | WO2018071831 SEQ ID NO: 308 |
| AAV2 variant | 11236 | WO2018071831 SEQ ID NO: 309 |
| AAV2 variant | 11237 | WO2018071831 SEQ ID NO: 310 |
| AAV2 variant | 11238 | WO2018071831 SEQ ID NO: 311 |
| AAV2 variant | 11239 | WO2018071831 SEQ ID NO: 312 |
| AAV2 variant | 11240 | WO2018071831 SEQ ID NO: 313 |
| AAV2 variant | 11241 | WO2018071831 SEQ ID NO: 314 |
| AAV2 variant | 11242 | WO2018071831 SEQ ID NO: 315 |
| AAV2 variant | 11243 | WO2018071831 SEQ ID NO: 316 |
| AAV2 variant | 11244 | WO2018071831 SEQ ID NO: 317 |
| AAV2 variant | 11245 | WO2018071831 SEQ ID NO: 318 |
| AAV2 variant | 11246 | WO2018071831 SEQ ID NO: 319 |
| AAV2 variant | 11247 | WO2018071831 SEQ ID NO: 320 |
| AAV2 variant | 11248 | WO2018071831 SEQ ID NO: 321 |
| AAV2 variant | 11249 | WO2018071831 SEQ ID NO: 322 |
| AAV2 variant | 11250 | WO2018071831 SEQ ID NO: 323 |
| AAV2 variant | 11251 | WO2018071831 SEQ ID NO: 324 |
| AAV2 variant | 11252 | WO2018071831 SEQ ID NO: 325 |
| AAV2 variant | 11253 | WO2018071831 SEQ ID NO: 326 |
| AAV2 variant | 11254 | WO2018071831 SEQ ID NO: 327 |
| AAV2 variant | 11255 | WO2018071831 SEQ ID NO: 328 |
| AAV2 variant | 11256 | WO2018071831 SEQ ID NO: 329 |
| AAV2 variant | 11257 | WO2018071831 SEQ ID NO: 330 |
| AAV2 variant | 11258 | WO2018071831 SEQ ID NO: 331 |
| AAV2 variant | 11259 | WO2018071831 SEQ ID NO: 332 |
| AAV2 variant | 11260 | WO2018071831 SEQ ID NO: 333 |
| AAV2 variant | 11261 | WO2018071831 SEQ ID NO: 334 |
| AAV2 variant | 11262 | WO2018071831 SEQ ID NO: 335 |
| AAV2 variant | 11263 | WO2018071831 SEQ ID NO: 336 |
| AAV2 variant | 11264 | WO2018071831 SEQ ID NO: 337 |
| AAV2 variant | 11265 | WO2018071831 SEQ ID NO: 338 |
| AAV2 variant | 11266 | WO2018071831 SEQ ID NO: 339 |
| AAV2 variant | 11267 | WO2018071831 SEQ ID NO: 340 |
| AAV2 variant | 11268 | WO2018071831 SEQ ID NO: 341 |
| AAV2 variant | 11269 | WO2018071831 SEQ ID NO: 342 |
| AAV2 variant | 11270 | WO2018071831 SEQ ID NO: 343 |
| AAV2 variant | 11271 | WO2018071831 SEQ ID NO: 344 |
| AAV2 variant | 11272 | WO2018071831 SEQ ID NO: 345 |
| AAV2 variant | 11273 | WO2018071831 SEQ ID NO: 346 |
| AAV2 variant | 11274 | WO2018071831 SEQ ID NO: 347 |
| AAV2 variant | 11275 | WO2018071831 SEQ ID NO: 348 |
| AAV2 variant | 11276 | WO2018071831 SEQ ID NO: 349 |
| AAV2 variant | 11277 | WO2018071831 SEQ ID NO: 350 |
| AAV2 variant | 11278 | WO2018071831 SEQ ID NO: 351 |
| AAV2 variant | 11279 | WO2018071831 SEQ ID NO: 352 |
| AAV2 variant | 11280 | WO2018071831 SEQ ID NO: 353 |
| AAV2 variant | 11281 | WO2018071831 SEQ ID NO: 354 |
| AAV2 variant | 11282 | WO2018071831 SEQ ID NO: 355 |
| AAV2 variant | 11283 | WO2018071831 SEQ ID NO: 356 |
| AAV2 variant | 11284 | WO2018071831 SEQ ID NO: 357 |
| AAV2 variant | 11285 | WO2018071831 SEQ ID NO: 358 |
| AAV2 variant | 11286 | WO2018071831 SEQ ID NO: 359 |
| AAV2 variant | 11287 | WO2018071831 SEQ ID NO: 360 |
| AAV2 variant | 11288 | WO2018071831 SEQ ID NO: 361 |
| AAV2 variant | 11289 | WO2018071831 SEQ ID NO: 362 |
| AAV2 variant | 11290 | WO2018071831 SEQ ID NO: 363 |
| AAV2 variant | 11291 | WO2018071831 SEQ ID NO: 364 |
| AAV2 variant | 11292 | WO2018071831 SEQ ID NO: 365 |
| AAV2 variant | 11293 | WO2018071831 SEQ ID NO: 366 |
| AAV2 variant | 11294 | WO2018071831 SEQ ID NO: 367 |
| AAV2 variant | 11295 | WO2018071831 SEQ ID NO: 368 |
| AAV2 variant | 11296 | WO2018071831 SEQ ID NO: 369 |
| AAV2 variant | 11297 | WO2018071831 SEQ ID NO: 370 |
| AAV2 variant | 11298 | WO2018071831 SEQ ID NO: 371 |
| AAV2 variant | 11299 | WO2018071831 SEQ ID NO: 372 |
| AAV2 variant | 11300 | WO2018071831 SEQ ID NO: 373 |
| AAV2 variant | 11301 | WO2018071831 SEQ ID NO: 374 |
| AAV2 variant | 11302 | WO2018071831 SEQ ID NO: 375 |
| AAV2 variant | 11303 | WO2018071831 SEQ ID NO: 376 |
| AAV2 variant | 11304 | WO2018071831 SEQ ID NO: 377 |
| AAV2 variant | 11305 | WO2018071831 SEQ ID NO: 378 |
| AAV2 variant | 11306 | WO2018071831 SEQ ID NO: 379 |
| AAV2 variant | 11307 | WO2018071831 SEQ ID NO: 380 |
| AAV2 variant | 11308 | WO2018071831 SEQ ID NO: 381 |
| AAV2 variant | 11309 | WO2018071831 SEQ ID NO: 382 |
| AAV2 variant | 11310 | WO2018071831 SEQ ID NO: 383 |
| AAV2 variant | 11311 | WO2018071831 SEQ ID NO: 384 |
| AAV2 variant | 11312 | WO2018071831 SEQ ID NO: 385 |
| AAV2 variant | 11313 | WO2018071831 SEQ ID NO: 386 |
| AAV2 variant | 11314 | WO2018071831 SEQ ID NO: 387 |
| AAV2 variant | 11315 | WO2018071831 SEQ ID NO: 388 |
| AAV2 variant | 11316 | WO2018071831 SEQ ID NO: 389 |
| AAV2 variant | 11317 | WO2018071831 SEQ ID NO: 390 |
| AAV2 variant | 11318 | WO2018071831 SEQ ID NO: 391 |
| AAV2 variant | 11319 | WO2018071831 SEQ ID NO: 392 |
| AAV2 variant | 11320 | WO2018071831 SEQ ID NO: 393 |
| AAV2 variant | 11321 | WO2018071831 SEQ ID NO: 394 |
| AAV2 variant | 11322 | WO2018071831 SEQ ID NO: 395 |
| AAV2 variant | 11323 | WO2018071831 SEQ ID NO: 396 |
| AAV2 variant | 11324 | WO2018071831 SEQ ID NO: 397 |
| AAV2 variant | 11325 | WO2018071831 SEQ ID NO: 398 |
| AAV2 variant | 11326 | WO2018071831 SEQ ID NO: 399 |
| AAV2 variant | 11327 | WO2018071831 SEQ ID NO: 400 |
| AAV2 variant | 11328 | WO2018071831 SEQ ID NO: 401 |
| AAV2 variant | 11329 | WO2018071831 SEQ ID NO: 402 |
| AAV2 variant | 11330 | WO2018071831 SEQ ID NO: 403 |
| AAV2 variant | 11331 | WO2018071831 SEQ ID NO: 404 |
| AAV2 variant | 11332 | WO2018071831 SEQ ID NO: 405 |
| AAV2 variant | 11333 | WO2018071831 SEQ ID NO: 406 |
| AAV2 variant | 11334 | WO2018071831 SEQ ID NO: 407 |
| AAV2 variant | 11335 | WO2018071831 SEQ ID NO: 408 |
| AAV2 variant | 11336 | WO2018071831 SEQ ID NO: 409 |
| AAV2/3 variant | 11337 | WO2018071831 SEQ ID NO: 435 |
| AAV2/3 variant | 11338 | WO2018071831 SEQ ID NO: 436 |
| AAV2/3 variant | 11339 | WO2018071831 SEQ ID NO: 437 |
| AAV2/3 variant | 11340 | WO2018071831 SEQ ID NO: 438 |
| AAV2/3 variant | 11341 | WO2018071831 SEQ ID NO: 439 |
| AAV2/3 variant | 11342 | WO2018071831 SEQ ID NO: 440 |
| AAV2/3 variant | 11343 | WO2018071831 SEQ ID NO: 441 |
| AAV2/3 variant | 11344 | WO2018071831 SEQ ID NO: 442 |
| AAV2/3 variant | 11345 | WO2018071831 SEQ ID NO: 443 |
| AAV2/3 variant | 11346 | WO2018071831 SEQ ID NO: 444 |
| AAV2/3 variant | 11347 | WO2018071831 SEQ ID NO: 445 |
| AAV2/3 variant | 11348 | WO2018071831 SEQ ID NO: 446 |
| AAV2/3 variant | 11349 | WO2018071831 SEQ ID NO: 447 |
| AAV2/3 variant | 11350 | WO2018071831 SEQ ID NO: 448 |
| AAV2/3 variant | 11351 | WO2018071831 SEQ ID NO: 449 |
| AAV2/3 variant | 11352 | WO2018071831 SEQ ID NO: 450 |
| AAV2/3 variant | 11353 | WO2018071831 SEQ ID NO: 451 |
| AAV2/3 variant | 11354 | WO2018071831 SEQ ID NO: 452 |
| AAV2/3 variant | 11355 | WO2018071831 SEQ ID NO: 453 |
| AAV2/3 variant | 11356 | WO2018071831 SEQ ID NO: 454 |
| AAV2/3 variant | 11357 | WO2018071831 SEQ ID NO: 455 |
| AAV2/3 variant | 11358 | WO2018071831 SEQ ID NO: 456 |
| AAV2/3 variant | 11359 | WO2018071831 SEQ ID NO: 457 |
| AAV2/3 variant | 11360 | WO2018071831 SEQ ID NO: 458 |
| AAV2/3 variant | 11361 | WO2018071831 SEQ ID NO: 459 |
| AAV2/3 variant | 11362 | WO2018071831 SEQ ID NO: 460 |
| AAV2/3 variant | 11363 | WO2018071831 SEQ ID NO: 461 |
| AAV2/3 variant | 11364 | WO2018071831 SEQ ID NO: 462 |
| AAV2/3 variant | 11365 | WO2018071831 SEQ ID NO: 463 |
| AAV2/3 variant | 11366 | WO2018071831 SEQ ID NO: 464 |
| AAV2/3 variant | 11367 | WO2018071831 SEQ ID NO: 465 |
| AAV2/3 variant | 11368 | WO2018071831 SEQ ID NO: 466 |
| AAV2/3 variant | 11369 | WO2018071831 SEQ ID NO: 467 |
| AAV2/3 variant | 11370 | WO2018071831 SEQ ID NO: 468 |
| AAV2/3 variant | 11371 | WO2018071831 SEQ ID NO: 469 |
| AAV2/3 variant | 11372 | WO2018071831 SEQ ID NO: 470 |
| AAV2/3 variant | 11373 | WO2018071831 SEQ ID NO: 471 |
| AAV2/3 variant | 11374 | WO2018071831 SEQ ID NO: 472 |
| AAV2/3 variant | 11375 | WO2018071831 SEQ ID NO: 473 |
| AAV2/3 variant | 11376 | WO2018071831 SEQ ID NO: 474 |
| AAV2/3 variant | 11377 | WO2018071831 SEQ ID NO: 475 |
| AAV2/3 variant | 11378 | WO2018071831 SEQ ID NO: 476 |
| AAV2/3 variant | 11379 | WO2018071831 SEQ ID NO: 477 |
| AAV2/3 variant | 11380 | WO2018071831 SEQ ID NO: 478 |
| AAV2/3 variant | 11381 | WO2018071831 SEQ ID NO: 479 |
| AAV2/3 variant | 11382 | WO2018071831 SEQ ID NO: 480 |
| AAV2/3 variant | 11383 | WO2018071831 SEQ ID NO: 481 |
| AAV2/3 variant | 11384 | WO2018071831 SEQ ID NO: 482 |
| AAV2/3 variant | 11385 | WO2018071831 SEQ ID NO: 483 |
| AAV2/3 variant | 11386 | WO2018071831 SEQ ID NO: 484 |
| AAV2/3 variant | 11387 | WO2018071831 SEQ ID NO: 485 |
| AAV2/3 variant | 11388 | WO2018071831 SEQ ID NO: 486 |
| AAV2/3 variant | 11389 | WO2018071831 SEQ ID NO: 487 |
| AAV2/3 variant | 11390 | WO2018071831 SEQ ID NO: 488 |
| AAV2/3 variant | 11391 | WO2018071831 SEQ ID NO: 489 |
| AAV2/3 variant | 11392 | WO2018071831 SEQ ID NO: 490 |
| AAV2/3 variant | 11393 | WO2018071831 SEQ ID NO: 491 |
| AAV2/3 variant | 11394 | WO2018071831 SEQ ID NO: 492 |
| AAV2/3 variant | 11395 | WO2018071831 SEQ ID NO: 493 |
| AAV2/3 variant | 11396 | WO2018071831 SEQ ID NO: 494 |
| AAV2/3 variant | 11397 | WO2018071831 SEQ ID NO: 495 |
| AAV2/3 variant | 11398 | WO2018071831 SEQ ID NO: 496 |
| AAV2/3 variant | 11399 | WO2018071831 SEQ ID NO: 497 |
| AAV2/3 variant | 11400 | WO2018071831 SEQ ID NO: 498 |
| AAV2/3 variant | 11401 | WO2018071831 SEQ ID NO: 499 |
| AAV2/3 variant | 11402 | WO2018071831 SEQ ID NO: 500 |
| AAV2/3 variant | 11403 | WO2018071831 SEQ ID NO: 501 |
| AAV2/3 variant | 11404 | WO2018071831 SEQ ID NO: 502 |
| AAV2/3 variant | 11405 | WO2018071831 SEQ ID NO: 503 |
| AAV2/3 variant | 11406 | WO2018071831 SEQ ID NO: 504 |
| AAV2/3 variant | 11407 | WO2018071831 SEQ ID NO: 505 |
| AAV2/3 variant | 11408 | WO2018071831 SEQ ID NO: 506 |
| AAV2/3 variant | 11409 | WO2018071831 SEQ ID NO: 507 |
| AAV2/3 variant | 11410 | WO2018071831 SEQ ID NO: 508 |
| AAV2/3 variant | 11411 | WO2018071831 SEQ ID NO: 509 |
| AAV2/3 variant | 11412 | WO2018071831 SEQ ID NO: 510 |
| AAV2/3 variant | 11413 | WO2018071831 SEQ ID NO: 511 |
| AAV2/3 variant | 11414 | WO2018071831 SEQ ID NO: 512 |
| AAV2/3 variant | 11415 | WO2018071831 SEQ ID NO: 513 |
| AAV2/3 variant | 11416 | WO2018071831 SEQ ID NO: 514 |
| AAV2/3 variant | 11417 | WO2018071831 SEQ ID NO: 515 |
| AAV2/3 variant | 11418 | WO2018071831 SEQ ID NO: 516 |
| AAV2/3 variant | 11419 | WO2018071831 SEQ ID NO: 517 |
| AAV2/3 variant | 11420 | WO2018071831 SEQ ID NO: 518 |
| AAV2/3 variant | 11421 | WO2018071831 SEQ ID NO: 519 |
| AAV2/3 variant | 11422 | WO2018071831 SEQ ID NO: 520 |
| AAV2/3 variant | 11423 | WO2018071831 SEQ ID NO: 521 |
| AAV2/3 variant | 11424 | WO2018071831 SEQ ID NO: 522 |
| AAV2/3 variant | 11425 | WO2018071831 SEQ ID NO: 523 |
| AAV2/3 variant | 11426 | WO2018071831 SEQ ID NO: 524 |
| AAV2/3 variant | 11427 | WO2018071831 SEQ ID NO: 525 |
| AAV2/3 variant | 11428 | WO2018071831 SEQ ID NO: 526 |
| AAV2/3 variant | 11429 | WO2018071831 SEQ ID NO: 527 |
| AAV2/3 variant | 11430 | WO2018071831 SEQ ID NO: 528 |
| AAV2/3 variant | 11431 | WO2018071831 SEQ ID NO: 529 |
| AAV2/3 variant | 11432 | WO2018071831 SEQ ID NO: 530 |
| AAV2/3 variant | 11433 | WO2018071831 SEQ ID NO: 531 |
| AAV2/3 variant | 11434 | WO2018071831 SEQ ID NO: 532 |
| AAV2/3 variant | 11435 | WO2018071831 SEQ ID NO: 533 |
| AAV2/3 variant | 11436 | WO2018071831 SEQ ID NO: 534 |
| AAV2/3 variant | 11437 | WO2018071831 SEQ ID NO: 535 |
| AAV2/3 variant | 11438 | WO2018071831 SEQ ID NO: 536 |
| AAV2/3 variant | 11439 | WO2018071831 SEQ ID NO: 537 |
| AAV2/3 variant | 11440 | WO2018071831 SEQ ID NO: 538 |
| AAV2/3 variant | 11441 | WO2018071831 SEQ ID NO: 539 |
| AAV2/3 variant | 11442 | WO2018071831 SEQ ID NO: 540 |
| AAV2/3 variant | 11443 | WO2018071831 SEQ ID NO: 541 |
| AAV2/3 variant | 11444 | WO2018071831 SEQ ID NO: 542 |
| AAV2/3 variant | 11445 | WO2018071831 SEQ ID NO: 543 |
| AAV2/3 variant | 11446 | WO2018071831 SEQ ID NO: 544 |
| AAV2/3 variant | 11447 | WO2018071831 SEQ ID NO: 545 |
| AAV2/3 variant | 11448 | WO2018071831 SEQ ID NO: 546 |
| AAV2/3 variant | 11449 | WO2018071831 SEQ ID NO: 547 |
| AAV2/3 variant | 11450 | WO2018071831 SEQ ID NO: 548 |
| AAV2/3 variant | 11451 | WO2018071831 SEQ ID NO: 549 |
| AAV2/3 variant | 11452 | WO2018071831 SEQ ID NO: 550 |
| AAV2/3 variant | 11453 | WO2018071831 SEQ ID NO: 551 |
| AAV2/3 variant | 11454 | WO2018071831 SEQ ID NO: 552 |
| AAV2/3 variant | 11455 | WO2018071831 SEQ ID NO: 553 |
| AAV2/3 variant | 11456 | WO2018071831 SEQ ID NO: 554 |
| AAV2/3 variant | 11457 | WO2018071831 SEQ ID NO: 555 |
| AAV2/3 variant | 11458 | WO2018071831 SEQ ID NO: 556 |
| AAV2/3 variant | 11459 | WO2018071831 SEQ ID NO: 557 |
| AAV2/3 variant | 11460 | WO2018071831 SEQ ID NO: 558 |
| AAV2/3 variant | 11461 | WO2018071831 SEQ ID NO: 559 |
| AAV2/3 variant | 11462 | WO2018071831 SEQ ID NO: 560 |
| AAV2/3 variant | 11463 | WO2018071831 SEQ ID NO: 561 |
| AAV2/3 variant | 11464 | WO2018071831 SEQ ID NO: 562 |
| AAV2/3 variant | 11465 | WO2018071831 SEQ ID NO: 563 |
| AAV2/3 variant | 11466 | WO2018071831 SEQ ID NO: 564 |
| AAV2/3 variant | 11467 | WO2018071831 SEQ ID NO: 565 |
| AAV2/3 variant | 11468 | WO2018071831 SEQ ID NO: 566 |
| AAV2/3 variant | 11469 | WO2018071831 SEQ ID NO: 567 |
| AAV2/3 variant | 11470 | WO2018071831 SEQ ID NO: 568 |
| AAV2/3 variant | 11471 | WO2018071831 SEQ ID NO: 569 |
| AAV2/3 variant | 11472 | WO2018071831 SEQ ID NO: 570 |
| AAV2/3 variant | 11473 | WO2018071831 SEQ ID NO: 571 |
| AAV2/3 variant | 11474 | WO2018071831 SEQ ID NO: 572 |
| AAV2/3 variant | 11475 | WO2018071831 SEQ ID NO: 573 |
| AAV2/3 variant | 11476 | WO2018071831 SEQ ID NO: 574 |
| AAV2/3 variant | 11477 | WO2018071831 SEQ ID NO: 575 |
| AAV2/3 variant | 11478 | WO2018071831 SEQ ID NO: 576 |
| AAV2/3 variant | 11479 | WO2018071831 SEQ ID NO: 577 |
| AAV2/3 variant | 11480 | WO2018071831 SEQ ID NO: 578 |
| AAV2/3 variant | 11481 | WO2018071831 SEQ ID NO: 579 |
| AAV2/3 variant | 11482 | WO2018071831 SEQ ID NO: 580 |
| AAV2/3 variant | 11483 | WO2018071831 SEQ ID NO: 581 |
| AAV2/3 variant | 11484 | WO2018071831 SEQ ID NO: 582 |
| AAV2/3 variant | 11485 | WO2018071831 SEQ ID NO: 583 |
| AAV2/3 variant | 11486 | WO2018071831 SEQ ID NO: 584 |
| AAV2/3 variant | 11487 | WO2018071831 SEQ ID NO: 585 |
| AAV2/3 variant | 11488 | WO2018071831 SEQ ID NO: 586 |
| AAV2/3 variant | 11489 | WO2018071831 SEQ ID NO: 587 |
| AAV2/3 variant | 11490 | WO2018071831 SEQ ID NO: 588 |
| AAV2/3 variant | 11491 | WO2018071831 SEQ ID NO: 589 |
| AAV2/3 variant | 11492 | WO2018071831 SEQ ID NO: 590 |
| AAV2/3 variant | 11493 | WO2018071831 SEQ ID NO: 591 |
| AAV2/3 variant | 11494 | WO2018071831 SEQ ID NO: 592 |
| AAV2/3 variant | 11495 | WO2018071831 SEQ ID NO: 593 |
| AAV2/3 variant | 11496 | WO2018071831 SEQ ID NO: 594 |
| AAV2/3 variant | 11497 | WO2018071831 SEQ ID NO: 595 |
| AAV2/3 variant | 11498 | WO2018071831 SEQ ID NO: 596 |
| AAV2/3 variant | 11499 | WO2018071831 SEQ ID NO: 597 |
| AAV2/3 variant | 11500 | WO2018071831 SEQ ID NO: 598 |
| AAV2/3 variant | 11501 | WO2018071831 SEQ ID NO: 599 |
| AAV2/3 variant | 11502 | WO2018071831 SEQ ID NO: 600 |
| AAV2/3 variant | 11503 | WO2018071831 SEQ ID NO: 601 |
| AAV2/3 variant | 11504 | WO2018071831 SEQ ID NO: 602 |
| AAV2/3 variant | 11505 | WO2018071831 SEQ ID NO: 603 |
| AAV2/3 variant | 11506 | WO2018071831 SEQ ID NO: 604 |
| AAV2/3 variant | 11507 | WO2018071831 SEQ ID NO: 605 |
| AAV2/3 variant | 11508 | WO2018071831 SEQ ID NO: 606 |
| AAV2/3 variant | 11509 | WO2018071831 SEQ ID NO: 607 |
| AAV2/3 variant | 11510 | WO2018071831 SEQ ID NO: 608 |
| AAV2/3 variant | 11511 | WO2018071831 SEQ ID NO: 609 |
| AAV2/3 variant | 11512 | WO2018071831 SEQ ID NO: 610 |
| AAV2/3 variant | 11513 | WO2018071831 SEQ ID NO: 611 |
| AAV2/3 variant | 11514 | WO2018071831 SEQ ID NO: 612 |
| AAV2/3 variant | 11515 | WO2018071831 SEQ ID NO: 613 |
| AAV2/3 variant | 11516 | WO2018071831 SEQ ID NO: 614 |
| AAV2/3 variant | 11517 | WO2018071831 SEQ ID NO: 615 |
| AAV2/3 variant | 11518 | WO2018071831 SEQ ID NO: 616 |
| AAV2/3 variant | 11519 | WO2018071831 SEQ ID NO: 617 |
| AAV2/3 variant | 11520 | WO2018071831 SEQ ID NO: 618 |
| AAV2/3 variant | 11521 | WO2018071831 SEQ ID NO: 619 |
| AAV2/3 variant | 11522 | WO2018071831 SEQ ID NO: 620 |
| AAV2/3 variant | 11523 | WO2018071831 SEQ ID NO: 621 |
| AAV2/3 variant | 11524 | WO2018071831 SEQ ID NO: 622 |
| AAV2/3 variant | 11525 | WO2018071831 SEQ ID NO: 623 |
| AAV2/3 variant | 11526 | WO2018071831 SEQ ID NO: 624 |
| AAV2/3 variant | 11527 | WO2018071831 SEQ ID NO: 625 |
| AAV2/3 variant | 11528 | WO2018071831 SEQ ID NO: 626 |
| AAV2/3 variant | 11529 | WO2018071831 SEQ ID NO: 627 |
| AAV2/3 variant | 11530 | WO2018071831 SEQ ID NO: 628 |
| AAV8 Variant | 11531 | WO2018071831 SEQ ID NO: 629 |
| AAV8 Variant | 11532 | WO2018071831 SEQ ID NO: 630 |
| AAV8 Variant | 11533 | WO2018071831 SEQ ID NO: 631 |
| AAV8 Variant | 11534 | WO2018071831 SEQ ID NO: 632 |
| AAV8 Variant | 11535 | WO2018071831 SEQ ID NO: 633 |
| AAV8 Variant | 11536 | WO2018071831 SEQ ID NO: 634 |
| AAV8 Variant | 11537 | WO2018071831 SEQ ID NO: 635 |
| AAV8 Variant | 11538 | WO2018071831 SEQ ID NO: 636 |
| AAV8 Variant | 11539 | WO2018071831 SEQ ID NO: 637 |
| AAV8 Variant | 11540 | WO2018071831 SEQ ID NO: 638 |
| AAV8 Variant | 11541 | WO2018071831 SEQ ID NO: 639 |
| AAV8 Variant | 11542 | WO2018071831 SEQ ID NO: 640 |
| AAV8 Variant | 11543 | WO2018071831 SEQ ID NO: 641 |
| AAV8 Variant | 11544 | WO2018071831 SEQ ID NO: 642 |
| AAV8 Variant | 11545 | WO2018071831 SEQ ID NO: 643 |
| AAV8 Variant | 11546 | WO2018071831 SEQ ID NO: 644 |
| AAV8 Variant | 11547 | WO2018071831 SEQ ID NO: 645 |
| AAV8 Variant | 11548 | WO2018071831 SEQ ID NO: 646 |
| AAV8 Variant | 11549 | WO2018071831 SEQ ID NO: 647 |
| AAV8 Variant | 11550 | WO2018071831 SEQ ID NO: 648 |
| AAV8 Variant | 11551 | WO2018071831 SEQ ID NO: 649 |
| AAV8 Variant | 11552 | WO2018071831 SEQ ID NO: 650 |
| AAV8 Variant | 11553 | WO2018071831 SEQ ID NO: 651 |
| AAV8 Variant | 11554 | WO2018071831 SEQ ID NO: 652 |
| AAV8 Variant | 11555 | WO2018071831 SEQ ID NO: 653 |
| AAV8 Variant | 11556 | WO2018071831 SEQ ID NO: 654 |
| AAV8 Variant | 11557 | WO2018071831 SEQ ID NO: 655 |
| AAV8 Variant | 11558 | WO2018071831 SEQ ID NO: 656 |
| AAV8 Variant | 11559 | WO2018071831 SEQ ID NO: 657 |
| AAV8 Variant | 11560 | WO2018071831 SEQ ID NO: 658 |
| AAV8 Variant | 11561 | WO2018071831 SEQ ID NO: 659 |
| AAV8 Variant | 11562 | WO2018071831 SEQ ID NO: 660 |
| AAV8 Variant | 11563 | WO2018071831 SEQ ID NO: 661 |
| AAV8 Variant | 11564 | WO2018071831 SEQ ID NO: 662 |
| AAV8 Variant | 11565 | WO2018071831 SEQ ID NO: 663 |
| AAV8 Variant | 11566 | WO2018071831 SEQ ID NO: 664 |
| AAV8 Variant | 11567 | WO2018071831 SEQ ID NO: 665 |
| AAV8 Variant | 11568 | WO2018071831 SEQ ID NO: 666 |
| AAV8 Variant | 11569 | WO2018071831 SEQ ID NO: 667 |
| AAV8 Variant | 11570 | WO2018071831 SEQ ID NO: 668 |
| AAV8 Variant | 11571 | WO2018071831 SEQ ID NO: 669 |
| AAV8 Variant | 11572 | WO2018071831 SEQ ID NO: 670 |
| AAV8 Variant | 11573 | WO2018071831 SEQ ID NO: 671 |
| AAV8 Variant | 11574 | WO2018071831 SEQ ID NO: 672 |
| AAV8 Variant | 11575 | WO2018071831 SEQ ID NO: 673 |
| AAV8 Variant | 11576 | WO2018071831 SEQ ID NO: 674 |
| AAV8 Variant | 11577 | WO2018071831 SEQ ID NO: 675 |
| AAV8 Variant | 11578 | WO2018071831 SEQ ID NO: 676 |
| AAV8 Variant | 11579 | WO2018071831 SEQ ID NO: 677 |
| AAV8 Variant | 11580 | WO2018071831 SEQ ID NO: 678 |
| AAV8 Variant | 11581 | WO2018071831 SEQ ID NO: 679 |
| AAV8 Variant | 11582 | WO2018071831 SEQ ID NO: 680 |
| AAV8 Variant | 11583 | WO2018071831 SEQ ID NO: 681 |
| AAV8 Variant | 11584 | WO2018071831 SEQ ID NO: 682 |
| AAV8 Variant | 11585 | WO2018071831 SEQ ID NO: 683 |
| AAV8 Variant | 11586 | WO2018071831 SEQ ID NO: 684 |
| AAV8 Variant | 11587 | WO2018071831 SEQ ID NO: 685 |
| AAV8 Variant | 11588 | WO2018071831 SEQ ID NO: 686 |
| AAV8 Variant | 11589 | WO2018071831 SEQ ID NO: 687 |
| AAV8 Variant | 11590 | WO2018071831 SEQ ID NO: 688 |
| AAV8 Variant | 11591 | WO2018071831 SEQ ID NO: 689 |
| AAV8 Variant | 11592 | WO2018071831 SEQ ID NO: 690 |
| AAV8 Variant | 11593 | WO2018071831 SEQ ID NO: 691 |
| AAV8 Variant | 11594 | WO2018071831 SEQ ID NO: 692 |
| AAV8 Variant | 11595 | WO2018071831 SEQ ID NO: 693 |
| AAV8 Variant | 11596 | WO2018071831 SEQ ID NO: 694 |
| AAV8 Variant | 11597 | WO2018071831 SEQ ID NO: 695 |
| AAV8 Variant | 11598 | WO2018071831 SEQ ID NO: 696 |
| AAV8 Variant | 11599 | WO2018071831 SEQ ID NO: 697 |
| AAV8 Variant | 11600 | WO2018071831 SEQ ID NO: 698 |
| AAV8 Variant | 11601 | WO2018071831 SEQ ID NO: 699 |
| AAV8 Variant | 11602 | WO2018071831 SEQ ID NO: 700 |
| AAV8 Variant | 11603 | WO2018071831 SEQ ID NO: 701 |
| AAV8 Variant | 11604 | WO2018071831 SEQ ID NO: 702 |
| AAV8 Variant | 11605 | WO2018071831 SEQ ID NO: 703 |
| AAV8 Variant | 11606 | WO2018071831 SEQ ID NO: 704 |
| AAV8 Variant | 11607 | WO2018071831 SEQ ID NO: 705 |
| AAV8 Variant | 11608 | WO2018071831 SEQ ID NO: 706 |
| AAV8 Variant | 11609 | WO2018071831 SEQ ID NO: 707 |
| AAV8 Variant | 11610 | WO2018071831 SEQ ID NO: 708 |
| AAV8 Variant | 11611 | WO2018071831 SEQ ID NO: 709 |
| AAV8 Variant | 11612 | WO2018071831 SEQ ID NO: 710 |
| AAV8 Variant | 11613 | WO2018071831 SEQ ID NO: 711 |
| AAV8 Variant | 11614 | WO2018071831 SEQ ID NO: 712 |
| AAV8 Variant | 11615 | WO2018071831 SEQ ID NO: 713 |
| AAV8 Variant | 11616 | WO2018071831 SEQ ID NO: 714 |
| AAV8 Variant | 11617 | WO2018071831 SEQ ID NO: 715 |
| AAV8 Variant | 11618 | WO2018071831 SEQ ID NO: 716 |
| AAV8 Variant | 11619 | WO2018071831 SEQ ID NO: 717 |
| AAV8 Variant | 11620 | WO2018071831 SEQ ID NO: 718 |
| AAV8 Variant | 11621 | WO2018071831 SEQ ID NO: 719 |
| AAV8 Variant | 11622 | WO2018071831 SEQ ID NO: 720 |
| AAV8 Variant | 11623 | WO2018071831 SEQ ID NO: 721 |
| AAV8 Variant | 11624 | WO2018071831 SEQ ID NO: 722 |
| AAV8 Variant | 11625 | WO2018071831 SEQ ID NO: 723 |
| AAV8 Variant | 11626 | WO2018071831 SEQ ID NO: 724 |
| AAV8 Variant | 11627 | WO2018071831 SEQ ID NO: 725 |
| AAV8 Variant | 11628 | WO2018071831 SEQ ID NO: 726 |
| AAV8 Variant | 11629 | WO2018071831 SEQ ID NO: 727 |
| AAV8 Variant | 11630 | WO2018071831 SEQ ID NO: 728 |
| AAV8 Variant | 11631 | WO2018071831 SEQ ID NO: 729 |
| AAV8 Variant | 11632 | WO2018071831 SEQ ID NO: 730 |
| AAV8 Variant | 11633 | WO2018071831 SEQ ID NO: 731 |
| AAV8 Variant | 11634 | WO2018071831 SEQ ID NO: 732 |
| AAV8 Variant | 11635 | WO2018071831 SEQ ID NO: 733 |
| AAV8 Variant | 11636 | WO2018071831 SEQ ID NO: 734 |
| AAV8 Variant | 11637 | WO2018071831 SEQ ID NO: 735 |
| AAV8 Variant | 11638 | WO2018071831 SEQ ID NO: 736 |
| AAV8 Variant | 11639 | WO2018071831 SEQ ID NO: 737 |
| AAV8 Variant | 11640 | WO2018071831 SEQ ID NO: 738 |
| AAV8 Variant | 11641 | WO2018071831 SEQ ID NO: 739 |
| AAV8 Variant | 11642 | WO2018071831 SEQ ID NO: 740 |
| AAV8 Variant | 11643 | WO2018071831 SEQ ID NO: 741 |
| AAV8 Variant | 11644 | WO2018071831 SEQ ID NO: 742 |
| AAV8 Variant | 11645 | WO2018071831 SEQ ID NO: 743 |
| AAV8 Variant | 11646 | WO2018071831 SEQ ID NO: 744 |
| AAV8 Variant | 11647 | WO2018071831 SEQ ID NO: 745 |
| AAV8 Variant | 11648 | WO2018071831 SEQ ID NO: 746 |
| AAV8 Variant | 11649 | WO2018071831 SEQ ID NO: 747 |
| AAV8 Variant | 11650 | WO2018071831 SEQ ID NO: 748 |
| AAV8 Variant | 11651 | WO2018071831 SEQ ID NO: 749 |
| AAV8 Variant | 11652 | WO2018071831 SEQ ID NO: 750 |
| AAV8 Variant | 11653 | WO2018071831 SEQ ID NO: 751 |
| AAV8 Variant | 11654 | WO2018071831 SEQ ID NO: 752 |
| AAV8 Variant | 11655 | WO2018071831 SEQ ID NO: 753 |
| AAV8 Variant | 11656 | WO2018071831 SEQ ID NO: 754 |
| AAV8 Variant | 11657 | WO2018071831 SEQ ID NO: 755 |
| AAV8 Variant | 11658 | WO2018071831 SEQ ID NO: 756 |
| AAV8 Variant | 11659 | WO2018071831 SEQ ID NO: 757 |
| AAV8 Variant | 11660 | WO2018071831 SEQ ID NO: 758 |
| AAV8 Variant | 11661 | WO2018071831 SEQ ID NO: 759 |
| AAV8 Variant | 11662 | WO2018071831 SEQ ID NO: 760 |
| AAV8 Variant | 11663 | WO2018071831 SEQ ID NO: 761 |
| AAV8 Variant | 11664 | WO2018071831 SEQ ID NO: 762 |
| AAV8 Variant | 11665 | WO2018071831 SEQ ID NO: 763 |
| AAV8 Variant | 11666 | WO2018071831 SEQ ID NO: 764 |
| AAV8 Variant | 11667 | WO2018071831 SEQ ID NO: 765 |
| AAV8 Variant | 11668 | WO2018071831 SEQ ID NO: 766 |
| AAV8 Variant | 11669 | WO2018071831 SEQ ID NO: 767 |
| AAV8 Variant | 11670 | WO2018071831 SEQ ID NO: 768 |
| AAV8 Variant | 11671 | WO2018071831 SEQ ID NO: 769 |
| AAV8 Variant | 11672 | WO2018071831 SEQ ID NO: 770 |
| AAV8 Variant | 11673 | WO2018071831 SEQ ID NO: 771 |
| AAV8 Variant | 11674 | WO2018071831 SEQ ID NO: 772 |
| AAV8 Variant | 11675 | WO2018071831 SEQ ID NO: 773 |
| AAV8 Variant | 11676 | WO2018071831 SEQ ID NO: 774 |
| AAV8 Variant | 11677 | WO2018071831 SEQ ID NO: 775 |
| AAV8 Variant | 11678 | WO2018071831 SEQ ID NO: 776 |
| AAV8 Variant | 11679 | WO2018071831 SEQ ID NO: 777 |
| AAV8 Variant | 11680 | WO2018071831 SEQ ID NO: 778 |
| AAV8 Variant | 11681 | WO2018071831 SEQ ID NO: 779 |
| AAV8 Variant | 11682 | WO2018071831 SEQ ID NO: 780 |
| AAV8 Variant | 11683 | WO2018071831 SEQ ID NO: 781 |
| AAV8 Variant | 11684 | WO2018071831 SEQ ID NO: 782 |
| AAV8 Variant | 11685 | WO2018071831 SEQ ID NO: 783 |
| AAV8 Variant | 11686 | WO2018071831 SEQ ID NO: 784 |
| AAV8 Variant | 11687 | WO2018071831 SEQ ID NO: 785 |
| AAV8 Variant | 11688 | WO2018071831 SEQ ID NO: 786 |
| AAV8 Variant | 11689 | WO2018071831 SEQ ID NO: 787 |
| AAV8 Variant | 11690 | WO2018071831 SEQ ID NO: 788 |
| AAV8 Variant | 11691 | WO2018071831 SEQ ID NO: 789 |
| AAV8 Variant | 11692 | WO2018071831 SEQ ID NO: 790 |
| AAV8 Variant | 11693 | WO2018071831 SEQ ID NO: 791 |
| AAV8 Variant | 11694 | WO2018071831 SEQ ID NO: 792 |
| AAV8 Variant | 11695 | WO2018071831 SEQ ID NO: 793 |
| AAV8 Variant | 11696 | WO2018071831 SEQ ID NO: 794 |
| AAV8 Variant | 11697 | WO2018071831 SEQ ID NO: 795 |
| AAV8 Variant | 11698 | WO2018071831 SEQ ID NO: 796 |
| AAV8 Variant | 11699 | WO2018071831 SEQ ID NO: 797 |
| AAV8 Variant | 11700 | WO2018071831 SEQ ID NO: 798 |
| AAV8 Variant | 11701 | WO2018071831 SEQ ID NO: 799 |
| AAV8 Variant | 11702 | WO2018071831 SEQ ID NO: 800 |
| AAV8 Variant | 11703 | WO2018071831 SEQ ID NO: 801 |
| AAV8 Variant | 11704 | WO2018071831 SEQ ID NO: 802 |
| AAV8 Variant | 11705 | WO2018071831 SEQ ID NO: 803 |
| AAV8 Variant | 11706 | WO2018071831 SEQ ID NO: 804 |
| AAV8 Variant | 11707 | WO2018071831 SEQ ID NO: 805 |
| AAV8 Variant | 11708 | WO2018071831 SEQ ID NO: 806 |
| AAV8 Variant | 11709 | WO2018071831 SEQ ID NO: 807 |
| AAV8 Variant | 11710 | WO2018071831 SEQ ID NO: 808 |
| AAV8 Variant | 11711 | WO2018071831 SEQ ID NO: 809 |
| AAV8 Variant | 11712 | WO2018071831 SEQ ID NO: 810 |
| AAV8 Variant | 11713 | WO2018071831 SEQ ID NO: 811 |
| AAV8 Variant | 11714 | WO2018071831 SEQ ID NO: 812 |
| AAV8 Variant | 11715 | WO2018071831 SEQ ID NO: 813 |
| AAV8 Variant | 11716 | WO2018071831 SEQ ID NO: 814 |
| AAV8 Variant | 11717 | WO2018071831 SEQ ID NO: 815 |
| AAV8 Variant | 11718 | WO2018071831 SEQ ID NO: 816 |
| AAV8 Variant | 11719 | WO2018071831 SEQ ID NO: 817 |
| AAV8 Variant | 11720 | WO2018071831 SEQ ID NO: 818 |
| AAV8 Variant | 11721 | WO2018071831 SEQ ID NO: 819 |
| AAV8 Variant | 11722 | WO2018071831 SEQ ID NO: 820 |
| AAV8 Variant | 11723 | WO2018071831 SEQ ID NO: 821 |
| AAV8 Variant | 11724 | WO2018071831 SEQ ID NO: 822 |
| AAV8 Variant | 11725 | WO2018071831 SEQ ID NO: 823 |
| AAV8 Variant | 11726 | WO2018071831 SEQ ID NO: 824 |
| AAV8 Variant | 11727 | WO2018071831 SEQ ID NO: 825 |
| AAV8 Variant | 11728 | WO2018071831 SEQ ID NO: 826 |
| AAV8 Variant | 11729 | WO2018071831 SEQ ID NO: 827 |
| AAV8 Variant | 11730 | WO2018071831 SEQ ID NO: 828 |
| AAV8 Variant | 11731 | WO2018071831 SEQ ID NO: 829 |
| AAV8 Variant | 11732 | WO2018071831 SEQ ID NO: 830 |
| AAV8 Variant | 11733 | WO2018071831 SEQ ID NO: 831 |
| AAV8 Variant | 11734 | WO2018071831 SEQ ID NO: 832 |
| AAV8 Variant | 11735 | WO2018071831 SEQ ID NO: 833 |
| AAV8 Variant | 11736 | WO2018071831 SEQ ID NO: 834 |
| AAV8 Variant | 11737 | WO2018071831 SEQ ID NO: 835 |
| AAV8 Variant | 11738 | WO2018071831 SEQ ID NO: 836 |
| AAV2 variant | 11739 | WO2018071831 SEQ ID NO: 837 |
| AAV2 variant | 11740 | WO2018071831 SEQ ID NO: 838 |
| AAV2 variant | 11741 | WO2018071831 SEQ ID NO: 839 |
| AAV2 variant | 11742 | WO2018071831 SEQ ID NO: 840 |
| AAV2 variant | 11743 | WO2018071831 SEQ ID NO: 841 |
| AAV2 variant | 11744 | WO2018071831 SEQ ID NO: 842 |
| AAV2 variant | 11745 | WO2018071831 SEQ ID NO: 843 |
| AAV2 variant | 11746 | WO2018071831 SEQ ID NO: 844 |
| AAV2 variant | 11747 | WO2018071831 SEQ ID NO: 845 |
| AAV2 variant | 11748 | WO2018071831 SEQ ID NO: 846 |
| AAV2 variant | 11749 | WO2018071831 SEQ ID NO: 847 |
| AAV2 variant | 11750 | WO2018071831 SEQ ID NO: 848 |
| AAV2 variant | 11751 | WO2018071831 SEQ ID NO: 849 |
| AAV2 variant | 11752 | WO2018071831 SEQ ID NO: 850 |
| AAV2 variant | 11753 | WO2018071831 SEQ ID NO: 851 |
| AAV2 variant | 11754 | WO2018071831 SEQ ID NO: 852 |
| AAV8 B1 | 11755 | WO2018071831 SEQ ID NO: 853 |
| AAV8 B2 | 11756 | WO2018071831 SEQ ID NO: 854 |
| AAV8 B3 | 11757 | WO2018071831 SEQ ID NO: 855 |
| AAV8 B4 | 11758 | WO2018071831 SEQ ID NO: 856 |
| AAV8 B12 | 11759 | WO2018071831 SEQ ID NO: 857 |
| AAV8 B18 | 11760 | WO2018071831 SEQ ID NO: 858 |
| AAV8 B24 | 11761 | WO2018071831 SEQ ID NO: 859 |
| AAV8 B41 | 11762 | WO2018071831 SEQ ID NO: 860 |
| AAV8 B44 | 11763 | WO2018071831 SEQ ID NO: 861 |
| AAV8 B45 | 11764 | WO2018071831 SEQ ID NO: 862 |
| AAV8 B46 | 11765 | WO2018071831 SEQ ID NO: 863 |
| AAV8 B60 | 11766 | WO2018071831 SEQ ID NO: 864 |
| AAV8 B61 | 11767 | WO2018071831 SEQ ID NO: 865 |
| AAV8 B62 | 11768 | WO2018071831 SEQ ID NO: 866 |
| AAV8 B63 | 11769 | WO2018071831 SEQ ID NO: 867 |
| AAV8 B64 | 11770 | WO2018071831 SEQ ID NO: 868 |
| AAV variant | 11771 | WO2018071831 SEQ ID NO: 876 |
| AAV variant | 11772 | WO2018071831 SEQ ID NO: 877 |
| AAV variant | 11773 | WO2018071831 SEQ ID NO: 878 |
| AAV variant | 11774 | WO2018071831 SEQ ID NO: 879 |
| AAV variant | 11775 | WO2018071831 SEQ ID NO: 880 |
| AAV variant | 11776 | WO2018071831 SEQ ID NO: 881 |
| AAV variant | 11777 | WO2018071831 SEQ ID NO: 882 |
| AAV variant | 11778 | WO2018071831 SEQ ID NO: 883 |
| AAV variant | 11779 | WO2018071831 SEQ ID NO: 884 |
| AAV variant | 11780 | WO2018071831 SEQ ID NO: 885 |
| AAV variant | 11781 | WO2018071831 SEQ ID NO: 886 |
| AAV variant | 11782 | WO2018071831 SEQ ID NO: 887 |
| AAV variant | 11783 | WO2018071831 SEQ ID NO: 888 |
| AAV variant | 11784 | WO2018071831 SEQ ID NO: 889 |
| AAV variant | 11785 | WO2018071831 SEQ ID NO: 890 |
| AAV variant | 11786 | WO2018071831 SEQ ID NO: 891 |
| AAV variant | 11787 | WO2018071831 SEQ ID NO: 892 |
| AAV variant | 11788 | WO2018071831 SEQ ID NO: 893 |
| AAV variant | 11789 | WO2018071831 SEQ ID NO: 894 |
| AAV variant | 11790 | WO2018071831 SEQ ID NO: 895 |
| AAV variant | 11791 | WO2018071831 SEQ ID NO: 896 |
| AAV variant | 11792 | WO2018071831 SEQ ID NO: 897 |
| AAV variant | 11793 | WO2018071831 SEQ ID NO: 898 |
| AAV variant | 11794 | WO2018071831 SEQ ID NO: 899 |
| AAV variant | 11795 | WO2018071831 SEQ ID NO: 900 |
| AAV variant | 11796 | WO2018071831 SEQ ID NO: 901 |
| AAV variant | 11797 | WO2018071831 SEQ ID NO: 902 |
| AAV variant | 11798 | WO2018071831 SEQ ID NO: 903 |
| AAV variant | 11799 | WO2018071831 SEQ ID NO: 904 |
| AAV variant | 11800 | WO2018071831 SEQ ID NO: 905 |
| AAV variant | 11801 | WO2018071831 SEQ ID NO: 906 |
| AAV variant | 11802 | WO2018071831 SEQ ID NO: 907 |
| AAV variant | 11803 | WO2018071831 SEQ ID NO: 908 |
| AAV variant | 11804 | WO2018071831 SEQ ID NO: 909 |
| AAV variant | 11805 | WO2018071831 SEQ ID NO: 910 |
| AAV variant | 11806 | WO2018071831 SEQ ID NO: 911 |
| AAV variant | 11807 | WO2018071831 SEQ ID NO: 912 |
| AAV variant | 11808 | WO2018071831 SEQ ID NO: 913 |
| AAV variant | 11809 | WO2018071831 SEQ ID NO: 914 |
| AAV variant | 11810 | WO2018071831 SEQ ID NO: 915 |
| AAV variant | 11811 | WO2018071831 SEQ ID NO: 916 |
| AAV variant | 11812 | WO2018071831 SEQ ID NO: 917 |
| AAV variant | 11813 | WO2018071831 SEQ ID NO: 918 |
| AAV variant | 11814 | WO2018071831 SEQ ID NO: 919 |
| AAV variant | 11815 | WO2018071831 SEQ ID NO: 920 |
| AAV variant | 11816 | WO2018071831 SEQ ID NO: 921 |
| AAV variant | 11817 | WO2018071831 SEQ ID NO: 922 |
| AAV variant | 11818 | WO2018071831 SEQ ID NO: 923 |
| AAV variant | 11819 | WO2018071831 SEQ ID NO: 924 |
| AAV variant | 11820 | WO2018071831 SEQ ID NO: 925 |
| AAV variant | 11821 | WO2018071831 SEQ ID NO: 926 |
| AAV variant | 11822 | WO2018071831 SEQ ID NO: 927 |
| AAV variant | 11823 | WO2018071831 SEQ ID NO: 928 |
| AAV variant | 11824 | WO2018071831 SEQ ID NO: 929 |
| AAV variant | 11825 | WO2018071831 SEQ ID NO: 930 |
| AAV variant | 11826 | WO2018071831 SEQ ID NO: 931 |
| AAV variant | 11827 | WO2018071831 SEQ ID NO: 932 |
| AAV variant | 11828 | WO2018071831 SEQ ID NO: 933 |
| AAV variant | 11829 | WO2018071831 SEQ ID NO: 934 |
| AAV variant | 11830 | WO2018071831 SEQ ID NO: 935 |
| AAV variant | 11831 | WO2018071831 SEQ ID NO: 936 |
| AAV variant | 11832 | WO2018071831 SEQ ID NO: 937 |
| AAV variant | 11833 | WO2018071831 SEQ ID NO: 938 |
| AAV variant | 11834 | WO2018071831 SEQ ID NO: 939 |
| AAV variant | 11835 | WO2018071831 SEQ ID NO: 940 |
| AAV variant | 11836 | WO2018071831 SEQ ID NO: 941 |
| AAV variant | 11837 | WO2018071831 SEQ ID NO: 942 |
| AAV variant | 11838 | WO2018071831 SEQ ID NO: 943 |
| AAV variant | 11839 | WO2018071831 SEQ ID NO: 944 |
| AAV variant | 11840 | WO2018071831 SEQ ID NO: 945 |
| AAV variant | 11841 | WO2018071831 SEQ ID NO: 946 |
| AAV variant | 11842 | WO2018071831 SEQ ID NO: 947 |
| AAV variant | 11843 | WO2018071831 SEQ ID NO: 948 |
| AAV variant | 11844 | WO2018071831 SEQ ID NO: 949 |
| AAV variant | 11845 | WO2018071831 SEQ ID NO: 950 |
| AAV variant | 11846 | WO2018071831 SEQ ID NO: 951 |
| AAV variant | 11847 | WO2018071831 SEQ ID NO: 952 |
| AAV variant | 11848 | WO2018071831 SEQ ID NO: 953 |
| AAV variant | 11849 | WO2018071831 SEQ ID NO: 954 |
| AAV variant | 11850 | WO2018071831 SEQ ID NO: 955 |
| AAV variant | 11851 | WO2018071831 SEQ ID NO: 956 |
| AAV variant | 11852 | WO2018071831 SEQ ID NO: 957 |
| AAV variant | 11853 | WO2018071831 SEQ ID NO: 958 |
| AAV variant | 11854 | WO2018071831 SEQ ID NO: 959 |
| AAV variant | 11855 | WO2018071831 SEQ ID NO: 960 |
| AAV variant | 11856 | WO2018071831 SEQ ID NO: 961 |
| AAV variant | 11857 | WO2018071831 SEQ ID NO: 962 |
| AAV variant | 11858 | WO2018071831 SEQ ID NO: 963 |
| AAV variant | 11859 | WO2018071831 SEQ ID NO: 964 |
| AAV variant | 11860 | WO2018071831 SEQ ID NO: 965 |
| AAV variant | 11861 | WO2018071831 SEQ ID NO: 966 |
| AAV variant | 11862 | WO2018071831 SEQ ID NO: 967 |
| AAV variant | 11863 | WO2018071831 SEQ ID NO: 968 |
| AAV variant | 11864 | WO2018071831 SEQ ID NO: 969 |
| AAV variant | 11865 | WO2018071831 SEQ ID NO: 970 |
| AAV variant | 11866 | WO2018071831 SEQ ID NO: 971 |
| AAV variant | 11867 | WO2018071831 SEQ ID NO: 972 |
| AAV variant | 11868 | WO2018071831 SEQ ID NO: 973 |
| AAV variant | 11869 | WO2018071831 SEQ ID NO: 974 |
| AAV variant | 11870 | WO2018071831 SEQ ID NO: 975 |
| AAV variant | 11871 | WO2018071831 SEQ ID NO: 976 |
| AAV variant | 11872 | WO2018071831 SEQ ID NO: 977 |
| AAV variant | 11873 | WO2018071831 SEQ ID NO: 978 |
| AAV variant | 11874 | WO2018071831 SEQ ID NO: 979 |
| AAV variant | 11875 | WO2018071831 SEQ ID NO: 980 |
| AAV variant | 11876 | WO2018071831 SEQ ID NO: 981 |
| AAV variant | 11877 | WO2018071831 SEQ ID NO: 982 |
| AAV variant | 11878 | WO2018071831 SEQ ID NO: 983 |
| AAV variant | 11879 | WO2018071831 SEQ ID NO: 984 |
| AAV variant | 11880 | WO2018071831 SEQ ID NO: 985 |
| AAV variant | 11881 | WO2018071831 SEQ ID NO: 986 |
| AAV variant | 11882 | WO2018071831 SEQ ID NO: 987 |
| AAV variant | 11883 | WO2018071831 SEQ ID NO: 988 |
| AAV variant | 11884 | WO2018071831 SEQ ID NO: 989 |
| AAV variant | 11885 | WO2018071831 SEQ ID NO: 990 |
| AAV variant | 11886 | WO2018071831 SEQ ID NO: 991 |
| AAV variant | 11887 | WO2018071831 SEQ ID NO: 992 |
| AAV variant | 11888 | WO2018071831 SEQ ID NO: 993 |
| AAV variant | 11889 | WO2018071831 SEQ ID NO: 994 |
| AAV variant | 11890 | WO2018071831 SEQ ID NO: 995 |
| AAV variant | 11891 | WO2018071831 SEQ ID NO: 996 |
| AAV variant | 11892 | WO2018071831 SEQ ID NO: 997 |
| AAV variant | 11893 | WO2018071831 SEQ ID NO: 998 |
| AAV variant | 11894 | WO2018071831 SEQ ID NO: 999 |
| AAV variant | 11895 | WO2018071831 SEQ ID NO: 1000 |
| AAV variant | 11896 | WO2018071831 SEQ ID NO: 1001 |
| AAV variant | 11897 | WO2018071831 SEQ ID NO: 1002 |
| AAV variant | 11898 | WO2018071831 SEQ ID NO: 1003 |
| AAV variant | 11899 | WO2018071831 SEQ ID NO: 1004 |
| AAV variant | 11900 | WO2018071831 SEQ ID NO: 1005 |
| AAV variant | 11901 | WO2018071831 SEQ ID NO: 1006 |
| AAV variant | 11902 | WO2018071831 SEQ ID NO: 1007 |
| AAV variant | 11903 | WO2018071831 SEQ ID NO: 1008 |
| AAV variant | 11904 | WO2018071831 SEQ ID NO: 1009 |
| AAV variant | 11905 | WO2018071831 SEQ ID NO: 1010 |
| AAV variant | 11906 | WO2018071831 SEQ ID NO: 1011 |
| AAV variant | 11907 | WO2018071831 SEQ ID NO: 1012 |
| AAV variant | 11908 | WO2018071831 SEQ ID NO: 1013 |
| AAV variant | 11909 | WO2018071831 SEQ ID NO: 1014 |
| AAV variant | 11910 | WO2018071831 SEQ ID NO: 1015 |
| AAV variant | 11911 | WO2018071831 SEQ ID NO: 1016 |
| AAV variant | 11912 | WO2018071831 SEQ ID NO: 1017 |
| AAV variant | 11913 | WO2018071831 SEQ ID NO: 1018 |
| AAV variant | 11914 | WO2018071831 SEQ ID NO: 1019 |
| AAV variant | 11915 | WO2018071831 SEQ ID NO: 1020 |
| AAV variant | 11916 | WO2018071831 SEQ ID NO: 1021 |
| AAV variant | 11917 | WO2018071831 SEQ ID NO: 1022 |
| AAV variant | 11918 | WO2018071831 SEQ ID NO: 1023 |
| AAV variant | 11919 | WO2018071831 SEQ ID NO: 1024 |
| AAV variant | 11920 | WO2018071831 SEQ ID NO: 1025 |
| AAV variant | 11921 | WO2018071831 SEQ ID NO: 1026 |
| AAV variant | 11922 | WO2018071831 SEQ ID NO: 1027 |
| AAV variant | 11923 | WO2018071831 SEQ ID NO: 1028 |
| AAV variant | 11924 | WO2018071831 SEQ ID NO: 1029 |
| AAV variant | 11925 | WO2018071831 SEQ ID NO: 1030 |
| AAV variant | 11926 | WO2018071831 SEQ ID NO: 1031 |
| AAV variant | 11927 | WO2018071831 SEQ ID NO: 1032 |
| AAV variant | 11928 | WO2018071831 SEQ ID NO: 1033 |
| AAV variant | 11929 | WO2018071831 SEQ ID NO: 1034 |
| AAV variant | 11930 | WO2018071831 SEQ ID NO: 1035 |
| AAV variant | 11931 | WO2018071831 SEQ ID NO: 1036 |
| AAV variant | 11932 | WO2018071831 SEQ ID NO: 1037 |
| AAV variant | 11933 | WO2018071831 SEQ ID NO: 1038 |
| AAV variant | 11934 | WO2018071831 SEQ ID NO: 1039 |
| AAV variant | 11935 | WO2018071831 SEQ ID NO: 1040 |
| AAV variant | 11936 | WO2018071831 SEQ ID NO: 1041 |
| AAV variant | 11937 | WO2018071831 SEQ ID NO: 1042 |
| AAV variant | 11938 | WO2018071831 SEQ ID NO: 1043 |
| AAV variant | 11939 | WO2018071831 SEQ ID NO: 1044 |
| AAV variant | 11940 | WO2018071831 SEQ ID NO: 1045 |
| AAV variant | 11941 | WO2018071831 SEQ ID NO: 1046 |
| AAV variant | 11942 | WO2018071831 SEQ ID NO: 1047 |
| AAV variant | 11943 | WO2018071831 SEQ ID NO: 1048 |
| AAV variant | 11944 | WO2018071831 SEQ ID NO: 1049 |
| AAV variant | 11945 | WO2018071831 SEQ ID NO: 1050 |
| AAV variant | 11946 | WO2018071831 SEQ ID NO: 1051 |
| AAV variant | 11947 | WO2018071831 SEQ ID NO: 1052 |
| AAV variant | 11948 | WO2018071831 SEQ ID NO: 1053 |
| AAV variant | 11949 | WO2018071831 SEQ ID NO: 1054 |
| AAV variant | 11950 | WO2018071831 SEQ ID NO: 1055 |
| AAV variant | 11951 | WO2018071831 SEQ ID NO: 1056 |
| AAV variant | 11952 | WO2018071831 SEQ ID NO: 1057 |
| AAV variant | 11953 | WO2018071831 SEQ ID NO: 1058 |
| AAV variant | 11954 | WO2018071831 SEQ ID NO: 1059 |
| AAV variant | 11955 | WO2018071831 SEQ ID NO: 1060 |
| AAV variant | 11956 | WO2018071831 SEQ ID NO: 1061 |
| AAV variant | 11957 | WO2018071831 SEQ ID NO: 1062 |
| AAV variant | 11958 | WO2018071831 SEQ ID NO: 1063 |
| AAV variant | 11959 | WO2018071831 SEQ ID NO: 1064 |
| AAV variant | 11960 | WO2018071831 SEQ ID NO: 1065 |
| AAV variant | 11961 | WO2018071831 SEQ ID NO: 1066 |
| AAV variant | 11962 | WO2018071831 SEQ ID NO: 1067 |
| AAV variant | 11963 | WO2018071831 SEQ ID NO: 1068 |
| AAV variant | 11964 | WO2018071831 SEQ ID NO: 1069 |
| AAV variant | 11965 | WO2018071831 SEQ ID NO: 1070 |
| AAV variant | 11966 | WO2018071831 SEQ ID NO: 1071 |
| AAV variant | 11967 | WO2018071831 SEQ ID NO: 1072 |
| AAV variant | 11968 | WO2018071831 SEQ ID NO: 1073 |
| AAV variant | 11969 | WO2018071831 SEQ ID NO: 1074 |
| AAV variant | 11970 | WO2018071831 SEQ ID NO: 1075 |
| AAV variant | 11971 | WO2018071831 SEQ ID NO: 1076 |
| AAV variant | 11972 | WO2018071831 SEQ ID NO: 1077 |
| AAV variant | 11973 | WO2018071831 SEQ ID NO: 1078 |
| AAV variant | 11974 | WO2018071831 SEQ ID NO: 1079 |
| AAV variant | 11975 | WO2018071831 SEQ ID NO: 1080 |
| AAV variant | 11976 | WO2018071831 SEQ ID NO: 1081 |
| AAV variant | 11977 | WO2018071831 SEQ ID NO: 1082 |
| AAV variant | 11978 | WO2018071831 SEQ ID NO: 1083 |
| AAV variant | 11979 | WO2018071831 SEQ ID NO: 1084 |
| AAV variant | 11980 | WO2018071831 SEQ ID NO: 1085 |
| AAV variant | 11981 | WO2018071831 SEQ ID NO: 1086 |
| AAV variant | 11982 | WO2018071831 SEQ ID NO: 1087 |
| AAV variant | 11983 | WO2018071831 SEQ ID NO: 1088 |
| AAV variant | 11984 | WO2018071831 SEQ ID NO: 1089 |
| AAV variant | 11985 | WO2018071831 SEQ ID NO: 1090 |
| AAV variant | 11986 | WO2018071831 SEQ ID NO: 1091 |
| AAV variant | 11987 | WO2018071831 SEQ ID NO: 1092 |
| AAV variant | 11988 | WO2018071831 SEQ ID NO: 1093 |
| AAV variant | 11989 | WO2018071831 SEQ ID NO: 1094 |
| AAV variant | 11990 | WO2018071831 SEQ ID NO: 1095 |
| AAV variant | 11991 | WO2018071831 SEQ ID NO: 1096 |
| AAV variant | 11992 | WO2018071831 SEQ ID NO: 1097 |
| AAV variant | 11993 | WO2018071831 SEQ ID NO: 1098 |
| AAV variant | 11994 | WO2018071831 SEQ ID NO: 1099 |
| AAV variant | 11995 | WO2018071831 SEQ ID NO: 1100 |
| AAV variant | 11996 | WO2018071831 SEQ ID NO: 1101 |
| AAV variant | 11997 | WO2018071831 SEQ ID NO: 1102 |
| AAV variant | 11998 | WO2018071831 SEQ ID NO: 1103 |
| AAV variant | 11999 | WO2018071831 SEQ ID NO: 1104 |
| AAV variant | 12000 | WO2018071831 SEQ ID NO: 1105 |
| AAV variant | 12001 | WO2018071831 SEQ ID NO: 1106 |
| AAV variant | 12002 | WO2018071831 SEQ ID NO: 1107 |
| AAV variant | 12003 | WO2018071831 SEQ ID NO: 1108 |
| AAV variant | 12004 | WO2018071831 SEQ ID NO: 1109 |
| AAV variant | 12005 | WO2018071831 SEQ ID NO: 1110 |
| AAV variant | 12006 | WO2018071831 SEQ ID NO: 1111 |
| AAV variant | 12007 | WO2018071831 SEQ ID NO: 1112 |
| AAV variant | 12008 | WO2018071831 SEQ ID NO: 1113 |
| AAV variant | 12009 | WO2018071831 SEQ ID NO: 1114 |
| AAV variant | 12010 | WO2018071831 SEQ ID NO: 1115 |
| AAV variant | 12011 | WO2018071831 SEQ ID NO: 1116 |
| AAV variant | 12012 | WO2018071831 SEQ ID NO: 1117 |
| AAV variant | 12013 | WO2018071831 SEQ ID NO: 1118 |
| AAV variant | 12014 | WO2018071831 SEQ ID NO: 1119 |
| AAV variant | 12015 | WO2018071831 SEQ ID NO: 1120 |
| AAV variant | 12016 | WO2018071831 SEQ ID NO: 1121 |
| AAV variant | 12017 | WO2018071831 SEQ ID NO: 1122 |
| AAV variant | 12018 | WO2018071831 SEQ ID NO: 1123 |
| AAV variant | 12019 | WO2018071831 SEQ ID NO: 1124 |
| AAV variant | 12020 | WO2018071831 SEQ ID NO: 1125 |
| AAV variant | 12021 | WO2018071831 SEQ ID NO: 1126 |
| AAV variant | 12022 | WO2018071831 SEQ ID NO: 1127 |
| AAV variant | 12023 | WO2018071831 SEQ ID NO: 1128 |
| AAV variant | 12024 | WO2018071831 SEQ ID NO: 1129 |
| AAV variant | 12025 | WO2018071831 SEQ ID NO: 1130 |
| AAV variant | 12026 | WO2018071831 SEQ ID NO: 1131 |
| AAV variant | 12027 | WO2018071831 SEQ ID NO: 1132 |
| AAV variant | 12028 | WO2018071831 SEQ ID NO: 1133 |
| AAV variant | 12029 | WO2018071831 SEQ ID NO: 1134 |
| AAV variant | 12030 | WO2018071831 SEQ ID NO: 1135 |
| AAV variant | 12031 | WO2018071831 SEQ ID NO: 1136 |
| AAV variant | 12032 | WO2018071831 SEQ ID NO: 1137 |
| AAV variant | 12033 | WO2018071831 SEQ ID NO: 1138 |
| AAV variant | 12034 | WO2018071831 SEQ ID NO: 1139 |
| AAV variant | 12035 | WO2018071831 SEQ ID NO: 1140 |
| AAV variant | 12036 | WO2018071831 SEQ ID NO: 1141 |
| AAV variant | 12037 | WO2018071831 SEQ ID NO: 1142 |
| AAV variant | 12038 | WO2018071831 SEQ ID NO: 1143 |
| AAV variant | 12039 | WO2018071831 SEQ ID NO: 1144 |
| AAV variant | 12040 | WO2018071831 SEQ ID NO: 1145 |
| AAV variant | 12041 | WO2018071831 SEQ ID NO: 1146 |
| AAV variant | 12042 | WO2018071831 SEQ ID NO: 1147 |
| AAV variant | 12043 | WO2018071831 SEQ ID NO: 1148 |
| AAV variant | 12044 | WO2018071831 SEQ ID NO: 1149 |
| AAV variant | 12045 | WO2018071831 SEQ ID NO: 1150 |
| AAV variant | 12046 | WO2018071831 SEQ ID NO: 1151 |
| AAV variant | 12047 | WO2018071831 SEQ ID NO: 1152 |
| AAV variant | 12048 | WO2018071831 SEQ ID NO: 1153 |
| AAV variant | 12049 | WO2018071831 SEQ ID NO: 1154 |
| AAV variant | 12050 | WO2018071831 SEQ ID NO: 1155 |
| AAV variant | 12051 | WO2018071831 SEQ ID NO: 1156 |
| AAV variant | 12052 | WO2018071831 SEQ ID NO: 1157 |
| AAV variant | 12053 | WO2018071831 SEQ ID NO: 1158 |
| AAV variant | 12054 | WO2018071831 SEQ ID NO: 1159 |
| AAV variant | 12055 | WO2018071831 SEQ ID NO: 1160 |
| AAV variant | 12056 | WO2018071831 SEQ ID NO: 1161 |
| AAV variant | 12057 | WO2018071831 SEQ ID NO: 1162 |
| AAV variant | 12058 | WO2018071831 SEQ ID NO: 1163 |
| AAV variant | 12059 | WO2018071831 SEQ ID NO: 1164 |
| AAV variant | 12060 | WO2018071831 SEQ ID NO: 1165 |
| AAV variant | 12061 | WO2018071831 SEQ ID NO: 1166 |
| AAV variant | 12062 | WO2018071831 SEQ ID NO: 1167 |
| AAV variant | 12063 | WO2018071831 SEQ ID NO: 1168 |
| AAV variant | 12064 | WO2018071831 SEQ ID NO: 1169 |
| AAV variant | 12065 | WO2018071831 SEQ ID NO: 1170 |
| AAV variant | 12066 | WO2018071831 SEQ ID NO: 1171 |
| AAV variant | 12067 | WO2018071831 SEQ ID NO: 1172 |
| AAV variant | 12068 | WO2018071831 SEQ ID NO: 1173 |
| AAV variant | 12069 | WO2018071831 SEQ ID NO: 1174 |
| AAV variant | 12070 | WO2018071831 SEQ ID NO: 1175 |
| AAV variant | 12071 | WO2018071831 SEQ ID NO: 1176 |
| AAV variant | 12072 | WO2018071831 SEQ ID NO: 1177 |
| AAV variant | 12073 | WO2018071831 SEQ ID NO: 1178 |
| AAV variant | 12074 | WO2018071831 SEQ ID NO: 1179 |
| AAV variant | 12075 | WO2018071831 SEQ ID NO: 1180 |
| AAV variant | 12076 | WO2018071831 SEQ ID NO: 1181 |
| AAV variant | 12077 | WO2018071831 SEQ ID NO: 1182 |
| AAV variant | 12078 | WO2018071831 SEQ ID NO: 1183 |
| AAV variant | 12079 | WO2018071831 SEQ ID NO: 1184 |
| AAV variant | 12080 | WO2018071831 SEQ ID NO: 1185 |
| AAV variant | 12081 | WO2018071831 SEQ ID NO: 1186 |
| AAV variant | 12082 | WO2018071831 SEQ ID NO: 1187 |
| AAV variant | 12083 | WO2018071831 SEQ ID NO: 1188 |
| AAV variant | 12084 | WO2018071831 SEQ ID NO: 1189 |
| AAV variant | 12085 | WO2018071831 SEQ ID NO: 1190 |
| AAV variant | 12086 | WO2018071831 SEQ ID NO: 1191 |
| AAV variant | 12067 | WO2018071831 SEQ ID NO: 1192 |
| AAV variant | 12088 | WO2018071831 SEQ ID NO: 1193 |
| AAV variant | 12089 | WO2018071831 SEQ ID NO: 1194 |
| AAV variant | 12090 | WO2018071831 SEQ ID NO: 1195 |
| AAV variant | 12091 | WO2018071831 SEQ ID NO: 1196 |
| AAV variant | 12092 | WO2018071831 SEQ ID NO: 1197 |
| AAV variant | 12093 | WO2018071831 SEQ ID NO: 1198 |
| AAV variant | 12094 | WO2018071831 SEQ ID NO: 1199 |
| AAV variant | 12095 | WO2018071831 SEQ ID NO: 1200 |
| AAV variant | 12096 | WO2018071831 SEQ ID NO: 1201 |
| AAV variant | 12097 | WO2018071831 SEQ ID NO: 1202 |
| AAV variant | 12098 | WO2018071831 SEQ ID NO: 1203 |
| AAV variant | 12099 | WO2018071831 SEQ ID NO: 1204 |
| AAV variant | 12100 | WO2018071831 SEQ ID NO: 1205 |
| AAV variant | 12101 | WO2018071831 SEQ ID NO: 1206 |
| AAV variant | 12102 | WO2018071831 SEQ ID NO: 1207 |
| AAV variant | 12103 | WO2018071831 SEQ ID NO: 1208 |
| AAV variant | 12104 | WO2018071831 SEQ ID NO: 1209 |
| AAV variant | 12105 | WO2018071831 SEQ ID NO: 1210 |
| AAV variant | 12106 | WO2018071831 SEQ ID NO: 1211 |
| AAV variant | 12107 | WO2018071831 SEQ ID NO: 1212 |
| AAV variant | 12108 | WO2018071831 SEQ ID NO: 1213 |
| AAV variant | 12109 | WO2018071831 SEQ ID NO: 1214 |
| AAV variant | 12110 | WO2018071831 SEQ ID NO: 1215 |
| AAV variant | 12111 | WO2018071831 SEQ ID NO: 1216 |
| AAV variant | 12112 | WO2018071831 SEQ ID NO: 1217 |
| AAV variant | 12113 | WO2018071831 SEQ ID NO: 1218 |
| AAV variant | 12114 | WO2018071831 SEQ ID NO: 1219 |
| AAV variant | 12115 | WO2018071831 SEQ ID NO: 1220 |
| AAV variant | 12116 | WO2018071831 SEQ ID NO: 1221 |
| AAV variant | 12117 | WO2018071831 SEQ ID NO: 1222 |
| AAV variant | 12118 | WO2018071831 SEQ ID NO: 1223 |
| AAV variant | 12119 | WO2018071831 SEQ ID NO: 1224 |
| AAV variant | 12120 | WO2018071831 SEQ ID NO: 1225 |
| AAV variant | 12121 | WO2018071831 SEQ ID NO: 1226 |
| AAV variant | 12122 | WO2018071831 SEQ ID NO: 1227 |
| AAV variant | 12123 | WO2018071831 SEQ ID NO: 1228 |
| AAV variant | 12124 | WO2018071831 SEQ ID NO: 1229 |
| AAV variant | 12125 | WO2018071831 SEQ ID NO: 1230 |
| AAV variant | 12126 | WO2018071831 SEQ ID NO: 1231 |
| AAV variant | 12127 | WO2018071831 SEQ ID NO: 1232 |
| AAV variant | 12128 | WO2018071831 SEQ ID NO: 1233 |
| AAV variant | 12129 | WO2018071831 SEQ ID NO: 1234 |
| AAV variant | 12130 | WO2018071831 SEQ ID NO: 1235 |
| AAV variant | 12131 | WO2018071831 SEQ ID NO: 1236 |
| AAV variant | 12132 | WO2018071831 SEQ ID NO: 1237 |
| AAV variant | 12133 | WO2018071831 SEQ ID NO: 1238 |
| AAV variant | 12134 | WO2018071831 SEQ ID NO: 1239 |
| AAV variant | 12135 | WO2018071831 SEQ ID NO: 1240 |
| AAV variant | 12136 | WO2018071831 SEQ ID NO: 1241 |
| AAV variant | 12137 | WO2018071831 SEQ ID NO: 1242 |
| AAV variant | 12138 | WO2018071831 SEQ ID NO: 1243 |
| AAV variant | 12139 | WO2018071831 SEQ ID NO: 1244 |
| AAV variant | 12140 | WO2018071831 SEQ ID NO: 1245 |
| AAV variant | 12141 | WO2018071831 SEQ ID NO: 1246 |
| AAV variant | 12142 | WO2018071831 SEQ ID NO: 1247 |
| AAV variant | 12143 | WO2018071831 SEQ ID NO: 1248 |
| AAV variant | 12144 | WO2018071831 SEQ ID NO: 1249 |
| AAV variant | 12145 | WO2018071831 SEQ ID NO: 1250 |
| AAV variant | 12146 | WO2018071831 SEQ ID NO: 1251 |
| AAV variant | 12147 | WO2018071831 SEQ ID NO: 1252 |
| AAV variant | 12148 | WO2018071831 SEQ ID NO: 1253 |
| AAV variant | 12149 | WO2018071831 SEQ ID NO: 1254 |
| AAV variant | 12150 | WO2018071831 SEQ ID NO: 1255 |
| AAV variant | 12151 | WO2018071831 SEQ ID NO: 1256 |
| AAV variant | 12152 | WO2018071831 SEQ ID NO: 1257 |
| AAV variant | 12153 | WO2018071831 SEQ ID NO: 1258 |
| AAV variant | 12154 | WO2018071831 SEQ ID NO: 1259 |
| AAV variant | 12155 | WO2018071831 SEQ ID NO: 1260 |
| AAV variant | 12156 | WO2018071831 SEQ ID NO: 1261 |
| AAV variant | 12157 | WO2018071831 SEQ ID NO: 1262 |
| AAV variant | 12158 | WO2018071831 SEQ ID NO: 1263 |
| AAV variant | 12159 | WO2018071831 SEQ ID NO: 1264 |
| AAV variant | 12160 | WO2018071831 SEQ ID NO: 1265 |
| AAV variant | 12161 | WO2018071831 SEQ ID NO: 1266 |
| AAV variant | 12162 | WO2018071831 SEQ ID NO: 1267 |
| AAV variant | 12163 | WO2018071831 SEQ ID NO: 1268 |
| AAV variant | 12164 | WO2018071831 SEQ ID NO: 1269 |
| AAV variant | 12165 | WO2018071831 SEQ ID NO: 1270 |
| AAV variant | 12166 | WO2018071831 SEQ ID NO: 1271 |
| AAV variant | 12167 | WO2018071831 SEQ ID NO: 1272 |
| AAV variant | 12168 | WO2018071831 SEQ ID NO: 1273 |
| AAV variant | 12169 | WO2018071831 SEQ ID NO: 1274 |
| AAV variant | 12170 | WO2018071831 SEQ ID NO: 1275 |
| AAV variant | 12171 | WO2018071831 SEQ ID NO: 1276 |
| AAV variant | 12172 | WO2018071831 SEQ ID NO: 1277 |
| AAV variant | 12173 | WO2018071831 SEQ ID NO: 1278 |
| AAV variant | 12174 | WO2018071831 SEQ ID NO: 1279 |
| AAV variant | 12175 | WO2018071831 SEQ ID NO: 1280 |
| AAV variant | 12176 | WO2018071831 SEQ ID NO: 1281 |
| AAV variant | 12177 | WO2018071831 SEQ ID NO: 1282 |
| AAV variant | 12178 | WO2018071831 SEQ ID NO: 1283 |
| AAV variant | 12179 | WO2018071831 SEQ ID NO: 1284 |
| AAV variant | 12180 | WO2018071831 SEQ ID NO: 1285 |
| AAV variant | 12181 | WO2018071831 SEQ ID NO: 1286 |
| AAV variant | 12182 | WO2018071831 SEQ ID NO: 1287 |
| AAV variant | 12183 | WO2018071831 SEQ ID NO: 1288 |
| AAV variant | 12184 | WO2018071831 SEQ ID NO: 1289 |
| AAV variant | 12185 | WO2018071831 SEQ ID NO: 1290 |
| AAV variant | 12186 | WO2018071831 SEQ ID NO: 1291 |
| AAV variant | 12187 | WO2018071831 SEQ ID NO: 1292 |
| AAV variant | 12188 | WO2018071831 SEQ ID NO: 1293 |
| AAV variant | 12189 | WO2018071831 SEQ ID NO: 1294 |
| AAV variant | 12190 | WO2018071831 SEQ ID NO: 1295 |
| AAV variant | 12191 | WO2018071831 SEQ ID NO: 1296 |
| AAV variant | 12192 | WO2018071831 SEQ ID NO: 1297 |
| AAV variant | 12193 | WO2018071831 SEQ ID NO: 1298 |
| AAV variant | 12194 | WO2018071831 SEQ ID NO: 1299 |
| AAV variant | 12195 | WO2018071831 SEQ ID NO: 1300 |
| AAV variant | 12196 | WO2018071831 SEQ ID NO: 1301 |
| AAV variant | 12197 | WO2018071831 SEQ ID NO: 1302 |
| AAV variant | 12198 | WO2018071831 SEQ ID NO: 1303 |
| AAV variant | 12199 | WO2018071831 SEQ ID NO: 1304 |
| AAV variant | 12200 | WO2018071831 SEQ ID NO: 1305 |
| AAV variant | 12201 | WO2018071831 SEQ ID NO: 1306 |
| AAV variant | 12202 | WO2018071831 SEQ ID NO: 1307 |
| AAV variant | 12203 | WO2018071831 SEQ ID NO: 1308 |
| AAV variant | 12204 | WO2018071831 SEQ ID NO: 1309 |
| AAV variant | 12205 | WO2018071831 SEQ ID NO: 1310 |
| AAV variant | 12206 | WO2018071831 SEQ ID NO: 1311 |
| AAV variant | 12207 | WO2018071831 SEQ ID NO: 1312 |
| AAV variant | 12208 | WO2018071831 SEQ ID NO: 1313 |
| AAV variant | 12209 | WO2018071831 SEQ ID NO: 1314 |
| AAV variant | 12210 | WO2018071831 SEQ ID NO: 1315 |
| AAV variant | 12211 | WO2018071831 SEQ ID NO: 1316 |
| AAV variant | 12212 | WO2018071831 SEQ ID NO: 1317 |
| AAV variant | 12213 | WO2018071831 SEQ ID NO: 1318 |
| AAV variant | 12214 | WO2018071831 SEQ ID NO: 1319 |
| AAV variant | 12215 | WO2018071831 SEQ ID NO: 1320 |
| AAV variant | 12216 | WO2018071831 SEQ ID NO: 1321 |
| AAV variant | 12217 | WO2018071831 SEQ ID NO: 1322 |
| AAV variant | 12218 | WO2018071831 SEQ ID NO: 1323 |
| AAV variant | 12219 | WO2018071831 SEQ ID NO: 1324 |
| AAV variant | 12220 | WO2018071831 SEQ ID NO: 1325 |
| AAV variant | 12221 | WO2018071831 SEQ ID NO: 1326 |
| AAV variant | 12222 | WO2018071831 SEQ ID NO: 1327 |
| AAV variant | 12223 | WO2018071831 SEQ ID NO: 1328 |
| AAV variant | 12224 | WO2018071831 SEQ ID NO: 1329 |
| AAV variant | 12225 | WO2018071831 SEQ ID NO: 1330 |
| AAV variant | 12226 | WO2018071831 SEQ ID NO: 1331 |
| AAV variant | 12227 | WO2018071831 SEQ ID NO: 1332 |
| AAV variant | 12228 | WO2018071831 SEQ ID NO: 1333 |
| AAV variant | 12229 | WO2018071831 SEQ ID NO: 1334 |
| AAV variant | 12230 | WO2018071831 SEQ ID NO: 1335 |
| AAV variant | 12231 | WO2018071831 SEQ ID NO: 1336 |
| AAV variant | 12232 | WO2018071831 SEQ ID NO: 1337 |
| AAV variant | 12233 | WO2018071831 SEQ ID NO: 1338 |
| AAV variant | 12234 | WO2018071831 SEQ ID NO: 1339 |
| AAV variant | 12235 | WO2018071831 SEQ ID NO: 1340 |
| AAV variant | 12236 | WO2018071831 SEQ ID NO: 1341 |
| AAV variant | 12237 | WO2018071831 SEQ ID NO: 1342 |
| AAV variant | 12238 | WO2018071831 SEQ ID NO: 1343 |
| AAV variant | 12239 | WO2018071831 SEQ ID NO: 1344 |
| AAV variant | 12240 | WO2018071831 SEQ ID NO: 1345 |
| AAV variant | 12241 | WO2018071831 SEQ ID NO: 1346 |
| AAV variant | 12242 | WO2018071831 SEQ ID NO: 1347 |
| AAV variant | 12243 | WO2018071831 SEQ ID NO: 1348 |
| AAV variant | 12244 | WO2018071831 SEQ ID NO: 1349 |
| AAV variant | 12245 | WO2018071831 SEQ ID NO: 1350 |
| AAV variant | 12246 | WO2018071831 SEQ ID NO: 1351 |
| AAV variant | 12247 | WO2018071831 SEQ ID NO: 1352 |
| AAV variant | 12248 | WO2018071831 SEQ ID NO: 1353 |
| AAV variant | 12249 | WO2018071831 SEQ ID NO: 1354 |
| AAV variant | 12250 | WO2018071831 SEQ ID NO: 1355 |
| AAV variant | 12251 | WO2018071831 SEQ ID NO: 1356 |
| AAV variant | 12252 | WO2018071831 SEQ ID NO: 1357 |
| AAV variant | 12253 | WO2018071831 SEQ ID NO: 1358 |
| AAV variant | 12254 | WO2018071831 SEQ ID NO: 1359 |
| AAV variant | 12255 | WO2018071831 SEQ ID NO: 1360 |
| AAV variant | 12256 | WO2018071831 SEQ ID NO: 1361 |
| AAV variant | 12257 | WO2018071831 SEQ ID NO: 1362 |
| AAV variant | 12258 | WO2018071831 SEQ ID NO: 1363 |
| AAV variant | 12259 | WO2018071831 SEQ ID NO: 1364 |
| AAV variant | 12260 | WO2018071831 SEQ ID NO: 1365 |
| AAV variant | 12261 | WO2018071831 SEQ ID NO: 1366 |
| AAV variant | 12262 | WO2018071831 SEQ ID NO: 1367 |
| AAV variant | 12263 | WO2018071831 SEQ ID NO: 1368 |
| AAV variant | 12264 | WO2018071831 SEQ ID NO: 1369 |
| AAV variant | 12265 | WO2018071831 SEQ ID NO: 1370 |
| AAV variant | 12266 | WO2018071831 SEQ ID NO: 1371 |
| AAV variant | 12267 | WO2018071831 SEQ ID NO: 1372 |
| AAV variant | 12268 | WO2018071831 SEQ ID NO: 1373 |
| AAV variant | 12269 | WO2018071831 SEQ ID NO: 1374 |
| AAV variant | 12270 | WO2018071831 SEQ ID NO: 1375 |
| AAV variant | 12271 | WO2018071831 SEQ ID NO: 1376 |
| AAV variant | 12272 | WO2018071831 SEQ ID NO: 1377 |
| AAV variant | 12273 | WO2018071831 SEQ ID NO: 1378 |
| AAV variant | 12274 | WO2018071831 SEQ ID NO: 1379 |
| AAV variant | 12275 | WO2018071831 SEQ ID NO: 1380 |
| AAV variant | 12276 | WO2018071831 SEQ ID NO: 1381 |
| AAV variant | 12277 | WO2018071831 SEQ ID NO: 1382 |
| AAV variant | 12278 | WO2018071831 SEQ ID NO: 1383 |
| AAV variant | 12279 | WO2018071831 SEQ ID NO: 1384 |
| AAV variant | 12280 | WO2018071831 SEQ ID NO: 1385 |
| AAV variant | 12281 | WO2018071831 SEQ ID NO: 1386 |
| AAV variant | 12282 | WO2018071831 SEQ ID NO: 1387 |
| AAV variant | 12263 | WO2018071831 SEQ ID NO: 1388 |
| AAV variant | 12284 | WO2018071831 SEQ ID NO: 1389 |
| AAV variant | 12285 | WO2018071831 SEQ ID NO: 1390 |
| AAV variant | 12286 | WO2018071831 SEQ ID NO: 1391 |
| AAV variant | 12287 | WO2018071831 SEQ ID NO: 1392 |
| AAV variant | 12288 | WO2018071831 SEQ ID NO: 1393 |
| AAV variant | 12289 | WO2018071831 SEQ ID NO: 1394 |
| AAV variant | 12290 | WO2018071831 SEQ ID NO: 1395 |
| AAV variant | 12291 | WO2018071831 SEQ ID NO: 1396 |
| AAV variant | 12292 | WO2018071831 SEQ ID NO: 1397 |
| AAV variant | 12293 | WO2018071831 SEQ ID NO: 1398 |
| AAV variant | 12294 | WO2018071831 SEQ ID NO: 1399 |
| AAV variant | 12295 | WO2018071831 SEQ ID NO: 1400 |
| AAV variant | 12296 | WO2018071831 SEQ ID NO: 1401 |
| AAV variant | 12297 | WO2018071831 SEQ ID NO: 1402 |
| AAV variant | 12298 | WO2018071831 SEQ ID NO: 1403 |
| AAV variant | 12299 | WO2018071831 SEQ ID NO: 1404 |
| AAV variant | 12300 | WO2018071831 SEQ ID NO: 1405 |
| AAV variant | 12301 | WO2018071831 SEQ ID NO: 1406 |
| AAV variant | 12302 | WO2018071831 SEQ ID NO: 1407 |
| AAV variant | 12303 | WO2018071831 SEQ ID NO: 1408 |
| AAV variant | 12304 | WO2018071831 SEQ ID NO: 1409 |
| AAV variant | 12305 | WO2018071831 SEQ ID NO: 1410 |
| AAV variant | 12306 | WO2018071831 SEQ ID NO: 1411 |
| AAV variant | 12307 | WO2018071831 SEQ ID NO: 1412 |
| AAV variant | 12308 | WO2018071831 SEQ ID NO: 1413 |
| AAV variant | 12309 | WO2018071831 SEQ ID NO: 1414 |
| AAV variant | 12310 | WO2018071831 SEQ ID NO: 1415 |
| AAV variant | 12311 | WO2018071831 SEQ ID NO: 1416 |
| AAV variant | 12312 | WO2018071831 SEQ ID NO: 1417 |
| AAV variant | 12313 | WO2018071831 SEQ ID NO: 1418 |
| AAV variant | 12314 | WO2018071831 SEQ ID NO: 1419 |
| AAV variant | 12315 | WO2018071831 SEQ ID NO: 1420 |
| AAV variant | 12316 | WO2018071831 SEQ ID NO: 1421 |
| AAV variant | 12317 | WO2018071831 SEQ ID NO: 1422 |
| AAV variant | 12318 | WO2018071831 SEQ ID NO: 1423 |
| AAV variant | 12319 | WO2018071831 SEQ ID NO: 1424 |
| AAV variant | 12320 | WO2018071831 SEQ ID NO: 1425 |
| AAV variant | 12321 | WO2018071831 SEQ ID NO: 1426 |
| AAV variant | 12322 | WO2018071831 SEQ ID NO: 1427 |
| AAV variant | 12323 | WO2018071831 SEQ ID NO: 1428 |
| AAV variant | 12324 | WO2018071831 SEQ ID NO: 1429 |
| AAV variant | 12325 | WO2018071831 SEQ ID NO: 1430 |
| AAV variant | 12326 | WO2018071831 SEQ ID NO: 1431 |
| AAV variant | 12327 | WO2018071831 SEQ ID NO: 1432 |
| AAV variant | 12328 | WO2018071831 SEQ ID NO: 1433 |
| AAV variant | 12329 | WO2018071831 SEQ ID NO: 1434 |
| AAV variant | 12330 | WO2018071831 SEQ ID NO: 1435 |
| AAV variant | 12331 | WO2018071831 SEQ ID NO: 1436 |
| AAV variant | 12332 | WO2018071831 SEQ ID NO: 1437 |
| AAV variant | 12333 | WO2018071831 SEQ ID NO: 1438 |
| AAV variant | 12334 | WO2018071831 SEQ ID NO: 1439 |
| AAV variant | 12335 | WO2018071831 SEQ ID NO: 1440 |
| AAV variant | 12336 | WO2018071831 SEQ ID NO: 1441 |
| AAV variant | 12337 | WO2018071831 SEQ ID NO: 1442 |
| AAV variant | 12338 | WO2018071831 SEQ ID NO: 1443 |
| AAV variant | 12339 | WO2018071831 SEQ ID NO: 1444 |
| AAV variant | 12340 | WO2018071831 SEQ ID NO: 1445 |
| AAV variant | 12341 | WO2018071831 SEQ ID NO: 1446 |
| AAV variant | 12342 | WO2018071831 SEQ ID NO: 1447 |
| AAV variant | 12343 | WO2018071831 SEQ ID NO: 1448 |
| AAV variant | 12344 | WO2018071831 SEQ ID NO: 1449 |
| AAV variant | 12345 | WO2018071831 SEQ ID NO: 1450 |
| AAV variant | 12346 | WO2018071831 SEQ ID NO: 1451 |
| AAV variant | 12347 | WO2018071831 SEQ ID NO: 1452 |
| AAV variant | 12348 | WO2018071831 SEQ ID NO: 1453 |
| AAV variant | 12349 | WO2018071831 SEQ ID NO: 1454 |
| AAV variant | 12350 | WO2018071831 SEQ ID NO: 1455 |
| AAV variant | 12351 | WO2018071831 SEQ ID NO: 1456 |
| AAV variant | 12352 | WO2018071831 SEQ ID NO: 1457 |
| AAV variant | 12353 | WO2018071831 SEQ ID NO: 1458 |
| AAV variant | 12354 | WO2018071831 SEQ ID NO: 1459 |
| AAV variant | 12355 | WO2018071831 SEQ ID NO: 1460 |
| AAV variant | 12356 | WO2018071831 SEQ ID NO: 1461 |
| AAV variant | 12357 | WO2018071831 SEQ ID NO: 1462 |
| AAV variant | 12358 | WO2018071831 SEQ ID NO: 1463 |
| AAV variant | 12359 | WO2018071831 SEQ ID NO: 1464 |
| AAV variant | 12360 | WO2018071831 SEQ ID NO: 1465 |
| AAV variant | 12361 | WO2018071831 SEQ ID NO: 1466 |
| AAV variant | 12362 | WO2018071831 SEQ ID NO: 1467 |
| AAV variant | 12363 | WO2018071831 SEQ ID NO: 1468 |
| AAV variant | 12364 | WO2018071831 SEQ ID NO: 1469 |
| AAV variant | 12365 | WO2018071831 SEQ ID NO: 1470 |
| AAV variant | 12366 | WO2018071831 SEQ ID NO: 1471 |
| AAV variant | 12367 | WO2018071831 SEQ ID NO: 1472 |
| AAV variant | 12368 | WO2018071831 SEQ ID NO: 1473 |
| AAV variant | 12369 | WO2018071831 SEQ ID NO: 1474 |
| AAV variant | 12370 | WO2018071831 SEQ ID NO: 1475 |
| AAV variant | 12371 | WO2018071831 SEQ ID NO: 1476 |
| AAV variant | 12372 | WO2018071831 SEQ ID NO: 1477 |
| AAV variant | 12373 | WO2018071831 SEQ ID NO: 1478 |
| AAV variant | 12374 | WO2018071831 SEQ ID NO: 1479 |
| AAV variant | 12375 | WO2018071831 SEQ ID NO: 1488 |
| AAV variant | 12376 | WO2018071831 SEQ ID NO: 1481 |
| AAV variant | 12377 | WO2018071831 SEQ ID NO: 1482 |
| AAV variant | 12378 | WO2018071831 SEQ ID NO: 1483 |
| AAV variant | 12379 | WO2018071831 SEQ ID NO: 1484 |
| AAV variant | 12380 | WO2018071831 SEQ ID NO: 1485 |
| AAV variant | 12381 | WO2018071831 SEQ ID NO: 1486 |
| AAV variant | 12382 | WO2018071831 SEQ ID NO: 1487 |
| AAV variant | 12383 | WO2018071831 SEQ ID NO: 1488 |
| AAV variant | 12384 | WO2018071831 SEQ ID NO: 1489 |
| AAV variant | 12365 | WO2018071831 SEQ ID NO: 1490 |
| AAV variant | 12386 | WO2018071831 SEQ ID NO: 1491 |
| AAV variant | 12387 | WO2018071831 SEQ ID NO: 1492 |
| AAV variant | 12388 | WO2018071831 SEQ ID NO: 1493 |
| AAV variant | 12389 | WO2018071831 SEQ ID NO: 1494 |
| AAV variant | 12390 | WO2018071831 SEQ ID NO: 1495 |
| AAV variant | 12391 | WO2018071831 SEQ ID NO: 1496 |
| AAV variant | 12392 | WO2018071831 SEQ ID NO: 1497 |
| AAV variant | 12393 | WO2018071831 SEQ ID NO: 1498 |
| AAV variant | 12394 | WO2018071831 SEQ ID NO: 1499 |
| AAV variant | 12395 | WO2018071831 SEQ ID NO: 1500 |
| AAV variant | 12396 | WO2018071831 SEQ ID NO: 1501 |
| AAV variant | 12397 | WO2018071831 SEQ ID NO: 1502 |
| AAV variant | 12398 | WO2018071831 SEQ ID NO: 1503 |
| AAV variant | 12399 | WO2018071831 SEQ ID NO: 1504 |
| AAV variant | 12400 | WO2018071831 SEQ ID NO: 1505 |
| AAV variant | 12401 | WO2018071831 SEQ ID NO: 1506 |
| AAV variant | 12402 | WO2018071831 SEQ ID NO: 1507 |
| AAV variant | 12403 | WO2018071831 SEQ ID NO: 1508 |
| AAV variant | 12404 | WO2018071831 SEQ ID NO: 1509 |
| AAV variant | 12405 | WO2018071831 SEQ ID NO: 1510 |
| AAV variant | 12406 | WO2018071831 SEQ ID NO: 1511 |
| AAV variant | 12407 | WO2018071831 SEQ ID NO: 1512 |
| AAV variant | 12408 | WO2018071831 SEQ ID NO: 1513 |
| AAV variant | 12409 | WO2018071831 SEQ ID NO: 1514 |
| AAV variant | 12410 | WO2018071831 SEQ ID NO: 1515 |
| AAV variant | 12411 | WO2018071831 SEQ ID NO: 1516 |
| AAV variant | 12412 | WO2018071831 SEQ ID NO: 1517 |
| AAV variant | 12413 | WO2018071831 SEQ ID NO: 1518 |
| AAV variant | 12414 | WO2018071831 SEQ ID NO: 1519 |
| AAV variant | 12415 | WO2018071831 SEQ ID NO: 1520 |
| AAV variant | 12416 | WO2018071831 SEQ ID NO: 1521 |
| AAV variant | 12417 | WO2018071831 SEQ ID NO: 1522 |
| AAV variant | 12418 | WO2018071831 SEQ ID NO: 1523 |
| AAV variant | 12419 | WO2018071831 SEQ ID NO: 1524 |
| AAV variant | 12420 | WO2018071831 SEQ ID NO: 1525 |
| AAV variant | 12421 | WO2018071831 SEQ ID NO: 1526 |
| AAV variant | 12422 | WO2018071831 SEQ ID NO: 1527 |
| AAV variant | 12423 | WO2018071831 SEQ ID NO: 1528 |
| AAV variant | 12424 | WO2018071831 SEQ ID NO: 1529 |
| AAV variant | 12425 | WO2018071831 SEQ ID NO: 1530 |
| AAV variant | 12426 | WO2018071831 SEQ ID NO: 1531 |
| AAV variant | 12427 | WO2018071831 SEQ ID NO: 1532 |
| AAV variant | 12428 | WO2018071831 SEQ ID NO: 1533 |
| AAV variant | 12429 | WO2018071831 SEQ ID NO: 1534 |
| AAV variant | 12430 | WO2018071831 SEQ ID NO: 1535 |
| AAV variant | 12431 | WO2018071831 SEQ ID NO: 1536 |
| AAV variant | 12432 | WO2018071831 SEQ ID NO: 1537 |
| AAV variant | 12433 | WO2018071831 SEQ ID NO: 1538 |
| AAV variant | 12434 | WO2018071831 SEQ ID NO: 1539 |
| AAV variant | 12435 | WO2018071831 SEQ ID NO: 1540 |
| AAV variant | 12436 | WO2018071831 SEQ ID NO: 1541 |
| AAV variant | 12437 | WO2018071831 SEQ ID NO: 1542 |
| AAV variant | 12438 | WO2018071831 SEQ ID NO: 1543 |
| AAV variant | 12439 | WO2018071831 SEQ ID NO: 1544 |
| AAV variant | 12440 | WO2018071831 SEQ ID NO: 1545 |
| AAV variant | 12441 | WO2018071831 SEQ ID NO: 1546 |
| AAV variant | 12442 | WO2018071831 SEQ ID NO: 1547 |
| AAV variant | 12443 | WO2018071831 SEQ ID NO: 1548 |
| AAV variant | 12444 | WO2018071831 SEQ ID NO: 1549 |
| AAV variant | 12445 | WO2018071831 SEQ ID NO: 1550 |
| AAV variant | 12446 | WO2018071831 SEQ ID NO: 1551 |
| AAV variant | 12447 | WO2018071831 SEQ ID NO: 1552 |
| AAV variant | 12448 | WO2018071831 SEQ ID NO: 1553 |
| AAV variant | 12449 | WO2018071831 SEQ ID NO: 1554 |
| AAV variant | 12450 | WO2018071831 SEQ ID NO: 1555 |
| AAV variant | 12451 | WO2018071831 SEQ ID NO: 1556 |
| AAV variant | 12452 | WO2018071831 SEQ ID NO: 1557 |
| AAV variant | 12453 | WO2018071831 SEQ ID NO: 1558 |
| AAV variant | 12454 | WO2018071831 SEQ ID NO: 1559 |
| AAV variant | 12455 | WO2018071831 SEQ ID NO: 1560 |
| AAV variant | 12456 | WO2018071831 SEQ ID NO: 1561 |
| AAV variant | 12457 | WO2018071831 SEQ ID NO: 1562 |
| AAV variant | 12458 | WO2018071831 SEQ ID NO: 1563 |
| AAV variant | 12459 | WO2018071831 SEQ ID NO: 1564 |
| AAV variant | 12460 | WO2018071831 SEQ ID NO: 1565 |
| AAV variant | 12461 | WO2018071831 SEQ ID NO: 1566 |
| AAV variant | 12462 | WO2018071831 SEQ ID NO: 1567 |
| AAV variant | 12463 | WO2018071831 SEQ ID NO: 1568 |
| AAV variant | 12464 | WO2018071831 SEQ ID NO: 1569 |
| AAV variant | 12465 | WO2018071831 SEQ ID NO: 1570 |
| AAV variant | 12466 | WO2018071831 SEQ ID NO: 1571 |
| AAV variant | 12467 | WO2018071831 SEQ ID NO: 1572 |
| AAV variant | 12468 | WO2018071831 SEQ ID NO: 1573 |
| AAV variant | 12469 | WO2018071831 SEQ ID NO: 1574 |
| AAV variant | 12470 | WO2018071831 SEQ ID NO: 1575 |
| AAV variant | 12471 | WO2018071831 SEQ ID NO: 1576 |
| AAV variant | 12472 | WO2018071831 SEQ ID NO: 1577 |
| AAV variant | 12473 | WO2018071831 SEQ ID NO: 1578 |
| AAV variant | 12474 | WO2018071831 SEQ ID NO: 1579 |
| AAV variant | 12475 | WO2018071831 SEQ ID NO: 1580 |
| AAV variant | 12476 | WO2018071831 SEQ ID NO: 1581 |
| AAV variant | 12477 | WO2018071831 SEQ ID NO: 1582 |
| AAV variant | 12478 | WO2018071831 SEQ ID NO: 1583 |
| AAV variant | 12479 | WO2018071831 SEQ ID NO: 1584 |
| AAV variant | 12480 | WO2018071831 SEQ ID NO: 1585 |
| AAV variant | 12481 | WO2018071831 SEQ ID NO: 1586 |
| AAV variant | 12482 | WO2018071831 SEQ ID NO: 1587 |
| AAV variant | 12483 | WO2018071831 SEQ ID NO: 1588 |
| AAV variant | 12484 | WO2018071831 SEQ ID NO: 1589 |
| AAV variant | 12485 | WO2018071831 SEQ ID NO: 1590 |
| AAV variant | 12486 | WO2018071831 SEQ ID NO: 1591 |
| AAV variant | 12487 | WO2018071831 SEQ ID NO: 1592 |
| AAV variant | 12488 | WO2018071831 SEQ ID NO: 1593 |
| AAV variant | 12489 | WO2018071831 SEQ ID NO: 1594 |
| AAV variant | 12490 | WO2018071831 SEQ ID NO: 1595 |
| AAV variant | 12491 | WO2018071831 SEQ ID NO: 1596 |
| AAV variant | 12492 | WO2018071831 SEQ ID NO: 1597 |
| AAV variant | 12493 | WO2018071831 SEQ ID NO: 1598 |
| AAV variant | 12494 | WO2018071831 SEQ ID NO: 1599 |
| AAV variant | 12495 | WO2018071831 SEQ ID NO: 1600 |
| AAV variant | 12496 | WO2018071831 SEQ ID NO: 1601 |
| AAV variant | 12497 | WO2018071831 SEQ ID NO: 1602 |
| AAV variant | 12498 | WO2018071831 SEQ ID NO: 1603 |
| AAV variant | 12499 | WO2018071831 SEQ ID NO: 1604 |
| AAV variant | 12560 | WO2018071831 SEQ ID NO: 1605 |
| AAV variant | 12501 | WO2018071831 SEQ ID NO: 1606 |
| AAV variant | 12502 | WO2018071831 SEQ ID NO: 1607 |
| AAV variant | 12503 | WO2018071831 SEQ ID NO: 1608 |
| AAV variant | 12504 | WO2018071831 SEQ ID NO: 1609 |
| AAV variant | 12505 | WO2018071831 SEQ ID NO: 1610 |
| AAV variant | 12506 | WO2018071831 SEQ ID NO: 1611 |
| AAV variant | 12507 | WO2018071831 SEQ ID NO: 1612 |
| AAV variant | 12508 | WO2018071831 SEQ ID NO: 1613 |
| AAV variant | 12509 | WO2018071831 SEQ ID NO: 1614 |
| AAV variant | 12510 | WO2018071831 SEQ ID NO: 1615 |
| AAV variant | 12511 | WO2018071831 SEQ ID NO: 1616 |
| AAV variant | 12512 | WO2018071831 SEQ ID NO: 1617 |
| AAV variant | 12513 | WO2018071831 SEQ ID NO: 1618 |
| AAV variant | 12514 | WO2018071831 SEQ ID NO: 1619 |
| AAV variant | 12515 | WO2018071831 SEQ ID NO: 1620 |
| AAV variant | 12516 | WO2018071831 SEQ ID NO: 1621 |
| AAV variant | 12517 | WO2018071831 SEQ ID NO: 1622 |
| AAV variant | 12518 | WO2018071831 SEQ ID NO: 1623 |
| AAV variant | 12519 | WO2018071831 SEQ ID NO: 1624 |
| AAV variant | 12520 | WO2018071831 SEQ ID NO: 1625 |
| AAV variant | 12521 | WO2018071831 SEQ ID NO: 1626 |
| AAV variant | 12522 | WO2018071831 SEQ ID NO: 1627 |
| AAV variant | 12523 | WO2018071831 SEQ ID NO: 1628 |
| AAV variant | 12524 | WO2018071831 SEQ ID NO: 1629 |
| AAV variant | 12525 | WO2018071831 SEQ ID NO: 1630 |
| AAV variant | 12526 | WO2018071831 SEQ ID NO: 1631 |
| AAV variant | 12527 | WO2018071831 SEQ ID NO: 1632 |
| AAV variant | 12528 | WO2018071831 SEQ ID NO: 1633 |
| AAV variant | 12529 | WO2018071831 SEQ ID NO: 1634 |
| AAV variant | 12530 | WO2018071831 SEQ ID NO: 1635 |
| AAV variant | 12531 | WO2018071831 SEQ ID NO: 1636 |
| AAV variant | 12532 | WO2018071831 SEQ ID NO: 1637 |
| AAV variant | 12533 | WO2018071831 SEQ ID NO: 1638 |
| AAV variant | 12534 | WO2018071831 SEQ ID NO: 1639 |
| AAV variant | 12535 | WO2018071831 SEQ ID NO: 1640 |
| AAV variant | 12536 | WO2018071831 SEQ ID NO: 1641 |
| AAV variant | 12537 | WO2018071831 SEQ ID NO: 1642 |
| AAV variant | 12538 | WO2018071831 SEQ ID NO: 1643 |
| AAV variant | 12539 | WO2018071831 SEQ ID NO: 1644 |
| AAV variant | 12540 | WO2018071831 SEQ ID NO: 1645 |
| AAV variant | 12541 | WO2018071831 SEQ ID NO: 1646 |
| AAV variant | 12542 | WO2018071831 SEQ ID NO: 1647 |
| AAV variant | 12543 | WO2018071831 SEQ ID NO: 1648 |
| AAV variant | 12544 | WO2018071831 SEQ ID NO: 1649 |
| AAV variant | 12545 | WO2018071831 SEQ ID NO: 1650 |
| AAV variant | 12546 | WO2018071831 SEQ ID NO: 1651 |
| AAV variant | 12547 | WO2018071831 SEQ ID NO: 1652 |
| AAV variant | 12548 | WO2018071831 SEQ ID NO: 1653 |
| AAV variant | 12549 | WO2018071831 SEQ ID NO: 1654 |
| AAV variant | 12550 | WO2018071831 SEQ ID NO: 1655 |
| AAV variant | 12551 | WO2018071831 SEQ ID NO: 1656 |
| AAV variant | 12552 | WO2018071831 SEQ ID NO: 1657 |
| AAV variant | 12553 | WO2018071831 SEQ ID NO: 1658 |
| AAV variant | 12554 | WO2018071831 SEQ ID NO: 1659 |
| AAV variant | 12555 | WO2018071831 SEQ ID NO: 1660 |
| AAV variant | 12556 | WO2018071831 SEQ ID NO: 1661 |
| AAV variant | 12557 | WO2018071831 SEQ ID NO: 1662 |
| AAV variant | 12558 | WO2018071831 SEQ ID NO: 1663 |
| AAV variant | 12559 | WO2018071831 SEQ ID NO: 1664 |
| AAV variant | 12560 | WO2018071831 SEQ ID NO: 1665 |
| AAV variant | 12561 | WO2018071831 SEQ ID NO: 1666 |
| AAV variant | 12562 | WO2018071831 SEQ ID NO: 1667 |
| AAV variant | 12563 | WO2018071831 SEQ ID NO: 1668 |
| AAV variant | 12564 | WO2018071831 SEQ ID NO: 1669 |
| AAV variant | 12565 | WO2018071831 SEQ ID NO: 1670 |
| AAV variant | 12566 | WO2018071831 SEQ ID NO: 1671 |
| AAV variant | 12567 | WO2018071831 SEQ ID NO: 1672 |
| AAV variant | 12568 | WO2018071831 SEQ ID NO: 1673 |
| AAV variant | 12569 | WO2018071831 SEQ ID NO: 1674 |
| AAV variant | 12570 | WO2018071831 SEQ ID NO: 1675 |
| AAV variant | 12571 | WO2018071831 SEQ ID NO: 1676 |
| AAV variant | 12572 | WO2018071831 SEQ ID NO: 1677 |
| AAV variant | 12573 | WO2018071831 SEQ ID NO: 1678 |
| AAV variant | 12574 | WO2018071831 SEQ ID NO: 1679 |
| AAV variant | 12575 | WO2018071831 SEQ ID NO: 1680 |
| AAV variant | 12576 | WO2018071831 SEQ ID NO: 1681 |
| AAV variant | 12577 | WO2018071831 SEQ ID NO: 1682 |
| AAV variant | 12578 | WO2018071831 SEQ ID NO: 1683 |
| AAV variant | 12579 | WO2018071831 SEQ ID NO: 1684 |
| AAV variant | 12580 | WO2018071831 SEQ ID NO: 1685 |
| AAV variant | 12581 | WO2018071831 SEQ ID NO: 1686 |
| AAV variant | 12582 | WO2018071831 SEQ ID NO: 1687 |
| AAV variant | 12583 | WO2018071831 SEQ ID NO: 1688 |
| AAV variant | 12584 | WO2018071831 SEQ ID NO: 1689 |
| AAV variant | 12585 | WO2018071831 SEQ ID NO: 1690 |
| AAV variant | 12586 | WO2018071831 SEQ ID NO: 1691 |
| AAV variant | 12587 | WO2018071831 SEQ ID NO: 1692 |
| AAV variant | 12588 | WO2018071831 SEQ ID NO: 1693 |
| AAV variant | 12589 | WO2018071831 SEQ ID NO: 1694 |
| AAV variant | 12590 | WO2018071831 SEQ ID NO: 1695 |
| AAV variant | 12591 | WO2018071831 SEQ ID NO: 1696 |
| AAV variant | 12592 | WO2018071831 SEQ ID NO: 1697 |
| AAV variant | 12593 | WO2018071831 SEQ ID NO: 1698 |
| AAV variant | 12594 | WO2018071831 SEQ ID NO: 1699 |
| AAV variant | 12595 | WO2018071831 SEQ ID NO: 1700 |
| AAV variant | 12596 | WO2018071831 SEQ ID NO: 1701 |
| AAV variant | 12597 | WO2018071831 SEQ ID NO: 1702 |
| AAV variant | 12598 | WO2018071831 SEQ ID NO: 1703 |
| AAV variant | 12599 | WO2018071831 SEQ ID NO: 1704 |
| AAV variant | 12600 | WO2018071831 SEQ ID NO: 1705 |
| AAV variant | 12601 | WO2018071831 SEQ ID NO: 1706 |
| AAV variant | 12602 | WO2018071831 SEQ ID NO: 1707 |
| AAV variant | 12603 | WO2018071831 SEQ ID NO: 1708 |
| AAV variant | 12604 | WO2018071831 SEQ ID NO: 1709 |
| AAV variant | 12605 | WO2018071831 SEQ ID NO: 1710 |
| AAV variant | 12606 | WO2018071831 SEQ ID NO: 1711 |
| AAV variant | 12607 | WO2018071831 SEQ ID NO: 1712 |
| AAV variant | 12608 | WO2018071831 SEQ ID NO: 1713 |
| AAV variant | 12609 | WO2018071831 SEQ ID NO: 1714 |
| AAV variant | 12610 | WO2018071831 SEQ ID NO: 1715 |
| AAV variant | 12611 | WO2018071831 SEQ ID NO: 1716 |
| AAV variant | 12612 | WO2018071831 SEQ ID NO: 1717 |
| AAV variant | 12613 | WO2018071831 SEQ ID NO: 1718 |
| AAV2 variant | 12614 | WO2018071831 SEQ ID NO: 1726 |
| AAV2 variant | 12615 | WO2018071831 SEQ ID NO: 1727 |
| AAV2 variant | 12616 | WO2018071831 SEQ ID NO: 1728 |
| AAV2 variant | 12617 | WO2018071831 SEQ ID NO: 1729 |
| AAV2 variant | 12618 | WO2018071831 SEQ ID NO: 1730 |
| AAV2 variant | 12619 | WO2018071831 SEQ ID NO: 1731 |
| AAV2 variant | 12620 | WO2018071831 SEQ ID NO: 1732 |
| AAV2 variant | 12621 | WO2018071831 SEQ ID NO: 1733 |
| AAV2 variant | 12622 | WO2018071831 SEQ ID NO: 1734 |
| AAV2 variant | 12623 | WO2018071831 SEQ ID NO: 1735 |
| AAV2 variant | 12624 | WO2018071831 SEQ ID NO: 1736 |
| AAV2 variant | 12625 | WO2018071831 SEQ ID NO: 1737 |
| AAV2 variant | 12626 | WO2018071831 SEQ ID NO: 1738 |
| AAV2 variant | 12627 | WO2018071831 SEQ ID NO: 1739 |
| AAV2 variant | 12628 | WO2018071831 SEQ ID NO: 1740 |
| AAV2 variant | 12629 | WO2018071831 SEQ ID NO: 1741 |
| AAV2 variant | 12630 | WO2018071831 SEQ ID NO: 1742 |
| AAV2 variant | 12631 | WO2018071831 SEQ ID NO: 1743 |
| AAV2 variant | 12632 | WO2018071831 SEQ ID NO: 1744 |
| AAV2 variant | 12633 | WO2018071831 SEQ ID NO: 1745 |
| AAV2 variant | 12634 | WO2018071831 SEQ ID NO: 1746 |
| AAV2 variant | 12635 | WO2018071831 SEQ ID NO: 1747 |
| AAV2 variant | 12636 | WO2018071831 SEQ ID NO: 1748 |
| AAV2 variant | 12637 | WO2018071831 SEQ ID NO: 1749 |
| AAV2 variant | 12638 | WO2018071831 SEQ ID NO: 1750 |
| AAV2 variant | 12639 | WO2018071831 SEQ ID NO: 1751 |
| AAV2 variant | 12640 | WO2018071831 SEQ ID NO: 1752 |
| AAV2 variant | 12641 | WO2018071831 SEQ ID NO: 1753 |
| AAV2 variant | 12642 | WO2018071831 SEQ ID NO: 1754 |
| AAV2 variant | 12643 | WO2018071831 SEQ ID NO: 1755 |
| AAV2 variant | 12644 | WO2018071831 SEQ ID NO: 1756 |
| AAV2 variant | 12645 | WO2018071831 SEQ ID NO: 1757 |
| AAV2 variant | 12646 | WO2018071831 SEQ ID NO: 1758 |
| AAV2 variant | 12647 | WO2018071831 SEQ ID NO: 1759 |
| AAV2 variant | 12648 | WO2018071831 SEQ ID NO: 1760 |
| AAV2 variant | 12649 | WO2018071831 SEQ ID NO: 1761 |
| AAV2 variant | 12650 | WO2018071831 SEQ ID NO: 1762 |
| AAV2 variant | 12651 | WO2018071831 SEQ ID NO: 1763 |
| AAV2 variant | 12652 | WO2018071831 SEQ ID NO: 1764 |
| AAV2 variant | 12653 | WO2018071831 SEQ ID NO: 1765 |
| AAV2 variant | 12654 | WO2018071831 SEQ ID NO: 1766 |
| AAV2 variant | 12655 | WO2018071831 SEQ ID NO: 1767 |
| AAV2 variant | 12656 | WO2018071831 SEQ ID NO: 1768 |
| AAV2 variant | 12657 | WO2018071831 SEQ ID NO: 1769 |
| AAV2 variant | 12658 | WO2018071831 SEQ ID NO: 1770 |
| AAV2 variant | 12659 | WO2018071831 SEQ ID NO: 1771 |
| AAV2 variant | 12660 | WO2018071831 SEQ ID NO: 1772 |
| AAV2 variant | 12661 | WO2018071831 SEQ ID NO: 1773 |
| AAV2 variant | 12662 | WO2018071831 SEQ ID NO: 1774 |
| AAV2 variant | 12663 | WO2018071831 SEQ ID NO: 1775 |
| AAV2 variant | 12664 | WO2018071831 SEQ ID NO: 1776 |
| AAV2 variant | 12665 | WO2018071831 SEQ ID NO: 1777 |
| AAV2 variant | 12666 | WO2018071831 SEQ ID NO: 1778 |
| AAV2 variant | 12667 | WO2018071831 SEQ ID NO: 1779 |
| AAV2 variant | 12668 | WO2018071831 SEQ ID NO: 1780 |
| AAV2 variant | 12669 | WO2018071831 SEQ ID NO: 1781 |
| AAV2 variant | 12670 | WO2018071831 SEQ ID NO: 1782 |
| AAV2 variant | 12671 | WO2018071831 SEQ ID NO: 1783 |
| AAV2 variant | 12672 | WO2018071831 SEQ ID NO: 1784 |
| AAV2 variant | 12673 | WO2018071831 SEQ ID NO: 1785 |
| AAV2 variant | 12674 | WO2018071831 SEQ ID NO: 1786 |
| AAV2 variant | 12675 | WO2018071831 SEQ ID NO: 1787 |
| AAV2 variant | 12676 | WO2018071831 SEQ ID NO: 1788 |
| AAV2 variant | 12677 | WO2018071831 SEQ ID NO: 1789 |
| AAV2 variant | 12678 | WO2018071831 SEQ ID NO: 1790 |
| AAV2 variant | 12679 | WO2018071831 SEQ ID NO: 1791 |
| AAV2 variant | 12689 | WO2018071831 SEQ ID NO: 1792 |
| AAV2 variant | 12681 | WO2018071831 SEQ ID NO: 1793 |
| AAV2 variant | 12682 | WO2018071831 SEQ ID NO: 1794 |
| AAV2 variant | 12663 | WO2018071831 SEQ ID NO: 1795 |
| AAV2 variant | 12684 | WO2018071831 SEQ ID NO: 1796 |
| AAV2 variant | 12685 | WO2018071831 SEQ ID NO: 1797 |
| AAV2 variant | 12686 | WO2018071831 SEQ ID NO: 1798 |
| AAV2 variant | 12687 | WO2018071831 SEQ ID NO: 1799 |
| AAV2 variant | 12688 | WO2018071831 SEQ ID NO: 1800 |
| AAV2 variant | 12689 | WO2018071831 SEQ ID NO: 1801 |
| AAV2 variant | 12690 | WO2018071831 SEQ ID NO: 1802 |
| AAV2 variant | 12691 | WO2018071831 SEQ ID NO: 1803 |
| AAV2 variant | 12692 | WO2018071831 SEQ ID NO: 1804 |
| AAV2 variant | 12693 | WO2018071831 SEQ ID NO: 1805 |
| AAV2 variant | 12694 | WO2018071831 SEQ ID NO: 1806 |
| AAV2 variant | 12695 | WO2018071831 SEQ ID NO: 1807 |
| AAV2 variant | 12696 | WO2018071831 SEQ ID NO: 1808 |
| AAV2 variant | 12697 | WO2018071831 SEQ ID NO: 1809 |
| AAV2 variant | 12698 | WO2018071831 SEQ ID NO: 1810 |
| AAV2 variant | 12699 | WO2018071831 SEQ ID NO: 1811 |
| AAV2 variant | 12700 | WO2018071831 SEQ ID NO: 1812 |
| AAV2 variant | 12701 | WO2018071831 SEQ ID NO: 1813 |
| AAV2 variant | 12702 | WO2018071831 SEQ ID NO: 1814 |
| AAV2/3 variant | 12703 | WO2018071831 SEQ ID NO: 1815 |
| AAV2/3 variant | 12764 | WO2018071831 SEQ ID NO: 1816 |
| AAV2/3 variant | 12705 | WO2018071831 SEQ ID NO: 1817 |
| AAV2/3 variant | 12706 | WO2018071831 SEQ ID NO: 1818 |
| AAV2/3 variant | 12707 | WO2018071831 SEQ ID NO: 1819 |
| AAV2/3 variant | 12708 | WO2018071831 SEQ ID NO: 1820 |
| AAV2/3 variant | 12709 | WO2018071831 SEQ ID NO: 1821 |
| AAV2/3 variant | 12710 | WO2018071831 SEQ ID NO: 1822 |
| AAV2/3 variant | 12711 | WO2018071831 SEQ ID NO: 1823 |
| AAV2/3 variant | 12712 | WO2018071831 SEQ ID NO: 1824 |
| AAV2/3 variant | 12713 | WO2018071831 SEQ ID NO: 1825 |
| AAV2/3 variant | 12714 | WO2018071831 SEQ ID NO: 1826 |
| AAV2/3 variant | 12715 | WO2018071831 SEQ ID NO: 1827 |
| AAV2/3 variant | 12716 | WO2018071831 SEQ ID NO: 1828 |
| AAV2/3 variant | 12717 | WO2018071831 SEQ ID NO: 1829 |
| AAV2/3 variant | 12718 | WO2018071831 SEQ ID NO: 1830 |
| AAV2/3 variant | 12719 | WO2018071831 SEQ ID NO: 1831 |
| AAV2/3 variant | 12720 | WO2018071831 SEQ ID NO: 1832 |
| AAV2/3 variant | 12721 | WO2018071831 SEQ ID NO: 1833 |
| AAV2/3 variant | 12722 | WO2018071831 SEQ ID NO: 1834 |
| AAV2/3 variant | 12723 | WO2018071831 SEQ ID NO: 1835 |
| AAV2/3 variant | 12724 | WO2018071831 SEQ ID NO: 1836 |
| AAV2/3 variant | 12725 | WO2018071831 SEQ ID NO: 1837 |
| AAV2/3 variant | 12726 | WO2018071831 SEQ ID NO: 1838 |
| AAV2/3 variant | 12727 | WO2018071831 SEQ ID NO: 1839 |
| AAV2/3 variant | 12728 | WO2018071831 SEQ ID NO: 1840 |
| AAV2/3 variant | 12729 | WO2018071831 SEQ ID NO: 1841 |
| AAV2/3 variant | 12730 | WO2018071831 SEQ ID NO: 1842 |
| AAV2/3 variant | 12731 | WO2018071831 SEQ ID NO: 1843 |
| AAV2/3 variant | 12732 | WO2018071831 SEQ ID NO: 1844 |
| AAV2/3 variant | 12733 | WO2018071831 SEQ ID NO: 1845 |
| AAV2/3 variant | 12734 | WO2018071831 SEQ ID NO: 1846 |
| AAV2/3 variant | 12735 | WO2018071831 SEQ ID NO: 1847 |
| AAV2/3 variant | 12736 | WO2018071831 SEQ ID NO: 1848 |
| AAV2/3 variant | 12737 | WO2018071831 SEQ ID NO: 1849 |
| AAV2/3 variant | 12738 | WO2018071831 SEQ ID NO: 1850 |
| AAV2/3 variant | 12739 | WO2018071831 SEQ ID NO: 1851 |
| AAV2/3 variant | 12740 | WO2018071831 SEQ ID NO: 1852 |
| AAV2/3 variant | 12741 | WO2018071831 SEQ ID NO: 1853 |
| AAV2/3 variant | 12742 | WO2018071831 SEQ ID NO: 1854 |
| AAV2/3 variant | 12743 | WO2018071831 SEQ ID NO: 1855 |
| AAV2/3 variant | 12744 | WO2018071831 SEQ ID NO: 1856 |
| AAV2/3 variant | 12745 | WO2018071831 SEQ ID NO: 1857 |
| AAV2/3 variant | 12746 | WO2018071831 SEQ ID NO: 1858 |
| AAV2/3 variant | 12747 | WO2018071831 SEQ ID NO: 1859 |
| AAV2/3 variant | 12748 | WO2018071831 SEQ ID NO: 1860 |
| AAV2/3 variant | 12749 | WO2018071831 SEQ ID NO: 1861 |
| AAV2/3 variant | 12750 | WO2018071831 SEQ ID NO: 1862 |
| AAV2/3 variant | 12751 | WO2018071831 SEQ ID NO: 1863 |
| AAV2/3 variant | 12752 | WO2018071831 SEQ ID NO: 1864 |
| AAV2/3 variant | 12753 | WO2018071831 SEQ ID NO: 1865 |
| AAV2/3 variant | 12754 | WO2018071831 SEQ ID NO: 1866 |
| AAV2/3 variant | 12755 | WO2018071831 SEQ ID NO: 1867 |
| AAV2/3 variant | 12756 | WO2018071831 SEQ ID NO: 1868 |
| AAV2/3 variant | 12757 | WO2018071831 SEQ ID NO: 1869 |
| AAV2/3 variant | 12758 | WO2018071831 SEQ ID NO: 1870 |
| AAV2/3 variant | 12759 | WO2018071831 SEQ ID NO: 1871 |
| AAV2/3 variant | 12760 | WO2018071831 SEQ ID NO: 1872 |
| AAV2/3 variant | 12761 | WO2018071831 SEQ ID NO: 1873 |
| AAV2/3 variant | 12762 | WO2018071831 SEQ ID NO: 1874 |
| AAV2/3 variant | 12763 | WO2018071831 SEQ ID NO: 1875 |
| AAV2/3 variant | 12764 | WO2018071831 SEQ ID NO: 1876 |
| AAV2/3 variant | 12765 | WO2018071831 SEQ ID NO: 1877 |
| AAV2/3 variant | 12766 | WO2018071831 SEQ ID NO: 1878 |
| AAV2/3 variant | 12767 | WO2018071831 SEQ ID NO: 1879 |
| AAV2/3 variant | 12768 | WO2018071831 SEQ ID NO: 1880 |
| AAV2/3 variant | 12769 | WO2018071831 SEQ ID NO: 1881 |
| AAV2/3 variant | 12770 | WO2018071831 SEQ ID NO: 1882 |
| AAV2/3 variant | 12771 | WO2018071831 SEQ ID NO: 1883 |
| AAV2/3 variant | 12772 | WO2018071831 SEQ ID NO: 1884 |
| AAV2/3 variant | 12773 | WO2018071831 SEQ ID NO: 1885 |
| AAV2/3 variant | 12774 | WO2018071831 SEQ ID NO: 1886 |
| AAV2/3 variant | 12775 | WO2018071831 SEQ ID NO: 1887 |
| AAV2/3 variant | 12776 | WO2018071831 SEQ ID NO: 1888 |
| AAV2/3 variant | 12777 | WO2018071831 SEQ ID NO: 1889 |
| AAV2/3 variant | 12778 | WO2018071831 SEQ ID NO: 1890 |
| AAV2/3 variant | 12779 | WO2018071831 SEQ ID NO: 1891 |
| AAV2/3 variant | 12780 | WO2018071831 SEQ ID NO: 1892 |
| AAV2/3 variant | 12781 | WO2018071831 SEQ ID NO: 1893 |
| AAV2/3 variant | 12782 | WO2018071831 SEQ ID NO: 1894 |
| AAV2/3 variant | 12783 | WO2018071831 SEQ ID NO: 1895 |
| AAV2/3 variant | 12784 | WO2018071831 SEQ ID NO: 1896 |
| AAV2/3 variant | 12785 | WO2018071831 SEQ ID NO: 1897 |
| AAV2/3 variant | 12786 | WO2018071831 SEQ ID NO: 1898 |
| AAV2/3 variant | 12787 | WO2018071831 SEQ ID NO: 1899 |
| AAV2/3 variant | 12788 | WO2018071831 SEQ ID NO: 1900 |
| AAV2/3 variant | 12789 | WO2018071831 SEQ ID NO: 1901 |
| AAV2/3 variant | 12790 | WO2018071831 SEQ ID NO: 1902 |
| AAV2/3 variant | 12791 | WO2018071831 SEQ ID NO: 1903 |
| AAV2/3 variant | 12792 | WO2018071831 SEQ ID NO: 1904 |
| AAV2/3 variant | 12793 | WO2018071831 SEQ ID NO: 1905 |
| AAV2/3 variant | 12794 | WO2018071831 SEQ ID NO: 1906 |
| AAV2/3 variant | 12795 | WO2018071831 SEQ ID NO: 1907 |
| AAV2/3 variant | 12796 | WO2018071831 SEQ ID NO: 1908 |
| AAV2/3 variant | 12797 | WO2018071831 SEQ ID NO: 1909 |
| AAV2/3 variant | 12798 | WO2018071831 SEQ ID NO: 1910 |
| AAV2/3 variant | 12799 | WO2018071831 SEQ ID NO: 1911 |
| AAV2/3 variant | 12800 | WO2018071831 SEQ ID NO: 1912 |
| AAV2/3 variant | 12801 | WO2018071831 SEQ ID NO: 1913 |
| AAV2/3 variant | 12802 | WO2018071831 SEQ ID NO: 1914 |
| AAV2/3 variant | 12803 | WO2018071831 SEQ ID NO: 1915 |
| AAV2/3 variant | 12804 | WO2018071831 SEQ ID NO: 1916 |
| AAV2/3 variant | 12805 | WO2018071831 SEQ ID NO: 1917 |
| AAV2/3 variant | 12806 | WO2018071831 SEQ ID NO: 1918 |
| AAV2/3 variant | 12807 | WO2018071831 SEQ ID NO: 1919 |
| AAV2/3 variant | 12808 | WO2018071831 SEQ ID NO: 1920 |
| AAV2/3 variant | 12809 | WO2018071831 SEQ ID NO: 1921 |
| AAV2/3 variant | 12810 | WO2018071831 SEQ ID NO: 1922 |
| AAV2/3 variant | 12811 | WO2018071831 SEQ ID NO: 1923 |
| AAV2/3 variant | 12812 | WO2018071831 SEQ ID NO: 1924 |
| AAV2/3 variant | 12813 | WO2018071831 SEQ ID NO: 1925 |
| AAV2/3 variant | 12814 | WO2018071831 SEQ ID NO: 1926 |
| AAV2/3 variant | 12815 | WO2018071831 SEQ ID NO: 1927 |
| AAV2/3 variant | 12816 | WO2018071831 SEQ ID NO: 1928 |
| AAV2/3 variant | 12817 | WO2018071831 SEQ ID NO: 1929 |
| AAV2/3 variant | 12818 | WO2018071831 SEQ ID NO: 1930 |
| AAV2/3 variant | 12819 | WO2018071831 SEQ ID NO: 1931 |
| AAV2/3 variant | 12820 | WO2018071831 SEQ ID NO: 1932 |
| AAV2/3 variant | 12821 | WO2018071831 SEQ ID NO: 1933 |
| AAV2/3 variant | 12822 | WO2018071831 SEQ ID NO: 1934 |
| AAV2/3 variant | 12823 | WO2018071831 SEQ ID NO: 1935 |
| AAV2/3 variant | 12824 | WO2018071831 SEQ ID NO: 1936 |
| AAV2/3 variant | 12825 | WO2018071831 SEQ ID NO: 1937 |
| AAV2/3 variant | 12826 | WO2018071831 SEQ ID NO: 1938 |
| AAV2/3 variant | 12827 | WO2018071831 SEQ ID NO: 1939 |
| AAV2/3 variant | 12828 | WO2018071831 SEQ ID NO: 1940 |
| AAV2/3 variant | 12829 | WO2018071831 SEQ ID NO: 1941 |
| AAV2/3 variant | 12830 | WO2018071831 SEQ ID NO: 1942 |
| AAV2/3 variant | 12831 | WO2018071831 SEQ ID NO: 1943 |
| AAV2/3 variant | 12832 | WO2018071831 SEQ ID NO: 1944 |
| AAV2/3 variant | 12833 | WO2018071831 SEQ ID NO: 1945 |
| AAV2/3 variant | 12834 | WO2018071831 SEQ ID NO: 1946 |
| AAV2/3 variant | 12835 | WO2018071831 SEQ ID NO: 1947 |
| AAV2/3 variant | 12836 | WO2018071831 SEQ ID NO: 1948 |
| AAV2/3 variant | 12837 | WO2018071831 SEQ ID NO: 1949 |
| AAV2/3 variant | 12838 | WO2018071831 SEQ ID NO: 1950 |
| AAV2/3 variant | 12839 | WO2018071831 SEQ ID NO: 1951 |
| AAV2/3 variant | 12840 | WO2018071831 SEQ ID NO: 1952 |
| AAV2/3 variant | 12841 | WO2018071831 SEQ ID NO: 1953 |
| AAV2/3 variant | 12842 | WO2018071831 SEQ ID NO: 1954 |
| AAV2/3 variant | 12843 | WO2018071831 SEQ ID NO: 1955 |
| AAV2/3 variant | 12844 | WO2018071831 SEQ ID NO: 1956 |
| AAV2/3 variant | 12845 | WO2018071831 SEQ ID NO: 1957 |
| AAV2/3 variant | 12846 | WO2018071831 SEQ ID NO: 1958 |
| AAV2/3 variant | 12847 | WO2018071831 SEQ ID NO: 1959 |
| AAV2/3 variant | 12848 | WO2018071831 SEQ ID NO: 1960 |
| AAV2/3 variant | 12849 | WO2018071831 SEQ ID NO: 1961 |
| AAV2/3 variant | 12850 | WO2018071831 SEQ ID NO: 1962 |
| AAV2/3 variant | 12851 | WO2018071831 SEQ ID NO: 1963 |
| AAV2/3 variant | 12852 | WO2018071831 SEQ ID NO: 1964 |
| AAV2/3 variant | 12853 | WO2018071831 SEQ ID NO: 1965 |
| AAV2/3 variant | 12854 | WO2018071831 SEQ ID NO: 1966 |
| AAV2/3 variant | 12855 | WO2018071831 SEQ ID NO: 1967 |
| AAV2/3 variant | 12856 | WO2018071831 SEQ ID NO: 1968 |
| AAV2/3 variant | 12857 | WO2018071831 SEQ ID NO: 1969 |
| AAV2/3 variant | 12858 | WO2018071831 SEQ ID NO: 1970 |
| AAV2/3 variant | 12859 | WO2018071831 SEQ ID NO: 1971 |
| AAV2/3 variant | 12860 | WO2018071831 SEQ ID NO: 1972 |
| AAV2/3 variant | 12861 | WO2018071831 SEQ ID NO: 1973 |
| AAV2/3 variant | 12862 | WO2018071831 SEQ ID NO: 1974 |
| AAV2/3 variant | 12863 | WO2018071831 SEQ ID NO: 1975 |
| AAV2/3 variant | 12864 | WO2018071831 SEQ ID NO: 1976 |
| AAV2/3 variant | 12865 | WO2018071831 SEQ ID NO: 1977 |
| AAV2/3 variant | 12866 | WO2018071831 SEQ ID NO: 1978 |
| AAV2/3 variant | 12867 | WO2018071831 SEQ ID NO: 1979 |
| AAV2/3 variant | 12868 | WO2018071831 SEQ ID NO: 1980 |
| AAV2/3 variant | 12869 | WO2018071831 SEQ ID NO: 1981 |
| AAV2/3 variant | 12870 | WO2018071831 SEQ ID NO: 1982 |
| AAV2/3 variant | 12871 | WO2018071831 SEQ ID NO: 1983 |
| AAV2/3 variant | 12872 | WO2018071831 SEQ ID NO: 1984 |
| AAV2/3 variant | 12873 | WO2018071831 SEQ ID NO: 1985 |
| AAV2/3 variant | 12874 | WO2018071831 SEQ ID NO: 1986 |
| AAV2/3 variant | 12875 | WO2018071831 SEQ ID NO: 1987 |
| AAV2/3 variant | 12876 | WO2018071831 SEQ ID NO: 1988 |
| AAV2 variant | 12877 | WO2018071831 SEQ ID NO: 1989 |
| AAV2 variant | 12878 | WO2018071831 SEQ ID NO: 1990 |
| AAV2 variant | 12879 | WO2018071831 SEQ ID NO: 1991 |
| AAV2 variant | 12880 | WO2018071831 SEQ ID NO: 1992 |
| AAV2 variant | 12881 | WO2018071831 SEQ ID NO: 1993 |
| AAV2 variant | 12882 | WO2018071831 SEQ ID NO: 1994 |
| AAV2 variant | 12883 | WO2018071831 SEQ ID NO: 1995 |
| AAV2 variant | 12884 | WO2018071831 SEQ ID NO: 1996 |
| AAV2 variant | 12885 | WO2018071831 SEQ ID NO: 1997 |
| AAV2 variant | 12886 | WO2018071831 SEQ ID NO: 1998 |
| AAV2 variant | 12887 | WO2018071831 SEQ ID NO: 1999 |
| AAV2 variant | 12888 | WO2018071831 SEQ ID NO: 2000 |
| AAV2 variant | 12889 | WO2018071831 SEQ ID NO: 2001 |
| AAV2 variant | 12890 | WO2018071831 SEQ ID NO: 2002 |
| AAV2 variant | 12891 | WO2018071831 SEQ ID NO: 2003 |
| AAV2 variant | 12892 | WO2018071831 SEQ ID NO: 2004 |
| AAV2 variant | 12893 | WO2018071831 SEQ ID NO: 2005 |
| AAV2 variant | 12894 | WO2018071831 SEQ ID NO: 2006 |
| AAV2 variant | 12895 | WO2018071831 SEQ ID NO: 2007 |
| AAV2 variant | 12896 | WO2018071831 SEQ ID NO: 2008 |
| AAV2 variant | 12897 | WO2018071831 SEQ ID NO: 2009 |
| AAV2 variant | 12898 | WO2018071831 SEQ ID NO: 2010 |
| AAV2 variant | 12899 | WO2018071831 SEQ ID NO: 2011 |
| AAV2 variant | 12900 | WO2018071831 SEQ ID NO: 2012 |
| AAV2 variant | 12901 | WO2018071831 SEQ ID NO: 2013 |
| AAV2 variant | 12902 | WO2018071831 SEQ ID NO: 2014 |
| AAV2 variant | 12903 | WO2018071831 SEQ ID NO: 2015 |
| AAV2 variant | 12904 | WO2018071831 SEQ ID NO: 2016 |
| AAV2 variant | 12905 | WO2018071831 SEQ ID NO: 2017 |
| AAV2 variant | 12906 | WO2018071831 SEQ ID NO: 2018 |
| AAV2 variant | 12907 | WO2018071831 SEQ ID NO: 2019 |
| AAV2 variant | 12908 | WO2018071831 SEQ ID NO: 2020 |
| AAV2 variant | 12909 | WO2018071831 SEQ ID NO: 2021 |
| AAV2 variant | 12910 | WO2018071831 SEQ ID NO: 2022 |
| AAV2 variant | 12911 | WO2018071831 SEQ ID NO: 2023 |
| AAV2 variant | 12912 | WO2018071831 SEQ ID NO: 2024 |
| AAV2 variant | 12913 | WO2018071831 SEQ ID NO: 2025 |
| AAV2 variant | 12914 | WO2018071831 SEQ ID NO: 2026 |
| AAV2 variant | 12915 | WO2018071831 SEQ ID NO: 2027 |
| AAV2 variant | 12916 | WO2018071831 SEQ ID NO: 2028 |
| AAV2 variant | 12917 | WO2018071831 SEQ ID NO: 2029 |
| AAV2 variant | 12918 | WO2018071831 SEQ ID NO: 2030 |
| AAV2 variant | 12919 | WO2018071831 SEQ ID NO: 2031 |
| AAV2 variant | 12929 | WO2018071831 SEQ ID NO: 2032 |
| AAV2 variant | 12921 | WO2018071831 SEQ ID NO: 2033 |
| AAV2 variant | 12922 | WO2018071831 SEQ ID NO: 2034 |
| AAV2 variant | 12923 | WO2018071831 SEQ ID NO: 2035 |
| AAV2 variant | 12924 | WO2018071831 SEQ ID NO: 2036 |
| AAV2 variant | 12925 | WO2018071831 SEQ ID NO: 2037 |
| AAV2 variant | 12926 | WO2018071831 SEQ ID NO: 2038 |
| AAV2 variant | 12927 | WO2018071831 SEQ ID NO: 2039 |
| AAV2 variant | 12928 | WO2018071831 SEQ ID NO: 2040 |
| AAV2 variant | 12929 | WO2018071831 SEQ ID NO: 2041 |
| AAV2 variant | 12930 | WO2018071831 SEQ ID NO: 2042 |
| AAV2 variant | 12931 | WO2018071831 SEQ ID NO: 2043 |
| AAV2 variant | 12932 | WO2018071831 SEQ ID NO: 2044 |
| AAV2 variant | 12933 | WO2018071831 SEQ ID NO: 2045 |
| AAV2 variant | 12934 | WO2018071831 SEQ ID NO: 2046 |
| AAV2 variant | 12935 | WO2018071831 SEQ ID NO: 2047 |
| AAV2 variant | 12936 | WO2018071831 SEQ ID NO: 2048 |
| AAV2 variant | 12937 | WO2018071831 SEQ ID NO: 2049 |
| AAV2 variant | 12938 | WO2018071831 SEQ ID NO: 2050 |
| AAV2 variant | 12939 | WO2018071831 SEQ ID NO: 2051 |
| AAV2 variant | 12940 | WO2018071831 SEQ ID NO: 2052 |
| AAV2 variant | 12941 | WO2018071831 SEQ ID NO: 2053 |
| AAV2 variant | 12942 | WO2018071831 SEQ ID NO: 2054 |
| AAV2 variant | 12943 | WO2018071831 SEQ ID NO: 2055 |
| AAV2 variant | 12944 | WO2018071831 SEQ ID NO: 2056 |
| AAV2 variant | 12945 | WO2018071831 SEQ ID NO: 2057 |
| AAV2 variant | 12946 | WO2018071831 SEQ ID NO: 2058 |
| AAV2 variant | 12947 | WO2018071831 SEQ ID NO: 2059 |
| AAV2 variant | 12948 | WO2018071831 SEQ ID NO: 2060 |
| AAV2 variant | 12949 | WO2018071831 SEQ ID NO: 2061 |
| AAV2 variant | 12950 | WO2018071831 SEQ ID NO: 2062 |
| AAV2 variant | 12951 | WO2018071831 SEQ ID NO: 2063 |
| AAV2 variant | 12952 | WO2018071831 SEQ ID NO: 2064 |
| AAV2 variant | 12953 | WO2018071831 SEQ ID NO: 2065 |
| AAV2 variant | 12954 | WO2018071831 SEQ ID NO: 2066 |
| AAV2 variant | 12955 | WO2018071831 SEQ ID NO: 2067 |
| AAV2 variant | 12956 | WO2018071831 SEQ ID NO: 2068 |
| AAV2 variant | 12957 | WO2018071831 SEQ ID NO: 2069 |
| AAV2 variant | 12958 | WO2018071831 SEQ ID NO: 2070 |
| AAV2 variant | 12959 | WO2018071831 SEQ ID NO: 2071 |
| AAV2 variant | 12960 | WO2018071831 SEQ ID NO: 2072 |
| AAV2 variant | 12961 | WO2018071831 SEQ ID NO: 2073 |
| AAV2 variant | 12962 | WO2018071831 SEQ ID NO: 2074 |
| AAV2 variant | 12963 | WO2018071831 SEQ ID NO: 2075 |
| AAV2 variant | 12964 | WO2018071831 SEQ ID NO: 2076 |
| AAV2 variant | 12965 | WO2018071831 SEQ ID NO: 2077 |
| AAV2/3 variant | 12966 | WO2018071831 SEQ ID NO: 2078 |
| AAV2/3 variant | 12967 | WO2018071831 SEQ ID NO: 2079 |
| AAV2/3 variant | 12968 | WO2018071831 SEQ ID NO: 2080 |
| AAV2/3 variant | 12969 | WO2018071831 SEQ ID NO: 2081 |
| AAV2/3 variant | 12970 | WO2018071831 SEQ ID NO: 2082 |
| AAV2/3 variant | 12971 | WO2018071831 SEQ ID NO: 2083 |
| AAV2/3 variant | 12972 | WO2018071831 SEQ ID NO: 2084 |
| AAV2/3 variant | 12973 | WO2018071831 SEQ ID NO: 2085 |
| AAV2/3 variant | 12974 | WO2018071831 SEQ ID NO: 2086 |
| AAV2/3 variant | 12975 | WO2018071831 SEQ ID NO: 2087 |
| AAV2/3 variant | 12976 | WO2018071831 SEQ ID NO: 2088 |
| AAV2/3 variant | 12977 | WO2018071831 SEQ ID NO: 2089 |
| AAV2/3 variant | 12978 | WO2018071831 SEQ ID NO: 2090 |
| AAV2/3 variant | 12979 | WO2018071831 SEQ ID NO: 2091 |
| AAV2/3 variant | 12980 | WO2018071831 SEQ ID NO: 2092 |
| AAV2/3 variant | 12981 | WO2018071831 SEQ ID NO: 2093 |
| AAV2/3 variant | 12982 | WO2018071831 SEQ ID NO: 2094 |
| AAV2/3 variant | 12983 | WO2018071831 SEQ ID NO: 2095 |
| AAV2/3 variant | 12984 | WO2018071831 SEQ ID NO: 2096 |
| AAV2/3 variant | 12985 | WO2018071831 SEQ ID NO: 2097 |
| AAV2/3 variant | 12986 | WO2018071831 SEQ ID NO: 2098 |
| AAV2/3 variant | 12987 | WO2018071831 SEQ ID NO: 2099 |
| AAV2/3 variant | 12988 | WO2018071831 SEQ ID NO: 2100 |
| AAV2/3 variant | 12989 | WO2018071831 SEQ ID NO: 2101 |
| AAV2/3 variant | 12990 | WO2018071831 SEQ ID NO: 2102 |
| AAV2/3 variant | 12991 | WO2018071831 SEQ ID NO: 2103 |
| AAV2/3 variant | 12992 | WO2018071831 SEQ ID NO: 2104 |
| AAV2/3 variant | 12993 | WO2018071831 SEQ ID NO: 2105 |
| AAV2/3 variant | 12994 | WO2018071831 SEQ ID NO: 2106 |
| AAV2/3 variant | 12995 | WO2018071831 SEQ ID NO: 2107 |
| AAV2/3 variant | 12996 | WO2018071831 SEQ ID NO: 2108 |
| AAV2/3 variant | 12997 | WO2018071831 SEQ ID NO: 2109 |
| AAV2/3 variant | 12998 | WO2018071831 SEQ ID NO: 2110 |
| AAV2/3 variant | 12999 | WO2018071831 SEQ ID NO: 2111 |
| AAV2/3 variant | 13000 | WO2018071831 SEQ ID NO: 2112 |
| AAV2/3 variant | 13001 | WO2018071831 SEQ ID NO: 2113 |
| AAV2/3 variant | 13002 | WO2018071831 SEQ ID NO: 2114 |
| AAV2/3 variant | 13003 | WO2018071831 SEQ ID NO: 2115 |
| AAV2/3 variant | 13004 | WO2018071831 SEQ ID NO: 2116 |
| AAV2/3 variant | 13005 | WO2018071831 SEQ ID NO: 2117 |
| AAV2/3 variant | 13006 | WO2018071831 SEQ ID NO: 2118 |
| AAV2/3 variant | 13007 | WO2018071831 SEQ ID NO: 2119 |
| AAV2/3 variant | 13008 | WO2018071831 SEQ ID NO: 2120 |
| AAV2/3 variant | 13009 | WO2018071831 SEQ ID NO: 2121 |
| AAV2/3 variant | 13010 | WO2018071831 SEQ ID NO: 2122 |
| AAV2/3 variant | 13011 | WO2018071831 SEQ ID NO: 2123 |
| AAV2/3 variant | 13012 | WO2018071831 SEQ ID NO: 2124 |
| AAV2/3 variant | 13013 | WO2018071831 SEQ ID NO: 2125 |
| AAV2/3 variant | 13014 | WO2018071831 SEQ ID NO: 2126 |
| AAV2/3 variant | 13015 | WO2018071831 SEQ ID NO: 2127 |
| AAV2/3 variant | 13016 | WO2018071831 SEQ ID NO: 2128 |
| AAV2/3 variant | 13017 | WO2018071831 SEQ ID NO: 2129 |
| AAV2/3 variant | 13018 | WO2018071831 SEQ ID NO: 2130 |
| AAV2/3 variant | 13619 | WO2018071831 SEQ ID NO: 2131 |
| AAV2/3 variant | 13020 | WO2018071831 SEQ ID NO: 2132 |
| AAV2/3 variant | 13021 | WO2018071831 SEQ ID NO: 2133 |
| AAV2/3 variant | 13022 | WO2018071831 SEQ ID NO: 2134 |
| AAV2/3 variant | 13023 | WO2018071831 SEQ ID NO: 2135 |
| AAV2/3 variant | 13024 | WO2018071831 SEQ ID NO: 2136 |
| AAV2/3 variant | 13025 | WO2018071831 SEQ ID NO: 2137 |
| AAV2/3 variant | 13026 | WO2018071831 SEQ ID NO: 2138 |
| AAV2/3 variant | 13027 | WO2018071831 SEQ ID NO: 2139 |
| AAV2/3 variant | 13028 | WO2018071831 SEQ ID NO: 2140 |
| AAV2/3 variant | 13029 | WO2018071831 SEQ ID NO: 2141 |
| AAV2/3 variant | 13030 | WO2018071831 SEQ ID NO: 2142 |
| AAV2/3 variant | 13031 | WO2018071831 SEQ ID NO: 2143 |
| AAV2/3 variant | 13032 | WO2018071831 SEQ ID NO: 2144 |
| AAV2/3 variant | 13033 | WO2018071831 SEQ ID NO: 2145 |
| AAV2/3 variant | 13034 | WO2018071831 SEQ ID NO: 2146 |
| AAV2/3 variant | 13035 | WO2018071831 SEQ ID NO: 2147 |
| AAV2/3 variant | 13036 | WO2018071831 SEQ ID NO: 2148 |
| AAV2/3 variant | 13037 | WO2018071831 SEQ ID NO: 2149 |
| AAV2/3 variant | 13038 | WO2018071831 SEQ ID NO: 2150 |
| AAV2/3 variant | 13039 | WO2018071831 SEQ ID NO: 2151 |
| AAV2/3 variant | 13040 | WO2018071831 SEQ ID NO: 2152 |
| AAV2/3 variant | 13041 | WO2018071831 SEQ ID NO: 2153 |
| AAV2/3 variant | 13042 | WO2018071831 SEQ ID NO: 2154 |
| AAV2/3 variant | 13043 | WO2018071831 SEQ ID NO: 2155 |
| AAV2/3 variant | 13044 | WO2018071831 SEQ ID NO: 2156 |
| AAV2/3 variant | 13045 | WO2018071831 SEQ ID NO: 2157 |
| AAV2/3 variant | 13046 | WO2018071831 SEQ ID NO: 2158 |
| AAV2/3 variant | 13047 | WO2018071831 SEQ ID NO: 2159 |
| AAV2/3 variant | 13048 | WO2018071831 SEQ ID NO: 2160 |
| AAV2/3 variant | 13049 | WO2018071831 SEQ ID NO: 2161 |
| AAV2/3 variant | 13050 | WO2018071831 SEQ ID NO: 2162 |
| AAV2/3 variant | 13051 | WO2018071831 SEQ ID NO: 2163 |
| AAV2/3 variant | 13052 | WO2018071831 SEQ ID NO: 2164 |
| AAV2/3 variant | 13053 | WO2018071831 SEQ ID NO: 2165 |
| AAV2/3 variant | 13054 | WO2018071831 SEQ ID NO: 2166 |
| AAV2/3 variant | 13055 | WO2018071831 SEQ ID NO: 2167 |
| AAV2/3 variant | 13056 | WO2018071831 SEQ ID NO: 2168 |
| AAV2/3 variant | 13057 | WO2018071831 SEQ ID NO: 2169 |
| AAV2/3 variant | 13058 | WO2018071831 SEQ ID NO: 2170 |
| AAV2/3 variant | 13059 | WO2018071831 SEQ ID NO: 2171 |
| AAV2/3 variant | 13060 | WO2018071831 SEQ ID NO: 2172 |
| AAV2/3 variant | 13061 | WO2018071831 SEQ ID NO: 2173 |
| AAV2/3 variant | 13062 | WO2018071831 SEQ ID NO: 2174 |
| AAV2/3 variant | 13063 | WO2018071831 SEQ ID NO: 2175 |
| AAV2/3 variant | 13064 | WO2018071831 SEQ ID NO: 2176 |
| AAV2/3 variant | 13065 | WO2018071831 SEQ ID NO: 2177 |
| AAV2/3 variant | 13066 | WO2018071831 SEQ ID NO: 2178 |
| AAV2/3 variant | 13067 | WO2018071831 SEQ ID NO: 2179 |
| AAV2/3 variant | 13068 | WO2018071831 SEQ ID NO: 2180 |
| AAV2/3 variant | 13069 | WO2018071831 SEQ ID NO: 2181 |
| AAV2/3 variant | 13070 | WO2018071831 SEQ ID NO: 2182 |
| AAV2/3 variant | 13071 | WO2018071831 SEQ ID NO: 2183 |
| AAV2/3 variant | 13072 | WO2018071831 SEQ ID NO: 2184 |
| AAV2/3 variant | 13073 | WO2018071831 SEQ ID NO: 2185 |
| AAV2/3 variant | 13074 | WO2018071831 SEQ ID NO: 2186 |
| AAV2/3 variant | 13075 | WO2018071831 SEQ ID NO: 2187 |
| AAV2/3 variant | 13076 | WO2018071831 SEQ ID NO: 2188 |
| AAV2/3 variant | 13077 | WO2018071831 SEQ ID NO: 2189 |
| AAV2/3 variant | 13078 | WO2018071831 SEQ ID NO: 2190 |
| AAV2/3 variant | 13079 | WO2018071831 SEQ ID NO: 2191 |
| AAV2/3 variant | 13080 | WO2018071831 SEQ ID NO: 2192 |
| AAV2/3 variant | 13081 | WO2018071831 SEQ ID NO: 2193 |
| AAV2/3 variant | 13082 | WO2018071831 SEQ ID NO: 2194 |
| AAV2/3 variant | 13083 | WO2018071831 SEQ ID NO: 2195 |
| AAV2/3 variant | 13064 | WO2018071831 SEQ ID NO: 2196 |
| AAV2/3 variant | 13085 | WO2018071831 SEQ ID NO: 2197 |
| AAV2/3 variant | 13086 | WO2018071831 SEQ ID NO: 2198 |
| AAV2/3 variant | 13087 | WO2018071831 SEQ ID NO: 2199 |
| AAV2/3 variant | 13088 | WO2018071831 SEQ ID NO: 2200 |
| AAV2/3 variant | 13089 | WO2018071831 SEQ ID NO: 2201 |
| AAV2/3 variant | 13090 | WO2018071831 SEQ ID NO: 2202 |
| AAV2/3 variant | 13091 | WO2018071831 SEQ ID NO: 2203 |
| AAV2/3 variant | 13092 | WO2018071831 SEQ ID NO: 2204 |
| AAV2/3 variant | 13093 | WO2018071831 SEQ ID NO: 2205 |
| AAV2/3 variant | 13094 | WO2018071831 SEQ ID NO: 2206 |
| AAV2/3 variant | 13095 | WO2018071831 SEQ ID NO: 2207 |
| AAV2/3 variant | 13096 | WO2018071831 SEQ ID NO: 2208 |
| AAV2/3 variant | 13097 | WO2018071831 SEQ ID NO: 2209 |
| AAV2/3 variant | 13098 | WO2018071831 SEQ ID NO: 2210 |
| AAV2/3 variant | 13099 | WO2018071831 SEQ ID NO: 2211 |
| AAV2/3 variant | 13100 | WO2018071831 SEQ ID NO: 2212 |
| AAV2/3 variant | 13101 | WO2018071831 SEQ ID NO: 2213 |
| AAV2/3 variant | 13102 | WO2018071831 SEQ ID NO: 2214 |
| AAV2/3 variant | 13103 | WO2018071831 SEQ ID NO: 2215 |
| AAV2/3 variant | 13164 | WO2018071831 SEQ ID NO: 2216 |
| AAV2/3 variant | 13105 | WO2018071831 SEQ ID NO: 2217 |
| AAV2/3 variant | 13106 | WO2018071831 SEQ ID NO: 2218 |
| AAV2/3 variant | 13107 | WO2018071831 SEQ ID NO: 2219 |
| AAV2/3 variant | 13108 | WO2018071831 SEQ ID NO: 2220 |
| AAV2/3 variant | 13109 | WO2018071831 SEQ ID NO: 2221 |
| AAV2/3 variant | 13110 | WO2018071831 SEQ ID NO: 2222 |
| AAV2/3 variant | 13111 | WO2018071831 SEQ ID NO: 2223 |
| AAV2/3 variant | 13112 | WO2018071831 SEQ ID NO: 2224 |
| AAV2/3 variant | 13113 | WO2018071831 SEQ ID NO: 2225 |
| AAV2/3 variant | 13114 | WO2018071831 SEQ ID NO: 2226 |
| AAV2/3 variant | 13115 | WO2018071831 SEQ ID NO: 2227 |
| AAV2/3 variant | 13116 | WO2018071831 SEQ ID NO: 2228 |
| AAV2/3 variant | 13117 | WO2018071831 SEQ ID NO: 2229 |
| AAV2/3 variant | 13118 | WO2018071831 SEQ ID NO: 2230 |
| AAV2/3 variant | 13119 | WO2018071831 SEQ ID NO: 2231 |
| AAV2/3 variant | 13120 | WO2018071831 SEQ ID NO: 2232 |
| AAV2/3 variant | 13121 | WO2018071831 SEQ ID NO: 2233 |
| AAV2/3 variant | 13122 | WO2018071831 SEQ ID NO: 2234 |
| AAV2/3 variant | 13123 | WO2018071831 SEQ ID NO: 2235 |
| AAV2/3 variant | 13124 | WO2018071831 SEQ ID NO: 2236 |
| AAV2/3 variant | 13125 | WO2018071831 SEQ ID NO: 2237 |
| AAV2/3 variant | 13126 | WO2018071831 SEQ ID NO: 2238 |
| AAV2/3 variant | 13127 | WO2018071831 SEQ ID NO: 2239 |
| AAV2/3 variant | 13128 | WO2018071831 SEQ ID NO: 2240 |
| AAV2/3 variant | 13129 | WO2018071831 SEQ ID NO: 2241 |
| AAV2/3 variant | 13130 | WO2018071831 SEQ ID NO: 2242 |
| AAV2/3 variant | 13131 | WO2018071831 SEQ ID NO: 2243 |
| AAV2/3 variant | 13132 | WO2018071831 SEQ ID NO: 2244 |
| AAV2/3 variant | 13133 | WO2018071831 SEQ ID NO: 2245 |
| AAV2/3 variant | 13134 | WO2018071831 SEQ ID NO: 2246 |
| AAV2/3 variant | 13135 | WO2018071831 SEQ ID NO: 2247 |
| AAV2/3 variant | 13136 | WO2018071831 SEQ ID NO: 2248 |
| AAV2/3 variant | 13137 | WO2018071831 SEQ ID NO: 2249 |
| AAV2/3 variant | 13138 | WO2018071831 SEQ ID NO: 2250 |
| AAV2/3 variant | 13139 | WO2018071831 SEQ ID NO: 2251 |

[0098] In some embodiments, the AAV serotype may be, or may have a sequence as described in International Patent Publication WO2015038959, the contents of which are herein incorporated by reference in their entirety, such as, but not limited to, AAV9 (SEQ ID NO: 2 and 11 of WO2015038958 or SEQ ID NO: 137 and 138 respectively herein), PHP.B (SEQ ID NO: 8 and 9 of WO2015038958, herein SEQ ID NO: 5 and 6), G2B-3.13 (SEQ ID NO: 12 of WO2015038958, herein SEQ ID NO: 7), G21-26 (SEQ ID NO: 13 of WO2015038958, herein SEQ ID NO: 5), TH1.1-32 (SEQ ID NO:14 of WO2015038958, herein SEQ ID NO: 8), TH1.1-35 (SEQ ID NO: 15 of WO2015038958, herein SEQ ID NO: 9) or variants thereof. Further, any of the targeting peptides or amino acid inserts described in WO2015038958, may be inserted into any parent AAV serotype, such as, but not limited to, AAV9 (SEQ ID NO: 137 for the DNA sequence and SEQ ID NO: 138 for the amino acid sequence). In some embodiments, the amino acid insert is inserted between amino acids 586.592 of the parent AAV (e.g., AAV9). In another embodiment, the amino acid insert is inserted between amino acids 588-589 of the parent AAV sequence. The amino acid insert may be, but is not limited to, any of the following amino acid sequences, TLAVPFK (SEQ ID NO: 1 of WO2015033953; herein SEQ ID NO: 1262), KFPVALT (SEQ ID NO: 3 of WO2015038958; herein SEQ ID NO: 1263), LAVPFK (SEQ ID NO: 31 of WO2015038958; herein SEQ ID NO: 1264), AVPFK (SEQ ID NO: 32 of WO2015038958; herein SEQ ID NO: 1265), VPFK (SEQ ID NO: 33 of WO2015038958; herein SEQ ID NO: 11266), TLAVPF (SEQ ID NO: 34 of WO2015038958; herein SEQ ID NO: 1267), TLAVP (SEQ ID NO: 35 of WO2015038958; herein SEQ ID NO: 1268), TLAV (SEQ ID NO: 36 of WO2015038958; herein SEQ ID NO: 1269), SVSKPFL (SEQ ID NO: 28 of WO2015038958; herein SEQ ID NO: 1270), FTLTTPK (SEQ ID NO: 29 of WO2015038953; herein SEQ ID NO: 1271), MNATKNV (SEQ ID NO: 30 of WO2015038958; herein SEQ ID NO: 1272), QSSQTPR(SEQ ID NO: 54 of WO2015038958; herein SEQ ID NO: 1273), ILGTGTS (SEQ ID NO: 55 of WO2015038958; herein SEQ ID NO: 1274), TRTNPEA (SEQ ID NO: 56 of WO2015038958; herein SEQ ID NO: 1275), NGGTSSS (SEQ ID NO: 58 of WO2015038958: herein SEQ ID NO: 1276), or YTLSQGW (SEQ ID NO: 60 of WO2015038958; herein SEQ ID NO: 1277). Non-limiting examples of nucleotide sequences that may encode the amino acid inserts include the following, AAGTTTCCTGTGGCGTTGACT (for SEQ ID NO: 3 of WO2015038958; herein SEQ ID NO: 1278), ACTTTGGCGGTGCCTTTTAAG (SEQ ID NO: 24 and 49 of WO2015038958; herein SEQ ID NO: 1279), AGTGTGAGTAAGCCTTTTTTG (SEQ ID NO: 25 of WO2015038958; herein SEQ ID NO: 1280), TTTACGTTGACGACGCCTAAG (SEQ ID NO: 26 of WO2015038958; herein SEQ ID NO: 1281), ATGAATGCTACGAAGAATGTG (SEQ ID NO: 27 of WO2015038958; herein SEQ ID NO: 1282), CAGTCGTCGCAGACGCCTAGG (SEQ ID NO: 48 of WO2015038958; herein SEQ ID NO: 1283), ATTCTGGGGACTGGTACTTCG (SEQ ID NO: 50 and 52 of WO2015038958; herein SEQ ID NO: 1284), ACGCGGACTAATCCTGAGGCT (SEQ ID NO: 51 of WO2015038958; herein SEQ ID NO: 1285), AATGGGGGGACTAGTAGTTCT (SEQ ID NO: 53 of WO2015038958; herein SEQ ID NO: 1286), or TATACTTTGTCGCAGGGTTGG (SEQ ID NO: 59 of WO2015038958; herein SEQ ID NO: 1287).

[0099] In some embodiments, the AAV serotype may be, or may have a sequence as described in International Patent Publication WO2017100671, the contents of which are herein incorporated by reference in their entirety, such as, but not limited to, AAV9 (SEQ ID NO: 45 of WO2017100671, herein SEQ ID NO: 11), PHP.N (SEQ ID NO: 46 of WO2017100671, herein SEQ ID NO: 4), PHP.S (SEQ ID NO: 47 of WO2017100671, herein SEQ ID NO: 10), or variants thereof. Further, any of the targeting peptides or amino acid inserts described in WO2017100671 may be inserted into any parent AAV serotype, such as, but not limited to, AAV9. In some embodiments, the amino acid insert is inserted between amino acids 586-592 of the parent AAV (e.g., AAV9). In another embodiment, the amino acid insert is inserted between amino acids 588-589 of the parent AAV sequence. The amino acid insert may be, but is not limited to, any of the following amino acid sequences, AQTLAVPFKAQ (SEQ ID NO: 1 of WO2017100671; herein SEQ ID NO: 1288), AQSVSKPFLAQ (SEQ ID NO: 2 of WO2017100671; herein SEQ ID NO: 1289), AQFTLTTPKAQ (SEQ ID NO: 3 in the sequence listing of WO2017100671; herein SEQ ID NO: 1290), DGTLAVPFKAQ (SEQ ID NO: 4 in the sequence listing of WO2017100671; herein SEQ ID NO: 1291), ESTLAVPFKAQ (SEQ ID NO: 5 of WO2017100671; herein SEQ ID NO: 1292), GGTLAVPFKAQ (SEQ ID NO: 6 of WO2017100671; herein SEQ ID NO: 1293), AQTLATPFKAQ (SEQ ID NO: 7 and 33 of WO2017100671; herein SEQ ID NO: 1294), ATTLATPFKAQ (SEQ ID NO: 8 of WO2017100671; herein SEQ ID NO: 1295), DGTLATPFKAQ (SEQ ID NO: 9 of WO2017100671; herein SEQ ID NO: 1296), GGTLATPFKAQ (SEQ ID NO: 10 of WO2017100671; herein SEQ ID NO: 1297), SGSLAVPFKAQ (SEQ ID NO: 11 of WO2017100671; herein SEQ ID NO: 1298), AQTLAQPFKAQ (SEQ ID NO: 12 of WO2017100671; herein SEQ ID NO: 1299), AQTLQQPFKAQ (SEQ ID NO: 13 of WO2017100671; herein SEQ ID NO: 1300), AQTLSNPFKAQ (SEQ ID NO: 14 of WO2017100671; herein SEQ ID NO: 1301), AQTLAVPFSNP (SEQ ID NO: 15 of WO2017100671; herein SEQ ID NO: 1302), QGTLAVPFKAQ (SEQ ID NO: 16 of WO2017100671; herein SEQ ID NO: 1303), NQTLAVPFKAQ (SEQ ID NO: 17 of WO2017100671; herein SEQ ID NO: 1304), EGSLAVPFKAQ (SEQ ID NO: 18 of WO2017100671; herein SEQ ID NO: 1305), SGNLAVPFKAQ (SEQ ID NO: 19 of WO2017100671; herein SEQ ID NO: 1306), EGTLAVPFKAQ (SEQ ID NO: 20 of WO2017100671; herein SEQ ID NO: 1307), DSTLAVPFKAQ (SEQ ID NO: 21 in Table 1 of WO2017100671; herein SEQ ID NO: 1308), AVTLAVPFKAQ (SEQ ID NO: 22 of WO2017100671; herein SEQ ID NO: 1309), AQTLSTPFKAQ (SEQ ID NO: 23 of WO2017100671; herein SEQ ID NO: 1310), AQTLPQPFKAQ (SEQ ID NO: 24 and 32 of WO2017100671; herein SEQ ID NO: 1311), AQTLSQPFKAQ (SEQ ID NO: 25 of WO2017100671; herein SEQ ID NO: 1312), AQTLQLPFKAQ (SEQ ID NO: 26 of WO2017100671; herein SEQ ID NO: 1313), AQTLTMPFKAQ (SEQ ID NO: 27, and 34 of WO2017100671 and SEQ ID NO: 35 in the sequence listing of WO2017100671; herein SEQ ID NO: 1314), AQTLTTPFKAQ (SEQ ID NO: 28 of WO2017100671; herein SEQ ID NO: 1315), AQYTLSQGWAQ (SEQ ID NO: 29 of WO2017100671; herein SEQ ID NO: 1316), AQMNATKNVAQ (SEQ ID NO: 30 of WO2017100671; herein SEQ ID NO: 1317), AQVSGGHHSAQ (SEQ ID NO: 31 of WO2017100671; herein SEQ ID NO: 1318), AQTLTAPFKAQ (SEQ ID NO: 35 in Table 1 of WO2017100671; herein SEQ ID NO: 1319), AQTLSKPFKAQ (SEQ ID NO: 36 of WO2017100671; herein SEQ ID NO: 1320), QAVRTSL (SEQ ID NO: 37 of WO2017100671; herein SEQ ID NO: 1321), YTLSQGW (SEQ ID NO: 38 of WO2017100671; herein SEQ ID NO: 1277), LAKERLS (SEQ ID NO: 39 of WO2017100671; herein SEQ ID NO: 1322), TLAVPFK (SEQ ID NO: 40 in the sequence listing of WO2017100671; herein SEQ ID NO: 1262), SVSKPFL (SEQ ID NO: 41 of WO2017100671; herein SEQ ID NO: 1270), FTLTTPK (SEQ ID NO: 42 of WO2017100671; herein SEQ ID NO: 1271), MNSTKNV (SEQ ID NO: 43 of WO2017100671; herein SEQ ID NO: 1323), VSGGHHS (SEQ ID NO: 44 of WO2017100671; herein SEQ ID NO: 1324), SAQTLAVPFKAQAQ (SEQ ID NO: 48 of WO2017100671; herein SEQ ID NO: 1325), SXXXLAVPFKAQAQ (SEQ ID NO: 49 of WO2017100671 wherein X may be any amino acid; herein SEQ ID NO: 1326), SAQXXXVPFKAQAQ (SEQ ID NO: 50 of WO2017100671 wherein X may be any amino acid; herein SEQ ID NO: 1327), SAQTLXXXFKAQAQ (SEQ ID NO: 51 of WO2017100671 wherein X may be any amino acid; herein SEQ ID NO: 1328), SAQTLAVXXXAQAQ (SEQ ID NO: 52 of WO2017100671 wherein X may be any amino acid; herein SEQ ID NO: 1329), SAQTLAVPFXXXAQ (SEQ ID NO: 53 of WO2017100671 wherein X may be any amino acid; herein SEQ ID NO: 1330), TNHQSAQ (SEQ ID NO: 65 of WO2017100671; herein SEQ ID NO: 1331), AQAQTGW (SEQ ID NO: 66 of WO2017100671; herein SEQ ID NO: 1332), DGTLATPFK (SEQ ID NO: 67 of WO2017100671; herein SEQ ID NO: 1333), DGTLATPFKXX (SEQ ID NO: 68 of WO2017100671 wherein X may be any amino acid; herein SEQ ID NO: 1334), LAVPFKAQ (SEQ ID NO: 80 of WO2017100671; herein SEQ ID NO: 1335), VPFKAQ (SEQ ID NO: 81 of WO2017100671; herein SEQ ID NO: 1336), FKAQ (SEQ ID NO: 82 of WO2017100671; herein SEQ ID NO: 1337), AQTLAV (SEQ ID NO: 83 of WO2017100671; herein SEQ ID NO: 1338), AQTLAVPF (SEQ ID NO: 84 of WO2017100671; herein SEQ ID NO: 1339), QAVR (SEQ ID NO: 85 of WO2017100671; herein SEQ ID NO: 1340), AVRT (SEQ ID NO: 86 of WO2017100671; herein SEQ ID NO: 1341), VRTS (SEQ ID NO: 87 of WO2017100671; herein SEQ ID NO: 1342), RTSL (SEQ ID NO: 88 of WO2017100671; herein SEQ ID NO: 1343), QAVRT (SEQ ID NO: 89 of WO2017100671; herein SEQ ID NO: 1344), AVRTS (SEQ ID NO: 90 of WO2017100671; herein SEQ ID NO: 1345), VRTSL (SEQ ID NO: 91 of WO2017100671; herein SEQ ID NO: 1346), QAVRTS (SEQ ID NO: 92 of WO2017100671; herein SEQ ID NO: 1347), or AVRTSL (SEQ ID NO: 93 of WO2017100671; herein SEQ ID NO: 1348).

[0100] Non-limiting examples of nucleotide sequences that may encode the amino acid inserts include the following, GATGGGACTTTGGCGGTGCCTTTTAAGGCACAG (SEQ ID NO: 54 of WO2017100671; herein SEQ ID NO: 1349), GATGGGACGTTGGCGGTGCCTTTTAAGGCACAG (SEQ ID NO: 55 of WO2017100671; herein SEQ ID NO: 1350), CAGGCGGTTAGGACGTCTTTG (SEQ ID NO: 56 of WO2017100671; herein SEQ ID NO: 1351), CAGGTCTTCACGGACTCAGACTATCAG (SEQ ID NO: 57 and 78 of WO2017100671; herein SEQ ID NO:1352), CAAGTAAAACCTCTACAAATGTGGTAAAATCG (SEQ ID NO: 58 of WO2017100671; herein SEQ ID NO: 1353), ACTCATCGACCAATACTTGTACTATCTCTCTAGAAC (SEQ ID NO: 59 of WO2017100671; herein SEQ ID NO: 1354), GGAAGTATTCCTTGGTTTTGAACCCA (SEQ ID NO: 60 of WO2017100671; herein SEQ ID NO: 1355), GGTCGCGGTTCTTGTTTGTGGAT (SEQ ID NO: 61 of WO2017100671; herein SEQ ID NO: 1356), CGACCTTGAAGCGCATGAACTCCT (SEQ ID NO: 62 of WO2017100671; herein SEQ ID NO: 1357), GTATTCCTTGGTTTTGACCCACCGGTCTGCGCCTGTGCNNMNNMNNMNNMNNNNMNNTTGGGCACTCTGGTGGTTTGTC (SEQ ID NO: 63 of WO2017100671 wherein N may be A, C, T, or G; herein SEQ ID NO: 1358), GTATTCCTTGGTTTTGAACCCAACCGGTCTGCGCMNNMNNMNNAAGGCACCGCCAAAGTTTG (SEQ ID NO: 69 of WO2017100671 wherein N may be A, C, T, or G; herein SEQ ID NO: 1359), GTATTCCTTGGTTTTGAACCCAACCGGTCTGCGCCTGTGCMNNMNNMNNCACCGCCAAAGTTTGGGCACT (SEQ ID NO: 70 of WO2017100671 wherein N may be A, C, T, or G; herein SEQ ID NO: 1360), GTATTCCTTGGTTTTGAACCCAACCGGTCTGCGCCTGTGCCTTAAAMNNMNNMNNCAGTTTGGGCACTCTGGTGG (SEQ ID NO: 71 of WO2017100671 wherein N may be A, C, T, or G; herein SEQ ID NO: 1361), GTATTCCTTGGTTTTGAACCCAACCGGTCTGCGCCTGTGCCTTAAAAGGCACMNNMNNMNNTTGGGCACTCTGGTGGTTTGTG (SEQ ID NO: 72 of WO2017100671 wherein N may be A, C, T, or G; herein SEQ ID NO: 1362), ACTTTGGCGGTGCCTTTTAAG (SEQ ID NO: 74 of WO2017100671; herein SEQ ID NO: 1279), AGTGTGAGTAAGCCTTTTTTG (SEQ ID NO: 75 of WO2017100671; herein SEQ ID NO: 1280), TTTACGTTGACGACGCCTAAG (SEQ ID NO: 76 of WO2017100671; herein SEQ ID NO: 1281), TATACTTTGTCGCAGGGTTGG (SEQ ID NO: 77 of WO2017100671; herein SEQ ID NO: 1287), or CTTGCGAAGGAGCGGCTTTCG (SEQ ID NO: 79 of WO2017100671; herein SEQ ID NO: 1363).

[0101] In some embodiments, the AAV serotype may be, or may have a sequence as described in U.S. Pat. No. 9,624,274, the contents of which are herein incorporated by reference in their entirety, such as, but not limited to, AAV1 (SEQ ID NO: 181 of U.S. Pat. No. 9,624,274), AAV6 (SEQ ID NO: 182 of U.S. Pat. No. 9,624,274), AAV2 (SEQ ID NO: 183 of U.S. Pat. No. 9,624,274), AAV3b (SEQ ID NO: 184 of U.S. Pat. No. 9,624,274), AAV7 (SEQ ID NO: 185 of U.S. Pat. No. 9,624,274), AAV8 (SEQ ID NO: 186 of U.S. Pat. No. 9,624,274), AAV10 (SEQ ID NO: 187 of U.S. Pat. No. 9,624,274), AAV4 (SEQ ID NO: 188 of U.S. Pat. No. 9,624,274), AAV11 (SEQ ID NO: 189 of U.S. Pat. No. 9,624,274), bAAV (SEQ ID NO: 190 of U.S. Pat. No. 9,624,274), AAV5 (SEQ ID NO: 191 of U.S. Pat. No. 9,624,274), GPV (SEQ ID NO: 192 of U.S. Pat. No. 9,624,274; herein SEQ ID NO: 879), B19 (SEQ ID NO: 193 of U.S. Pat. No. 9,624,274; herein SEQ ID NO: 880), MVM (SEQ ID NO: 194 of U.S. Pat. No. 9,624,274; herein SEQ ID NO: 881), FPV (SEQ ID NO: 195 of U.S. Pat. No. 9,624,274; herein SEQ ID NO: 882), CPV (SEQ ID NO: 196 of U.S. Pat. No. 9,624,274; herein SEQ ID NO: 883) or variants thereof. Further, any of the structural protein inserts described in U.S. Pat. No. 9,624,274, may be inserted into, but not limited to, I-453 and I-587 of any parent AAV serotype, such as, but not limited to, AAV2 (SEQ ID NO: 183 of U.S. Pat. No. 9,624,274). The amino acid insert may be, but is not limited to, any of the following amino acid sequences, VNLTWSRASG (SEQ ID NO: 50 of U.S. Pat. No. 9,624,274; herein SEQ ID NO: 1364), EFCINHRGYWVCGD (SEQ ID NO:55 of U.S. Pat. No. 9,624,274; herein SEQ ID NO: 1365), EDGQVMDVDLS (SEQ ID NO: 85 of U.S. Pat. No. 9,624,274; herein SEQ ID NO: 1366), EKQRNGTLT (SEQ ID NO: 86 of U.S. Pat. No. 9,624,274; herein SEQ ID NO: 1367), TYQCRVTHPHLPRALMR (SEQ ID NO: 87 of U.S. Pat. No. 9,624,274; herein SEQ ID NO: 1368), RHSTTQPRKTKGSG (SEQ ID NO: 88 of U.S. Pat. No. 9,624,274; herein SEQ ID NO: 1369), DSNPRGVSAYLSR (SEQ ID NO: 89 of U.S. Pat. No. 9,624,274; herein SEQ ID NO: 1370), TITCLWDLAPSK (SEQ ID NO: 90 of U.S. Pat. No. 9,624,274; herein SEQ ID NO: 1371), KTKGSGFFVF (SEQ ID NO: 91 of U.S. Pat. No. 9,624,274; herein SEQ ID NO: 1372), THPHLPRALMRS (SEQ ID NO: 92 of U.S. Pat. No. 9,624,274; herein SEQ ID NO: 1373), GETYQCRVTHPHLPRALMRSTTK (SEQ ID NO: 93 of U.S. Pat. No. 9,624,274; herein SEQ ID NO: 1374), LPRALMRS (SEQ ID NO: 94 of U.S. Pat. No. 9,624,274; herein SEQ ID NO: 1375), INHRGYWV (SEQ ID NO: 95 of U.S. Pat. No. 9,624,274; herein SEQ ID NO: 1376), CDAGSVRTNAPD (SEQ ID NO: 60 of U.S. Pat. No. 9,624,274; herein SEQ ID NO: 1377), AKAVSNLTESRSESLQS (SEQ ID NO: 96 of U.S. Pat. No. 9,624,274; herein SEQ ID NO: 1378), SLTGDEFKKVLET (SEQ ID NO: 97 of U.S. Pat. No. 9,624,274; herein SEQ ID NO: 1379), REAVAYRFEED (SEQ ID NO: 98 of U.S. Pat. No. 9,624,274; herein SEQ ID NO: 1380), INPEIITLDG (SEQ ID NO: 99 of U.S. Pat. No. 9,624,274; herein SEQ ID NO: 1381), DISVTGAPVITATYL (SEQ ID NO: 100 of U.S. Pat. No. 9,624,274: herein SEQ ID NO: 1382), DISVTGAPVITA (SEQ ID NO: 101 of U.S. Pat. No. 9,624,274; herein SEQ ID NO: 1383), PKTVSNLTESSSESVQS (SEQ ID NO: 102 of U.S. Pat. No. 9,624,274; herein SEQ ID NO: 1384), SLMGDEFKAVLET (SEQ ID NO: 103 of U.S. Pat. No. 9,624,274; herein SEQ ID NO: 1385), QHSVAYTFEED (SEQ ID NO: 104 of U.S. Pat. No. 9,624,274; herein SEQ ID NO: 1386), INPEIITRDG (SEQ ID NO: 105 of U.S. Pat. No. 9,624,274; herein SEQ ID NO: 1387), DISLTGDPVITASYL (SEQ ID NO: 106 of U.S. Pat. No. 9,624,274; herein SEQ ID NO: 1388), DISLTGDPVITA (SEQ ID NO: 107 of U.S. Pat. No. 9,624,274; herein SEQ ID NO: 1389), DQSIDFEIDSA (SEQ ID NO: 108 of U.S. Pat. No. 9,624,274; herein SEQ ID NO: 1390), KNVSEDLPLPTFSPTLLGDS (SEQ ID NO: 109 of U.S. Pat. No. 9,624,274; herein SEQ ID NO: 1391), KNVSEDLPLPT (SEQ ID NO: 110 of U.S. Pat. No. 9,624,274; herein SEQ ID NO: 1392), CDSGRVRTDAPD (SEQ ID NO: 111 of U.S. Pat. No. 9,624,274; herein SEQ ID NO: 1393), FPEHLLVDFLQSLS (SEQ ID NO: 112 of U.S. Pat. No. 9,624,274; herein SEQ ID NO: 1394), DAEFRHDSG (SEQ ID NO: 65 of U.S. Pat. No. 9,624,274; herein SEQ ID NO: 1395), HYAAAQWDFGNTMCQL (SEQ ID NO: 113 of U.S. Pat. No. 9,624,274; herein SEQ ID NO: 1396), YAAQWDFGNTMCQ (SEQ ID NO: 114 of U.S. Pat. No. 9,624,274; herein SEQ ID NO: 1397), RSQKEGLHYT (SEQ ID NO: 115 of U.S. Pat. No. 9,624,274; herein SEQ ID NO: 1398), SSRTPSDKPVAHWANPQAE (SEQ ID NO: 116 of U.S. Pat. No. 9,624,274; herein SEQ ID NO: 1399), SRTPSDKPVAMWANP (SEQ ID NO: 117 of U.S. Pat. No. 9,624,274; herein SEQ ID NO: 1400), SSRTPSDKP (SEQ ID NO: 118 of U.S. Pat. No. 9,624,274; herein SEQ ID NO: 1401), NADGNVDYHMNSVP (SEQ ID NO: 119 of U.S. Pat. No. 9,624,274; herein SEQ ID NO: 1402), DGNVDYHMNSV (SEQ ID NO: 120 of U.S. Pat. No. 9,624,274; herein SEQ ID NO: 1403), RSFKEFLQSSLRALRQ (SEQ ID NO: 121 of U.S. Pat. No. 9,624,274; herein SEQ ID NO: 1404); FKEFLQSSLRA (SEQ ID NO: 122 of U.S. Pat. No. 9,624,274; herein SEQ ID NO: 1405), or QMWAPQWGPD (SEQ ID NO: 123 of U.S. Pat. No. 9,624,274; herein SEQ ID NO: 1406).

[0102] In some embodiments, the AAV serotype may be, or may have a sequence as described in U.S. Pat. No. 9,475,845, the contents of which are herein incorporated by reference in their entirety, such as, but not limited to, AAV capsid proteins comprising modification of one or more amino acids at amino acid positions 585 to 590 of the native AAV2 capsid protein. Further the modification may result in, but not be limited to, the amino acid sequence RGNRQA (SEQ ID NO: 3 of U.S. Pat. No. 9,475,845; herein SEQ ID NO: 1407), SSSTDP (SEQ ID NO: 4 of U.S. Pat. No. 9,475,845; herein SEQ ID NO: 1408), SSNTAP (SEQ ID NO: 5 of U.S. Pat. No. 9,475,845; herein SEQ ID NO: 1409), SNSNLP (SEQ ID NO: 6 of U.S. Pat. No. 9,475,845; herein SEQ ID NO: 1410), SSTTAP (SEQ ID NO: 7 of U.S. Pat. No. 9,475,845; herein SEQ ID NO: 1411), AANTAA (SEQ ID NO: 8 of U.S. Pat. No. 9,475,845; herein SEQ ID NO: 1412), QQNTAP (SEQ ID NO: 9 of U.S. Pat. No. 9,475,845; herein SEQ ID NO: 1413), SAQAQA (SEQ ID NO: 10 of U.S. Pat. No. 9,475,845; herein SEQ ID NO: 1414), QANTGP (SEQ ID NO: 11 of U.S. Pat. No. 9,475,845; herein SEQ ID NO: 1415), NATTAP (SEQ ID NO: 12 of U.S. Pat. No. 9,475,845; herein SEQ ID NO: 1416), SSTAGP (SEQ ID NO: 13 and 20 of U.S. Pat. No. 9,475,845; herein SEQ ID NO: 1417), QQNTAA (SEQ ID NO: 14 of U.S. Pat. No. 9,475,845; herein SEQ ID NO: 1418), PSTAGP (SEQ ID NO: 15 of U.S. Pat. No. 9,475,845; herein SEQ ID NO: 1419), NQNTAP (SEQ ID NO: 16 of U.S. Pat. No. 9,475,845; herein SEQ ID NO: 1420), QAANAP (SEQ ID NO: 17 of U.S. Pat. No. 9,475,845; herein SEQ ID NO: 1421), SIVGLP (SEQ ID NO: 18 of U.S. Pat. No. 9,475,845; herein SEQ ID NO: 1422), AASTAA (SEQ ID NO: 19, and 27 of U.S. Pat. No. 9,475,845; herein SEQ ID NO: 1423), SQNTTA (SEQ ID NO: 21 of U.S. Pat. No. 9,475,845; herein SEQ ID NO: 1424), QQDTAP (SEQ ID NO: 22 of U.S. Pat. No. 9,475,845; herein SEQ ID NO: 1425), QTNTGP (SEQ ID NO: 23 of U.S. Pat. No. 9,475,845; herein SEQ ID NO: 1426), QTNGAP (SEQ ID NO: 24 of U.S. Pat. No. 9,475,845; herein SEQ ID NO: 1427), QQNAAP (SEQ ID NO: 25 of U.S. Pat. No. 9,475,845; herein SEQ ID NO: 1428), or AANTQA (SEQ ID NO: 26 of U.S. Pat. No. 9,475,845; herein SEQ ID NO: 1429). In some embodiments, the amino acid modification is a substitution at amino acid positions 262 through 265 in the native AAV2 capsid protein or the corresponding position in the capsid protein of another AAV with a targeting sequence. The targeting sequence may be, but is not limited to, any of the amino acid sequences, NGRAHA (SEQ ID NO: 38 of U.S. Pat. No. 9,475,845; herein SEQ ID NO: 1430), QPEHSST (SEQ ID NO: 39 and 50 of U.S. Pat. No. 9,475,845; herein SEQ ID NO: 1431), VNTANST (SEQ ID NO: 40 of U.S. Pat. No. 9,475,845; herein SEQ ID NO: 1432), HGPMQKS (SEQ ID NO: 41 of U.S. Pat. No. 9,475,845; herein SEQ ID NO: 1433), PHKPPLA (SEQ ID NO: 42 of U.S. Pat. No. 9,475,845; herein SEQ ID NO: 1434), IKNNEMW (SEQ ID NO: 43 of U.S. Pat. No. 9,475,845; herein SEQ ID NO: 1435), RNLDTPM (SEQ ID NO: 44 of U.S. Pat. No. 9,475,845; herein SEQ ID NO: 1436), VDSHRQS (SEQ ID NO: 45 of U.S. Pat. No. 9,475,845; herein SEQ ID NO: 1437), YDSKTKT (SEQ ID NO: 46 of U.S. Pat. No. 9,475,845; herein SEQ ID NO: 1438), SQLPHQK (SEQ ID NO: 47 of U.S. Pat. No. 9,475,845; herein SEQ ID NO: 1439), STMQQNT (SEQ ID NO: 48 of U.S. Pat. No. 9,475,845; herein SEQ ID NO: 1440), TERYMTQ (SEQ ID NO: 49 of U.S. Pat. No. 9,475,845; herein SEQ ID NO: 1441), DASLSTS (SEQ ID NO: 51 of U.S. Pat. No. 9,475,845; herein SEQ ID NO: 1442), DLPNKKT (SEQ ID NO: 52 of U.S. Pat. No. 9,475,845; herein SEQ ID NO: 1443), DLTAARL (SEQ ID NO: 53 of U.S. Pat. No. 9,475,845; herein SEQ ID NO: 1444), EPHQFNY (SEQ ID NO: 54 of U.S. Pat. No. 9,475,845; herein SEQ ID NO: 1445), EPQSNHT (SEQ ID NO: 55 of U.S. Pat. No. 9,475,845; herein SEQ ID NO: 1446), MSSWPSQ (SEQ ID NO: 56 of U.S. Pat. No. 9,475,845; herein SEQ ID NO: 1447), NPKHNAT (SEQ ID NO: 57 of U.S. Pat. No. 9,475,845; herein SEQ ID NO: 1448), PDGMRTT (SEQ ID NO: 58 of U.S. Pat. No. 9,475,845; herein SEQ ID NO: 1449), PNNNKTT (SEQ ID NO: 59 of U.S. Pat. No. 9,475,845; herein SEQ ID NO: 1450), QSTTHDS (SEQ ID NO: 60 of U.S. Pat. No. 9,475,845; herein SEQ ID NO: 1451), TGSKQKQ (SEQ ID NO: 61 of U.S. Pat. No. 9,475,845; herein SEQ ID NO: 1452), SLKHQAL (SEQ ID NO: 62 of U.S. Pat. No. 9,475,845; herein SEQ ID NO: 1453), SPIDGEQ (SEQ ID NO: 63 of U.S. Pat. No. 9,475,845; herein SEQ ID NO: 1454), WIFPWIQL (SEQ ID NO: 64 and 112 of U.S. Pat. No. 9,475,845; herein SEQ ID NO: 1455), CDCRGDCFC (SEQ ID NO: 65 of U.S. Pat. No. 9,475,845; herein SEQ ID NO: 1456), CNGRC (SEQ ID NO: 66 of U.S. Pat. No. 9,475,845; herein SEQ ID NO: 1457), CPRECES (SEQ ID NO: 67 of U.S. Pat. No. 9,475,845; herein SEQ ID NO: 1458), CTTHWGFTLC (SEQ ID NO: 68 and 123 of U.S. Pat. No. 9,475,845; herein SEQ ID NO: 1459), CGRRAGGSC (SEQ ID NO: 69 of U.S. Pat. No. 9,475,845; herein SEQ ID NO: 1460), CKGGRAKDC (SEQ ID NO: 70 of U.S. Pat. No. 9,475,845; herein SEQ ID NO: 1461), CVPELGHEC (SEQ ID NO: 71 and 115 of U.S. Pat. No. 9,475,845; herein SEQ ID NO: 1462), CRRETAWAK (SEQ ID NO: 72 of U.S. Pat. No. 9,475,845; herein SEQ ID NO: 1463), VSWFSHRYSPFAVS (SEQ ID NO: 73 of U.S. Pat. No. 9,475,845; herein SEQ ID NO: 1464), GYRDGYAGPILYN (SEQ ID NO: 74 of U.S. Pat. No. 9,475,845; herein SEQ ID NO: 1465), XXXYXXX (SEQ ID NO: 75 of U.S. Pat. No. 9,475,845; herein SEQ ID NO: 1466), YXNW (SEQ ID NO: 76 of U.S. Pat. No. 9,475,845; herein SEQ ID NO: 1467), RPLPPLP (SEQ ID NO: 77 of U.S. Pat. No. 9,475,845; herein SEQ ID NO: 1468), APPLPPR (SEQ ID NO: 78 of U.S. Pat. No. 9,475,845; herein SEQ ID NO: 1469), DVFYPYPYASGS (SEQ ID NO: 79 of U.S. Pat. No. 9,475,845; herein SEQ ID NO: 1470), MYWYPY (SEQ ID NO: 80 of U.S. Pat. No. 9,475,845; herein SEQ ID NO: 1471), DITWDQLWDLMK (SEQ ID NO: 81 of U.S. Pat. No. 9,475,845; herein SEQ ID NO: 1472), CWDDXWLC (SEQ ID NO: 82 of U.S. Pat. No. 9,475,845; herein SEQ ID NO: 1473), EWCEYLGGYLRCYA (SEQ ID NO: 83 of U.S. Pat. No. 9,475,845; herein SEQ ID NO: 1474), YXCXXGPXTWXCXP (SEQ ID NO: 84 of U.S. Pat. No. 9,475,845; herein SEQ ID NO: 1475), IEGPTLRQWLAARA (SEQ ID NO: 85 of U.S. Pat. No. 9,475,845; herein SEQ ID NO: 1476), LWXXX (SEQ ID NO: 86 of U.S. Pat. No. 9,475,845; herein SEQ ID NO: 1477), XFXXYLW (SEQ ID NO: 87 of U89475845; herein SEQ ID NO: 1478), SSIISHFRWGLCD (SEQ ID NO: 88 of U.S. Pat. No. 9,475,845; herein SEQ ID NO: 1479), MSRPACPPNDKYE (SEQ ID NO: 89 of U.S. Pat. No. 9,475,845; herein SEQ ID NO: 1480), CLRSGRGC (SEQ ID NO: 90 of U.S. Pat. No. 9,475,845; herein SEQ ID NO: 1481), CHWMFSPWC (SEQ ID NO: 91 of U.S. Pat. No. 9,475,845; herein SEQ ID NO: 1482), WXXF (SEQ ID NO: 92 of U.S. Pat. No. 9,475,845; herein SEQ ID NO: 1483), CSSRLDAC (SEQ ID NO: 93 of U.S. Pat. No. 9,475,845; herein SEQ ID NO: 1484), CLPVASC (SEQ ID NO: 94 of U.S. Pat. No. 9,475,845; herein SEQ ID NO: 1485), CGFECVRQCPERC (SEQ ID NO: 95 of U.S. Pat. No. 9,475,845; herein SEQ ID NO: 1486), CVALCREACGEGC (SEQ ID NO: 96 of U.S. Pat. No. 9,475,845; herein SEQ ID NO: 1487), SWCEPGWCR (SEQ ID NO: 97 of U.S. Pat. No. 9,475,845; herein SEQ ID NO: 1488), YSGKWGW (SEQ ID NO: 98 of U.S. Pat. No. 9,475,845; herein SEQ ID NO: 1489), GLSGGRS (SEQ ID NO: 99 of U.S. Pat. No. 9,475,845; herein SEQ ID NO: 1490), LMLPRAD (SEQ ID NO: 100 of U.S. Pat. No. 9,475,845; herein SEQ ID NO: 1491), CSCFRDVCC (SEQ ID NO: 101 of U.S. Pat. No. 9,475,845; herein SEQ ID NO: 1492), CRDVVSVIC (SEQ ID NO: 102 of U.S. Pat. No. 9,475,845; herein SEQ ID NO: 1493), MARSGL (SEQ ID NO: 103 of U.S. Pat. No. 9,475,845; herein SEQ ID NO: 1494), MARAKE (SEQ ID NO: 104 of U.S. Pat. No. 9,475,845; herein SEQ ID NO: 1495), MSRTMS (SEQ ID NO: 105 of U.S. Pat. No. 9,475,845; herein SEQ ID NO: 1496, KCCYSL (SEQ ID NO: 106 of U.S. Pat. No. 9,475,845; herein SEQ ID NO: 1497), MYWGDSHWLQYWYE (SEQ ID NO: 107 of U.S. Pat. No. 9,475,845; herein SEQ ID NO: 1498), MQLPLAT (SEQ ID NO: 108 of U.S. Pat. No. 9,475,845; herein SEQ ID NO: 1499), EWLS (SEQ ID NO: 109 of U.S. Pat. No. 9,475,845; herein SEQ ID NO: 1500), SNEW (SEQ ID NO: 110 of U.S. Pat. No. 9,475,845; herein SEQ ID NO: 1501), TNYL (SEQ ID NO: 111 of U.S. Pat. No. 9,475,845; herein SEQ ID NO: 1502), WDLAWMFRLPVG (SEQ ID NO: 113 of U.S. Pat. No. 9,475,845; herein SEQ ID NO: 1503), CTVALPGGYVRVC (SEQ ID NO: 114 of U.S. Pat. No. 9,475,845; herein SEQ ID NO: 1504), CVAYCIEHHCWTC (SEQ ID NO: 116 of U.S. Pat. No. 9,475,845; herein SEQ ID NO: 1505), CVFAHNYDYLVC (SEQ ID NO: 117 of U.S. Pat. No. 9,475,845; herein SEQ ID NO: 1506), CVFTSNYAFC (SEQ ID NO: 118 of U.S. Pat. No. 9,475,845; herein SEQ ID NO: 1507), VHSPNKK (SEQ ID NO: 119 of U.S. Pat. No. 9,475,845; herein SEQ ID NO: 1508), CRGDGWC (SEQ ID NO: 120 of U.S. Pat. No. 9,475,845; herein SEQ ID NO: 1509), XRGCDX (SEQ ID NO: 121 of U.S. Pat. No. 9,475,845; herein SEQ ID NO: 1510), PXXX (SEQ ID NO: 122 of U.S. Pat. No. 9,475,845; herein SEQ ID NO: 1511), SGKGPRQITAL (SEQ ID NO: 124 of U.S. Pat. No. 9,475,845; herein SEQ ID NO: 1512), AAAAAAAAAXXXXX (SEQ ID NO: 125 of U.S. Pat. No. 9,475,845; herein SEQ ID NO: 1513), VYMSPF (SEQ ID NO: 126 of U.S. Pat. No. 9,475,845; herein SEQ ID NO: 1514), ATWLPPR (SEQ ID NO: 127 of U.S. Pat. No. 9,475,845; herein SEQ ID NO: 1515), HTMYYHHYQHHL (SEQ ID NO: 128 of U.S. Pat. No. 9,475,845; herein SEQ ID NO: 1516), SEVGCRAGPLQWLCEKYFG (SEQ ID NO: 129 of U.S. Pat. No. 9,475,845; herein SEQ ID NO: 1517), CGLLPVGRPDRNVWRWLC (SEQ ID NO: 130 of U.S. Pat. No. 9,475,845; herein SEQ ID NO: 1518), CKGQCDRFKGLPWEC (SEQ ID NO: 131 of U.S. Pat. No. 9,475,845; herein SEQ ID NO: 1519), SGRSA (SEQ ID NO: 132 of U.S. Pat. No. 9,475,845; herein SEQ ID NO: 1520), WGFP (SEQ ID NO: 133 of U.S. Pat. No. 9,475,845; herein SEQ ID NO: 1521), AEPMPHSLNFSQYLWYT (SEQ ID NO: 134 of U.S. Pat. No. 9,475,845; herein SEQ ID NO: 1522), WAYXSP (SEQ ID NO: 135 of U.S. Pat. No. 9,475,845; herein SEQ ID NO: 1523), IELLQAR (SEQ ID NO: 136 of U.S. Pat. No. 9,475,845; herein SEQ ID NO: 1524), AYTKCSRQWRTCMTTH (SEQ ID NO: 137 of U.S. Pat. No. 9,475,845; herein SEQ ID NO: 1525), PQNSKIPGPTFLDPH (SEQ ID NO: 138 of U.S. Pat. No. 9,475,845; herein SEQ ID NO: 1526), SMEPALPDWWWKMFK (SEQ ID NO: 139 of U.S. Pat. No. 9,475,845; herein SEQ ID NO: 1527), ANTPCGPYTHDCPVKR (SEQ ID NO: 140 of U.S. Pat. No. 9,475,845; herein SEQ ID NO: 1528), TACHQHVRMVRP (SEQ ID NO: 141 of U.S. Pat. No. 9,475,845; herein SEQ ID NO: 1529), VPWMEPAYQRFL (SEQ ID NO: 142 of U.S. Pat. No. 9,475,845; herein SEQ ID NO: 1530), DPRATPGS (SEQ ID NO: 143 of U.S. Pat. No. 9,475,845; herein SEQ ID NO: 1531), FRPNRAQDYNTN (SEQ ID NO: 144 of U.S. Pat. No. 9,475,845; herein SEQ ID NO: 1532), CTKNSYLMC (SEQ ID NO: 145 of U.S. Pat. No. 9,475,845; herein SEQ ID NO: 1533), CXXTXXXGXGC (SEQ ID NO: 146 of U.S. Pat. No. 9,475,845; herein SEQ ID NO: 1534), CPIEDRPMC (SEQ ID NO: 147 of U.S. Pat. No. 9,475,845; herein SEQ ID NO: 1535), HEWSYLAPYPWF (SEQ ID NO: 148 of U.S. Pat. No. 9,475,845; herein SEQ ID NO: 1536), MCPKHPLGC (SEQ ID NO: 149 of U.S. Pat. No. 9,475,845; herein SEQ ID NO: 1537), RMWPSSTVNLSAGRR (SEQ ID NO: 150 of U.S. Pat. No. 9,475,845; herein SEQ ID NO: 1538), SAKTAVSQRVWLPSHRGGEP (SEQ ID NO: 151 of U.S. Pat. No. 9,475,845; herein SEQ ID NO: 1539), KSREHVNNSACPSKRITAAL (SEQ ID NO: 152 of U.S. Pat. No. 9,475,845; herein SEQ ID NO: 1540), EGFR (SEQ ID NO: 153 of U.S. Pat. No. 9,475,845; herein SEQ ID NO: 1541), AGLGVR (SEQ ID NO: 154 of U.S. Pat. No. 9,475,845; herein SEQ ID NO: 1542), GTRQGHTMRLGVSDG (SEQ ID NO: 155 of U.S. Pat. No. 9,475,845; herein SEQ ID NO: 1543), IAGLATPGWSHWLAL (SEQ ID NO: 156 of U.S. Pat. No. 9,475,845; herein SEQ ID NO: 1544), SMSIARL (SEQ ID NO: 157 of U.S. Pat. No. 9,475,845; herein SEQ ID NO: 1545), HTFEPGV (SEQ ID NO: 158 of U.S. Pat. No. 9,475,845; herein SEQ ID NO: 1546), NTSLKRISNKRIRRK (SEQ ID NO: 159 of U.S. Pat. No. 9,475,845; herein SEQ ID NO: 1547), LRIKRKRRKRKKTRK (SEQ ID NO: 160 of U.S. Pat. No. 9,475,845; herein SEQ ID NO: 1548), GGG, GFS, LWS, EGG, LLV, LSP, LBS, AGG, GRR, GGH and GTV.

[0103] In some embodiments, the AAV serotype may be, or may have a sequence as described in United States Publication No. US 20160369298, the contents of which are herein incorporated by reference in their entirety, such as, but not limited to, site-specific mutated capsid protein of AAV2 (SEQ ID NO: 97 of US 20160369298; herein SEQ ID NO: 1549) or variants thereof, wherein the specific site is at least one site selected from sites R447, G453, S578, N587, N587+1, S662 of VP1 or fragment thereof.

[0104] Further, any of the mutated sequences described in US 20160369298, may be or may have, but not limited to, any of the following sequences SDSGASN (SEQ ID NO: 1 and SEQ ID NO: 231 of US20160369298; herein SEQ ID NO: 1550), SPSGASN (SEQ ID NO: 2 of US20160369298; herein SEQ ID NO: 1551), SHSGASN (SEQ ID NO: 3 of US20160369298; herein SEQ ID NO: 1552), SRSGASN (SEQ ID NO: 4 of US20160369298; herein SEQ ID NO: 1553), SKSGASN (SEQ ID NO: 5 of US20160369298; herein SEQ ID NO: 1554), SNSGASN (SEQ ID NO: 6 of US20160369298; herein SEQ ID NO: 1555), SGSGASN (SEQ ID NO: 7 of US20160369298; herein SEQ ID NO: 1556), SASGASN (SEQ ID NO: 8, 175, and 221 of US20160369298; herein SEQ ID NO: 1557), SESGTSN (SEQ ID NO: 9 of US20160369298; herein SEQ ID NO: 1558), STTGGSN (SEQ ID NO: 10 of US20160369298; herein SEQ ID NO: 1559), SSAGSTN (SEQ ID NO: 11 of US20160369298; herein SEQ ID NO: 1560), NNDSQA (SEQ ID NO: 12 of US20160369298; herein SEQ ID NO: 1561), NNRNQA (SEQ ID NO: 13 of US20160369298; herein SEQ ID NO: 1562), NNNKQA (SEQ ID NO: 14 of US20160369298; herein SEQ ID NO: 1563), NAKRQA (SEQ ID NO: 15 of US20160369298; herein SEQ ID NO: 1564), NDEHQA (SEQ ID NO: 16 of US20160369298; herein SEQ ID NO: 1565), NTSQKA (SEQ ID NO: 17 of US20160369298; herein SEQ ID NO: 1566), YYLSRTNTPSGTDTQSRLVFSQAGA (SEQ ID NO: 18 of US20160369298; herein SEQ ID NO: 1567), YYLSRTNTDSGTETQSGLDFSQAGA (SEQ ID NO:19 of US20160369298; herein SEQ ID NO:1568), YYLSRTNTESGTPTQSALEFSQAGA (SEQ ID NO: 20 of US20160369298; herein SEQ ID NO: 1569), YYLSRTNTHSGTHTQSPLHFSQAGA (SEQ ID NO: 21 of US20160369298; herein SEQ ID NO: 1570), YYLSRTNTSSGTITISHLIFSQAGA (SEQ ID NO: 22 of US20160369298; herein SEQ ID NO: 1571), YYLSRTNTRSGIMTKSSLMFSQAGA (SEQ ID NO: 23 of US20160369298; herein SEQ ID NO: 1572), YYLSRTNTKSGRKTLSNLSFSQAGA (SEQ ID NO: 24 of US20160369298; herein SEQ ID NO: 1573), YYLSRTNDGSGPVTPSKLRFSQRGA (SEQ ID NO: 25 of US20160369298; herein SEQ ID NO: 1574), YYLSRTNAASGHATHSDLKFSQPGA (SEQ ID NO: 26 of US20160369298; herein SEQ ID NO: 1575), YYLSRTNGQAGSLTMSELGFSQVGA (SEQ ID NO: 27 of US20160369298; herein SEQ ID NO: 1576), YYLSRTNSTGGNQTTSQLLFSQLSA (SEQ ID NO: 28 of US20160369298; herein SEQ ID NO: 1577), YFLSRTNNNTGLNTNSTLNFSQGRA (SEQ ID NO: 29 of US20160369298; herein SEQ ID NO: 1578), SKTGADNNNSEYSWTG (SEQ ID NO: 30 of US20160369298; herein SEQ ID NO: 1579), SKTDADNNNSEYSWTG (SEQ ID NO: 31 of US20160369298; herein SEQ ID NO: 1580), SKTEADNNNSEYSWTG (SEQ ID NO: 32 of US20160369298; herein SEQ ID NO: 1581), SKTPADNNNSEYSWTG (SEQ ID NO: 33 of US20160369298; herein SEQ ID NO: 1582), SKTHADNNNSEYSWTG (SEQ ID NO: 34 of US20160369298; herein SEQ ID NO: 1583), SKTQADNNNSEYSWTG (SEQ ID NO: 35 of US20160369298; herein SEQ ID NO: 1584), SKTIADNNNSEYSWTG (SEQ ID NO: 36 of US20160369298; herein SEQ ID NO: 1585), SKTMADNNNSEYSWTG (SEQ ID NO: 37 of US20160369298; herein SEQ ID NO: 1586), SKTRADNNNSEYSWTG (SEQ ID NO: 38 of US20160369298; herein SEQ ID NO: 1587), SKTNADNNNSEYSWTG (SEQ ID NO: 39 of US20160369298; herein SEQ ID NO: 1588), SKTVGRNNNSEYSWTG (SEQ ID NO: 40 of US20160369298; herein SEQ ID NO: 1589), SKTADRNNNSEYSWTG (SEQ ID NO: 41 of US20160369298; herein SEQ ID NO: 1590), SKKLSQNNNSKYSWQG (SEQ ID NO: 42 of US20160369298; herein SEQ ID NO: 1591), SKPTTGNNNSDYSWPG (SEQ ID NO: 43 of US20160369298; herein SEQ ID NO: 1592), STQKNENNNSNYSWPG (SEQ ID NO: 44 of US20160369298; herein SEQ ID NO: 1593), HKDDEGKF (SEQ ID NO: 45 of US20160369298; herein SEQ ID NO: 1594), HKDDNRKF (SEQ ID NO: 46 of US20160369298; herein SEQ ID NO: 1595), HKDDTNKF (SEQ ID NO: 47 of US20160369298; herein SEQ ID NO: 1596), HEDSDKNF (SEQ ID NO: 48 of US20160369298; herein SEQ ID NO: 1597), HRDGADSF (SEQ ID NO: 49 of US20160369298; herein SEQ ID NO: 1598), HGDNKSRF (SEQ ID NO: 50 of US20160369298; herein SEQ ID NO: 1599), KQGSEKTNVDFEEV (SEQ ID NO: 51 of US20160369298; herein SEQ ID NO: 1600), KQGSEKTNVDSEEV (SEQ ID NO: 52 of US20160369298; herein SEQ ID NO: 1601), KQGSEKTNVDVEEV (SEQ ID NO: 53 of US20160369298; herein SEQ ID NO: 1602), KQGSDKTNVDDAGV (SEQ ID NO: 54 of US20160369298; herein SEQ ID NO: 1603), KQGSSKTNVDPREV (SEQ ID NO: 55 of US20160369298; herein SEQ ID NO: 1604), KQGSRKTNVDHKQV (SEQ ID NO: 56 of US20160369298; herein SEQ ID NO: 1605), KQGSKGGNVDTNRV (SEQ ID NO: 57 of US20160369298; herein SEQ ID NO: 1606), KQGSGEANVDNGDV (SEQ ID NO: 58 of US20160369298; herein SEQ ID NO: 1607), KQDAAADNIDYDHV (SEQ ID NO: 59 of US20160369298; herein SEQ ID NO: 1608), KQSGTRSNAAASSV (SEQ ID NO: 60 of US20160369298; herein SEQ ID NO: 1609), KENTNTNDTELTNV (SEQ ID NO: 61 of US20160369298; herein SEQ ID NO: 1610), QRGNNVAATADVNT (SEQ ID NO: 62 of US20160369298; herein SEQ ID NO: 1611), QRGNNEAATADVNT (SEQ ID NO: 63 of US20160369298; herein SEQ ID NO: 1612), QRGNNPAATADVNT (SEQ ID NO: 64 of US20160369298; herein SEQ ID NO: 1613), QRGNNHAATADVNT (SEQ ID NO: 65 of US20160369298; herein SEQ ID NO: 1614), QEENNIAATPGVNT (SEQ ID NO: 66 of US20160369298; herein SEQ ID NO: 1615), QPPNNMAATHEVNT (SEQ ID NO: 67 of US20160369298; herein SEQ ID NO: 1616), QHHNNSAATTIVNT (SEQ ID NO: 68 of US20160369298; herein SEQ ID NO: 1617), QTTNNRAAFNMVET (SEQ ID NO: 69 of US20160369298; herein SEQ ID NO: 1618), QKKNNNAASKKVAT (SEQ ID NO: 70 of US20160369298; herein SEQ ID NO: 1619), QGGNNKAADDAVKT (SEQ ID NO: 71 of US20160369298; herein SEQ ID NO: 1620), QAAKGGAADDAVKT (SEQ ID NO: 72 of US20160369298; herein SEQ ID NO: 1621), QDDRAAAANESVDT (SEQ ID NO: 73 of US20160369298; herein SEQ ID NO: 1622), QQQHDDAAYQRVHT (SEQ ID NO: 74 of US20160369298; herein SEQ ID NO: 1623), QSSSSLAAVSTVQT (SEQ ID NO: 75 of US20160369298; herein SEQ ID NO: 1624), QNNQTTAAIRNVTT (SEQ ID NO: 76 of US20160369298; herein SEQ ID NO: 1625), NYNKKSDNVDFT (SEQ ID NO: 77 of US20160369298; herein SEQ ID NO: 1626), NYNKKSENVDFT (SEQ ID NO: 78 of US20160369298; herein SEQ ID NO: 1627), NYNKKSLNVDFT (SEQ ID NO: 79 of US20160369298; herein SEQ ID NO: 1628), NYNKKSPNVDFT (SEQ ID NO: 80 of US20160369298; herein SEQ ID NO: 1629), NYSKKSHCVDFT (SEQ ID NO: 81 of US20160369298; herein SEQ ID NO: 1630), NYRKTIYVDFT (SEQ ID NO: 82 of US20160369298; herein SEQ ID NO: 1631), NYKEKKDVHFT (SEQ ID NO: 83 of US20160369298; herein SEQ ID NO: 1632), NYGHRAIVQFT (SEQ ID NO: 84 of US20160369298; herein SEQ ID NO: 1633), NYANHQFVVCT (SEQ ID NO: 85 of US20160369298; herein SEQ ID NO: 1634), NYDDDPTGVLLT (SEQ ID NO: 86 of US20160369298; herein SEQ ID NO: 1635), NYDDPTGVLLT (SEQ ID NO: 87 of US20160369298; herein SEQ ID NO: 1636), NFEQQNSVEWT (SEQ ID NO: 88 of US20160369298; herein SEQ ID NO: 1637), SQSGASN (SEQ ID NO: 89 and SEQ ID NO: 241 of US20160369298; herein SEQ ID NO: 1638), NNGSQA (SEQ ID NO: 90 of US20160369298; herein SEQ ID NO: 1639), YYLSRTNTPSGTTTWSRLQFSQAGA (SEQ ID NO: 91 of US20160369298; herein SEQ ID NO: 1640), SKTSADNNNSEYSWTG (SEQ ID NO: 92 of US20160369298; herein SEQ ID NO: 1641), HKDDEEKF (SEQ ID NO: 93, 209, 214, 219, 224, 234, 239, and 244 of US20160369298; herein SEQ ID NO: 1642), KQGSEKTNVDIEEV (SEQ ID NO: 94 of US20160369298; herein SEQ ID NO: 1643), QRGNNQAATADVNT (SEQ ID NO: 95 of US20160369298; herein SEQ ID NO: 1644), NYNKKSVNVDFT (SEQ ID NO: 96 of US20160369298; herein SEQ ID NO: 1645), SQSGASNYNTPSGTTTQSRLQFSTSADNNNSEYSWTGATKYH (SEQ ID NO: 106 of US20160369298; herein SEQ ID NO: 1646), SASGASNFNSEGGSLTQSSLGFSTDGENNNSDFSWTGATKYH (SEQ ID NO: 107 of US20160369298; herein SEQ ID NO: 1647), SQSGASNYNTPSGTTTQSRLQFSTDGENNNSDFSWTGATKYH (SEQ ID NO: 108 of US20160369298; herein SEQ ID NO: 1648), SASGASNYNTPSGTTTQSRLQFSTSADNNNSEFSWPGATTYH (SEQ ID NO: 109 of US20160369298; herein SEQ ID NO: 1649), SQSGASNFNSEGGSLTQSSLGFSTDGENNNSDFSWTGATKYH (SEQ ID NO: 110 of US20160369298; herein SEQ ID NO: 1650), SASGASNYNTPSGSLTQSSLGFSTDGENNNSDFSWTGATKYH (SEQ ID NO: 111 of US20160369298; herein SEQ ID NO: 1651), SQSGASNYNTPSGTTTQSRLQFSTSADNNNSDFSWTGATKYH (SEQ ID NO: 112 of US20160369298; herein SEQ ID NO: 1652), SGAGASNFNSEGGSLTQSSLGFSTDGENNNSDFSWTGATKYH (SEQ ID NO: 113 of US20160369298; herein SEQ ID NO: 1653), SGAGASN (SEQ ID NO: 176 of US20160369298; herein SEQ ID NO: 1654), NSEGGSLTQSSLGFS (SEQ ID NO: 177, 185, 193 and 202 of US20160369298; herein SEQ ID NO: 1655), TDGENNNSDFS (SEQ ID NO: 178 of US20160369298; herein SEQ ID NO: 1656), SEFSWPGATT (SEQ ID NO: 179 of US20160369298; herein SEQ ID NO: 1657), TSADNNNSDFSWT (SEQ ID NO: 180 of US20160369298; herein SEQ ID NO: 1658), SQSGASNY (SEQ ID NO: 181,187, and 198 of US20160369298; herein SEQ ID NO: 1659), NTPSGTTTQSRLQFS (SEQ ID NO: 182,188,191, and 199 of US20160369298; herein SEQ ID NO: 1660), TSADNNNSEYSWTGATKYH (SEQ ID NO: 183 of US20160369298; herein SEQ ID NO: 1661), SASGASNF (SEQ ID NO: 184 of US20160369298; herein SEQ ID NO: 1662), TDGENNNSDFSWTGATKYH (SEQ ID NO: 186,189,194,197, and 203 of US20160369298; herein SEQ ID NO: 1663), SASGASNY (SEQ ID NO: 190 and SEQ ID NO: 195 of US20160369298: herein SEQ ID NO: 1664), TSADNNNSEFSWPGATTYH (SEQ ID NO: 192 of US20160369298; herein SEQ ID NO: 1665), NTPSGSLTQSSLGFS (SEQ ID NO: 196 of US20160369298; herein SEQ ID NO: 1666), TSADNNNSDFSWTGATKYH (SEQ ID NO: 200 of US20160369298; herein SEQ ID NO: 1667), SGAGASNF (SEQ ID NO: 201 of US20160369298; herein SEQ ID NO: 1668), CTCCAGVVSVVSMRSRVCVNSGCAGCTDHCVVSRNSGTCVMSACACAA (SEQ ID NO: 204 of US20160369298; herein SEQ ID NO: 1669), CTCCAGAGAGGCAACAGACAAGCAGCTACCGCAGATGTCAACACACAA (SEQ ID NO: 205 of US20160369298; herein SEQ ID NO: 1670), SAAGASN (SEQ ID NO: 206 of US20160369298; herein SEQ ID NO: 1671), YFLSRTNTESGSTTQSTLRFSQAG (SEQ ID NO: 207 of US20160369298; herein SEQ ID NO: 1672), SKTSADNNNSDFS (SEQ ID NO: 208, 228, and 253 of US20160369298; herein SEQ ID NO: 1673), KQGSEKTDVDIDKV (SEQ ID NO: 210 of US20160369298; herein SEQ ID NO: 1674), STAGASN (SEQ ID NO: 211 of US20160369298; herein SEQ ID NO: 1675), YFLSRTNTTSGIETQSTLRFSQAG (SEQ ID NO: 212 and SEQ ID NO: 247 of US20160369298; herein SEQ ID NO: 1676), SKTDGENNNSDFS (SEQ ID NO: 213 and SEQ ID NO: 248 of US20160369298; herein SEQ ID NO: 1677), KQGAAADDVEIDGV (SEQ ID NO: 215 and SEQ ID NO: 250 of US20160369298; herein SEQ ID NO: 1678), SEAGASN (SEQ ID NO: 216 of US20160369298; herein SEQ ID NO: 1679), YYLSRTNTPSGTTTQSRLQFSQAG (SEQ ID NO: 217, 232 and 242 of US20160369298; herein SEQ ID NO: 1680), SKTSADNNNSEYS (SEQ ID NO: 218, 233, 238, and 243 of US20160369298; herein SEQ ID NO: 1681), KQGSEKTNVDIEKV (SEQ ID NO: 220, 225 and 245 of US20160369298; herein SEQ ID NO: 1682), YFLSRTNDASGSDTKSTLLFSQAG (SEQ ID NO: 222 of US20160369298; herein SEQ ID NO: 1683), STTPSENNNSEYS (SEQ ID NO: 223 of US20160369298; herein SEQ ID NO: 1684), SAAGATN (SEQ ID NO: 226 and SEQ ID NO: 251 of US20160369298; herein SEQ ID NO: 1685), YFLSRTNGEAGSATLSELRFSQAG (SEQ ID NO: 227 of US20160369298; herein SEQ ID NO: 1686), HGDDADRF (SEQ ID NO: 229 and SEQ ID NO: 254 of US20160369298; herein SEQ ID NO: 1687), KQGAEKSDVEVDRV (SEQ ID NO: 230 and SEQ ID NO: 255 of US20160369298; herein SEQ ID NO: 1688), KQDSGGDNIDIDQV (SEQ ID NO: 235 of US20160369298; herein SEQ ID NO: 1689), SDAGASN (SEQ ID NO: 236 of US20160369298; herein SEQ ID NO: 1690), YFLSRTNTEGGHDTQSTLRFSQAG (SEQ ID NO: 237 of US20160369298; herein SEQ ID NO: 1691), KEDGGGSDVAIDEV (SEQ ID NO: 240 of US20160369298; herein SEQ ID NO: 1692), SNAGASN (SEQ ID NO: 246 of US20160369298; herein SEQ ID NO: 1693), and YFLSRTNGEAGSATLSELRFSQPG (SEQ ID NO: 252 of US20160369298; herein SEQ ID NO: 1694). Non-limiting examples of nucleotide sequences that may encode the amino acid mutated sites include the following, AGCWMDCAGGARSCASCAAC (SEQ ID NO: 97 of US20160369298; herein SEQ ID NO: 1695), AACRACRRSMRSMAGGCA (SEQ ID NO: 98 of US20160369298; herein SEQ ID NO: 1696), CACRRGGACRRCRMSRRSARSTTT (SEQ ID NO: 99 of US20160369298; herein SEQ ID NO: 1697), TATTTCTTGAGCAGAACAAACRVCVVSRSCGGAMNCVHSACGMHSTCAWSCTTVDSTTTTCTCAGSBCRGSGCG (SEQ ID NO: 100 of US20160369298; herein SEQ ID NO: 1698), TCAAMAMMAVNSRVCSRSAACAACAACAGTRASTTCTCGTGGMMAGGA (SEQ ID NO: 101 of US20160369298; herein SEQ ID NO: 1699), AAGSAARRCRSCRVSRVARVCRATRYCGMSNHCRVMVRSGTC (SEQ ID NO: 102 of US20160369298; herein SEQ ID NO: 1700), CAGVVSWSMRSRVCVNSGCAGCTDHCWSRNSGTCVMSACA (SEQ ID NO: 103 of US20160369298; herein SEQ ID NO: 1701), AACTWCRVSVASMVSVHSDDTGTGSWSTKSACT (SEQ ID NO: 104 of US20160369298; herein SEQ ID NO: 1702), TTGTTGAACATCACCACGTGACGCACGTTC (SEQ ID NO: 256 of US20160369298; herein SEQ ID NO: 1703), TCCCCGTGGTTCTACTACATAATGTGGCCG (SEQ ID NO: 257 of US20160369298; herein SEQ ID NO: 1704), TTCCACACTCCGTTTTGGATAATGTTGAAC (SEQ ID NO: 258 of US20160369298; herein SEQ ID NO: 1705), AGGGACATCCCCAGCTCCATGCTGTGGTCG (SEQ ID NO: 259 of US20160369298; herein SEQ ID NO: 1706), AGGGACAACCCCTCCGACTCGCCCTAATCC (SEQ ID NO: 260 of US20160369298; herein SEQ ID NO: 1707), TCCTAGTAGAAGACACCCTCTCACTGCCCG (SEQ ID NO: 261 of US20160369298; herein SEQ ID NO: 1708), AGTACCATGTACACCCACTCTCCCAGTGCC (SEQ ID NO: 262 of US20160369298; herein SEQ ID NO: 1709), ATATGGACGTTCATGCTGATCACCATACCG (SEQ ID NO: 263 of US20160369298; herein SEQ ID NO: 1710), AGCAGGAGCTCCTTGGCCTCAGCGTGCGAG (SEQ ID NO: 264 of US20160369298; herein SEQ ID NO: 1711), ACAAGCAGCTTCACTATGACAACCACTGAC (SEQ ID NO: 265 of US20160369298; herein SEQ ID NO: 1712), CAGCCTAGGAACTGGCTTCCTGGACCCTGTTACCGCCAGCAGAGAGTCTCAAMAMMAVNSRVCSRSAACAACAACAGTRASTTCTCC TGGMMAGGAGCTACCAAGTACCACCTCAATGGCAGAGACTCTCTGGTGAATCCCGGACCAGCTATGGCAAGCCACRRGGACRRCR MSRRSARSTTTTTTCCTCAGAGCGGGGTTCTCATCTTTGGGAAGSAARRCRSCRVSRVARVCRATRYCGMSNHCRVMVRSGTCATGAT TACAGACGAAGAGGAGATCTGGAC (SEQ ID NO: 266 of US20160369298; herein SEQ ID NO: 1713), TGGGACAATGGCGGTCGTCTCTCAGAGTTKTKKT (SEQ ID NO: 267 of US20160369298; herein SEQ ID NO: 1714), AGAGGACCKKTCCTCGATGGTTCATGGTGGAGTTA (SEQ ID NO: 268 of US20160369298; herein SEQ ID NO: 1715), CCACTTAGGGCCTGGTCGATACCGTTCGGTG (SEQ ID NO: 269 of US20160369298; herein SEQ ID NO: 1716), and TCTCGCCCCAAGAGTAGAAACCCTTCSTTYYG (SEQ ID NO: 270 of US20160369298; herein SEQ ID NO: 1717).

[0105] In some embodiments, the AAV serotype may comprise an ocular cell targeting peptide as described in International Patent Publication WO2016134375, the contents of which are herein incorporated by reference in their entirety, such as, but not limited to SEQ ID NO: 9, and SEQ ID NO:10 of WO2016134375. Further, any of the ocular cell targeting peptides or amino acids described in WO2016134375, may be inserted into any parent AAV serotype, such as, but not limited to, AAV2 (SEQ ID NO:8 of WO2016134375; herein SEQ ID NO: 1718), or AAV9 (SEQ ID NO: 11 of WO2016134375; herein SEQ ID NO: 1719). In some embodiments, modifications, such as insertions are made in AAV2 proteins at P34-5, T138-A139, A139-P140, G453. T454, N587. R588, and/or R588-Q589. In certain embodiments, insertions are made at D384, G385, 1560, T561, N562, E563, E564, E565, N704, and/or Y705 of AAV9. The ocular cell targeting peptide may be, but is not limited to, any of the following amino acid sequences, GSTPPPM (SEQ ID NO: 1 of WO2016134375; herein SEQ ID NO: 1720), or GETRAPL (SEQ ID NO: 4 of WO2016134375; herein SEQ ID NO: 1721).

[0106] In some embodiments, the AAV serotype may be modified as described in the United States Publication US 20170145405 the contents of which are herein incorporated by reference in their entirety. AAV serotypes may include, modified AAV2 (e.g., modifications at Y444F, Y500F, Y730F and/or S662V), modified AAV3 (e.g., modifications at Y705F, Y731F and/or T492V), and modified AAV6 (e.g., modifications at S663V and/or T492V).

[0107] In some embodiments, the AAV serotype may be modified as described in the International Publication WO2017083722 the contents of which are herein incorporated by reference in their entirety. AAV serotypes may include, AAV (Y705+731F+T492V), AAV2 (Y444+500+730F+T491V), AAV3 (Y705+731F), AAV5, AAV 5 (Y436+693+719F), AAV6 (VP3 variant Y705F1Y731F/T492V), AAV8 (Y733F), AAV9, AAV9 (VP3 variant Y731F), and AAV10 (Y733F).

[0108] In some embodiments, the AAV serotype may comprise, as described in International Patent Publication WO2017015102, the contents of which are herein incorporated by reference in their entirety, an engineered epitope comprising the amino acids SPAKFA (SEQ ID NO: 24 of WO2017015102; herein SEQ ID NO: 1722) or NKDKLN (SEQ ID NO:2 of WO2017015102; herein SEQ ID NO: 1723). The epitope may be inserted in the region of amino acids 665 to 670 based on the numbering of the VP1 capsid of AAV8 (SEQ ID NO: 3 of WO2017015102) and/or residues 664 to 668 of AAV3B (SEQ ID NO: 3).

[0109] In some embodiments, the AAV serotype may be, or may have a sequence as described in International Patent Publication WO2017058892, the contents of which are herein incorporated by reference in their entirety, such as, but not limited to, AAV variants with capsid proteins that may comprise a substitution at one or more (e.g., 2, 3, 4, 5, 6, or 7) of amino acid residues 262-268, 370-379, 451-459, 472-473, 493-500, 528-534, 547-552, 588-597, 709-710, 716-722 of AAV1, in any combination, or the equivalent amino acid residues in AAV2, AAV3, AAV4, AAV5, AAV6, AAV7, AAV8, AAV9, AAV10, AAV11, AAV12, AAVrh8, AAVrh10, AAVrh32.33, bovine AAV or avian AAV. The amino acid substitution may be, but is not limited to, any of the amino acid sequences described in WO2017058892. In some embodiments, the AAV may comprise an amino acid substitution at residues 256L, 258K, 259Q, 261S, 263A, 264S, 265T, 266G, 272H, 385S, 386Q, 5472R, V473D, N500E 547S, 709A, 710N, 716D, 717N, 718N, 720L, 56T, Q457T, N458Q, K459S, T492S, K493A, S586R, S587G, S588N, T589R and/or 722T of AAV (SEQ ID NO: 1 of WO2017058892) in any combination, 244N, 246Q, 248R, 249E, 2501, 251K, 252S, 253G, 254S, 255V, 256D, 263Y, 377E, 378N, 453L, 456R, 532Q, 533P, 535N, 536P, 537G, 538T, 539T, 540A, 541T, 542Y, 543L, 546N, 653V, 654P, 656S, 697Q, 698F, 704D, 705S, 706T, 707G, 708E, 709Y and/or 710R of AAV5 (SEQ ID NO:5 of WO2017058892) in any combination, 248R, 316V, 317Q, 318D, 319S, 443N, 530N, 531S, 532Q 533P, 534A, 535N, 540A, 541 T, 542Y, 543L, 545G, 546N, 697Q, 704D, 706T, 708E, 709Y and/or 710R of AAV5 (SEQ ID NO: 5 of WO2017058892) in any combination, 264S, 266G, 269N, 272H, 457Q, 588S and/or 5891 of AAV6 (SEQ ID NO:6 WO2017058892) in any combination, 457T, 459N, 496G, 499N, 500N, 589Q, 590N and/or 592A of AAV8 (SEQ ID NO: 8 WO2017058892) in any combination, 451I, 452N, 453G, 454S, 455G, 456Q, 457N and/or 458Q of AAV9 (SEQ ID NO: 9 WO2017058892) in any combination.

[0110] In some embodiments, the AAV may include a sequence of amino acids at positions 155, 156 and 157 of VP1 or at positions 17, 18, 19 and 20 of VP2, as described in International Publication No. WO 2017066764, the contents of which are herein incorporated by reference in their entirety. The sequences of amino acid may be, but not limited to, N-S-S, S-X-S, S-S-Y, N-X-S, N-S-Y, S-X-Y and N-X-Y, where N, X and Y are, but not limited to, independently non-serine, or non-threonine amino acids, wherein the AAV may be, but not limited to AAV1, AAV2, AAV3, AAV4, AAV5, AAV6, AAV7, AAV8, AAV9, AAV10, AAV11 and AAV12. In some embodiments, the AAV may include a deletion of at least one amino acid at positions 156,157 or 158 of VP1 or at positions 19, 20 or 21 of VP2, wherein the AAV may be, but not limited to AAV1, AAV2, AAV3, AAV4, AAV5, AAV6, AAV7, AAV8, AAV9, AAV10, AAV11 and AAV12.

[0111] The effectiveness of AAV payload delivery may be affected by preexisting neutralizing antibodies, which present a significant challenge for vector effectiveness in therapeutic applications. In some embodiments, one or more of the mutations described by Jose et al. may be included in AAV described herein to circumvent the effects of preexisting neutralizing antibodies in a subject. In some embodiments, the AAV may be AAV5. In some embodiments, the AAV may include a mutation at positions 443, 444, 471, 481, 483, 484, 520, 576, 577, and/or 578 of VP3 as described in Jose et al. (J Virol. 2018 Dec. 10; 93(1):e01394-18; the contents of which are herein incorporated by reference in their entirety). As a non-limiting example, the mutation at position 443 of VP3 may be N443Q, or N443T. As a non-limiting example, the mutation at position 444 of VP3 may be T444V. As a non-limiting example, the mutation at position 471 of VP3 may be R471E. As a non-limiting example, the mutation at position 481 of VP3 may be V481T, V481P, or V481Y. As a non-limiting example, the mutation at position 483 of VP3 may be R483A, R483K, or R483Q. As a non-limiting example, the mutation at position 484 of VP3 may be A484S, A484Q or deletion of A484. As a non-limiting example, the mutation at position 520 of VP3 may be T520A, or T520R. As a non-limiting example, the mutation at position 576 of VP3 may be S576A, or S576Q. As a non-limiting example, the mutation at position 577 of VP3 may be T577A, or T577V. As a non-limiting example, the mutation at position 578 of VP3 may be T578A, or T578Q.

[0112] In some embodiments, the AAV may be a serotype generated by Cre-recombination-based AAV targeted evolution (CREATE) as described by Deverman et al., (Nature Biotechnology 34(2):204-209 (2016)), the contents of which are herein incorporated by reference in their entirety. In some embodiments, AAV serotypes generated in this manner have improved CNS transduction and/or neuronal and astrocytic tropism, as compared to other AAV serotypes. As non-limiting examples, the AAV serotype may include a peptide such as, but not limited to, PHP.B, PHP.B2, PHP.B3, PHP.A, PHP.S, G2A12, G2A15, G2, G2B4, and G2B5. In some embodiments, these AAV serotypes may be AAV9 (SEQ ID NO: 11 or 138) derivatives with a 7-amino acid insert between amino acids 588-589. Non-limiting examples of these 7-amino acid inserts include TLAVPFK (PHP.B; SEQ ID NO: 1262), SVSKPFL (PHP.B2; SEQ ID NO: 1270), FTLTTPK (PHP.B3; SEQ ID NO: 1271), YTLSQGW (PHP.A; SEQ ID NO: 1277), QAVRTSL (PHP.S; SEQ ID NO: 1321), LAKERLS (G2; SEQ ID NO: 1322), MNSTKNV (G2B4; SEQ ID NO: 1323), and/or VSGGHHS (G2B5; SEQ ID NO: 1324).

[0113] In some embodiments, the AAV serotype may be as described in Jackson et al (Frontiers in Molecular Neuroscience 9:154 (2016)), the contents of which are herein incorporated by reference in their entirety. In some embodiments, the AAV serotype is PHP.B or AAV9. In some embodiments, the AAV serotype is paired with a synapsin promoter to enhance neuronal transduction, as compared to when more ubiquitous promoters are used (i.e., CBA or CMV).

[0114] In some embodiments, the AAV serotype is a serotype comprising the AAVPHP.N (PHP.N) peptide, or a variant thereof.

[0115] In some embodiments the AAV serotype is a serotype comprising the AAVPHP.B (PHP.B) peptide, or a variant thereof.

[0116] In some embodiments, the AAV serotype is a serotype comprising the AAVPHP.A (PHP.A) peptide, or a variant thereof.

[0117] In some embodiments, the V serotype is a serotype comprising the PHP.S peptide, or a variant thereof.

[0118] In some embodiments, the V serotype is a serotype comprising the PHP.B2 peptide, or a variant thereof.

[0119] In some embodiments, the V serotype is a serotype comprising the PHP.B3 peptide, or a variant thereof.

[0120] In some embodiments, the V serotype is a serotype comprising the G2B4 peptide, or a variant thereof.

[0121] In some embodiments, the AAV serotype is a serotype comprising the G2B5 peptide, or a variant thereof.

[0122] In some embodiments, the V serotype is VOY101, or a variant thereof. In some embodiments, the VOY101 capsid comprises the amino acid sequence SEQ ID NO: 1. In some embodiments, the VOY101 amino acid sequence is encoded by a nucleotide sequence comprising SEQ ID NO: 2. In some embodiments, the VOY101 capsid comprises an amino acid sequence at least 70% identical to SEQ ID NO: 1, such as, 70%, 75%, 80%, 85%, 90%, 91%, 92%, 93%, 94%, 95%,96%,97%, 98%, 99%, or greater than 99%. In some embodiments, the VOY101 capsid comprises a nucleotide sequence at least 70% identical to SEQ ID NO: 2, such as, 70%, 75%, 80%, 85%, 90%, 91%, 92%, 93%, 94%, 95%, 96%, 97%, 98%, 99%, or greater than 99%.

[0123] In some embodiments, the V serotype is VOY201, or a variant thereof. In some embodiments, the VOY201 capsid comprises the amino acid sequence SEQ ID NO: 4534. In some embodiments, the VOY201 amino acid sequence is encoded by a nucleotide sequence comprising SEQ ID NO: 3. In some embodiments, the VOY201 capsid comprises an amino acid sequence at least 70% identical to SEQ ID NO: 4534, such as, 70%, 75%, 80%, 85%, 90%, 91%, 92%, 93%, 94%, 95%, 96%, 97%, 98%, 99%, or greater than 99%. In some embodiments, the VOY201 capsid comprises a nucleotide sequence at least 70% identical to SEQ ID NO: 3, such as, 70%, 75%, 80%, 85%, 90%, 91%, 92%, 93%, 94%, 95%, 96%, 97%, 98%, 99%, or greater than 99%.

[0124] In some embodiments, the AAV serotype is PHP.B, or a variant thereof. In some embodiments, the PHP.B capsid comprises the amino acid sequence SEQ ID NO: 5. In some embodiments, the PHP.B amino acid sequence is encoded by a nucleotide sequence comprising SEQ ID NO: 6. In some embodiments, the PHP.B capsid comprises an amino acid sequence at least 70% identical to SEQ ID NO: 5, such as, 70%, 75%,80%, 85%,90%,91%, 92%, 93%, 94%, 95%, 96%, 97%,98%,99%, or greater than 99%. In some embodiments, the PHP.B capsid comprises a nucleotide sequence at least 70% identical to SEQ ID NO: 6, such as, 70%, 75%, 80%, 85%, 90%, 91%, 92%, 93%, 94%, 95%, 96%, 97%, 98%, 99%, or greater than 99%.

[0125] In some embodiments, the AAV serotype is PHP.N, or a variant thereof. In some embodiments, the PHP.N capsid comprises the amino acid sequence SEQ ID NO: 4. In some embodiments, the PHP.N capsid comprises an amino acid sequence at least 70% identical to SEQ ID NO: 4, such as, 70%, 75%,80%, 85%, 90%, 91%, 92%, 93%,94%, 95%, 96%, 97%,98%, 99%, or greater than 99%.

[0126] In some embodiments the V serotype is AAV9, or a variant thereof. In some embodiments, the AAV9 capsid comprises the amino acid sequence SEQ ID NO: 138. In some embodiments, the AAV9 amino acid sequence is encoded by a nucleotide sequence comprising SEQ ID NO: 137. In some embodiments, the AAV9 capsid comprises an amino acid sequence at least 70% identical to SEQ ID NO: 138, such as, 70%, 75%,80%, 85%, 90%,91%,92%, 93%,94%,95%, 96%,97%,98%,99%, or greater than 99%. In some embodiments, the AAV9 capsid comprises a nucleotide sequence at least 70% identical to SEQ ID NO: 137, such as, 70%, 75%, 80%, 85%, 90%, 91%, 92%, 93%, 94%, 95%, 96%, 97%, 98%, 99%, or greater than 99%.

[0127] In some embodiments, the AAV serotype is AAV9 K449R, or a variant thereof. In some embodiments, the AAV9 K449R capsid comprises the amino acid sequence SEQ ID NO: 11. In some embodiments, the AAV9 K449R capsid comprises an amino acid sequence at least 70% identical to SEQ ID NO: 11, such as, 70%,75%,80%, 85%,90%, 91%,92%,93%, 94%, 95%,96%, 97%, 98%,99%, or greater than 99%.

[0128] In some embodiments, the AAV capsid allows for blood brain barrier penetration following intravenous administration. Non-limiting examples of such AAV capsids include AAV9, AAV9 K449R, VOY101, VOY201, or AAV capsids comprising a peptide insert such as, but not limited to, AAVPHP.N (PHP.N), AAVPHP.B (PHP.B), PHP.S, G2A3, G2B4, G2B5, G2A12, G2A15, PHP.B2, PHP.B3, or AAVPHP.A (PHP.A).

[0129] In some embodiments, the AAV capsid is suitable for intramuscular administration and/or transduction of muscle fibers. Non-limiting examples of such AAV capsids include AAV2, AAV3, AAV8 and variants thereof such as, but not limited to, AAV2 variants, AAV2/3 variants, AAV8 variants, and/or AAV2/3/8 variants.

[0130] In some embodiments, the AAV serotype is an AAV2 variant. As a non-limiting example, the AAV serotype is an AAV2 variant comprising SEQ ID NO: 11285 or a fragment or variant thereof. As a non-limiting example, the AAV serotype is at least 70% identical to SEQ ID NO: 11285, such as, 70%, 75%,80%,85%, 90%,91%,92%, 93%, 94%,95%,96%, 97%, 98%,99%, or greater than 99%.

[0131] In some embodiments, the AAV serotype is an AAV2/3 variant. As a non-limiting example, the AAV serotype is an AAV213 variant comprising SEQ ID NO: 11415 or a fragment or variant thereof. As a non-limiting example, the AAV serotype is an AAV2/3 variant which is at least 70% identical to SEQ ID NO: 11415, such as, 70%,75%,80%, 85%,90%,91%, 92%, 93%,94%, 95%, 96%, 97%,98%,99%, or greater than 99%. As a non-limiting example, the AAV serotype is an AAV2/3 variant comprising SEQ ID NO: 11477 or a fragment or variant thereof. As a non-limiting example, the AAV serotype is an AAV2/3 variant which is at least 70% identical to SEQ ID NO: 11477, such as, 70%, 75%, 80%, 85%, 90%, 91%, 92%, 93%, 94%, 95%, 96%, 97%, 98%, 99%, or greater than 99%.

[0132] In some embodiments, the AAV serotype may comprise a capsid amino acid sequence with 50%, 51%, 52%, 53%, 54%, 55%, 56%, 57%, 58%, 59%, 60%, 61%, 62%, 63%, 64%, 65%, 66%, 67%, 68%, 69%, 70%, 71%, 72%, 73%, 74%, 75%, 76%, 77%, 78%, 79%, 80%, 81%, 82%, 83%, 84%, 85%,86%, 87%, 88%, 89%, 90%, 91%, 92%, 93%, 94%, 95%, 96%, 97%, 98%, 99%, or 100% identity to any of those described herein.

[0133] In some embodiments, the AAV serotype may be encoded by a capsid nucleic acid sequence with 50%, 51%,52%, 53%, 54%, 55%, 56%, 57%, 58%, 59%, 60%,61%,62%, 63%, 64%, 65%, 66%, 67%, 68%, 69%, 70%, 71%, 72%, 73%, 74%, 75%, 76%, 77%, 78%, 79%, 80%, 81%, 82%, 83%, 84%, 85%, 86%, 87%, 88%, 89%, 90%, 91%, 92%, 93%, 94%, 95%, 96%, 97%, 98%, 99%, or 100% identity to any of those described herein.

[0134] In some embodiments, the AAV serotype is selected for use due to its tropism for cells of the central nervous system. In some embodiments, the cells of the central nervous system are neurons. In another embodiment, the cells of the central nervous system are astrocytes.

[0135] In some embodiments, the AAV serotype is selected for use due to its tropism for cells of the muscle(s).

[0136] In some embodiments, the initiation codon for translation of the AAV VP1 capsid protein may be CTG, TTG, or GTG as described in U.S. Pat. No. 8,163,543, the contents of which are herein incorporated by reference in its entirety.

[0137] The present disclosure refers to structural capsid proteins (including VP1, VP2 and VP3) which are encoded by capsid (Cap) genes. These capsid proteins form an outer protein structural shell (i.e. capsid) of a viral vector such as AAV. VP capsid proteins synthesized from Cap polynucleotides generally include a methionine as the first amino acid in the peptide sequence (Met1), which is associated with the start codon (AUG or ATG) in the corresponding Cap nucleotide sequence. However, it is common for a first-methionine (Met1) residue or generally any first amino acid (AA1) to be cleaved off after or during polypeptide synthesis by protein processing enzymes such as Met-aminopeptidases. This “Met/AA-clipping” process often correlates with a corresponding acetylation of the second amino acid in the polypeptide sequence (e.g., alanine, valine, serine, threonine, etc.). Met-clipping commonly occurs with VP1 and VP3 capsid proteins but can also occur with VP2 capsid proteins.

[0138] Where the Met/AA-clipping is incomplete, a mixture of one or more (one, two or three) VP capsid proteins comprising the viral capsid may be produced, some of which may include a Met1/AA1 amino acid (Met+/AA+) and some of which may lack a Met1/AA1 amino acid as a result of Met/AA-clipping (Met−/AA−). For further discussion regarding Met/AA-clipping in capsid proteins, see Jin, et al. Direct Liquid Chromatography/Mass Spectrometry Analysis for Complete Characterization of Recombinant Adeno-Associated Virus Capsid Proteins. Hum Gene Ther. Methods. 2017 Oct. 28(5):255-267; Hwang, et al. N. Terminal Acetylation of Cellular Proteins Creates Specific Degradation Signals. Science, 2010 Feb. 19. 327(5968): 973-977; the contents of which are each incorporated herein by reference in its entirety.

[0139] According to the present disclosure, references to capsid proteins is not limited to either clipped (Met−/AA−) or unclipped (Met+/AA+) and may, in context, refer to independent capsid proteins, viral capsids comprised of a mixture of capsid proteins, and/or polynucleotide sequences (or fragments thereof which encode, describe, produce or result in capsid proteins of the present disclosure. A direct reference to a “capsid protein” or “capsid polypeptide” (such as VP1, VP2 or VP2) may also comprise VP capsid proteins which include a Met1/AA1 amino acid (Met+/AA+) as well as corresponding VP capsid proteins which lack the Met1/AA1 amino acid as a result of Met/AA-clipping (Met−/AA−).

[0140] Further according to the present disclosure, a reference to a specific SEQ ID NO: (whether a protein or nucleic acid) which comprises or encodes, respectively, one or more capsid proteins which include a Met1/AA1 amino acid (Met+/AA+) should be understood to teach the VP capsid proteins which lack the Met1/AA1 amino acid as upon review of the sequence, it is readily apparent any sequence which merely lacks the first listed amino acid (whether or not Met1/AA1).

[0141] As a non-limiting example, reference to a VP1 polypeptide sequence which is 736 amino acids in length and which includes a “Met1” amino acid (Met+) encoded by the AUG/ATG start codon may also be understood to teach a VP1 polypeptide sequence which is 735 amino acids in length and which does not include the “Met1” amino acid (Met−) of the 736 amino acid Met+ sequence. As a second non-limiting example, reference to a VP1 polypeptide sequence which is 736 amino acids in length and which includes an “AA1” amino acid (AA1+) encoded by any NNN initiator codon may also be understood to teach a VP1 polypeptide sequence which is 735 amino acids in length and which does not include the “AA1” amino acid (AA1-) of the 736 amino acid AA1+ sequence.

[0142] References to viral capsids formed from VP capsid proteins (such as reference to specific AAV capsid serotypes), can incorporate VP capsid proteins which include a Met1/AA1 amino acid (Met+/AA1+), corresponding VP capsid proteins which lack the Met1/AA1 amino acid as a result of Met/AA1-clipping (Met−/AA1−), and combinations thereof (Met+/AA1+ and Met−/AA1-).

[0143] As a non-limiting example, an AAV capsid serotype can include VP1 (Met+/AA1+), VP1 (Met−/AA1−), or a combination of VP1 (Met+/AA1+) and VP1 (Met−/AA1−). An AAV capsid serotype can also include VP3 (Met+/AA1+), VP3 (Met−/AA1), or a combination of VP3 (Met+/AA1+) and VP3 (Met−/AA1−); and can also include similar optional combinations of VP2 (Met+/AA1) and VP2 (Met−/AA1−).

### AAV Envelopes

[0144] In some embodiments, the present disclosure provides an AAV vector that may comprise an AAV particle surrounded by a lipid bilayer, wherein the lipid bilayer may comprise one or more functional molecules. As a non-limiting example, the functional molecule may be an immune-suppressing molecule. The lipid bilayer may be referred to herein as an envelope. The AAV vector or AAV particle surrounded by said lipid bilayer may be referred to herein as an enveloped AAV vector, or an enveloped AAV particle. In some embodiments, the enveloped AAV vector exhibits reduced immunogenicity compared to an AAV vector without an envelope. In some embodiments, the AAV particle may be partially surrounded by an envelope. In some embodiments, the AAV particle may be completely surrounded by an envelope.

[0145] The immunosuppressive molecules include but are not limited to molecules (e.g., proteins) that down-regulate immune function of a host by any mechanism, such as by stimulating or up-regulating immune inhibitors or by inhibiting or down-regulating immune stimulating molecules and/or activators, or by otherwise reducing the immunogenicity of the enveloped AAV vector compared to an enveloped vector without the immunosuppressive molecules. Non-limiting examples of immunosuppressive molecules include immune checkpoint receptors and ligands. Exemplary immune-suppressing molecules include, but are not limited to, cytotoxic T lymphocyte-associated antigen (CTLA4), B7-1, B7-2, programmed cell death protein 1 (PD-1), programmed death-ligand 1 (PD-L1), programmed death-ligand 2 (PD-L2), cluster of differentiation (CD28), V-domain Ig suppressor of T cell activation (VISTA), T-cell immunoglobin and mucin domain-3 (TIM-3), galectin-9 (GAL9), T-cell immunoreceptor with Ig and ITIM domains (TIGIT), CD155, (lymphocyte-activation gene 3 (LAG3), B and T lymphocyte associated (BTLA) and herpesvirus entry mediator (HVEM).

[0146] In some embodiments, the enveloped AAV vector may comprise AAV particle surrounded by an envelope, wherein the AAV particle comprises a heterologous transgene, and the envelope comprises a lipid bilayer and one or more immunosuppressive molecules. In some embodiments, the enveloped AAV may have reduced immunogenicity compared to an AAV vector without immunosuppressive molecules in the lipid bilayer. In some embodiments, the enveloped AAV vectors, compositions and methods thereof may be described in International Publication No. WO2019/140311, the contents of each of which are herein incorporated by reference in their entirety.

[0147] In some embodiments, the immunosuppressive molecules stimulate immune inhibitors. In some embodiments, the immunosuppressive molecules inhibit immune stimulating molecules. In some embodiments, the envelope comprises immunosuppressive molecules that stimulate immune inhibitors and immunosuppressive molecules that inhibit immune stimulating molecules. In some embodiments, the envelope may further comprise targeting molecules that target the AAV vector to one or more cell types. In some embodiments, the targeting molecule may be an antibody. Generally, targeting molecules that target different cell or tissue types can be used depending on the desired destination for the AAV vector. Non-limiting examples include one or more of liver, muscle, heart, brain (for example, neurons, glial cells, astrocytes, etc.), kidney, lung, pancreas, stomach, intestines, bone marrow, blood cells (for example, leukocytes, lymphocytes, erythrocytes), ovaries, uterus, testes, and stem cells of any type.

[0148] In some embodiments, the AAV particle comprises a viral capsid and a viral genome. In some embodiments, the viral genome comprises one or more heterologous transgene. In some embodiments, the AAV vector comprises a capsid from human AAV serotype AAV1, AAV2, AAV3, AAV4, AAV5, AAV6, AAV7, AAV8, AAV9, AAV10, AAV11 or AAV12. In some embodiments, the AAV vector comprises an AAV viral genome comprising inverted terminal repeat (ITR) sequences from human AAV serotype AAV1, AA V2, AAV3, AAV4, AAV5, AAV, AAV7, AAV8, AAV9, or AAV10.

[0149] In some embodiments, the AAV capsid and the AAV ITR are from the same serotype or from different serotypes. In some embodiments, the AAV viral particle comprises an AAV viral capsid and an AAV viral genome from the same serotype. In some embodiments, the AAV viral genome and the AAV capsid are of different serotypes. For example, the AAV viral capsid may be an AAV6 viral capsid and the AAV viral genome may be an AAV2 viral genome. In some embodiments, the AAV may be a self-complementary AAV (scAAV).

[0150] In some embodiments, the enveloped AAV vector as described herein can be used to deliver a transgene to a cell or a subject. In some embodiments, the enveloped AAV vector as described herein can be used to treat a disease or disorder in a subject. Non-limiting examples of diseases or disorders include myotubularin myopathy, spinal muscular atrophy, Leber's congenital amaurosis, hemophilia A, hemophilia B, choroideremia, Huntington's disease, Batten disease, Leber hereditary optic neuropathy, Omithine transcarbamylase (OTC) deficiency, Pompe disease, Fabry disease, citrullinemia type 1, phenylketonuria (PKU), adrenoleukodystrophy, sickle cell disease, Niemann-Pick disease and beta thalassemia.

[0151] In some embodiments, the disclosure provides a method of producing an enveloped AAV vector with reduced immunogenicity. The method may comprise culturing viral producer cells to generate enveloped AAV particles. In some embodiments the viral producer cells may comprise a nucleic acid encoding AAV rep and cap genes; a nucleic acid encoding an AAV viral genome comprising a transgene and at least one ITR; and a nucleic acid encoding AAV helper genes. In some embodiments, nucleic acid encoding AAV rep and cap genes and/or the AAV viral genome may be transiently introduced in the producer cell line. In some embodiments, nucleic acid encoding AAV rep and cap genes and/or the AAV viral genome may be stably maintained in the producer cell line. In some embodiments, nucleic acid encoding AAV rep and cap genes and/or the AAV viral genome may be stably integrated into the genome of the producer cell line. In some embodiments, the AAV genome comprises two AAV ITRs. For example, the viral genome may comprise a heterologous transgene flanked by AAV ITRs. In some embodiments, one or more AAV helper functions may be provided by one or more of a plasmid, an adenovirus, a nucleic acid stably integrated into the cell genome or a herpes simplex virus (HSV). In some embodiments, the AAV helper functions comprise one or more of adenovirus E1A function, adenovirus E1B function, adenovirus E2A function, adenovirus E4 function and adenovirus VA function. In some embodiments, one or more AAV helper functions may be stably integrated into the host cell genome and other AAV helper functions may be delivered transiently. For example, in some embodiments, the AAV enveloped vector is prepared in 293 cells expressing adenovirus E1A and E1B functions. The other helper functions may be delivered transiently; for example, by plasmid or by replication-deficient adenovirus. In some embodiments, the AAV helper functions comprise one or more of HSV UL5 function, HSV UL8 function, HSV UL52 function, and HSV UL29 function.

[0152] Generally, enveloped AAV vectors can be produced by co-transfecting plasmids or other expression vectors encoding the viral production genes (e.g., Rep/Cap and helper genes) and a plasmid or other construct comprising the AAV ITR and payload nucleic acid. Transfection can be accomplished in any manner, such as, but not limited to, by using calcium phosphate transfection, polyethyleneimine (PEI) transfection, or by using an HSV based production system as described by Booth et al., 2004 (see Booth et al. (2004) Gene Ther, 11(10):82937, the contents of which are herein incorporated by reference in their entirety). In some embodiments, the viral genes can include, but are not limited to, AAV2, 5, 6, 8, or 9 structural genes Rep and Cap, flanked by the AAV2 ITRs, and necessary helper virus genes as described by Ayuso et al., 2014 (see Ayuso et al. (2014) Hum Gene Ther, 25:977-987, the contents of which are herein incorporated by reference in their entirety). Production can be done in any suitable manner, such as, but not limited to, by using an adherent or suspension production system, with or without serum (see Ayuso et al. (2014) Hum Gene Ther, 25:977-987; Xiao et al. (1998), J Viral, 72(3): 2224-2232; Ryu et al. (2013) Mal Ther, Volume 21.B, the contents of which are herein incorporated by reference in their entirety). When the enveloped AAV vector includes a targeting moiety as described herein, the targeting moiety can be used as an affinity ligand to aid in isolation/purification. Other methods for producing enveloped AAV vectors are known and can be used, provided the producer cell is engineered to overexpress the desired immunosuppressive molecules.

### Viral Genome Component: Inverted Terminal Repeats (ITRs)

[0153] The AAV particles of the present disclosure comprise a viral genome with at least one ITR region and a payload region. In some embodiments, the viral genome has two ITRs. These two ITRs flank the payload region at the 5′ and 3′ ends. The ITRs function as origins of replication comprising recognition sites for replication. ITRs comprise sequence regions which can be complementary and symmetrically arranged. ITRs incorporated into viral genomes may be comprised of naturally occurring polynucleotide sequences or recombinantly derived polynucleotide sequences.

[0154] The ITRs may be derived from the same serotype as the capsid, selected from any of the serotypes listed in Table 1, or a derivative thereof. The ITR may be of a different serotype than the capsid. In some embodiments, the AAV particle has more than one ITR. In a non-limiting example, the AAV particle has a viral genome comprising two ITRs. In some embodiments, the ITRs are of the same serotype as one another. In another embodiment, the ITRs are of different serotypes. Non-limiting examples include zero, one or both of the ITRs having the same serotype as the capsid. In some embodiments both ITRs of the viral genome of the AAV particle are AAV2 ITRs.

[0155] Independently, each ITR may be about 100 to about 150 nucleotides in length. An ITR may be about 100.105 nucleotides in length, 106-110 nucleotides in length, 111-115 nucleotides in length, 116-120 nucleotides in length, 121-125 nucleotides in length, 126-130 nucleotides in length, 131-135 nucleotides in length, 136-140 nucleotides in length, 141-145 nucleotides in length or 146.150 nucleotides in length. In some embodiments, the ITRs are 140-142 nucleotides in length. Non-limiting examples of ITR length are 102, 130, 140, 141, 142, 145 nucleotides in length, and those having at least 95% identity thereto.

[0156] In some embodiments, each ITR may be 141 nucleotides in length.

[0157] In some embodiments, each ITR may be 130 nucleotides in length.

[0158] In some embodiments, the AAV particles comprise two ITRs and one ITR is 141 nucleotides in length and the other ITR is 130 nucleotides in length.

### Viral Genome Component Promoters

[0159] In some embodiments, the payload region of the viral genome comprises at least one element to enhance the transgene target specificity and expression (See e.g., Powell et al. Viral Expression Cassette Elements to Enhance Transgene Target Specificity and Expression in Gene Therapy, 2015; the contents of which are herein incorporated by reference in its entirety). Non-limiting examples of elements to enhance the transgene target specificity and expression include promoters, endogenous miRNAs, post-transcriptional regulatory elements (PREs), polyadenylation (PolyA) signal sequences and upstream enhancers (USEs), CMV enhancers and introns.

[0160] A person skilled in the art may recognize that expression of the polypeptides in a target cell may require a specific promoter, including but not limited to, a promoter that is species specific, inducible, tissue-specific, or cell cycle-specific (Parr et al., Nat. Med. 3:1145-9 (1997); the contents of which are herein incorporated by reference in their entirety).

[0161] In some embodiments, the promoter is deemed to be efficient when it drives expression of the polypeptide(s) encoded in the payload region of the viral genome of the AAV particle.

[0162] In some embodiments, the promoter is a promoter deemed to be efficient when it drives expression in the cell being targeted.

[0163] In some embodiments, the promoter drives expression of the polypeptides (e.g., a functional antibody) for a period of time in targeted tissues. Expression driven by a promoter may be for a period of 1 hour, 2, hours, 3 hours, 4 hours, 5 hours, 6 hours, 7 hours, 8 hours, 9 hours, 10 hours, 11 hours, 12 hours, 13 hours, 14 hours, 15 hours, 16 hours, 17 hours, 18 hours, 19 hours, 20 hours, 21 hours, 22 hours, 23 hours, 1 day, 2 days, 3 days, 4 days, 5 days, 6 days, 1 week, 8 days, 9 days, 10 days, 11 days, 12 days, 13 days, 2 weeks, 15 days, 16 days, 17 days, 18 days, 19 days, 20 days, 3 weeks, 22 days, 23 days, 24 days, 25 days, 26 days, 27 days, 28 days, 29 days, 30 days, 31 days, 1 month, 2 months, 3 months, 4 months, 5 months, 6 months, 7 months, 8 months, 9 months, 10 months, 11 months, 1 year, 13 months, 14 months, 15 months, 16 months, 17 months, 18 months, 19 months, 20 months, 21 months, 22 months, 23 months, 2 years, 3 years, 4 years, 5 years, 6 years, 7 years, 8 years, 9 years, 10 years or more than 10 years. Expression may be for 1.5 hours, 1-12 hours, 1-2 days, 1-5 days, 1-2 weeks, 1-3 weeks, 1-4 weeks, 1-2 months, 1-4 months, 1-6 months, 2-6 months, 3-6 months, 3-9 months, 4-8 months, 6.12 months, 1-2 years, 1-5 years, 2-5 years, 3-6 years, 3-8 years, 4-4 years, or 5-10 years.

[0164] In some embodiments, the promoter drives expression of the polypeptides (e.g., a functional antibody) for at least 1 month, 2 months, 3 months, 4 months, 5 months, 6 months, 7 months, 8 months, 9 months, 10 months, 11 months, 1 year, 2 years, 3 years 4 years, 5 years, 6 years, 7 years, 8 years, 9 years, 10 years, 11 years, 12 years, 13 years, 14 years, 15 years, 16 years, 17 years, 18 years, 19 years, 20 years, 21 years, 22 years, 23 years, 24 years, 25 years, 26 years, 27 years, 28 years, 29 years, 30 years, 31 years, 32 years, 33 years, 34 years, 35 years, 36 years, 37 years, 38 years, 39 years, 40 years, 41 years, 42 years, 43 years, 44 years, 45 years, 46 years, 47 years, 48 years, 49 years, 50 years, 55 years, 60 years, 65 years, or more than 65 years.

[0165] Promoters may be naturally occurring or non-naturally occurring. Non-limiting examples of promoters include viral promoters, plant promoters and mammalian promoters. In some embodiments, the promoters may be human promoters. In some embodiments, the promoter may be truncated.

[0166] Promoters which drive or promote expression in most tissues include, but are not limited to, human elongation factor 1α-subunit (EF1α), cytomegalovirus (CMV) immediate-early enhancer and/or promoter, chicken β-actin (CBA) and its derivative CAG, β glucuronidase (GUSB), or ubiquitin C (UBC). Tissue-specific expression elements can be used to restrict expression to certain cell types such as, but not limited to, muscle specific promoters, B cell promoters, monocyte promoters, leukocyte promoters, macrophage promoters, pancreatic acinar cell promoters, endothelial cell promoters, lung tissue promoters, astrocyte promoters, or nervous system promoters which can be used to restrict expression to neurons, astrocytes, or oligodendrocytes.

[0167] Non-limiting examples of muscle-specific promoters include mammalian muscle creatine kinase (MCK) promoter, mammalian desmin (DES) promoter, mammalian troponin I (TNNI2) promoter, and mammalian skeletal alpha-actin (ASKA) promoter (see, e.g. U.S. Patent Publication US20110212529, the contents of which are herein incorporated by reference in their entirety)

[0168] Non-limiting examples of tissue-specific expression elements for neurons include neuron-specific enolase (NSE), platelet-derived growth factor (PDGF), platelet-derived growth factor B-chain (PDGF-β), synapsin (Syn), methyl-CpG binding protein 2 (MeCP2), Ca²⁺/calmoduin-dependent protein kinase II (CaMKII), metabotropic glutamate receptor 2 (mGluR2), neurofilament light (NFL) or heavy (NFH), β-globin minigene nβ2, preproenkephalin (PPE), enkephalin (Enk) and excitatory amino acid transporter 2 (EAAT2) promoters. Non-limiting examples of tissue-specific expression elements for astrocytes include glial fibrillary acidic protein (GFAP) and EAAT2 promoters. A non-limiting example of a tissue-specific expression element for oligodendrocytes includes the myelin basic protein (MBP) promoter.

[0169] In some embodiments, the promoter may be less than 1 kb. The promoter may have a length of 200, 210, 220, 230, 240, 250, 260, 270, 280, 290, 300, 310, 320, 330, 340, 350, 360, 370, 380, 390, 400, 410, 420, 430, 440, 450, 460, 470, 480, 490, 500, 510, 520, 530, 540, 550, 560, 570, 580, 590, 600, 610, 620, 630, 640, 650, 660, 670, 680, 690, 700, 710, 720, 730, 740, 750, 760, 770, 780, 790, 800, or more than 800 nucleotides. The promoter may have a length between 200-300, 200-400, 200-500, 200-600, 200-700, 200-800, 300.400, 300-500, 300-600, 300.700, 300-800, 400-500, 400-600, 400.700, 400.800, 500-600, 500-700, 500-800, 600.700, 600-800, or 700-800.

[0170] In some embodiments, the promoter may be a combination of two or more components of the same or different starting or parental promoters such as, but not limited to, CMV and CBA. Each component may have a length of 200, 210, 220, 230, 240, 250, 260, 270, 280, 290, 300, 310, 320, 330, 340, 350, 360, 370, 380, 381, 382, 383, 384, 385, 386, 387, 388, 389, 390, 400, 410, 420, 430, 440, 450, 460, 470, 480, 490, 500, 510, 520, 530, 540, 550, 560, 570, 580, 590, 600, 610, 620, 630, 640, 650, 660, 670, 680, 690, 700, 710, 720, 730, 740, 750, 760, 770, 780, 790, 800, or more than 800. Each component may have a length between 200.300, 200.400, 200-500, 200.600, 200-700, 200-800, 300.400, 300-500, 300-600, 300-700, 300-800, 400.500, 400.600, 400.700, 400-800, 500-600, 500-700, 500-800, 600.700, 600-800 or 700-800. In some embodiments, the promoter is a combination of a 382 nucleotide CMV-enhancer sequence and a 260 nucleotide CBA-promoter sequence.

[0171] In some embodiments, the viral genome comprises a ubiquitous promoter. Non-limiting examples of ubiquitous promoters include CMV, CBA (including derivatives CAG, CB6, CBh, etc.), EF-1α, PGK, UBC, GUSB (hGBp), and UCOE (promoter of HNRPA2B1-CBX3).

[0172] Yu et al. (Molecular Pain 2011, 7:63; the contents of which are herein incorporated by reference in their entirety) evaluated the expression of eGFP under the CAG, EFIα, PGK and UBC promoters in rat DRG cells and primary DRG cells using lentiviral vectors and found that UBC showed weaker expression than the other 3 promoters and only 10-12% glial expression was seen for all promoters. Soderblom et al. (E. Neuro 2015; the contents of which are herein incorporated by reference in its entirety) evaluated the expression of eGFP in AAV8 with CMV and UBC promoters and AAV2 with the CMV promoter after injection in the motor cortex. Intranasal administration of a plasmid containing a UBC or EFIα promoter showed a sustained airway expression greater than the expression with the CMV promoter (See e.g., Gill et al., Gene Therapy 2001, Vol. 8, 1539-1546; the contents of which are herein incorporated by reference in their entirety). Husain et al. (Gene Therapy 2009; the contents of which are herein incorporated by reference in its entirety) evaluated an HOH construct with a hGUSB promoter, an HSV-1LAT promoter and an NSE promoter and found that the HOH construct showed weaker expression than NSE in mouse brain. Passini and Wolfe (J. Virol. 2001, 12382-12392, the contents of which are herein incorporated by reference in its entirety) evaluated the long-term effects of the HOH vector following an intraventricular injection in neonatal mice and found that there was sustained expression for at least 1 year. Low expression in all brain regions was found by Xu et al. (Gene Therapy 2001, 8, 1323-1332; the contents of which are herein incorporated by reference in their entirety) when NFL and NFH promoters were used as compared to the CMV-lacZ, CMV-luc, EF, GFAP, hENK, nAChR, PPE, PPE+wpre, NSE (0.3 kb), NSE (1.8 kb) and NSE (1.8 kb+wpre). Xu et al. found that the promoter activity in descending order was NSE (1.8 kb), EF, NSE (0.3 kb), GFAP, CMV, hENK, PPE, NFL and NFH. NFL is a 650 nucleotide promoter and NFH is a 920-nucleotide promoter which are both absent in the liver but NFH is abundant in the sensory proprioceptive neurons, brain and spinal cord and NFH is present in the heart. Scn8a is a 470 nucleotide promoter which expresses throughout the DRG, spinal cord and brain with particularly high expression seen in the hippocampal neurons and cerebellar Purkinje cells, cortex, thalamus, and hypothalamus (See e.g., Drews et al. Identification of evolutionary conserved, functional noncoding elements in the promoter region of the sodium channel gene SCN8A, Mamm Genome (2007) 18:723-731; and Raymond et al. Expression of Alternatively Spliced Sodium Channel α-subunit genes, Journal of Biological Chemistry (2004) 279(44) 46234-46241; the contents of each of which are herein incorporated by reference in their entireties).

[0173] Any of promoters taught by the aforementioned Yu, Soderblom, Gill, Husain, Passini, Xu, Drews, or Raymond may be used in the present disclosures.

[0174] In some embodiments, the promoter is not cell specific.

[0175] In some embodiments, the promoter is a ubiquitin c (UBC) promoter. The UBC promoter may have a size of 300-350 nucleotides. As a non-limiting example, the UBC promoter is 332 nucleotides.

[0176] In some embodiments, the promoter is a β-glucuronidase (GUSB) promoter. The GUSB promoter may have a size of 350-400 nucleotides. As a non-limiting example, the GUSB promoter is 378 nucleotides.

[0177] In some embodiments, the promoter is a neurofilament light (NFL) promoter. The NFL promoter may have a size of 600-700 nucleotides. As a non-limiting example, the NFL promoter is 650 nucleotides.

[0178] In some embodiments, the promoter is a neurofilament heavy (NFH) promoter. The NFH promoter may have a size of 900-950 nucleotides. As a non-limiting example, the NFH promoter is 920 nucleotides.

[0179] In some embodiments, the promoter is a scn8a promoter. The scn8a promoter may have a size of 450-500 nucleotides. As a non-limiting example, the scn8a promoter is 470 nucleotides.

[0180] In some embodiments, the promoter is a phosphoglycerate kinase 1 (PGK) promoter.

[0181] In some embodiments, the promoter is a chicken β-actin (CBA) promoter, or a variant thereof.

[0182] In some embodiments, the promoter is a CB6 promoter.

[0183] In some embodiments, the promoter is a minimal CB promoter.

[0184] In some embodiments, the promoter is a cytomegalovirus (CMV) promoter.

[0185] In some embodiments, the promoter is a CAG promoter.

[0186] In some embodiments, the promoter is a GFAP promoter.

[0187] In some embodiments, the promoter is a synapsin promoter.

[0188] In some embodiments, the promoter is a liver or a skeletal muscle promoter. Non-limiting examples of liver promoters include human α-1-antitrypsin (hAAT) and thyroxine binding globulin (TBG). Non-limiting examples of skeletal muscle promoters include Desmin, MCK or synthetic C5-12.

[0189] In some embodiments, the promoter is an RNA pol III promoter. As a non-limiting example, the RNA pol III promoter is U6. As a non-limiting example, the RNA pol III promoter is H1.

[0190] In some embodiments, the viral genome comprises two promoters. As a non-limiting example, the promoters are an EF1α promoter and a CMV promoter.

[0191] In some embodiments, the viral genome comprises an enhancer element, a promoter and/or a 5′UTR intron. The enhancer element, also referred to herein as an “enhancer,” may be, but is not limited to, a CMV enhancer, the promoter may be, but is not limited to, a CMV, CBA, UBC, GUSB, NSE, Synapsin, MeCP2, and GFAP promoter and the 5′UTR/intron may be, but is not limited to, SV40, and CBA-MVM. As a non-limiting example, the enhancer, promoter and/or intron used in combination may be: (1) CMV enhancer, CMV promoter, SV40 5′UTR intron; (2) CMV enhancer, CBA promoter, SV 40 5′UTR intron; (3) CMV enhancer, CBA promoter, CBA-MVM 5′UTR intron; (4) UBC promoter; (5) GUSB promoter; (6) NSE promoter; (7) Synapsin promoter; (8) MeCP2 promoter; and (9) GFAP promoter.

[0192] In some embodiments, the viral genome comprises an engineered promoter.

[0193] In another embodiment, the viral genome comprises a promoter from a naturally expressed protein.

### Viral Genome Component: Untranslated Regions (UTRs)

[0194] By definition, wild type untranslated regions (UTRs) of a gene are transcribed but not translated. Generally, the 5′ UTR starts at the transcription start site and ends at the start codon and the 3′ UTR starts immediately following the stop codon and continues until the termination signal for transcription.

[0195] Features typically found in abundantly expressed genes of specific target organs may be engineered into UTRs to enhance the stability and protein production. As a non-limiting example, a 5′ UTR from mRNA normally expressed in the liver (e.g., albumin, serum amyloid A, Apolipoprotein A/BIE, transferrin, alpha fetoprotein, erythropoietin, or Factor VIII) may be used in the viral genomes of the AAV particles to enhance expression in hepatic cell lines or liver.

[0196] While not wishing to be bound by theory, wild-type 5′ untranslated regions (UTRs) include features which play roles in translation initiation. Kozak sequences, which are commonly known to be involved in the process by which the ribosome initiates translation of many genes, are usually included in 5′ UTRs. Kozak sequences have the consensus CCR(A/G)CCAUGG, where R is a purine (adenine or guanine) three bases upstream of the start codon (ATG), which is followed by another ‘G’.

[0197] In some embodiments, the 5′UTR in the viral genome includes a Kozak sequence.

[0198] In some embodiments, the 5′UTR in the viral genome does not include a Kozak sequence.

[0199] In some embodiments, the Kozak sequence is GAGGAGCCACC (SEQ ID NO: 13149).

[0200] In some embodiments, the Kozak sequence is GCCGCCACCATG (SEQ ID NO: 13563)

[0201] While not wishing to be bound by theory, wild-type 3′UTRs are known to have stretches of Adenosines and Uridines embedded therein. These AU rich signatures are particularly prevalent in genes with high rates of turnover. Based on their sequence features and functional properties, the AU rich elements (AREs) can be separated into three classes (Chen et al, 1995, the contents of which are herein incorporated by reference in its entirety): Class I AREs, such as, but not limited to, c-Myc and MyoD, contain several dispersed copies of an AUUUA motif within U-rich regions. Class II AREs, such as, but not limited to, GM-CSF and TNF-α, possess two or more overlapping UUAUUUA(U/A)(U/A) nonamers. Class III ARES, such as, but not limited to, c-Jun and Myogenin, are less well defined. These U rich regions do not contain an AUUUA motif. Most proteins binding to the AREs are known to destabilize the messenger, whereas members of the ELAV family, most notably HuR, have been documented to increase the stability of mRNA. HuR binds to AREs of all the three classes. Engineering the HuR specific binding sites into the 3′UTR of nucleic acid molecules will lead to HuR binding and thus, stabilization of the message in vivo.

[0202] Introduction, removal or modification of 3′ UTR AU rich elements (AREs) can be used to modulate the stability of polynucleotides. When engineering specific polynucleotides, e.g., payload regions of viral genomes, one or more copies of an ARE can be introduced to make polynucleotides less stable and thereby curtail translation and decrease production of the resultant protein. Likewise, AREs can be identified and removed or mutated to increase the intracellular stability and thus increase translation and production of the resultant protein.

[0203] In some embodiments, the 3′UTR of the viral genome may include an oligo(dT) sequence for templated addition of a poly-A tail.

[0204] In some embodiments, the viral genome may include at least one miRNA seed, binding site or full sequence. microRNAs (or miRNA or miR) are 19-25 nucleotide noncoding RNAs that bind to the sites of nucleic acid targets and down-regulate gene expression either by reducing nucleic acid molecule stability or by inhibiting translation. A microRNA sequence comprises a “seed” region, i.e., a sequence in the region of positions 2-8 of the mature microRNA, which sequence has perfect Watson-Crick complementarity to the miRNA target sequence of the nucleic acid.

[0205] In some embodiments, the viral genome may be engineered to include, alter or remove at least one miRNA binding site, sequence, or seed region.

[0206] Any UTR from any gene known in the art may be incorporated into the viral genome of the AAV particle. These UTRs, or portions thereof, may be placed in the same orientation as in the gene from which they were selected, or they may be altered in orientation or location. In some embodiments, the UTR used in the viral genome of the AAV particle may be inverted, shortened, lengthened, made with one or more other 5′UTRs or 3′UTRs known in the art. As used herein, the term “altered” as it relates to a UTR, means that the UTR has been changed in some way in relation to a reference sequence. For example, a 3′ or 5′ UTR may be altered relative to a wild type or native UTR by the change in orientation or location as taught above or may be altered by the inclusion of additional nucleotides, deletion of nucleotides, swapping or transposition of nucleotides.

[0207] In some embodiments, the viral genome of the AAV particle comprises at least one artificial UTRs which is not a variant of a wild type UTR.

[0208] In some embodiments, the viral genome of the AAV particle comprises UTRs which have been selected from a family of transcripts whose proteins share a common function, structure, feature or property.

### Viral Genome Component: Polyadenylation Sequence

[0209] In some embodiments, the viral genome of the AAV particles of the present disclosure comprise at least one polyadenylation sequence. The viral genome of the AAV particle may comprise a polyadenylation sequence between the 3′ end of the payload coding sequence and the 5′ end of the 3′ITR.

[0210] In some embodiments, the polyadenylation sequence or “polyA sequence” may range from absent to about 500 nucleotides in length. The polyadenylation sequence may be, but is not limited to, 1, 2, 3, 4, 5, 6, 7, 8, 9, 10, 11, 12, 13, 14, 15, 16, 17, 18, 19, 20, 21, 22, 23, 24, 25, 26, 27, 28, 29, 30, 31, 32, 33, 34, 35, 36, 37, 38, 39, 40, 41, 42, 43, 44, 45, 46, 47, 48, 49, 50, 51, 52, 53, 54, 55, 56, 57, 58, 59, 60, 61, 62, 63, 64, 65, 66, 67, 68, 69, 70, 71, 72, 73, 74, 75, 76, 77, 78, 79, 80, 81, 82, 83, 84, 85, 86, 87, 88, 89, 90, 91, 92, 93, 94, 95, 96, 97, 98, 99, 100, 101, 102, 103, 104, 105, 106, 107, 108, 109, 110, 111, 112, 113, 114, 115, 116, 117, 118, 119, 120, 121, 122, 123, 124, 125, 126, 127, 128, 129, 130, 131, 132, 133, 134, 135, 136, 137, 138, 139, 140, 141, 142, 143, 144, 145, 146, 147, 148, 149, 150, 151, 152, 153, 154, 155, 156, 157, 158, 159, 160, 161, 162, 163, 164, 165, 166, 167, 168, 169, 170, 171, 172, 173, 174, 175, 176, 177, 178, 179, 180, 181, 182, 183, 184, 185, 186, 187, 188, 189, 190, 191, 192, 193, 194, 195, 196, 197, 198, 199, 200, 201, 202, 203, 204, 205, 206, 207, 208, 209, 210, 211, 212, 213, 214, 215, 216, 217, 218, 219, 220, 221, 222, 223, 224, 225, 226, 227, 228, 229, 230, 231, 232, 233, 234, 235, 236, 237, 238, 239, 240, 241, 242, 243, 244, 245, 246, 247, 248, 249, 250, 251, 252, 253, 254, 255, 256, 257, 258, 259, 260, 261, 262, 263, 264, 265, 266, 267, 268, 269, 270, 271, 272, 273, 274, 275, 276, 277, 278, 279, 280, 281, 282, 283, 284, 285, 286, 287, 288, 289, 290, 291, 292, 293, 294, 295, 296, 297, 298, 299, 300, 301, 302, 303, 304, 305, 306, 307, 308, 309, 310, 311, 312, 313, 314, 315, 316, 317, 318, 319, 320, 321, 322, 323, 324, 325, 326, 327, 328, 329, 330, 331, 332, 333, 334, 335, 336, 337, 338, 339, 340, 341, 342, 343, 344, 345, 346, 347, 348, 349, 350, 351, 352, 353, 354, 355, 356, 357, 358, 359, 360, 361, 362, 363, 364, 365, 366, 367, 368, 369, 370, 371, 372, 373, 374, 375, 376, 377, 378, 379, 380, 381, 382, 383, 384, 385, 386, 387, 388, 389, 390, 391, 392, 393, 394, 395, 396, 397, 398, 399, 400, 401, 402, 403, 404, 405, 406, 407, 408, 409, 410, 411, 412, 413, 414, 415, 416, 417, 418, 419, 420, 421, 422, 423, 424, 425, 426, 427, 428, 429, 430, 431, 432, 433, 434, 435, 436, 437, 438, 439, 440, 441, 442, 443, 444, 445, 446, 447, 448, 449, 450, 451, 452, 453, 454, 455, 456, 457, 458, 459, 460, 461, 462, 463, 464, 465, 466, 467, 468, 469, 470, 471, 472, 473, 474, 475, 476, 477, 478, 479, 480, 481, 482, 483, 484, 485, 486, 487, 488, 489, 490, 491, 492, 493, 494, 495, 496, 497, 498, 499, 500, 501, 502, 503, 504, 505, 506, 507, 508, 509, 510, 511, 512, 513, 514, 515, 516, 517, 518, 519, 520, 521, 522, 523, 524, 525, 526, 527, 528, 529, 530, 531, 532, 533, 534, 535, 536, 537, 538, 539, 540, 541, 542, 543, 544, 545, 546, 547, 548, 549, 550, 551, 552, 553, 554, 555, 556, 557, 558, 559, 560, 561, 562, 563, 564, 565, 566, 567, 568, 569, 570, 571, 572, 573, 574, 575, 576, 577, 578, 579, 580, 581, 582, 583, 584, 585, 586, 587, 588, 589, 590, 591, 592, 593, 594, 595, 596, 597, 598, 599, and 600 nucleotides in length.

[0211] In some embodiments, the polyadenylation sequence is 50-100 nucleotides in length.

[0212] In some embodiments, the polyadenylation sequence is 50-150 nucleotides in length.

[0213] In some embodiments, the polyadenylation sequence is 50-160 nucleotides in length.

[0214] In some embodiments, the polyadenylation sequence is 50-200 nucleotides in length.

[0215] In some embodiments, the polyadenylation sequence is 60-100 nucleotides in length.

[0216] In some embodiments, the polyadenylation sequence is 60-150 nucleotides in length.

[0217] In some embodiments, the polyadenylation sequence is 60-160 nucleotides in length.

[0218] In some embodiments, the polyadenylation sequence is 60-200 nucleotides in length.

[0219] In some embodiments, the polyadenylation sequence is 70-100 nucleotides in length.

[0220] In some embodiments, the polyadenylation sequence is 70-150 nucleotides in length.

[0221] In some embodiments, the polyadenylation sequence is 70-160 nucleotides in length.

[0222] In some embodiments, the polyadenylation sequence is 70-200 nucleotides in length.

[0223] In some embodiments, the polyadenylation sequence is 80-100 nucleotides in length.

[0224] In some embodiments, the polyadenylation sequence is 80-150 nucleotides in length.

[0225] In some embodiments, the polyadenylation sequence is 80-160 nucleotides in length.

[0226] In some embodiments, the polyadenylation sequence is 80-200 nucleotides in length.

[0227] In some embodiments, the polyadenylation sequence is 90-100 nucleotides in length.

[0228] In some embodiments, the polyadenylation sequence is 90-150 nucleotides in length.

[0229] In some embodiments, the polyadenylation sequence is 90.160 nucleotides in length.

[0230] In some embodiments, the polyadenylation sequence is 90.200 nucleotides in length.

[0231] In some embodiments, the polyadenylation sequence is 127 nucleotides in length.

[0232] In some embodiments, the polyadenylation sequence is 477 nucleotides in length.

[0233] In some embodiments, the polyadenylation sequence is 552 nucleotides in length.

### Viral Genome Component: Linkers

[0234] Viral genomes may be engineered with one or more spacer or linker regions to separate coding or non-coding regions.

[0235] In some embodiments, the payload region of the AAV particle may optionally encode one or more linker sequences. In some cases, the linker may be a peptide linker that may be used to connect the polypeptides encoded by the payload region (i.e., light and heavy antibody chains during expression). Some peptide linkers may be cleaved after expression to separate heavy and light chain domains, allowing assembly of mature antibodies or antibody fragments. Linker cleavage may be enzymatic. In some cases, linkers comprise an enzymatic cleavage site to facilitate intracellular or extracellular cleavage. Some payload regions encode linkers that interrupt polypeptide synthesis during translation of the linker sequence from an mRNA transcript. Such linkers may facilitate the translation of separate protein domains (e.g., heavy and light chain antibody domains) from a single transcript. In some cases, two or more linkers are encoded by a payload region of the viral genome. Non-limiting examples of linkers that may be encoded by the payload region of an AAV particle viral genome are given in Table 2.

TABLE 2
Linkers

| | | | SEQ |
|---|---|---|---|
| Linker ID | Description | Length | ID NO |
| Linker1 | Furin | 12 | 1724 |
| Linker2 | Furin | 12 | 1725 |
| Linker3 | T2A | 54 | 1726 |
| Linker4 | F2A | 75 | 1727 |
| Linker5 | P2A | 66 | 1728 |
| Linker6 | SG4S (SEQ ID NO: 13142) | 18 | 1729 |
| Linker7 | (G4S)3 (SEQ ID NO: 13143) | 45 | 1730 |
| Linker8 | (G4S)5 (SEQ ID NO: 13144) | 75 | 1731 |
| Linker9 | IRES | 609 | 1732 |
| Linker10 | IRES-2 | 623 | 1733 |
| Linker11 | hIgG2 hinge | 54 | 1734 |
| Linker12 | hIgG3 hinge | 108 | 1735 |
| Linker13 | hIgG3-2 hinge | 153 | 1736 |
| Linker14 | hIgG3-3 hinge | 198 | 1737 |
| Linker15 | msiGG-1 hinge | 45 | 1738 |
| Linker16 | msiGG1 hinge | 18 | 1739 |
| Linker17 | HigG3 hinge | 198 | 2244 |
| Linker18 | G4S (SEQ ID NO: 13141) | 15 | 2245 |
| Linker19 | (G4S)2 (SEQ ID NO: 13145) | 30 | 2246 |
| Linker20 | (G4S)3 (SEQ ID NO: 13143) | 45 | 2247 |
| Linker21 | (G4S)4 (SEQ ID NO: 13146) | 60 | 2248 |
| Linker22 | (G4S)5 (SEQ ID NO: 13144) | 75 | 2249 |
| Linker23 | (G4S)5 (SEQ ID NO: 13144) | 75 | 2250 |
| Linker24 | (G4S)6 (SEQ ID NO: 13147) | 90 | 2251 |
| Linker25 | (G4S)8 (SEQ ID NO: 13148) | 120 | 2252 |
| Linker26 | (G4S)8 (SEQ ID NO: 13148) | 120 | 2253 |
| Linker27 | (G4S)4 (SEQ ID NO: 13146) | 60 | 2254 |
| Linker28 | (G4S)6 (SEQ ID NO: 13147) | 90 | 2259 |

[0236] Some payload regions encode linkers comprising furin cleavage sites. Furin is a calcium dependent serine endoprotease that cleaves proteins just downstream of a basic amino acid target sequence (Arg-X-(Arg/Lys)-Arg) (Thomas, G., 2002. Nature Reviews Molecular Cell Biology 3(10): 753-66; the contents of which are herein incorporated by reference in its entirety). Furin is enriched in the trans-golgi network where it is involved in processing cellular precursor proteins. Furin also plays a role in activating a number of pathogens. This activity can be taken advantage of for expression of polypeptides.

[0237] 2A peptides are small “self-cleaving” peptides (18-22 amino acids) derived from viruses such as foot-and-mouth disease virus (F2A), porcine teschovirus-1 (P2A), Thoseaasigna virus (T2A), or equine rhinitis A virus (E2A). The 2A designation refers specifically to a region of picornavirus polyproteins that lead to a ribosomal skip at the glycyl-prolyl bond in the C-terminus of the 2A peptide (Kim, J. H. et al., 2011. PLoS One 6(4): e18556; the contents of which are herein incorporated by reference in its entirety). This skip results in a cleavage between the 2A peptide and its immediate downstream peptide. As opposed to IRES linkers, 2A peptides generate stoichiometric expression of proteins flanking the 2A peptide and their shorter length can be advantageous in generating viral expression vectors.

[0238] Internal ribosomal entry site (IRES) is a nucleotide sequence (>500 nucleotides) that allows for initiation of translation in the middle of an mRNA sequence (Kim, J. H. et al., 2011. PLoS One 6(4): e18556; the contents of which are herein incorporated by reference in its entirety). Use of an IRES sequence ensures co-expression of genes before and after the IRES, though the sequence following the IRES may be transcribed and translated at lower levels than the sequence preceding the IRES sequence.

[0239] In some embodiments, the payload region may encode one or more linkers comprising cathepsin, matrix metalloproteinases or legumain cleavage sites. Such linkers are described e.g. by Cizeau and Macdonald in International Publication No. WO2008052322, the contents of which are herein incorporated in their entirety. Cathepsins are a family of proteases with unique mechanisms to cleave specific proteins. Cathepsin B is a cysteine protease and cathepsin D is an aspartyl protease. Matrix metalloproteinases are a family of calcium-dependent and zinc-containing endopeptidases. Legumain is an enzyme catalyzing the hydrolysis of (-Asn-Xaa-) bonds of proteins and small molecule substrates.

[0240] In some embodiments, payload regions may encode linkers that are not cleaved. Such linkers may include a simple amino acid sequence, such as a glycine rich sequence. In some cases, linkers may comprise flexible peptide linkers comprising glycine and serine residues. The linker may comprise flexible peptide linkers of different lengths, e.g. nxG4S, where n=1-10 (SEQ ID NO: 13150), and the length of the encoded linker varies between 5 and 50 amino acids. In a non-limiting example, the linker may be 5xG4S (SEQ ID NO: 13144). These flexible linkers are small and without side chains so they tend not to influence secondary protein structure while providing a flexible linker between antibody segments (George, R A, et al., 2002. Protein Engineering 15(11): 871-9; Huston, J. S. et al, 1988. PNAS 85:5879-83; and Shan, D. et al., 1999. Journal of Immunology. 162(11):6589-95; the contents of each of which are herein incorporated by reference in their entirety). Furthermore, the polarity of the serine residues improves solubility and prevents aggregation problems.

[0241] In some embodiments, payload regions may encode small and unbranched serine-rich peptide linkers, such as those described by Huston et al. In U.S. Pat. No. 5,525,491, the contents of which are herein incorporated in their entirety. Polypeptides encoded by the payload region, linked by serine-rich linkers, have increased solubility.

[0242] In some embodiments, payload regions may encode artificial linkers, such as those described by Whitlow and Filpula in U.S. Pat. No. 5,856,456 and Ladner et al. in U.S. Pat. No. 4,946,778, the contents of each of which are herein incorporated by their entirety.

[0243] In some embodiments, the payload region encodes at least one G4S3 linker (“G43” disclosed as SEQ ID NO: 13143).

[0244] In some embodiments, the payload region encodes at least one G4S linker (“G4S” disclosed as SEQ ID NO: 13141).

[0245] In some embodiments, the payload region encodes at least one furin site.

[0246] In some embodiments, the payload region encodes at least one T2A linker.

[0247] In some embodiments, the payload region encodes at least one F2A linker.

[0248] In some embodiments, the payload region encodes at least one P2A linker.

[0249] In some embodiments, the payload region encodes at least one IRES sequence.

[0250] In some embodiments, the payload region encodes at least one G4S5 linker (“G4S5” disclosed as SEQ ID NO: 13144).

[0251] In some embodiments, the payload region encodes at least one furin and one 2A linker. As non-limiting examples, the payload region may comprise furin and T2A linkers or furin and F2A linkers.

[0252] In some embodiments, the payload region encodes at least one hinge region. As a non-limiting example, the hinge is an IgG hinge.

[0253] In some embodiments, the linker region may be 1.50, 1-100, 50-100, 50-150, 100-150, 100-200, 150-200, 150-250, 200-250, 200-300, 250-300, 250-350, 300-350, 300-400, 350-400, 350-450, 400-450, 400-500, 450-500, 450-550, 500-550, 500-600, 550-600, 550-650, or 600-650 nucleotides in length. The linker region may have a length of 1, 2, 3, 4, 5, 6, 7, 8, 9, 10, 11, 12, 13, 14, 15, 16, 17, 18, 19, 20, 21, 22, 23, 24, 25, 26, 27, 28, 29, 30, 31, 32, 33, 34, 35, 36, 37, 38, 39, 40, 41, 42, 43, 44, 45, 46, 47, 48, 49, 50, 51, 52, 53, 54, 55, 56, 57, 58, 59, 60, 61, 62, 63, 64, 65, 66, 67, 68, 69, 70, 71, 72, 73, 74, 75, 76, 77, 78, 79, 80, 81, 82, 83, 84, 85, 86, 87, 88, 89, 90, 91, 92, 93, 94, 95, 96, 97, 98, 99, 100, 101, 102, 103, 104, 105, 106, 107, 108, 109, 110, 115, 120, 125, 130, 135, 140, 145, 150, 151, 152, 153, 154, 155, 156, 157, 158, 159, 160, 165, 170, 171, 172, 173, 174, 175, 176, 177, 178, 179, 180, 185, 190, 191, 192, 193, 194, 195, 196, 197, 198,199, 200, 210, 220, 230, 240, 250, 260, 270, 280, 290, 300, 310, 320, 330, 340, 350, 360, 370, 380, 390, 400, 410, 420, 430, 440, 450, 460, 470, 480, 490, 500, 510, 520, 530, 540, 550, 560, 570, 580, 590, 600, 601, 602, 603, 604, 605, 606, 607, 608, 609, 610, 611, 612, 613, 614, 615, 616, 617, 618, 619, 620, 621, 622, 623, 624, 625, 626, 627, 628, 629, 630, 631, 632, 633, 634, 635, 640, 650 or greater than 650. In some embodiments, the linker region may be 12 nucleotides in length. In some embodiments, the linker region may be 15 nucleotides in length. In some embodiments, the linker region may be 18 nucleotides in length. In some embodiments, the linker region may be 30 nucleotides in length. In some embodiments, the linker region may be 45 nucleotides in length. In some embodiments, the linker region may be 54 nucleotides in length. In some embodiments, the linker region may be 60 nucleotides in length. In some embodiments, the linker region may be 66 nucleotides in length. In some embodiments, the linker region may be 75 nucleotides in length. In some embodiments, the linker region may be 78 nucleotides in length. In some embodiments, the linker region may be 87 nucleotides in length. In some embodiments, the linker region may be 108 nucleotides in length. In some embodiments, the linker region may be 120 nucleotides in length. In some embodiments, the linker region may be 153 nucleotides in length. In some embodiments, the linker region may be 198 nucleotides in length. In some embodiments, the linker region may be 609 nucleotides in length. In some embodiments, the linker region may be 623 nucleotides in length.

### Viral Genome Component: Introns

[0254] In some embodiments, the payload region comprises at least one element to enhance the expression such as one or more introns or portions thereof. Non-limiting examples of introns include, MVM (67.97 bps), FIX truncated intron 1 (300 bps), β-globin SD/immunoglobulin heavy chain splice acceptor (250 bps), adenovirus splice donor/immunoglobin splice acceptor (500 bps), SV40 late splice donor/splice acceptor (19S/16S) (180 bps) and hybrid adenovirus splice donor/IgG splice acceptor (230 bps).

[0255] In some embodiments, the intron or intron portion may be 1-100, 100-500, 500-1000, or 1000-1500 nucleotides in length. The intron may have a length of 10, 15, 20, 30, 40, 50, 60, 70, 80, 90, 100, 110, 120, 130, 140, 150, 160, 170, 171, 172, 173, 174, 175, 176, 177, 178, 179, 180, 190,200, 210, 220, 230, 240, 250, 260, 270, 280, 290, 300, 310, 320, 330, 340, 350, 360, 370, 380, 390, 400, 410, 420, 430, 440, 450, 460, 470, 480, 490, 500, or greater than 500. The intron may have a length between 80-100, 80-120, 80-140, 80-160, 80-180, 80-200, 80-250, 80-300, 80-350, 80-400, 80-450, 80-500, 200-300, 200-400, 200-500, 300-400, 300-500, or 400-500. In some embodiments, the intron may be 15 nucleotides in length. In some embodiments, the intron may be 32 nucleotides in length. In some embodiments, the intron may be 41 nucleotides in length. In some embodiments, the intron may be 53 nucleotides in length. In some embodiments, the intron may be 54 nucleotides in length. In some embodiments, the intron may be 59 nucleotides in length. In some embodiments, the intron may be 73 nucleotides in length. In some embodiments, the intron may be 102 nucleotides in length. In some embodiments, the intron may be 134 nucleotides in length. In some embodiments, the intron may be 168 nucleotides in length. In some embodiments, the intron may be 172 nucleotides in length. In some embodiments, the intron may be 292 nucleotides in length. In some embodiments, the intron may be 347 nucleotides in length. In some embodiments, the intron may be 387 nucleotides in length. In some embodiments, the intron may be 491 nucleotides in length. In some embodiments, the intron may be 566 nucleotides in length. In some embodiments, the intron may be 1074 nucleotides in length.

[0256] Any, or all components of a viral genome may be modified or optimized to improve expression or targeting of the payload. Such components include, but are not limited to, intron, signal peptide sequences, antibody heavy chain and/or light chain 5 to 3′ order, antibody heavy chain and/or light chain codons, linkers, cleavage sites, polyadenylation sequences, stuffer sequences, other regulatory sequences, and/or the backbone of the ITR to ITR sequence.

### Payloads

[0257] The AAV particles of the present disclosure comprise at least one payload region. As used herein, “payload” or “payload region” refers to one or more polynucleotides or polynucleotide regions encoded by or within a viral genome or an expression product of such polynucleotide or polynucleotide region, e.g., a transgene, a polynucleotide encoding a polypeptide or multi-polypeptide or a modulatory nucleic acid or regulatory nucleic acid. Payloads of the present disclosure typically encode polypeptides (e.g., antibodies or antibody-based compositions) or fragments or variants thereof.

[0258] The payload region may be constructed in such a way as to reflect a region similar to or mirroring the natural organization of an mRNA.

[0259] The payload region may comprise a combination of coding and non-coding nucleic acid sequences.

[0260] In some embodiments, the AAV payload region may encode a coding or non-coding RNA.

[0261] In some embodiments, the AAV particle comprises a viral genome with a payload region comprising nucleic acid sequences encoding more than one polypeptide of interest (e.g., an antibody). In such an embodiment, a viral genome encoding more than one polypeptide may be replicated and packaged into a viral particle. A target cell transduced with a viral particle comprising more than one polypeptide may express each of the polypeptides in a single cell.

[0262] In some embodiments, an AAV particle comprises a viral genome with a payload region comprising a nucleic acid sequence encoding a heavy chain and alight chain of an antibody, or fragments thereof. The heavy chain and light chain are expressed and assembled to form the antibody which is secreted.

[0263] In some embodiments, the payload region may comprise at least one inverted terminal repeat (ITR), a promoter region, an intron region, and a coding region. In some embodiments, the coding region comprises a heavy chain region and/or a light chain region of an antibody, or a fragment thereof, and any two components may be separated by a linker region.

[0264] In some embodiments, the coding region may comprise a payload region with a heavy chain and light chain sequence separated by a linker and/or a cleavage site. In some embodiments, the heavy and light chain sequence is separated by an IRES sequence. In some embodiments, the heavy and light chain sequence is separated by a foot and mouth virus sequence. In some embodiments, the heavy and light chain sequence is separated by a foot and mouth virus sequence and a furin cleavage site. In some embodiments, the heavy and light chain sequence is separated by a porcine teschovirus-1 virus sequence. In some embodiments, the heavy and light chain sequence is separated by a porcine teschovirus-1 virus and a furin cleavage site. In some embodiments, the heavy and light chain sequence is separated by a 5xG4S sequence (“5xG4S” disclosed as SEQ ID NO: 13144).

[0265] Where the AAV particle payload region encodes a polypeptide, the polypeptide may be a peptide or protein. A protein encoded by the AAV particle payload region may comprise an antibody, an antibody related composition, a secreted protein, an intracellular protein, an extracellular protein, and/or a membrane protein. The encoded proteins may be structural or functional. In addition to the antibodies or antibody-based composition, proteins encoded by the payload region may include, in combination, certain mammalian proteins involved in immune system regulation. The V viral genomes encoding polypeptides described herein may be useful in the fields of human disease, viruses, infections, veterinary applications and a variety of in vivo and in vitro settings.

[0266] In some embodiments, the AAV particles are useful in the field of medicine for the treatment, prophylaxis, palliation, or amelioration of neurological diseases and/or disorders.

[0267] In some embodiments, the AAV particle payload region may one or more include therapeutic modalities related to gene silencing or interference such as but not limited to, miRNA, siRNA, RNAi, shRNA, and/or pri-miRNA.

### Antibodies and Antibody-Based Compositions

[0268] Payload regions of the AAV particles may encode polypeptides that form one or more functional antibodies or antibody-based compositions. As used herein, the term “antibody” is referred to in the broadest sense and specifically covers various embodiments including, but not limited to monoclonal antibodies, polyclonal antibodies, multispecific antibodies (e.g. bispecific antibodies formed from at least two intact antibodies), and antibody fragments (e.g., diabodies) so long as they exhibit a desired biological activity (e.g., “functional”). Antibodies are primarily amino-acid based molecules but may also comprise one or more modifications (including, but not limited to the addition of sugar moieties, fluorescent moieties, chemical tags, etc.).

[0269] As used herein, “antibody-based” or “antibody-derived” compositions are monomeric or multi-meric polypeptides which comprise at least one amino-acid region derived from a known or parental antibody sequence and at least one amino acid region derived from a non-antibody sequence, e.g., mammalian protein.

[0270] Payload regions may encode polypeptides that form or function as any antibody, including antibodies that are known in the art and/or antibodies that are commercially available. The encoded antibodies may be therapeutic, diagnostic, or for research purposes. Further, polypeptides may include fragments of such antibodies or antibodies that have been developed to comprise one or more of such fragments (e.g., variable domains or complementarity determining regions (CDRs)).

[0271] In some embodiments, the viral genome of the AAV particles may comprise nucleic acids which have been engineered to enable expression of antibodies, antibody fragments, or components of any of those described in U.S. Pat. No. 7,041,807 related to YYX epitope; US20090175884, US20110305630, US20130330275 related to misfolded proteins in cancer; US20040175775 related to PrP in eye fluid; US20030114360 related to copolymers and methods of treating prion-related diseases; WO2009121176 related to insulin-induced gene peptide compositions; US20030022243, WO2003000853 related to protein aggregation assays; WO200078344 related to prion protein peptides and uses thereof. Each of these publications are incorporated by reference in their entireties.

[0272] In some embodiments, the viral genome of the AAV particles may comprise an Fc sequence which has been swapped with the Fc sequence of the reference antibody sequence, wherein the Fc swap may mediate direct cell killing.

### Antibody Generation

[0273] In some embodiments, viral genomes of the AAV particles may encode antibodies or antibody-based compositions produced using methods known in the art. Such methods may include, but are not limited to, immunization and display technologies (e.g., phage display, yeast display, and ribosomal display). Antibodies may be developed, for example, using any naturally occurring or synthetic antigen. As used herein, an “antigen” is an entity which induces or evokes an immune response in an organism. An immune response is characterized by the reaction of the cells, tissues and/or organs of an organism to the presence of a foreign entity. Such an immune response typically leads to the production by the organism of one or more antibodies against the foreign entity, e.g., antigen or a portion of the antigen. As used herein, “antigens” also refer to binding partners for specific antibodies or binding agents in a display library.

[0274] In some embodiments, the sequences of the polypeptides to be encoded in the viral genomes may be derived from antibodies produced using hybridoma technology. Host animals (e.g. mice, rabbits, goats, and llamas) may be immunized by an injection with an antigenic protein to elicit lymphocytes that specifically bind to the antigen. Lymphocytes may be collected and fused with immortalized cell lines to generate hybridomas which can be cultured in a suitable culture medium to promote growth. The antibodies produced by the cultured hybridomas may be subjected to analysis to determine binding specificity of the antibodies for the target antigen. Once antibodies with desirable characteristics are identified, corresponding hybridomas may be subcloned through limiting dilution procedures and grown by standard methods. The antibodies produced by these cells may be isolated and purified using standard immunoglobulin purification procedures.

[0275] In some embodiments, the sequences of the polypeptides to be encoded in the viral genomes may be produced using heavy and light chain variable region cDNA sequences selected from hybridomas or from other sources. Sequences encoding antibody variable domains expressed by hybridomas may be determined by extracting RNA molecules from antibody-producing hybridoma cells and producing cDNA by reverse transcriptase polymerase chain reaction (PCR). PCR may be used to amplify cDNA using primers specific for heavy and light chain sequences. PCR products may then be subcloned into plasmids for sequence analysis. Antibodies may be produced by insertion of resulting variable domain sequences into expression vectors.

[0276] In some embodiments, the sequences of the polypeptides to be encoded in the viral genomes may be generated using display technologies. Display technologies used to generate polypeptides may include any of the display techniques (e.g. display library screening techniques) disclosed in International Patent Application No. WO2014074532, the contents of which are herein incorporated by reference in their entirety. In some embodiments, synthetic antibodies may be designed, selected, or optimized by screening target antigens using display technologies (e.g. phage display technologies). Phage display libraries may comprise millions to billions of phage particles, each expressing unique antibody fragments on their viral coats. Such libraries may provide richly diverse resources that may be used to select potentially hundreds of antibody fragments with diverse levels of affinity for one or more antigens of interest (McCafferty, et al., 1990. Nature. 348:552-4; Edwards, B. M. et al., 2003. JMB. 334: 103-18; Schofield, D. et al., 2007. Genome Biol. 8, R254 and Pershad, K. et al., 2010. Protein Engineering Design and Selection. 23:279-88; the contents of each of which are herein incorporated by reference in their entirety). Often, the antibody fragments present in such libraries comprise scFv antibody fragments, comprising a fusion protein of V_{H} and V_{L} antibody domains joined by a flexible linker. In some cases, scFvs may contain the same sequence with the exception of unique sequences encoding variable loops of the CDRs. In some cases, scFvs are expressed as fusion proteins, linked to viral coat proteins (e.g. the N-terminus of the viral pill coat protein). V_{L} chains may be expressed separately for assembly with V_{H} chains in the periplasm prior to complex incorporation into viral coats. Precipitated library members may be sequenced from the bound phage to obtain cDNA encoding desired scFvs. Antibody variable domains or CDRs from such sequences may be directly incorporated into antibody sequences for recombinant antibody production or mutated and utilized for further optimization through in vitro affinity maturation.

[0277] In some embodiments, the sequences of the polypeptides to be encoded in the viral genomes may be produced using yeast surface display technology, wherein antibody variable domain sequences may be expressed on the cell surface of Saccharomyces cerevisiae. Recombinant antibodies may be developed by displaying the antibody fragment of interest as a fusion to e.g. Aga2p protein on the surface of the yeast, where the protein interacts with proteins and small molecules in a solution. scFvs with affinity toward desired receptors may be isolated from the yeast surface using magnetic separation and flow cytometry. Several cycles of yeast surface display and isolation may be done to attain scFvs with desired properties through directed evolution.

[0278] In some embodiments, the sequence of the polypeptides to be encoded in the viral genomes (e.g., antibodies) may be designed by VERSITOPE™ Antibody Generation and other methods used by BIOATLA® and described in United States Patent Publication No. US20130281303, the contents of which are herein incorporated by reference in their entirety. In brief, recombinant monoclonal antibodies are derived from B-cells of a host immuno-challenged with one or more target antigens. These methods of antibody generation do not rely on immortalized cell lines, such as hybridoma, thereby avoiding some of the associated challenges i.e., genetic instability and low production capacity, producing high affinity and high diversity recombinant monoclonal antibodies. In some embodiments, the method is a natural diversity approach. In another embodiment, the method is a high diversity approach.

[0279] In some embodiments, the sequences of the polypeptides to be encoded in the viral genomes may be generated using the BIOATLA® natural diversity approach. In the natural diversity approach of generating recombinant monoclonal antibodies described in United States Patent Publication No. US20130281303, the original pairings of variable heavy (V_{H}) and variable light (V_{L}) domains are retained from the host, yielding recombinant monoclonal antibodies that are naturally paired. These may be advantageous due to a higher likelihood of functionality as compared to non-natural pairings of V_{H} and V_{L}. To produce the recombinant monoclonal antibodies, first a non-human host (i.e., rabbit, mouse, hamster, guinea pig, camel or goat) is immuno-challenged with an antigen of interest. In some embodiments, the host may be a previously challenged human patient. In other embodiments, the host may not have been immuno-challenged. B-cells are harvested from the host and screened by fluorescence activated cell sorting (FACS), or other method, to create a library of B-cells enriched in B-cells capable of binding the target antigen. The cDNA obtained from the mRNA of a single B-cell is then amplified to generate an immunoglobulin library of V_{H} and V_{L} domains. This library of immunoglobulins is then cloned into expression vectors capable of expressing the V_{H} and V_{L} domains, wherein the V_{H} and V_{L} domains remain naturally paired. The library of expression vectors is then used in an expression system to express the V_{H} and V_{L} domains in order to create an antibody library. Screening of the antibody library yields antibodies able to bind the target antigen, and these antibodies can be further characterized. Characterization may include one or more of the following: isoelectric point, thermal stability, sedimentation rate, folding rate, neutralization or antigen activity, antagonist or agonistic activity, expression level, specific and non-specific binding, inhibition of enzymatic activity, rigidity/flexibility, shape, charge, stability across pH, in solvents, under UV radiation, in mechanical stress conditions, or in sonic conditions, half-life, and glycosylation.

[0280] In some embodiments, the sequences of the polypeptides to be encoded in the viral genomes may be generated using the BIOATLA® high diversity approach. In the high diversity approach of generating recombinant monoclonal antibodies described in United States Patent Publication No. US20130281303, additional pairings of variable heavy (V_{H}) and variable light (V_{L}) domains are attained. To produce the recombinant monoclonal antibodies, B-cells harvested from the host are screened by fluorescence activated cell sorting (FACS), panning, or other method, to create a library of B-cells enriched in B-cells capable of binding the target antigen. The cDNA obtained from the mRNA of the pooled B-cells is then amplified to generate an immunoglobulin library of V_{H} and V_{L} domains. This library of immunoglobulins is then used in a biological display system (mammalian, yeast or bacterial cell surface display systems) to generate a population of cells displaying antibodies, fragments or derivatives comprising the V_{H} and V_{L} domains wherein, the antibodies, fragments or derivatives comprise V_{H} and V_{L} domain combinations that were not present in the B-cells in vivo. Screening of the cell population by FACS, with the target antigen, yields a subset of cells capable of binding the target antigen and the antibodies displayed on these cells can be further characterized. In an alternate embodiment of the high diversity approach, the immunoglobulin library comprises only V_{H} domains obtained from the B-cells of the immuno-challenged host, while the V_{L} domain(s) are obtained from another source.

[0281] In some embodiments, the sequences of the polypeptides to be encoded in the viral genomes may be evolved using BIOATLA® comprehensive approaches. The methods of generating recombinant monoclonal antibodies as described in United States Patent Publication No. US20130281303, further comprises evolving the recombinant antibody by comprehensive positional evolution (CPE™), CPE™ followed by comprehensive protein synthesis (CPS™), PCR shuffling, or other method.

[0282] In some embodiments, the sequence of the polypeptides to be encoded in the viral genomes (e.g., antibodies) may be derived from any of the BIOATLA® protein evolution methods described in International Publication WO2012009026, the contents of which are herein incorporated by reference in their entirety. In this method, mutations are systematically performed throughout the polypeptide or molecule of interest, a map is created providing useful informatics to guide the subsequent evolutionary steps. Not wishing to be bound by theory, these evolutionary methods typically start with a template polypeptide and a mutant is derived therefrom, which has desirable properties or characteristics. Non-limiting examples of evolutionary techniques include polymerase chain reaction (PCR), error prone PCR, oligonucleotide-directed mutagenesis, cassette mutagenesis, shuffling, assembly PCR, sexual PCR mutagenesis, in vivo mutagenesis, site-specific mutagenesis, gene reassembly, gene site saturated mutagenesis, in vitro mutagenesis, ligase chain reaction, oligonucleotide synthesis or any combination thereof.

[0283] In some embodiments, the BIOATLA® evolution method is Comprehensive Positional Evolution (CPE™). In CPE, naturally occurring amino acid variants are generated for each of the codons of the template polypeptide, wherein 63 different codon options exist for each amino acid variant. A set of polypeptides with single amino acid mutations are generated and the mutations are then confirmed by sequencing or other method known in the art and each amino acid change screened for improved function, neutral mutations, inhibitory mutations, expression, and compatibility with the host system. An EvoMap™ is created that describes in detail the effects of each amino acid mutation on the properties and characteristics of that polypeptide. The data from the EvoMap™ may be utilized to produce polypeptides with more than one amino acid mutation, wherein the resultant multi-site mutant polypeptides can be screened for desirable characteristics.

[0284] In some embodiments, the BIOATLA® evolution method is Synergy Evolution, wherein an EvoMap™ is used to identify amino acid positions to introduce 2-20 mutations simultaneously to produce a combinatorial effect. The resulting multi-site mutant polypeptides may be screened on one or more pre-determined characteristics to identify “upmutants” wherein the function of the mutant is improved as compared to the parent polypeptide. In some embodiments, Synergy Evolution is used to enhance binding affinity of an antibody.

[0285] In some embodiments, the BIOATLA® evolution method is Flex Evolution, wherein an EvoMap™ is used to identify fully mutable sites within a polypeptide that may then be targeted for alteration, such as introduction of glycosylation sites or chemical conjugation.

[0286] In some embodiments, the BIOATLA® evolution method is Comprehensive Positional Insertion Evolution (CPI™), wherein an amino acid is inserted after each amino acid of a template polypeptide to generate a set of lengthened polypeptides. CPI may be used to insert 1, 2, 3, 4, or 5 amino acids at each new position. The resultant lengthened polypeptides are sequenced and assayed for one or more pre-determined properties and evaluated in comparison to its template or parent molecule. In some embodiments, the binding affinity and immunogenicity of the resultant polypeptides are assayed. In some embodiments, the lengthened polypeptides are further mutated and mapped to identify polypeptides with desirable characteristics.

[0287] In some embodiments, the BIOATLA® evolution approach is Comprehensive Positional Deletion Evolution (CPD™), wherein each amino acid of the template polypeptide is individually and systematically deleted one at a time. The resultant shortened polypeptides are then sequenced and evaluated by assay for at least one pre-determined feature. In some embodiments, the shortened polypeptides are further mutated and mapped to identify polypeptides with desirable characteristics.

[0288] In some embodiments, the BIOATLA® evolution approach is Combinatorial Protein Synthesis (CPS™), wherein mutants identified in CPE, CPI, CPD, or other evolutionary techniques are combined for polypeptide synthesis. These combined mutant polypeptides are then screened for enhanced properties and characteristics. In some embodiments CPS is combined with any of the aforementioned evolutionary or polypeptide synthesis methods.

[0289] In some embodiments, the sequence of the polypeptides to be encoded in the viral genomes (e.g., antibodies) may be derived from the BIOATLA® Comprehensive Integrated Antibody Optimization (CIAO!™) described in U.S. Pat. No. 8,859,467, the contents of which are herein incorporated by reference in their entirety. The CIAO!™ method allows for simultaneous evolution of polypeptide performance and expression optimization, within a eukaryotic cell host (i.e., mammalian or yeast cell host). First, an antibody library is generated in a mammalian cell production host by antibody cell surface display, wherein the generated antibody library targets a particular antigen of interest. The antibody library is then screened by any method known in the art, for one or more properties or characteristics. One or more antibodies of the library, with desirable properties or characteristics are chosen for further polypeptide evolution by any of the methods known in the art, to produce a library of mutant antibodies by antibody cell surface display in a mammalian cell production host. The generated mutant antibodies are screened for one or more predetermined properties or characteristics, whereby an upmutant is selected, wherein the upmutant has enhanced or improved characteristics as compared to the parent template polypeptide.

[0290] In some embodiments, the sequences of the polypeptides to be encoded in the viral genomes may be humanized by the methods of BIOATLA® as described in United States Patent Publication US20130303399, the contents of which are herein incorporated by reference in their entirety. In this method, for generating enhanced full-length humanized antibodies in mammalian cells, no back-mutations are required to retain affinity to the antigen and no CDR grafting or phage-display is necessary. The generated humanized antibody has reduced immunogenicity and equal or greater affinity for the target antigen as compared to the parent antibody. The variable regions or CDRs of the generated humanized antibody are derived from the parent or template, whereas the framework and constant regions are derived from one or more human antibodies. To start, the parent, or template antibody is selected, cloned and each CDR sequence identified and synthesized into a CDR fragment library. Double stranded DNA fragment libraries for V_{H} and V_{L} are synthesized from the CDR fragment encoding libraries, wherein at least one CDR fragment library is derived from the template antibody and framework (FW fragment encoding libraries, wherein the FW fragment library is derived from a pool of human frameworks obtained from natively expressed and functional human antibodies. Stepwise liquid phase ligation of FW and CDR encoding fragments is then used to generate both V_{H} and V_{L} fragment libraries. The V_{H} and V_{L} fragment libraries are then cloned into expression vectors to create a humanization library, which is further transfected into cells for expression of full length humanized antibodies and used to create a humanized antibody library. The humanized antibody library is then screened to determine expression level of the humanized antibodies, affinity or binding ability for the antigen, and additional improved or enhanced characteristics, as compared to the template or parent antibody. Non-limiting examples of characteristics that may be screened include equilibrium dissociation constant (K_{D}), stability, melting temperature (Tₘ), pl, solubility, expression level, reduced immunogenicity, and improved effector function.

[0291] In some embodiments, the sequences of the polypeptides to be encoded in the viral genomes may be generated by the BIOATLA® method for preparing conditionally active antibodies as described in International Publications WO2016033331 and WO2016036916, the contents of which are herein incorporated by reference in their entirety. As used herein, the term “conditionally active” refers to a molecule that is active at an aberrant condition. Further, the conditionally active molecule may be virtually inactive at normal physiological conditions. Aberrant conditions may result from changes in pH, temperature, osmotic pressure, osmolality, oxidative stress, electrolyte concentration, and/or chemical or proteolytic resistance, as non-limiting examples.

[0292] The method of preparing a conditionally active antibody is described in International Publications WO2016033331 and WO2016036916 and summarized herein. Briefly, a wild-type polypeptide is selected and the DNA is evolved to create mutant DNAs. Non-limiting examples of evolutionary techniques that may be used to evolve the DNA include polymerase chain reaction (PCR), error prone PCR, shuffling, oligonucleotide-directed mutagenesis, assembly PCR, sexual PCR mutagenesis, in vivo mutagenesis, site-specific mutagenesis, gene reassembly, gene site saturated mutagenesis, in vitro mutagenesis, ligase chain reaction, oligonucleotide synthesis or any combination thereof. Once mutant DNAs are created, they are expressed in a eukaryotic cell production host (i.e., fungal, insect, mammalian, adenoviral, plant), wherein a mutant polypeptide is produced. The mutant polypeptide and the corresponding wild-type polypeptide are then subjected to assays under both normal physiological conditions and aberrant conditions in order to identify mutants that exhibit a decrease in activity in the assay at normal physiological conditions as compared to the wild-type polypeptide and/or an increase in activity in the assay under aberrant conditions, as compared to the corresponding wild-type polypeptide. The desired conditionally active mutant may then be produced in the aforementioned eukaryotic cell production host.

[0293] In some embodiments, the conditionally active antibody is a “mirac protein” as described by BIOATLA® in U.S. Pat. No. 8,709,755, the contents of which are herein incorporated by reference in their entirety. As used herein “mirac protein” refers to a conditionally active antibody that is virtually inactive at body temperature but active at lower temperatures.

[0294] In some embodiments, the sequence of the polypeptides to be encoded in the viral genomes (e.g., antibodies) may be derived based on any of the BIOATLA™ methods including, but not limited to, VERSITOPE™ Antibody Generation, natural diversity approaches, and high diversity approaches for generating monoclonal antibodies, methods for generation of conditionally active polypeptides, humanized antibodies, mirac proteins, multi-specific antibodies or cross-species active mutant polypeptides, Comprehensive Integrated Antibody Optimization (CIAO!™), Comprehensive Positional Evolution (CPE™), Synergy Evolution, Flex Evolution, Comprehensive Positional Insertion Evolution (CPI™), Comprehensive Positional Deletion Evolution (CPD™), Combinatorial Protein Synthesis (CPS™), or any combination thereof. These methods are described in United States Patent Nos. U.S. Pat. Nos. 8,859,467 and 8,709,755 and United States Publication Nos. US20130281303, US20130303399, US20150065690, US20150252119, US20150086562 and US20100138945, and International Publication Nos. WO2015105888, WO2012009026, WO2011109726, WO2016036916, and WO2016033331, the contents of each of which are herein incorporated by reference in their entirety.

[0295] In some embodiments, antibodies of the present disclosure are generated by any of the aforementioned means to target one or more of the following epitopes of the tau protein; phosphorylated tau peptides, pS396, pS396-pS404, pS404, pS396-pS404-pS422, pS422, pS199, pS199-pS202, pS202, pT181, pT231, cis-pT231, any of the following acetylated sites acK174, acK274, acK280, acK281 and/or any combination thereof.

### Antibody Fragments and Variants

[0296] In some embodiments, antibody fragments encoded by payloads comprise antigen binding regions from intact antibodies. Examples of antibody fragments may include, but are not limited to Fab, Fab′, F(ab′)₂, and Fv fragments; diabodies; linear antibodies; single-chain antibody molecules; and multispecific antibodies formed from antibody fragments. Papain digestion of antibodies produces two identical antigen-binding fragments, called “Fab” fragments, each with a single antigen-binding site. Also produced is a residual “Fc” fragment, whose name reflects its ability to crystallize readily. Pepsin treatment yields an F(ab′)₂ fragment that has two antigen-binding sites and is still capable of cross-linking antigen. Compounds and/or compositions of the present disclosure may comprise one or more of these fragments. For the purposes herein, an “antibody” may comprise a heavy and light variable domain as well as an Fc region.

[0297] In some embodiments, the Fc region may be a modified Fc region, as described in US Patent Publication US20150065690, wherein the Fe region may have a single amino acid substitution as compared to the corresponding sequence for the wild-type Fc region, wherein the single amino acid substitution yields an Fc region with preferred properties to those of the wild-type Fc region. Non-limiting examples of Fc properties that may be altered by the single amino acid substitution include bind properties or response to pH conditions

[0298] As used herein, the term “native antibody” refers to a usually heterotetrameric glycoprotein of about 150,000 Daltons, composed of two identical light (L) chains and two identical heavy (H) chains. Genes encoding antibody heavy and light chains are known and segments making up each have been well characterized and described (Matsuda, F. et al., 1998. The Journal of Experimental Medicine. 188(11); 2151-62 and Li, A. et al., 2004. Blood. 103(12: 4602.9, the content of each of which are herein incorporated by reference in their entirety). Each light chain is linked to a heavy chain by one covalent disulfide bond, while the number of disulfide linkages varies among the heavy chains of different immunoglobulin isotypes. Each heavy and light chain also has regularly spaced intrachain disulfide bridges. Each heavy chain has at one end a variable domain (V_{H}) followed by a number of constant domains. Each light chain has a variable domain at one end (V_{L}) and a constant domain at its other end; the constant domain of the light chain is aligned with the first constant domain of the heavy chain, and the light chain variable domain is aligned with the variable domain of the heavy chain.

[0299] As used herein, the term “variable domain” refers to specific antibody domains found on both the antibody heavy and light chains that differ extensively in sequence among antibodies and are used in the binding and specificity of each particular antibody for its particular antigen. Variable domains comprise hypervariable regions. As used herein, the term “hypervariable region” refers to a region within a variable domain comprising amino acid residues responsible for antigen binding. The amino acids present within the hypervariable regions determine the structure of the complementarity determining regions (CDRs) that become part of the antigen-binding site of the antibody. As used herein, the term “CDR” refers to a region of an antibody comprising a structure that is complimentary to its target antigen or epitope. Other portions of the variable domain, not interacting with the antigen, are referred to as framework (FW) regions. The antigen-binding site (also known as the antigen combining site or paratope) comprises the amino acid residues necessary to interact with a particular antigen. The exact residues making up the antigen-binding site are typically elucidated by co-crystallography with bound antigen, however computational assessments can also be used based on comparisons with other antibodies (Strohl, W. R. Therapeutic Antibody Engineering. Woodhead Publishing, Philadelphia Pa. 2012. Ch. 3, p 47-54, the contents of which are herein incorporated by reference in their entirety). Determining residues making up CDRs may include the use of numbering schemes including, but not limited to, those taught by Kabat [Wu, T. T. et al., 1970, JEM, 132(2):211-50 and Johnson, G. et al., 2000, Nucleic Acids Res. 28(1): 214-8, the contents of each of which are herein incorporated by reference in their entirety], Chothia [Chothia and Lesk, J. Mol. Biol. 196, 901 (1987), Chothia et al., Nature 342, 877 (1989) and Al-Lazikani, B. et al., 1997, J Mol Biol. 273(4):927-48, the contents of each of which are herein incorporated by reference in their entirety], Lefranc (Lefranc, M. P. et al., 2005, Immunome Res. 1:3) and Honegger (Honegger, A. and Pluckthun, A. 2001. J. Mol. Biol. 309(3):657-70, the contents of which are herein incorporated by reference in their entirety).

[0300] V_{H} and V_{L} domains have three CDRs each. V_{L} CDRs are referred to herein as CDR-L1, CDR-L2 and CDR-L3, in order of occurrence when moving from N- to C-terminus along the variable domain polypeptide. V_{H} CDRs are referred to herein as CDR-H1, CDR-H2, and CDR-H3, in order of occurrence when moving from N- to C-terminus along the variable domain polypeptide. Each of CDRs have favored canonical structures with the exception of the CDR-H3, which comprises amino acid sequences that may be highly variable in sequence and length between antibodies resulting in a variety of three-dimensional structures in antigen-binding domains (Nikoloudis, D. et al., 2014. Peer J. 2:e456; the contents of which are herein incorporated by reference in their entirety). In some cases, CDR-H3s may be analyzed among a panel of related antibodies to assess antibody diversity. Various methods of determining CDR sequences are known in the art and may be applied to known antibody sequences (Strohl, W. R. Therapeutic Antibody Engineering. Woodhead Publishing, Philadelphia Pa. 2012. Ch. 3, p 47-54, the contents of which are herein incorporated by reference in their entirety).

[0301] As used herein, the term “Fv” refers to an antibody fragment comprising the minimum fragment on an antibody needed to form a complete antigen-binding site. These regions consist of a dimer of one heavy chain and one light chain variable domain in tight, non-covalent association. Fv fragments can be generated by proteolytic cleavage but are largely unstable. Recombinant methods are known in the art for generating stable Fv fragments, typically through insertion of a flexible linker between the light chain variable domain and the heavy chain variable domain [to form a single chain Fv (scFv)] or through the introduction of a disulfide bridge between heavy and light chain variable domains (Strohl, W. R. Therapeutic Antibody Engineering. Woodhead Publishing, Philadelphia Pa. 2012. Ch. 3, p 46.47, the contents of which are herein incorporated by reference in their entirety).

[0302] As used herein, the term “light chain” refers to a component of an antibody from any vertebrate species assigned to one of two clearly distinct types, called kappa and lambda based on amino acid sequences of constant domains. Depending on the amino acid sequence of the constant domain of their heavy chains, antibodies can be assigned to different classes. There are five major classes of intact antibodies: IgA, IgD, IgE, IgG, and IgM, and several of these may be further divided into subclasses (isotypes), e.g., IgG1, IgG2, IgG3, IgG4, IgA, and IgA2.

[0303] As used herein, the term “single chain Fv” or “scFv” refers to a fusion protein of V_{H} and V_{L} antibody domains, wherein these domains are linked together into a single polypeptide chain by a flexible peptide linker. In some embodiments, the Fv polypeptide linker enables the scFv to form the desired structure for antigen binding. In some embodiments, scFvs are utilized in conjunction with phage display, yeast display or other display methods where they may be expressed in association with a surface member (e.g. phage coat protein) and used in the identification of high affinity peptides for a given antigen.

[0304] As used herein, the term “bispecific antibody” refers to an antibody capable of binding two different antigens. Such antibodies typically comprise regions from at least two different antibodies. Bispecific antibodies may include any of those described in Riethmuller, G. 2012. Cancer Immunity. 12:12-18, Marvin, J. S. et al., 2005. Acta Pharmacologica Sinica. 26(6):649-58 and Schaefer, W. et al., 2011. PNAS. 108(27):11187-92, the contents of each of which are herein incorporated by reference in their entirety.

[0305] As used herein, the term “diabody” refers to a small antibody fragment with two antigen-binding sites. Diabodies comprise a heavy chain variable domain V_{H} connected to alight chain variable domain V_{L} in the same polypeptide chain. By using a linker that is too short to allow pairing between the two domains on the same chain, the domains are forced to pair with the complementary domains of another chain and create two antigen-binding sites. Diabodies are described more fully in, for example, EP 404097; WO 9311161; and Hollinger et al. (Hollinger, P. et al., “Diabodies”: Small bivalent and bispecific antibody fragments. PNAS. 1993. 90:6444-8) the contents of each of which are incorporated herein by reference in their entirety.

[0306] The term “Intrabody” refers to a form of antibody that is not secreted from a cell in which it is produced, but instead targets one or more intracellular proteins. Intrabodies may be used to affect a multitude of cellular processes including, but not limited to intracellular trafficking, transcription, translation, metabolic processes, proliferative signaling, and cell division. In some embodiments, methods of the present disclosure may include intrabody-based therapies. In some such embodiments, variable domain sequences and/or CDR sequences disclosed herein may be incorporated into one or more constructs for intrabody-based therapy.

[0307] As used herein, the term “monoclonal antibody” refers to an antibody obtained from a population of substantially homogeneous cells (or clones), i.e., the individual antibodies comprising the population are identical and/or bind the same epitope, except for possible variants that may arise during production of the monoclonal antibodies, such variants generally being present in minor amounts. In contrast to polyclonal antibody preparations that typically include different antibodies directed against different determinants (epitopes), each monoclonal antibody is directed against a single determinant on the antigen

[0308] The modifier “monoclonal” indicates the character of the antibody as being obtained from a substantially homogeneous population of antibodies and is not to be construed as requiring production of the antibody by any particular method. The monoclonal antibodies herein include “chimeric” antibodies (immunoglobulins) in which a portion of the heavy and/or light chain is identical with or homologous to corresponding sequences in antibodies derived from a particular species or belonging to a particular antibody class or subclass, while the remainder of the chain(s) is identical with or homologous to corresponding sequences in antibodies derived from another species or belonging to another antibody class or subclass, as well as fragments of such antibodies.

[0309] As used herein, the term “humanized antibody” refers to a chimeric antibody comprising a minimal portion from one or more non-human (e.g., murine) antibody source(s) with the remainder derived from one or more human immunoglobulin sources. For the most part, humanized antibodies are human immunoglobulins (recipient antibody) in which residues from the hypervariable region from an antibody of the recipient are replaced by residues from the hypervariable region from an antibody of a non-human species (donor antibody) such as mouse, rat, rabbit or nonhuman primate having the desired specificity, affinity, and/or capacity.

[0310] In some embodiments, viral genomes of the present disclosure may encode antibody mimetics. As used herein, the term “antibody mimetic” refers to any molecule which mimics the function or effect of an antibody and which binds specifically and with high affinity to their molecular targets. In some embodiments, antibody mimetics may be monobodies, designed to incorporate the fibronectin type III domain (Fn3) as a protein scaffold (U.S. Pat. Nos. 6,673,901; 6,348,584). In some embodiments, antibody mimetics may be those known in the art including, but are not limited to affibody molecules, affilins, affitins, anticalins, avimers, Centyrins, DARPINS™, fynomers, Kunitz domains, and domain peptides. In other embodiments, antibody mimetics may include one or more non-peptide regions.

[0311] As used herein, the term “antibody variant” refers to a modified antibody (in relation to a native or starting antibody) or a biomolecule resembling a native or starting antibody in structure and/or function (e.g., an antibody mimetic). Antibody variants may be altered in their amino acid sequence, composition, or structure as compared to a native antibody. Antibody variants may include, but are not limited to, antibodies with altered isotypes (e.g., IgA, IgD, IgE, IgG₁, IgG₂, IgG₃, IgG₄, or IgM), humanized variants, optimized variants, multispecific antibody variants (e.g., bispecific variants), and antibody fragments.

[0312] The preparation of antibodies, whether monoclonal or polyclonal, is known in the art. Techniques for the production of antibodies are well known in the art and described, e.g. in Harlow and Lane “Antibodies, A Laboratory Manual”, Cold Spring Harbor Laboratory Press, 1988; Harlow and Lane “Using Antibodies: A Laboratory Manual” Cold Spring Harbor Laboratory Press, 1999 and “Therapeutic Antibody Engineering: Current and Future Advances Driving the Strongest Growth Area in the Pharmaceutical Industry” Woodhead Publishing, 2012.

### Multispecific Antibodies

[0313] In some embodiments, payloads may encode antibodies that bind more than one epitope. As used herein, the terms “multibody” or “multispecific antibody” refer to an antibody wherein two or more variable regions bind to different epitopes. The epitopes may be on the same or different targets. In certain embodiments, a multi-specific antibody is a “bispecific antibody,” which recognizes two different epitopes on the same or different antigens.

[0314] In some embodiments, multi-specific antibodies may be prepared by the methods used by BIOATLA® and described in International Patent publication WO201109726, the contents of which are herein incorporated by reference in their entirety. First a library of homologous, naturally occurring antibodies is generated by any method known in the art (i.e., mammalian cell surface display), then screened by FACSAria or another screening method, for multi-specific antibodies that specifically bind to two or more target antigens. In some embodiments, the identified multi-specific antibodies are further evolved by any method known in the art, to produce a set of modified multi-specific antibodies. These modified multi-specific antibodies are screened for binding to the target antigens. In some embodiments, the multi-specific antibody may be further optimized by screening the evolved modified multi-specific antibodies for optimized or desired characteristics.

[0315] In some embodiments, multi-specific antibodies may be prepared by the methods used by BIOATLA® and described in Unites States Publication No. US20150252119, the contents of which are herein incorporated by reference in their entirety. In one approach, the variable domains of two parent antibodies, wherein the parent antibodies are monoclonal antibodies are evolved using any method known in the art in a manner that allows a single light chain to functionally complement heavy chains of two different parent antibodies. Another approach requires evolving the heavy chain of a single parent antibody to recognize a second target antigen. A third approach involves evolving the light chain of a parent antibody so as to recognize a second target antigen. Methods for polypeptide evolution are described in International Publication WO2012009026, the contents of which are herein incorporated by reference in their entirety, and include as non-limiting examples, Comprehensive Positional Evolution (CPE), Combinatorial Protein Synthesis (CPS), Comprehensive Positional Insertion (CPI), Comprehensive Positional Deletion (CPD), or any combination thereof. The Fc region of the multi-specific antibodies described in United States Publication No. US20150252119 may be created using a knob-in-hole approach, or any other method that allows the Fc domain to form heterodimers. The resultant multi-specific antibodies may be further evolved for improved characteristics or properties such as binding affinity for the target antigen.

### Bispecific Antibodies

[0316] In some embodiments, payloads may encode bispecific antibodies. Bispecific antibodies are capable of binding two different antigens. Such antibodies typically comprise antigen-binding regions from at least two different antibodies. For example, a bispecific monoclonal antibody (BsMAb, BsAb) is an artificial protein composed of fragments of two different monoclonal antibodies, thus allowing the BsAb to bind to two different types of antigen.

[0317] In some cases, payloads encode bispecific antibodies comprising antigen-binding regions from two different antibodies. For example, such bispecific antibodies may comprise binding regions from two different antibodies selected from Tables 3-16.

[0318] Bispecific antibody frameworks may include any of those described in Riethmuller, G., 2012. Cancer Immunity. 12:12-18; Marvin, J. S. et al., 2005. Acta Pharmacologica Sinica. 26(6):649-58; and Schaefer, W. et al., 2011. PNAS. 108(27):11187-92, the contents of each of which are herein incorporated by reference in their entirety.

[0319] New generations of BsMAb, called “trifunctional bispecific” antibodies, have been developed. These consist of two heavy and two light chains, one each from two different antibodies, where the two Fab regions (the arms) are directed against two antigens, and the Fc region (the foot) comprises the two heavy chains and forms the third binding site.

[0320] Of the two paratopes that form the tops of the variable domains of a bispecific antibody, one can be directed against a target antigen and the other against a T-lymphocyte antigen like CD3. In the case of trifunctional antibodies, the Fc region may additionally bind to a cell that expresses Fc receptors, like a macrophage, a natural killer (NK) cell or a dendritic cell. In sum, the targeted cell is connected to one or two cells of the immune system, which subsequently destroy it.

[0321] Other types of bispecific antibodies have been designed to overcome certain problems, such as short half-life, immunogenicity and side-effects caused by cytokine liberation. They include chemically linked Fabs, consisting only of the Fab regions, and various types of bivalent and trivalent single-chain variable fragments (scFvs), fusion proteins mimicking the variable domains of two antibodies. The furthest developed of these newer formats are the bi-specific T-cell engagers (BiTEs) and mAb2's, antibodies engineered to contain an Fcab antigen-binding fragment instead of the Fc constant region.

[0322] Using molecular genetics, two scFvs can be engineered in tandem into a single polypeptide, separated by a linker domain, called a “tandem scFv” (tascFv). TascFvs have been found to be poorly soluble and require refolding when produced in bacteria, or they may be manufactured in mammalian cell culture systems, which avoids refolding requirements but may result in poor yields. Construction of a tascFv with genes for two different scFvs yields a “bispecific single-chain variable fragments” (bis-scFvs). Only two tascFvs have been developed clinically by commercial firms; both are bispecific agents in active early phase development by Micromet for oncologic indications and are described as “Bispecific T-cell Engagers (BITE).” Blinatumomab is an anti-CD19/anti-CD3 bispecific tascFv that potentiates T-cell responses to B-cell non-Hodgkin lymphoma in Phase 2. MT110 is an anti-EP-CAM/anti-CD3 bispecific tascFv that potentiates T-cell responses to solid tumors in Phase 1. Bispecific, tetravalent “TandAbs” are also being researched by Affimed (Nelson, A. L., MAbs. 2010. January-February; 2(1):77-83).

[0323] In some embodiments, payloads may encode antibodies comprising a single antigen-binding domain. These molecules are extremely small, with molecular weights approximately one-tenth of those observed for full-sized mAbs. Further antibodies may include “nanobodies” derived from the antigen-binding variable heavy chain regions (V_{HH}s) of heavy chain antibodies found in camels and llamas, which lack light chains (Nelson, A. L., MAbs. 2010. January-February; 2(1):77-83). Nanobodies are single heavy chain antibodies. In some embodiments, nanobodies may have a high solubility and a molecular weight that is lower than an antibody. In some embodiments, nanobodies may exhibit high stability in the presence of strong denaturing agents and/or extreme pH environments—conditions which may cause the degradation of full length antibodies. Nanobodies possess high affinity and specificity. Compared to antibodies, nanobodies may have a longer CDR3 (complementarity-determining region 3) which may form a binding surface that is stable, and convex relative to the concave or planar antigen-binding surface of an antibody. Nanobodies may possess weak immunogenicity and strong penetrability. The immunogenicity may be related to the size and chemical structure of the nanobodies. The small size of the nanobodies may also result in strong tissue penetrating ability.

[0324] In some embodiments, the nanobodies may be bispecific nanobodies.

[0325] Disclosed and claimed in PCT Publication WO2014144573 to Memorial Sloan-Kettering Cancer Center are multimerization technologies for making dimeric multispecific binding agents (e.g., fusion proteins comprising antibody components) with improved properties over multispecific binding agents without the capability of dimerization.

[0326] In some cases, payloads may encode tetravalent bispecific antibodies (TetBiAbs as disclosed and claimed in PCT Publication WO2014144357). TetBiAbs feature a second pair of Fab fragments with a second antigen specificity attached to the C-terminus of an antibody, thus providing a molecule that is bivalent for each of the two antigen specificities. The tetravalent antibody is produced by genetic engineering methods, by linking an antibody heavy chain covalently to a Fab light chain, which associates with its cognate, co-expressed Fab heavy chain.

[0327] In some aspects, payloads may encode biosynthetic antibodies as described in U.S. Pat. No. 5,091,513, the contents of which are herein incorporated by reference in their entirety. Such antibody may include one or more sequences of amino acids constituting a region which behaves as a biosynthetic antibody binding site (BABS). The sites comprise 1) non-covalently associated or disulfide bonded synthetic V_{H} and V_{L} dimers, 2) V_{H}-V_{L} or V_{L}-V_{H} single chains wherein the V_{H} and V_{L} are attached by a polypeptide linker, or 3) individuals V_{H} or V_{L} domains. The binding domains comprise linked CDR and FR regions, which may be derived from separate immunoglobulins. The biosynthetic antibodies may also include other polypeptide sequences which function, e.g., as an enzyme, toxin, binding site, or site of attachment to an immobilization media or radioactive atom. Methods are disclosed for producing the biosynthetic antibodies, for designing BABS having any specificity that can be elicited by in vivo generation of antibody, and for producing analogs thereof.

[0328] In some embodiments, payloads may encode antibodies with antibody acceptor frameworks taught in U.S. Pat. No. 8,399,625. Such antibody acceptor frameworks may be particularly well suited accepting CDRs from an antibody of interest. In some cases, CDRs from anti-tau antibodies known in the art or developed according to the methods presented herein may be used.

### Miniaturized Antibody

[0329] In some embodiments, the antibody encoded by the payloads may be a “miniaturized” antibody. Among the best examples of mAb miniaturization are the small modular immune pharmaceuticals (SMIPs) from Trubion Pharmaceuticals. These molecules, which can be monovalent or bivalent, are recombinant single-chain molecules containing one V_{L}, one V_{H} antigen-binding domain, and one or two constant “effector” domains, all connected by linker domains. Presumably, such a molecule might offer the advantages of increased tissue or tumor penetration claimed by fragments while retaining the immune effector functions conferred by constant domains. At least three “miniaturized” SMIPs have entered clinical development. TRU-015, an anti-CD20 SMIP developed in collaboration with Wyeth, is the most advanced project, having progressed to Phase 2 for rheumatoid arthritis (RA). Earlier attempts in systemic lupus erythrematosus (SLE) and B cell lymphomas were ultimately discontinued. Trubion and Facet Biotechnology are collaborating in the development of TRU-016, an anti-CD37 SMIP, for the treatment of CLL and other lymphold neoplasia, a project that has reached Phase 2. Wyeth has licensed the anti-CD20 SMIP SBI-087 for the treatment of autoimmune diseases, including RA, SLE, and possibly multiple sclerosis, although these projects remain in the earliest stages of clinical testing. (Nelson, A. L., MAbs. 2010. January-February; 2(1):77-83).

### Diabodies

[0330] In some embodiments, payloads may encode diabodies. Diabodies are functional bispecific single-chain antibodies (bscAb). These bivalent antigen-binding molecules are composed of non-covalent dimers of scFvs, and can be produced in mammalian cells using recombinant methods. (See, e.g., Mack et al, Proc. Natl. Acad. Sci., 92: 7021-7025, 1995). Few diabodies have entered clinical development. An iodine-123-labeled diabody version of the anti-CEA chimeric antibody cT84.66 has been evaluated for pre-surgical immunoscintigraphic detection of colorectal cancer in a study sponsored by the Beckman Research Institute of the City of Hope (Clinicaltrials.gov NCT00647153) (Nelson, A. L., MAbs., 2010. January-February; 2(1):77-83).

### Unibody

[0331] In some embodiments, payloads may encode a “unibody,” in which the hinge region has been removed from IgG4 molecules. While IgG4 molecules are unstable and can exchange light-heavy chain heterodimers with one another, deletion of the hinge region prevents heavy chain-heavy chain pairing entirely, leaving highly specific monovalent light/heavy heterodimers, while retaining the Fc region to ensure stability and half-life in vivo. This configuration may minimize the risk of immune activation or oncogenic growth, as IgG4 interacts poorly with FcRs and monovalent unibodies fail to promote intracellular signaling complex formation. These contentions are, however, largely supported by laboratory, rather than clinical, evidence. Other antibodies may be “miniaturized” antibodies, which are compacted 100 kDa antibodies (see, e.g., Nelson, A. L., MAbs., 2010. January-February; 2(1):77-83).

### Intrabodies

[0332] In some embodiments, payloads may encode intrabodies. Intrabodies are a form of antibody that is not secreted from a cell in which it is produced, but instead targets one or more intracellular proteins. Intrabodies are expressed and function intracellularly, and may be used to affect a multitude of cellular processes including, but not limited to intracellular trafficking, transcription, translation, metabolic processes, proliferative signaling and cell division. In some embodiments, methods described herein include intrabody-based therapies. In some such embodiments, variable domain sequences and/or CDR sequences disclosed herein are incorporated into one or more constructs for intrabody-based therapy. For example, intrabodies may target one or more glycated intracellular proteins or may modulate the interaction between one or more glycated intracellular proteins and an alternative protein.

[0333] More than two decades ago, intracellular antibodies against intracellular targets were first described (Biocca, Neuberger and Cattaneo EMBO J. 9: 101-108, 1990). The intracellular expression of intrabodies in different compartments of mammalian cells allows blocking or modulation of the function of endogenous molecules (Biocca, et al., EMBO J. 9: 101-108, 1990; Colby et al., Proc. Natl. Acad. Sci. U.S.A. 101: 17616-21, 2004). Intrabodies can alter protein folding, protein-protein, protein. DNA, protein-RNA interactions and protein modification. They can induce a phenotypic knockout and work as neutralizing agents by direct binding to the target antigen, by diverting its intracellular trafficking or by inhibiting its association with binding partners. They have been largely employed as research tools and are emerging as therapeutic molecules for the treatment of human diseases such as viral pathologies, cancer and misfolding diseases. The fast-growing bio-market of recombinant antibodies provides intrabodies with enhanced binding specificity, stability, and solubility, together with lower immunogenicity, for their use in therapy (Biocca, abstract in Antibody Expression and Production Cell Engineering Volume 7, 2011, pp. 179-195).

[0334] In some embodiments, intrabodies have advantages over interfering RNA (iRNA); for example, iRNA has been shown to exert multiple non-specific effects, whereas intrabodies have been shown to have high specificity and affinity to target antigens. Furthermore, as proteins, intrabodies possess a much longer active half-life than iRNA. Thus, when the active half-life of the intracellular target molecule is long, gene silencing through iRNA may be slow to yield an effect, whereas the effects of intrabody expression can be almost instantaneous. Lastly, it is possible to design intrabodies to block certain binding interactions of a particular target molecule, while sparing others.

[0335] Intrabodies are often single chain variable fragments (scFvs) expressed from a recombinant nucleic acid molecule and engineered to be retained intracellularly (e.g., retained in the cytoplasm, endoplasmic reticulum, or periplasm). Intrabodies may be used, for example, to ablate the function of a protein to which the intrabody binds. The expression of intrabodies may also be regulated through the use of inducible promoters in the nucleic acid expression vector comprising the intrabody. Intrabodies may be produced for use in the viral genomes using methods known in the art, such as those disclosed and reviewed in: (Marasco et al., 1993 Proc. Natl. Acad. Sci. USA, 90: 7889-7893; Chen et al, 1994, Hum. Gene Ther. 5:595-601; Chen et al., 1994, Proc. Natl. Acad. Sci. USA, 91: 5932-5936; Maciejewski et al., 1995, Nature Med., 1: 667-673; Marasco, 1995, Immunotech, 1: 119; Mhashilkar, et al., 1995, EMBO J, 14: 1542-51; Chen et al., 1996, Hum. Gene Therap., 7: 1515-1525; Marasco, Gene Ther. 4:11-15, 1997; Rondon and Marasco, 1997, Annu. Rev. Microbiol. 51:257-283; Cohen, et al., 1998, Oncogene 17:2445-56; Proba et al., 1998, J. Mol. Biol. 275:245-253; Cohen et al., 1998, Oncogene 17:2445-2456; Hassanzadeh, et al., 1998, FEBS Lett. 437:81-6; Richardson et al., 1998, Gene Ther. 5:635-44; Ohage and Steipe, 1999, J. Mol. Biol. 291:1119-1128; Ohage et al., 1999, J. Mol. Biol, 291:1129-1134; Wirtz and Steipe, 1999, Protein Sci. 8:2245-2250; Zhu et al., 1999, J. Immunol. Methods 231:207-222; Arafat et al., 2000, Cancer Gene Ther. 7:1250-6; der Maur et al., 2002, J. Biol. Chem. 277:45075-85; Mhashilkar et al., 2002, Gene Ther. 9:307-19; and Wheeler et al., 2003, FASEB J. 17: 1733-5; and references cited therein). In particular, a CCR5 intrabody has been produced by Steinberger et al., 2000, Proc. Natl. Acad. Sci. USA 97:805.810). See generally Marasco, W A, 1998, “Intrabodies: Basic Research and Clinical Gene Therapy Applications” Springer: New York; and for a review of scFvs, see Pluckthun in “The Pharmacology of Monoclonal Antibodies,” 1994, vol. 113, Rosenburg and Moore eds. Springer-Verlag, New York, pp. 269-315.

[0336] Sequences from donor antibodies may be used to develop intrabodies. Intrabodies are often recombinantly expressed as single domain fragments such as isolated V_{H} and V_{L} domains or as a single chain variable fragment (scFv) antibody within the cell. For example, intrabodies are often expressed as a single polypeptide to form a single chain antibody comprising the variable domains of the heavy and light chains joined by a flexible linker polypeptide. Intrabodies typically lack disulfide bonds and can modulate the expression or activity of target genes through their specific binding activity. Single chain antibodies can also be expressed as a single chain variable region fragment joined to the light chain constant region.

[0337] As is known in the art, an intrabody can be engineered into recombinant polynucleotide vectors to encode sub-cellular trafficking signals at its Nor C terminus to allow expression at high concentrations in the sub-cellular compartments where a target protein is located. For example, intrabodies targeted to the endoplasmic reticulum (ER) are engineered to incorporate a leader peptide and, optionally, a C-terminal ER retention signal, such as the KDEL amino acid motif (SEQ ID NO: 13163). Intrabodies intended to exert activity in the nucleus are engineered to include a nuclear localization signal. Lipid moieties are joined to intrabodies in order to tether the intrabody to the cytosolic side of the plasma membrane. Intrabodies can also be targeted to exert function in the cytosol. For example, cytosolic intrabodies are used to sequester factors within the cytosol, thereby preventing them from being transported to their natural cellular destination.

[0338] There are certain technical challenges with intrabody expression. In particular, protein conformational folding and structural stability of the newly synthesized intrabody within the cell is affected by reducing conditions of the intracellular environment.

[0339] Intrabodies may be promising therapeutic agents for the treatment of misfolding diseases, including Tauopathies, prion diseases, Alzheimer's, Parkinson's, and Huntington's, because of their virtually infinite ability to specifically recognize the different conformations of a protein, including pathological isoforms, and because they can be targeted to the potential sites of aggregation (both intra- and extracellular sites). These molecules can work as neutralizing agents against amyloidogenic proteins by preventing their aggregation, and/or as molecular shunters of intracellular traffic by rerouting the protein from its potential aggregation site (Cardinale, and Biocca, Curr. Mol. Med. 2008, 8:2-11).

### Maxibodies

[0340] In some embodiments, the payloads encode a maxibody (bivalent scFv fused to the amino terminus of the Fc (CH2-CH3 domains) of IgG.

### Chimeric Antigen Receptors

[0341] In some embodiments, the polypeptides encoded by the viral genomes (e.g., antibodies) may be used to generate chimeric antigen receptors (CARs) as described by BIOATLA® in International Publications WO2016033331 and WO2016036916, the contents of which are herein incorporated by reference in their entirety. As used herein, a “chimeric antigen receptor (CAR)” refers to an artificial chimeric protein comprising at least one antigen specific targeting region (ASTIR), wherein the antigen specific targeting region comprises a full-length antibody or a fragment thereof that specifically binds to a target antigen. The ASTR may comprise any of the following: a full length heavy or light chain, an Fab fragment, a single chain Fv fragment, a divalent single chain antibody, or a diabody. As a non-limiting example, the ASTR of a CAR may be any of the antibodies listed in Tables 3-16, antibody-based compositions or fragments thereof. Any molecule that is capable of binding a target antigen with high affinity can be used in the ASTR of a CAR. In some embodiments, the CAR may have more than one ASTR. These ASTRs may target two or more antigens or two or more epitopes of the same antigen. In some embodiments, the CAR is conditionally active. In some embodiments, the CAR is used to produce a genetically engineered cytotoxic cell carrying the CAR and capable of targeting the antigen bound by the ASTR.

[0342] Chimeric antigen receptors (CARs) are particularly useful in the treatment of cancers, though also therapeutically effective in treatment of a wide variety of other diseases and disorders. Non-limiting examples of disease categories that may be treated with CARs or CAR-based therapeutics include autoimmune disorders, B-cell mediated diseases, inflammatory diseases, neuronal disorders, cardiovascular disease and circulatory disorders, or infectious diseases. Not wishing to be bound by theory, CARs traditionally work by targeting antigens presented on the surface of or on the inside of cells to be destroyed e.g., cancer tumor cells, by the cytotoxic cell of the CAR.

[0343] In some embodiments, payloads of the present disclosure may be a chimeric antigen receptor (CAR), which when transduced into immune cells (e.g., T cells and NK cells), can re-direct the immune cells against the target (e.g., a tumor cell) which expresses a molecule recognized by the extracellular target moiety of the CAR as described in U.S. provisional patent application 62/844,433, the contents of which are herein incorporated by reference in their entirety.

### Senescent Cell Surface Protein Antibodies

[0344] In some embodiments, the AAV particles may comprise nucleic acids which have been engineered to express of antibodies that selectively bind to surface marker proteins of senescent cells. For example, the antibodies may selectively bind to proteins that are in misfolded conformation. The binding antibodies may reduce the number of senescent cells and be used to treat age-related conditions, such as, but not limited to, Alzheimer's disease, cardiovascular disease, emphysema, sarcopenia, and tumorigenesis as well as conditions more cosmetic in nature such as signs of skin aging including wrinkling, sagging, discoloration, age-related tissue dysfunction, tumor formation, and other age-related conditions.

[0345] In some embodiments, the expressed antibodies binding to epitopes of senescent cell surface proteins may be, but are not limited to, such as prion epitopes presented by SEQ ID NO: 1-14 of International Publication No. WO2014186878; CD44 epitopes presented by SEQ ID NO: 47.51 of International Publication No. WO2014186878; TNFR epitopes presented by SEQ ID NO: 52.56 of International Publication No. WO2014186878; NOTCH1 epitope presented by SEQ ID NO: 57-61 of International Publication No. WO2014186878; FasR epitopes presented by SEQ ID NO: 62-66 of International Publication No. WO2014186878; epidermal growth factor epitopes presented by SEQ ID NO: 67-81 of International Publication No. WO2014186878; CD38 epitopes presented by SEQ ID NO: 82-86 of International Publication No. WO2014186878, the contents of each of which are herein incorporated by reference in their entirety.

[0346] In some embodiments, the expressed antibodies may comprise peptides binding to senescent cell surface prion proteins, such as, but not limited to, those presented by SEQ ID NO: 15-36 of International Publication No. WO2014186878, the contents of which are herein incorporated by reference in their entirety.

[0347] In some embodiments, the expressed antibody may be AMF-3a-118 or AMF 3d-19 (SEQ ID NO: 89-92 and 103-106 of International publication WO2014186878, respectively, the contents of which are herein incorporated by reference in their entirety) targeting senescent cell surface protein FasR. In some embodiments, the expressed antibody may be Ab c-120 (SEQ ID NO: 37-40 of International publication WO2014186878, the contents of which are herein incorporated by reference in their entirety) targeting senescent cell surface protein PrP.

### Antibody Drug Conjugates

[0348] In certain embodiments, a therapeutic molecule comprises an antibody conjugated to an oligonucleotide with a linker. The antibody may engage a highly expressed receptor expressed on the surface of a cell type of interest, for example, a muscle cell. The muscle cell may be skeletal, cardiac, or smooth muscle. In some embodiments, the receptor may be expressed only on cells with a disease. In some embodiments, the receptor may be expressed only on the cell type of interest. The disease may be myotonic dystrophy Type 1 (DM1). By the antibody engaging the receptor, the oligonucleotide is brought to the primary site of disease to facilitate delivery of the oligonucleotide into the cell type of interest. The antibody-oligonucleotide conjugate is wholly engulfed by the cell. Once inside the cell, the oligonucleotide binds with the RNA that is driving disease progression, thereby degrading the disease-causing RNA. In some embodiments, the therapeutic molecule increases the delivery specificity of the oligonucleotide compared to present delivery methods of an oligonucleotide. In certain embodiments, administering the therapeutic molecule to a subject results in decreased systemic effects compared to present delivery methods of an oligonucleotide.

### Payload Antibodies of the Disclosure

[0349] The payload region of the AAV particle described in the present disclosure may comprise one or more nucleic acid sequences encoding antibodies, variants or fragments thereof. In some embodiments, the payload region of the AAV particle comprises one or more nucleic acid sequences encoding infectious disease antibodies, variants or fragments thereof. As a non-limiting example, the payload region of the AAV particle comprises one or more nucleic acid sequence encoding infectious disease antibodies targeting John Cunningham Virus, Influenza virus, Hepatitis, Respiratory syncytial virus (RSV), Herpes simplex virus 1 and 2, Human Cytomegalovirus, Epstein-Barr virus, Varicella zoster virus, Coronaviruses, Poxviruses, Enterovirus 71, Rubella virus, Human papilloma virus, Pseudomonas Aeruginosa, Streptococcus bacteria, Staphylococcus bacteria, Clostridium Tetani, Bordetella, Mycobacterium, Francisella Tularensis, Toxoplasma gondii, Candida yeast, Human Immunodeficiency Virus (HIV),Plasmodium falciparum, Ebola virus, Marburg virus, West Nile virus, Yellow Fever virus, Japanese encephalitis virus, St. Louis encephalitis virus, Chikungunya virus, Dengue virus, Trypanosoma cruzi, Rabies virus, Rotavirus, Norwalk virus/Norovirus, Campylobacter jejuni, Clostridium difficile, Entamoeba histolytica, Helicobacter pylori, Enterotoxin B, Ricin, Becillus anthracis, Shiga and Shiga-like toxins, and Botulinum toxins. As another non-limiting example, the payload region of the AAV particle may be any of the infectious disease antibodies listed in Table 3.

[0350] In certain embodiments, the payload region of the AAV particle comprises one or more nucleic acid sequences encoding non-infectious disease antibodies, variants or fragments thereof. As a non-limiting example, the payload region of the AAV particle comprises one or more nucleic acid sequence encoding non-infectious disease antibodies targeting cancer, immune diseases, inflammatory disorders, blood and blood vessel diseases, respiratory diseases, muscle diseases, bone diseases, endocrine and metabolic diseases, nervous system diseases, e.g., Alzheimer's disease, Parkinson's disease, Dementia with Lewy bodies, Huntington's disease, Amyotrophic lateral sclerosis, multiple sclerosis, multiple systems atrophy, spinal muscular atrophy, neuropathies, psychiatric disorders, migraine, pain, and ocular diseases. As another non-limiting example, the payload region of the AAV particle may be any of the non-infectious disease antibodies listed in Tables 4-15.

### Payload Antibodies: Infectious Disease

[0351] In some embodiments, the payload region of the AAV particle comprises one or more nucleic acid sequences encoding infectious disease-associated antibodies, variants or fragments thereof.

[0352] In some embodiments, the payload region of the AAV particle comprises one or more nucleic acid sequences encoding one or more of the payload antibody polypeptides listed in Table 3, or variants or fragments thereof. As used herein, “antibody polynucleotide” refers to a nucleic acid sequence encoding an antibody polypeptide.

[0353] In some embodiments, the payload region of the AAV particle comprises one or more nucleic acid sequences listed in Table 3, or variants or fragments thereof.

[0354] In some embodiments, the payload region of the AAV particle comprises a nucleic acid sequence encoding a payload antibody with at least 50% identity to one or more payload antibody polypeptides listed in Table 3. The encoded antibody polypeptide may have 50%, 51%, 52%, 53%, 54%, 55%, 56%, 57%, 58%, 59%, 60%, 61%, 62%, 63%, 64%, 65%, 66%, 67%, 68%, 69%, 70%, 71%, 72%, 73%, 74%, 75%, 76%, 77%, 78%, 79%, 80%, 81%, 82%, 83%, 84%, 85%, 86%, 87%, 88%, 89%, 90%, 91%, 92%, 93%, 94%, 95%, 96%, 97%, 98%, 99%, or 100% identity to one or more of the payload antibody polypeptides listed in Table 3, or variants or fragments thereof.

[0355] In some embodiments, the full sequence of the encoded antibody polypeptide may have 50%, 51%, 52%, 53%, 54%, 55%, 56%, 57%, 58%, 59%,60%, 61%, 62%, 63%, 64%, 65%, 66%, 67%, 68%, 69%, 70%, 71%, 72%, 73%, 74%, 75%, 76%, 77%, 78%, 79%, 80%, 81%, 82%, 83%, 84%, 85%, 86%,87%, 88%, 89%, 90%, 91%, 92%, 93%, 94%, 95%, 96%, 97%, 98%, 99%, or 100% identity to one or more of the payload antibody polypeptides listed in Table 3, or variants or fragments thereof.

[0356] In some embodiments, the variable region sequence(s) of the encoded antibody polypeptide may have 50%, 51%, 52%, 53%, 54%, 55%, 56%, 57%, 58%, 59%, 60%, 61%, 62%, 63%, 64%, 65%, 66%, 67%, 68%, 69%, 70%, 71%, 72%, 73%, 74%, 75%, 76%, 77%, 78%, 79%, 80%, 81%, 82%, 83%, 84%, 85%, 86%, 87%, 88%, 89%, 90%, 91%, 92%, 93%, 94%, 95%, 96%, 97%, 98%, 99%, or 100% identity to one or more of the payload antibody polypeptides listed in Table 3, or variants or fragments thereof.

[0357] In some embodiments, the heavy chain of the encoded antibody polypeptide may have 50%, 51%,52%, 53%,54%, 55%, 56%, 57%, 58%, 59%, 60%, 61%, 62%, 63%, 64%, 65%, 66%, 67%, 68%, 69%, 70%, 71%, 72%, 73%, 74%, 75%, 76%, 77%, 78%, 79%, 80%, 81%, 82%, 83%, 84%, 85%, 86%, 87%, 88%, 89%, 90%, 91%, 92%, 93%, 94%, 95%, 96%, 97%, 98%, 99%, or 100% identity to one or more of the payload heavy chain antibody polypeptides listed in Table 3, or variants or fragments thereof.

[0358] In some embodiments, the light chain of the encoded antibody polypeptide may have 50%, 51%, 52%, 53%, 54%, 55%, 56%, 57%, 58%, 59%, 60%, 61%, 62%, 63%, 64%, 65%, 66%, 67%, 68%, 69%, 70%, 71%, 72%, 73%, 74%, 75%, 76%, 77%, 78%, 79%, 80%, 81%, 82%, 83%, 84%, 85%, 86%, 87%, 88%, 89%, 90%, 91%, 92%, 93%, 94%, 95%, 96%, 97%, 98%, 99%, or 100% identity to one or more of the payload light chain antibody polypeptides listed in Table 3, or variants or fragments thereof.

[0359] In some embodiments, the CDR region of the encoded antibody polypeptide may have 50%, 51%, 52%, 53%, 54%, 55%, 56%, 57%, 58%, 59%, 60%, 61%, 62%, 63%, 64%, 65%, 66%, 67%, 68%, 69%, 70%, 71%, 72%, 73%, 74%, 75%,76%,77%, 78%, 79%, 80%, 81%, 82%, 83%, 84%, 85%, 86%, 87%, 88%, 89%, 90%, 91%, 92%, 93%, 94%, 95%, 96%, 97%, 98%, 99%, or 100% identity to the CDRs of one or more of the payload antibody polypeptides listed in Table 3, or variants or fragments thereof.

[0360] In some embodiments, the payload antibody has 90% identity to one or more of the antibody polypeptides listed in Table 3, or variants or fragments thereof.

[0361] In some embodiments, the payload antibody has 91% identity to one or more of the antibody polypeptides listed in Table 3, or variants or fragments thereof.

[0362] In some embodiments, the payload antibody has 92% identity to one or more of the antibody polypeptides listed in Table 3, or variants or fragments thereof.

[0363] In some embodiments, the payload antibody has 93% identity to one or more of the antibody polypeptides listed in Table 3, or variants or fragments thereof.

[0364] In some embodiments, the payload antibody has 94% identity to one or more of the antibody polypeptides listed in Table 3, or variants or fragments thereof.

[0365] In some embodiments, the payload antibody has 95% identity to one or more of the antibody polypeptides listed in Table 3, or variants or fragments thereof.

[0366] In some embodiments, the payload antibody has 96% identity to one or more of the antibody polypeptides listed in Table 3, or variants or fragments thereof.

[0367] In some embodiments, the payload antibody has 97% identity to one or more of the antibody polypeptides listed in Table 3, or variants or fragments thereof.

[0368] In some embodiments, the payload antibody has 98% identity to one or more of the antibody polypeptides listed in Table 3, or variants or fragments thereof.

[0369] In some embodiments, the payload antibody has 99% identity to one or more of the antibody polypeptides listed in Table 3, or variants or fragments thereof.

[0370] In some embodiments, the payload antibody has 100% identity to one or more of the antibody polypeptides listed in Table 3, or variants or fragments thereof.

[0371] In some embodiments, the payload region of the AAV particle comprises a nucleic acid sequence with at least 50% identity to one or more nucleic acid sequences listed in Table 3, or variants or fragments thereof. The payload nucleic acid sequence may have 50%, 51%,52%,53%, 54%, 55%, 56%, 57%, 58%, 59%, 60%, 61%, 62%, 63%, 64%, 65%, 66%, 67%, 68%, 69%, 70%, 71%, 72%, 73%, 74%, 75%, 76%, 77%, 78%, 79%, 80%, 81%, 82%, 83%, 84%, 85%, 86%, 87%, 88%, 89%, 90%, 91%, 92%, 93%, 94%, 95%, 96%, 97%, 98%, 99%, or 100% identity to one or more nucleic acid sequences listed in Table 3, or variants or fragments thereof.

[0372] In some embodiments, the payload nucleic acid sequence has 90% identity to one or more of the nucleic acid sequences listed in Table 3, or variants or fragments thereof.

[0373] In some embodiments, the payload nucleic acid sequence has 91% identity to one or more of the nucleic acid sequences listed in Table 3, or variants or fragments thereof.

[0374] In some embodiments, the payload nucleic acid sequence has 92% identity to one or more of the nucleic acid sequences listed in Table 3, or variants or fragments thereof.

[0375] In some embodiments, the payload nucleic acid sequence has 93% identity to one or more of the nucleic acid sequences listed in Table 3, or variants or fragments thereof.

[0376] In some embodiments, the payload nucleic acid sequence has 94% identity to one or more of the nucleic acid sequences listed in Table 3, or variants or fragments thereof.

[0377] In some embodiments, the payload nucleic acid sequence has 95% identity to one or more of the nucleic acid sequences listed in Table 3, or variants or fragments thereof.

[0378] In some embodiments, the payload nucleic acid sequence has 96% identity to one or more of the nucleic acid sequences listed in Table 3, or variants or fragments thereof.

[0379] In some embodiments, the payload nucleic acid sequence has 97% identity to one or more of the nucleic acid sequences listed in Table 3, or variants or fragments thereof.

[0380] In some embodiments, the payload nucleic acid sequence has 98% identity to one or more of the nucleic acid sequences listed in Table 3, or variants or fragments thereof.

[0381] In some embodiments, the payload nucleic acid sequence has 99% identity to one or more of the nucleic acid sequences listed in Table 3, or variants or fragments thereof.

[0382] In some embodiments, the payload nucleic acid sequence has 100% identity to one or more of the nucleic acid sequences listed in Table 3, or variants or fragments thereof.

[0383] In some embodiments, the payload antibody may be variants of any of the antibody polypeptides listed in Table 3, that exclude one or more amino acids designated as “X” or “x” in the described polypeptide sequence, wherein X may represent any amino acid. In some embodiments, the payload nucleic acid sequence may be variants of any of the nucleic acid sequences listed in Table 3, that exclude one or more nucleic acids designated as “n” or “N” in the described nucleic acid sequence, wherein n may represent any nucleic acid.

TABLE 3
Infectious disease antibodies

| | | Type | | SEQ |
|---|---|---|---|---|
| Ab ID | Component | (PRT/DNA) | Reference | ID NO. |
| IFD1 | CDR | DNA | U.S. Pat. No. 8,562,996; SEQ ID NO: 60 | 1740 |
| IFD2 | CDR | DNA | U.S. Pat. No. 8,562,996; SEQ ID NO: 97 | 1741 |
| IFD3 | CDR | DNA | U.S. Pat. No. 8,562,996; SEQ ID NO: 71 | 1742 |
| IFD4 | CDR | DNA | U.S. Pat. No. 8,562,996; SEQ ID NO: 67 | 1743 |
| IFD5 | CDR | DNA | U.S. Pat. No. 8,562,996; SEQ ID NO: 64 | 1744 |
| IFD6 | CDR | DNA | U.S. Pat. No. 8,562,996; SEQ ID NO: 95 | 1745 |
| IFD7 | CDR | DNA | U.S. Pat. No. 8,562,996; SEQ ID NO: 62 | 1746 |
| IFD8 | CDR | DNA | U.S. Pat. No. 8,562,996; SEQ ID NO: 69 | 1747 |
| IFD9 | CDR | DNA | US20190031747; SEQ ID NO: 101 | 1748 |
| IFD10 | CDR | DNA | US20190031747; SEQ ID NO: 245 | 1749 |
| IFD11 | CDR | DNA | US20190031747; SEQ ID NO: 21 | 1750 |
| IFD12 | CDR | DNA | US20190031747; SEQ ID NO: 53 | 1751 |
| IFD13 | CDR | DNA | US20190031747; SEQ ID NO: 293 | 1752 |
| IFD14 | CDR | DNA | US20190031747; SEQ ID NO: 309 | 1753 |
| IFD15 | CDR | DNA | US20190031747; SEQ ID NO: 229 | 1754 |
| IFD16 | CDR | DNA | US20190031747; SEQ ID NO: 69 | 1755 |
| IFD17 | CDR | DNA | US20190031747; SEQ ID NO: 85 | 1756 |
| IFD18 | CDR | DNA | US20190031747; SEQ ID NO: 181 | 1757 |
| IFD19 | CDR | DNA | US20190031747; SEQ ID NO: 213 | 1758 |
| IFD20 | CDR | DNA | US20190031747; SEQ ID NO: 319 | 1759 |
| IFD21 | CDR | DNA | US20190031747; SEQ ID NO: 255 | 1760 |
| IFD22 | CDR | DNA | US20190031747; SEQ ID NO: 159 | 1761 |
| IFD23 | CDR | DNA | US20190031747; SEQ ID NO: 341 | 1762 |
| IFD24 | CDR | DNA | US20190031747; SEQ ID NO: 197 | 1763 |
| IFD25 | CDR | DNA | US20190031747; SEQ ID NO: 117 | 1764 |
| IFD26 | CDR | DNA | US20190031747; SEQ ID NO: 165 | 1765 |
| IFD27 | CDR | DNA | US20190031747; SEQ ID NO: 149 | 1766 |
| IFD28 | CDR | DNA | US20190031747; SEQ ID NO: 107 | 1767 |
| IFD29 | CDR | DNA | US20190031747; SEQ ID NO: 315 | 1768 |
| IFD30 | CDR | DNA | US20190031747; SEQ ID NO: 79 | 1769 |
| IFD31 | CDR | DNA | US20190031747; SEQ ID NO: 15 | 1770 |
| IFD32 | CDR | DNA | US20190031747; SEQ ID NO: 111 | 1771 |
| IFD33 | CDR | DNA | US20190031747; SEQ ID NO: 351 | 1772 |
| IFD34 | CDR | DNA | US20190031747; SEQ ID NO: 239 | 1773 |
| IFD35 | CDR | DNA | US20190031747; SEQ ID NO: 191 | 1774 |
| IFD36 | CDR | DNA | US20190031747; SEQ ID NO: 251 | 1775 |
| IFD37 | CDR | DNA | US20190031747; SEQ ID NO: 219 | 1776 |
| IFD38 | CDR | DNA | US20190031747; SEQ ID NO: 347 | 1777 |
| IFD39 | CDR | DNA | US20190031747; SEQ ID NO: 139 | 1778 |
| IFD40 | CDR | DNA | US20190031747; SEQ ID NO: 11 | 1779 |
| IFD41 | CDR | DNA | US20190031747; SEQ ID NO: 155 | 1780 |
| IFD42 | CDR | DNA | US20190031747; SEQ ID NO: 203 | 1781 |
| IFD43 | CDR | DNA | US20190031747; SEQ ID NO: 91 | 1782 |
| IFD44 | CDR | DNA | US20190031747; SEQ ID NO: 123 | 1783 |
| IFD45 | CDR | DNA | US20190031747; SEQ ID NO: 223 | 1784 |
| IFD46 | CDR | DNA | US20190031747; SEQ ID NO: 207 | 1785 |
| IFD47 | CDR | DNA | US20190031747; SEQ ID NO: 95 | 1786 |
| IFD48 | CDR | DNA | US20190031747; SEQ ID NO: 127 | 1787 |
| IFD49 | CDR | DNA | US20190031747; SEQ ID NO: 143 | 1788 |
| IFD50 | CDR | DNA | US20190031747; SEQ ID NO: 299 | 1789 |
| IFD51 | CDR | DNA | US20190031747; SEQ ID NO: 187 | 1790 |
| IFD52 | CDR | DNA | US20190031747; SEQ ID NO: 59 | 1791 |
| IFD53 | CDR | DNA | US20190031747; SEQ ID NO: 27 | 1792 |
| IFD54 | CDR | DNA | US20190031747; SEQ ID NO: 75 | 1793 |
| IFD55 | CDR | DNA | US20190031747; SEQ ID NO: 235 | 1794 |
| IFD56 | CDR | DNA | US20190031747; SEQ ID NO: 303 | 1795 |
| IFD57 | CDR | DNA | US20190031747; SEQ ID NO: 31 | 1796 |
| IFD58 | CDR | DNA | US20190031747; SEQ ID NO: 37 | 1797 |
| IFD59 | CDR | DNA | US20190031747; SEQ ID NO: 63 | 1798 |
| IFD60 | CDR | DNA | US20190031747; SEQ ID NO: 119 | 1799 |
| IFD61 | CDR | DNA | US20190031747; SEQ ID NO: 231 | 1800 |
| IFD62 | CDR | DNA | US20190031747; SEQ ID NO: 167 | 1801 |
| IFD63 | CDR | DNA | US20190031747; SEQ ID NO: 71 | 1802 |
| IFD64 | CDR | DNA | US20190031747; SEQ ID NO: 247 | 1803 |
| IFD65 | CDR | DNA | US20190031747; SEQ ID NO: 39 | 1804 |
| IFD66 | CDR | DNA | US20190031747; SEQ ID NO: 23 | 1805 |
| IFD67 | CDR | DNA | US20190031747; SEQ ID NO: 295 | 1806 |
| IFD68 | CDR | DNA | US20190031747; SEQ ID NO: 327 | 1807 |
| IFD69 | CDR | DNA | US20190031747; SEQ ID NO: 55 | 1808 |
| IFD70 | CDR | DNA | US20190031747; SEQ ID NO: 103 | 1809 |
| IFD71 | CDR | DNA | US20190031747; SEQ ID NO: 87 | 1810 |
| IFD72 | CDR | DNA | US20190031747; SEQ ID NO: 183 | 1811 |
| IFD73 | CDR | DNA | US20190031747; SEQ ID NO: 215 | 1812 |
| IFD74 | CDR | DNA | US20190031747; SEQ ID NO: 311 | 1813 |
| IFD75 | CDR | DNA | US20190031747; SEQ ID NO: 199 | 1814 |
| IFD76 | CDR | DNA | US20190031747; SEQ ID NO: 343 | 1815 |
| IFD77 | CDR | DNA | US20190031747; SEQ ID NO: 7 | 1816 |
| IFD78 | CDR | DNA | US20190031747; SEQ ID NO: 3 | 1817 |
| IFD79 | CDR | DNA | US20190031747; SEQ ID NO: 83 | 1818 |
| IFD80 | CDR | DNA | US20190031747; SEQ ID NO: 51 | 1819 |
| IFD81 | CDR | DNA | US20190031747; SEQ ID NO: 67 | 1820 |
| IFD82 | CDR | DNA | US20190031747; SEQ ID NO: 339 | 1821 |
| IFD83 | CDR | DNA | US20190031747; SEQ ID NO: 19 | 1822 |
| IFD84 | CDR | DNA | US20190031747; SEQ ID NO: 243 | 1823 |
| IFD85 | CDR | DNA | US20190031747; SEQ ID NO: 35 | 1824 |
| IFD86 | CDR | DNA | US20190031747; SEQ ID NO: 195 | 1825 |
| IFD87 | CDR | DNA | US20190031747; SEQ ID NO: 147 | 1826 |
| IFD88 | CDR | DNA | US20190031747; SEQ ID NO: 99 | 1827 |
| IFD89 | CDR | DNA | US20190031747; SEQ ID NO: 115 | 1828 |
| IFD90 | CDR | DNA | US20190031747; SEQ ID NO: 163 | 1829 |
| IFD91 | CDR | DNA | US20190031747; SEQ ID NO: 291 | 1830 |
| IFD92 | CDR | DNA | US20190031747; SEQ ID NO: 323 | 1831 |
| IFD93 | CDR | DNA | US20190031747; SEQ ID NO: 179 | 1832 |
| IFD94 | CDR | DNA | US20190031747; SEQ ID NO: 211 | 1833 |
| IFD95 | CDR | DNA | US20190031747; SEQ ID NO: 307 | 1834 |
| IFD96 | CDR | DNA | US20190031747; SEQ ID NO: 263 | 1835 |
| IFD97 | CDR | DNA | US20190031747; SEQ ID NO: 135 | 1836 |
| IFD98 | CDR | DNA | US20190031747; SEQ ID NO: 279 | 1837 |
| IFD99 | CDR | DNA | US20190031747; SEQ ID NO: 151 | 1838 |
| IFD100 | CDR | DNA | US20190031747; SEQ ID NO: 133 | 1839 |
| IFD101 | CDR | DNA | US20190031747; SEQ ID NO: 5 | 1840 |
| IFD102 | CDR | PRT | US20190015509; SEQ ID NO: 9 | 1841 |
| IFD103 | CDR | PRT | US20190015509; SEQ ID NO: 10 | 1842 |
| IFD104 | CDR | PRT | US20190015509; SEQ ID NO: 8 | 1843 |
| IFD105 | CDR | PRT | US20190015509; SEQ ID NO: 4 | 1844 |
| IFD106 | CDR | PRT | US20190015509; SEQ ID NO: 5 | 1845 |
| IFD107 | CDR | PRT | US20190015509; SEQ ID NO: 3 | 1846 |
| IFD108 | CDR | PRT | U.S. Pat. No. 8,562,996; SEQ ID NO: 75 | 1847 |
| IFD109 | CDR | PRT | U.S. Pat. No. 8,562,996; SEQ ID NO: 82 | 1848 |
| IFD110 | CDR | PRT | U.S. Pat. No. 8,562,996; SEQ ID NO: 3 | 1849 |
| IFD111 | CDR | PRT | U.S. Pat. No. 8,562,996; SEQ ID NO: 87 | 1850 |
| IFD112 | CDR | PRT | U.S. Pat. No. 8,562,996; SEQ ID NO: 73 | 1851 |
| IFD113 | CDR | PRT | U.S. Pat. No. 8,562,996; SEQ ID NO: 80 | 1852 |
| IFD114 | CDR | PRT | U.S. Pat. No. 8,562,996; SEQ ID NO: 2 | 1853 |
| IFD115 | CDR | PRT | U.S. Pat. No. 8,562,996; SEQ ID NO: 84 | 1854 |
| IFD116 | CDR | PRT | U.S. Pat. No. 8,562,996; SEQ ID NO: 81 | 1855 |
| IFD117 | CDR | PRT | U.S. Pat. No. 8,562,996; SEQ ID NO: 74 | 1856 |
| IFD118 | CDR | PRT | U.S. Pat. No. 8,562,996; SEQ ID NO: 90 | 1857 |
| IFD119 | CDR | PRT | U.S. Pat. No. 8,562,996; SEQ ID NO: 1 | 1858 |
| IFD120 | CDR | PRT | U.S. Pat. No. 8,562,996; SEQ ID NO: 4 | 1859 |
| IFD121 | CDR | PRT | U.S. Pat. No. 8,562,996; SEQ ID NO: 76 | 1860 |
| IFD122 | CDR | PRT | U.S. Pat. No. 8,562,996; SEQ ID NO: 6 | 1861 |
| IFD123 | CDR | PRT | U.S. Pat. No. 8,562,996; SEQ ID NO: 77 | 1862 |
| IFD124 | CDR | PRT | U.S. Pat. No. 8,562,996; SEQ ID NO: 91 | 1863 |
| IFD125 | CDR | PRT | U.S. Pat. No. 8,562,996; SEQ ID NO: 83 | 1864 |
| IFD126 | CDR | PRT | U.S. Pat. No. 8,562,996; SEQ ID NO: 5 | 1865 |
| IFD127 | CDR | PRT | U.S. Pat. No. 8,562,996; SEQ ID NO: 89 | 1866 |
| IFD128 | CDR | PRT | U.S. Pat. No. 8,562,996; SEQ ID NO: 88 | 1867 |
| IFD129 | CDR | PRT | US20190031747; SEQ ID NO: 8 | 1868 |
| IFD130 | CDR | PRT | US20190031747; SEQ ID NO: 58 | 1869 |
| IFD131 | CDR | PRT | US20190031747; SEQ ID NO: 120 | 1870 |
| IFD132 | CDR | PRT | US20190031747; SEQ ID NO: 168 | 1871 |
| IFD133 | CDR | PRT | US20190031747; SEQ ID NO: 72 | 1872 |
| IFD134 | CDR | PRT | US20190031747; SEQ ID NO: 184 | 1873 |
| IFD135 | CDR | PRT | US20190031747; SEQ ID NO: 216 | 1874 |
| IFD136 | CDR | PRT | US20190031747; SEQ ID NO: 200 | 1875 |
| IFD137 | CDR | PRT | US20190031747; SEQ ID NO: 88 | 1876 |
| IFD138 | CDR | PRT | US20190031747; SEQ ID NO: 56 | 1877 |
| IFD139 | CDR | PRT | US20190031747; SEQ ID NO: 232 | 1878 |
| IFD140 | CDR | PRT | US20190031747; SEQ ID NO: 104 | 1879 |
| IFD141 | CDR | PRT | US20190031747; SEQ ID NO: 344 | 1880 |
| IFD142 | CDR | PRT | US20190031747; SEQ ID NO: 328 | 1881 |
| IFD143 | CDR | PRT | US20190031747; SEQ ID NO: 296 | 1882 |
| IFD144 | CDR | PRT | US20190031747; SEQ ID NO: 248 | 1883 |
| IFD145 | CDR | PRT | US20190031747; SEQ ID NO: 24 | 1884 |
| IFD146 | CDR | PRT | US20190031747; SEQ ID NO: 40 | 1885 |
| IFD147 | CDR | PRT | US20190031747; SEQ ID NO: 312 | 1886 |
| IFD148 | CDR | PRT | US20190031747; SEQ ID NO: 346 | 1887 |
| IFD149 | CDR | PRT | US20190031747; SEQ ID NO: 186 | 1888 |
| IFD150 | CDR | PRT | US20190031747; SEQ ID NO: 330 | 1889 |
| IFD151 | CDR | PRT | US20190031747; SEQ ID NO: 298 | 1890 |
| IFD152 | CDR | PRT | US20190031747; SEQ ID NO: 42 | 1891 |
| IFD153 | CDR | PRT | US20190031747; SEQ ID NO: 26 | 1892 |
| IFD154 | CDR | PRT | US20190031747; SEQ ID NO: 106 | 1893 |
| IFD155 | CDR | PRT | US20190031747; SEQ ID NO: 10 | 1894 |
| IFD156 | CDR | PRT | US20190031747; SEQ ID NO: 234 | 1895 |
| IFD157 | CDR | PRT | US20190031747; SEQ ID NO: 74 | 1896 |
| IFD158 | CDR | PRT | US20190031747; SEQ ID NO: 218 | 1897 |
| IFD159 | CDR | PRT | US20190031747; SEQ ID NO: 154 | 1898 |
| IFD160 | CDR | PRT | US20190031747; SEQ ID NO: 170 | 1899 |
| IFD161 | CDR | PRT | US20190031747; SEQ ID NO: 250 | 1900 |
| IFD162 | CDR | PRT | US20190031747; SEQ ID NO: 314 | 1901 |
| IFD163 | CDR | PRT | U.S. Pat. No. 7,132,100; SEQ ID NO: 1 | 1902 |
| IFD164 | CDR | PRT | U.S. Pat. No. 7,132,100; SEQ ID NO: 5 | 1903 |
| IFD165 | CDR | PRT | US20190031747; SEQ ID NO: 90 | 1904 |
| IFD166 | CDR | PRT | US20190031747; SEQ ID NO: 202 | 1905 |
| IFD167 | CDR | PRT | US20190031747; SEQ ID NO: 122 | 1906 |
| IFD168 | CDR | PRT | US20190031747; SEQ ID NO: 138 | 1907 |
| IFD169 | CDR | PRT | US20190031747; SEQ ID NO: 6 | 1908 |
| IFD170 | CDR | PRT | U.S. Pat. No. 7,132,100; SEQ ID NO: 6 | 1909 |
| IFD171 | CDR | PRT | US20190031747; SEQ ID NO: 324 | 1910 |
| IFD172 | CDR | PRT | US20190031747; SEQ ID NO: 292 | 1911 |
| IFD173 | CDR | PRT | US20190031747; SEQ ID NO: 164 | 1912 |
| IFD174 | CDR | PRT | US20190031747; SEQ ID NO: 116 | 1913 |
| IFD175 | CDR | PRT | US20190031747; SEQ ID NO: 20 | 1914 |
| IFD176 | CDR | PRT | US20190031747; SEQ ID NO: 148 | 1915 |
| IFD177 | CDR | PRT | US20190031747; SEQ ID NO: 196 | 1916 |
| IFD178 | CDR | PRT | US20190031747; SEQ ID NO: 244 | 1917 |
| IFD179 | CDR | PRT | US20190031747; SEQ ID NO: 100 | 1918 |
| IFD180 | CDR | PRT | US20190031747; SEQ ID NO: 340 | 1919 |
| IFD181 | CDR | PRT | US20190031747; SEQ ID NO: 68 | 1920 |
| IFD182 | CDR | PRT | US20190031747; SEQ ID NO: 212 | 1921 |
| IFD183 | CDR | PRT | US20190031747; SEQ ID NO: 180 | 1922 |
| IFD184 | CDR | PRT | US20190031747; SEQ ID NO: 308 | 1923 |
| IFD185 | CDR | PRT | US20190031747; SEQ ID NO: 84 | 1924 |
| IFD186 | CDR | PRT | US20190031747; SEQ ID NO: 4 | 1925 |
| IFD187 | CDR | PRT | US20190031747; SEQ ID NO: 52 | 1926 |
| IFD188 | CDR | PRT | US20190031747; SEQ ID NO: 150 | 1927 |
| IFD189 | CDR | PRT | US20190031747; SEQ ID NO: 86 | 1928 |
| IFD190 | CDR | PRT | US20190031747; SEQ ID NO: 102 | 1929 |
| IFD191 | CDR | PRT | US20190031747; SEQ ID NO: 166 | 1930 |
| IFD192 | CDR | PRT | US20190031747; SEQ ID NO: 310 | 1931 |
| IFD193 | CDR | PRT | US20190031747; SEQ ID NO: 54 | 1932 |
| IFD194 | CDR | PRT | US20190031747; SEQ ID NO: 294 | 1933 |
| IFD195 | CDR | PRT | US20190031747; SEQ ID NO: 198 | 1934 |
| IFD196 | CDR | PRT | US20190031747; SEQ ID NO: 70 | 1935 |
| IFD197 | CDR | PRT | US20190031747; SEQ ID NO: 230 | 1936 |
| IFD198 | CDR | PRT | US20190031747; SEQ ID NO: 342 | 1937 |
| IFD199 | CDR | PRT | US20190031747; SEQ ID NO: 118 | 1938 |
| IFD200 | CDR | PRT | US20190031747; SEQ ID NO: 22 | 1939 |
| IFD201 | CDR | PRT | US20190031747; SEQ ID NO: 246 | 1940 |
| IFD202 | CDR | PRT | US20190031747; SEQ ID NO: 182 | 1941 |
| IFD203 | CDR | PRT | US20190031747; SEQ ID NO: 214 | 1942 |
| IFD204 | CDR | PRT | U.S. Pat. No. 7,132,100; SEQ ID NO: 3 | 1943 |
| IFD205 | CDR | PRT | US20190031747; SEQ ID NO: 64 | 1944 |
| IFD206 | CDR | PRT | US20190031747; SEQ ID NO: 304 | 1945 |
| IFD207 | CDR | PRT | US20190031747; SEQ ID NO: 32 | 1946 |
| IFD208 | CDR | PRT | US20190031747; SEQ ID NO: 38 | 1947 |
| IFD209 | CDR | PRT | US20190031747; SEQ ID NO: 256 | 1948 |
| IFD210 | CDR | PRT | US20190031747; SEQ ID NO: 160 | 1949 |
| IFD211 | CDR | PRT | US20190031747; SEQ ID NO: 320 | 1950 |
| IFD212 | CDR | PRT | US20190031747; SEQ ID NO: 60 | 1951 |
| IFD213 | CDR | PRT | US20190031747; SEQ ID NO: 188 | 1952 |
| IFD214 | CDR | PRT | US20190031747; SEQ ID NO: 300 | 1953 |
| IFD215 | CDR | PRT | US20190031747; SEQ ID NO: 28 | 1954 |
| IFD216 | CDR | PRT | US20190031747; SEQ ID NO: 236 | 1955 |
| IFD217 | CDR | PRT | US20190031747; SEQ ID NO: 76 | 1956 |
| IFD218 | CDR | PRT | US20190031747; SEQ ID NO: 108 | 1957 |
| IFD219 | CDR | PRT | US20190031747; SEQ ID NO: 252 | 1958 |
| IFD220 | CDR | PRT | US20190031747; SEQ ID NO: 220 | 1959 |
| IFD221 | CDR | PRT | US20190031747; SEQ ID NO: 240 | 1960 |
| IFD222 | CDR | PRT | US20190031747; SEQ ID NO: 96 | 1961 |
| IFD223 | CDR | PRT | US20190031747; SEQ ID NO: 208 | 1962 |
| IFD224 | CDR | PRT | US20190031747; SEQ ID NO: 16 | 1963 |
| IFD225 | CDR | PRT | US20190031747; SEQ ID NO: 112 | 1964 |
| IFD226 | CDR | PRT | US20190031747; SEQ ID NO: 352 | 1965 |
| IFD227 | CDR | PRT | US20190031747; SEQ ID NO: 80 | 1966 |
| IFD228 | CDR | PRT | US20190031747; SEQ ID NO: 128 | 1967 |
| IFD229 | CDR | PRT | US20190031747; SEQ ID NO: 192 | 1968 |
| IFD230 | CDR | PRT | US20190031747; SEQ ID NO: 224 | 1969 |
| IFD231 | CDR | PRT | US20190031747; SEQ ID NO: 204 | 1970 |
| IFD232 | CDR | PRT | US20190031747; SEQ ID NO: 12 | 1971 |
| IFD233 | CDR | PRT | US20190031747; SEQ ID NO: 156 | 1972 |
| IFD234 | CDR | PRT | US20190031747; SEQ ID NO: 316 | 1973 |
| IFD235 | CDR | PRT | US20190031747; SEQ ID NO: 124 | 1974 |
| IFD236 | CDR | PRT | US20190031747; SEQ ID NO: 92 | 1975 |
| IFD237 | CDR | PRT | US20190031747; SEQ ID NO: 140 | 1976 |
| IFD238 | CDR | PRT | US20199031747; SEQ ID NO: 348 | 1977 |
| IFD239 | CDR | PRT | U.S. Pat. No. 7,132,100; SEQ ID NO: 2 | 1978 |
| IFD240 | CDR | PRT | US20190031747; SEQ ID NO: 280 | 1979 |
| IFD241 | CDR | PRT | US20190031747; SEQ ID NO: 136 | 1980 |
| IFD242 | CDR | PRT | US20190031747; SEQ ID NO: 264 | 1981 |
| IFD243 | CDR | PRT | US20190031747; SEQ ID NO: 152 | 1982 |
| IFD244 | CDR | PRT | US20190031747; SEQ ID NO: 134 | 1983 |
| IFD245 | FR | DNA | U.S. Pat. No. 8,562,996; SEQ ID NO: 63 | 1984 |
| IFD246 | FR | DNA | U.S. Pat. No. 8,562,996; SEQ ID NO: 59 | 1985 |
| IFD247 | FR | DNA | U.S. Pat. No. 8,562,996; SEQ ID NO: 72 | 1986 |
| IFD248 | FR | DNA | U.S. Pat. No. 8,562,996; SEQ ID NO: 66 | 1987 |
| IFD249 | FR | DNA | U.S. Pat. No. 8,562,996; SEQ ID NO: 70 | 1988 |
| IFD250 | FR | DNA | U.S. Pat. No. 8,562,996; SEQ ID NO: 61 | 1989 |
| IFD251 | FR | DNA | U.S. Pat. No. 8,562,996; SEQ ID NO: 65 | 1990 |
| IFD252 | FR | DNA | U.S. Pat. No. 8,562,996; SEQ ID NO: 68 | 1991 |
| IFD253 | Full antibody | DNA | U.S. Pat. No. 8,562,996; SEQ ID NO: 51 | 1992 |
| IFD254 | Full antibody | PRT | U.S. Pat. No. 8,562,996; SEQ ID NO: 58 | 1993 |
| IFD255 | Full antibody | PRT | U.S. Pat. No. 8,562,996; SEQ ID NO: 57 | 1994 |
| IFD256 | Full antibody | PRT | U.S. Pat. No. 8,562,996; SEQ ID NO: 56 | 1995 |
| IFD257 | HC | DNA | U.S. Pat. No. 8,562,996; SEQ ID NO: 126 | 1996 |
| IFD258 | HC | DNA | U.S. Pat. No. 8,562,996; SEQ ID NO: 111 | 1997 |
| IFD259 | HC | DNA | U.S. Pat. No. 8,562,996; SEQ ID NO: 112 | 1998 |
| IFD260 | HC | DNA | U.S. Pat. No. 8,562,996; SEQ ID NO: 124 | 1999 |
| IFD261 | HC | DNA | U.S. Pat. No. 8,562,996; SEQ ID NO: 9 | 2000 |
| IFD262 | HC | DNA | U.S. Pat. No. 8,562,996; SEQ ID NO: 109 | 2001 |
| IFD263 | HC | DNA | U.S. Pat. No. 8,562,996; SEQ ID NO: 116 | 2002 |
| IFD264 | HC | DNA | U.S. Pat. No. 8,562,996; SEQ ID NO: 131 | 2003 |
| IFD265 | HC | DNA | U.S. Pat. No. 8,562,996; SEQ ID NO: 99 | 2004 |
| IFD266 | HC | DNA | U.S. Pat. No. 8,562,996; SEQ ID NO: 114 | 2005 |
| IFD267 | HC | DNA | U.S. Pat. No. 8,562,996; SEQ ID NO: 125 | 2006 |
| IFD268 | HC | DNA | U.S. Pat. No. 8,562,996; SEQ ID NO: 110 | 2007 |
| IFD269 | HC | DNA | U.S. Pat. No. 8,562,996; SEQ ID NO: 129 | 2008 |
| IFD270 | HC | DNA | U.S. Pat. No. 8,562,996; SEQ ID NO: 127 | 2009 |
| IFD271 | HC | DNA | U.S. Pat. No. 8,562,996; SEQ ID NO: 113 | 2010 |
| IFD272 | HC | DNA | U.S. Pat. No. 8,562,996; SEQ ID NO: 128 | 2011 |
| IFD273 | HC | DNA | U.S. Pat. No. 8,562,996; SEQ ID NO: 98 | 2012 |
| IFD274 | HC | DNA | U.S. Pat. No. 8,562,996; SEQ ID NO: 100 | 2013 |
| IFD275 | HC | DNA | U.S. Pat. No. 8,562,996; SEQ ID NO: 130 | 2014 |
| IFD276 | HC | PRT | U.S. Pat. No. 8,562,996; SEQ ID NO: 92 | 2015 |
| IFD277 | HC | PRT | U.S. Pat. No. 8,562,996; SEQ ID NO: 85 | 2016 |
| IFD278 | HC | PRT | US20190031747; SEQ ID NO: 363 | 2017 |
| IFD279 | HC | PRT | US20190031747; SEQ ID NO: 357 | 2018 |
| IFD280 | HC | PRT | US20190031747; SEQ ID NO: 359 | 2019 |
| IFD281 | HC | PRT | US20190031747; SEQ ID NO: 361 | 2020 |
| IFD282 | LC | DNA | U.S. Pat. No. 8,562,996; SEQ ID NO: 133 | 2021 |
| IFD283 | LC | DNA | U.S. Pat. No. 8,562,996; SEQ ID NO: 120 | 2022 |
| IFD284 | LC | DNA | U.S. Pat. No. 8,562,996; SEQ ID NO: 105 | 2023 |
| IFD285 | LC | DNA | U.S. Pat. No. 8,562,996; SEQ ID NO: 118 | 2024 |
| IFD286 | LC | DNA | U.S. Pat. No. 8,562,996; SEQ ID NO: 106 | 2025 |
| IFD287 | LC | DNA | U.S. Pat. No. 8,562,996; SEQ ID NO: 121 | 2026 |
| IFD288 | LC | DNA | U.S. Pat. No. 8,562,996; SEQ ID NO: 103 | 2027 |
| IFD289 | LC | DNA | U.S. Pat. No. 8,562,996; SEQ ID NO: 136 | 2028 |
| IFD290 | LC | DNA | U.S. Pat. No. 8,562,996; SEQ ID NO: 117 | 2029 |
| IFD291 | LC | DNA | U.S. Pat. No. 8,562,996; SEQ ID NO: 123 | 2030 |
| IFD292 | LC | DNA | U.S. Pat. No. 8,562,996; SEQ ID NO: 10 | 2031 |
| IFD293 | LC | DNA | U.S. Pat. No. 8,562,996; SEQ ID NO: 102 | 2032 |
| IFD294 | LC | DNA | U.S. Pat. No. 8,562,996; SEQ ID NO: 135 | 2033 |
| IFD295 | LC | DNA | U.S. Pat. No. 8,562,996; SEQ ID NO: 119 | 2034 |
| IFD296 | LC | DNA | U.S. Pat. No. 8,562,996; SEQ ID NO: 134 | 2035 |
| IFD297 | LC | DNA | U.S. Pat. No. 8,562,996; SEQ ID NO: 122 | 2036 |
| IFD298 | LC | DNA | U.S. Pat. No. 8,562,996; SEQ ID NO: 132 | 2037 |
| IFD299 | LC | DNA | U.S. Pat. No. 8,562,996; SEQ ID NO: 138 | 2038 |
| IFD300 | LC | DNA | U.S. Pat. No. 8,562,996; SEQ ID NO: 104 | 2039 |
| IFD301 | LC | DNA | U.S. Pat. No. 8,562,996; SEQ ID NO: 107 | 2040 |
| IFD302 | LC | DNA | U.S. Pat. No. 8,562,996; SEQ ID NO: 137 | 2041 |
| IFD303 | LC | PRT | U.S. Pat. No. 8,562,996; SEQ ID NO: 86 | 2042 |
| IFD304 | LC | PRT | U.S. Pat. No. 8,562,996; SEQ ID NO: 93 | 2043 |
| IFD305 | LC | PRT | US20190031747; SEQ ID NO: 362 | 2044 |
| IFD306 | LC | PRT | US20190031747; SEQ ID NO: 360 | 2045 |
| IFD307 | LC | PRT | US20190031747; SEQ ID NO: 358 | 2046 |
| IFD308 | LC | PRT | US20190031747; SEQ ID NO: 364 | 2047 |
| IFD309 | VH | DNA | US20190015509; SEQ ID NO: 1 | 2048 |
| IFD310 | VH | DNA | U.S. Pat. No. 8,562,996; SEQ ID NO: 96 | 2049 |
| IFD311 | VH | DNA | U.S. Pat. No. 8,562,996; SEQ ID NO: 94 | 2050 |
| IFD312 | VH | DNA | U.S. Pat. No. 8,562,996; SEQ ID NO: 101 | 2051 |
| IFD313 | VH | DNA | US20190031747; SEQ ID NO: 305 | 2052 |
| IFD314 | VH | DNA | US20190031747; SEQ ID NO: 177 | 2053 |
| IFD315 | VH | DNA | US20190031747; SEQ ID NO: 209 | 2054 |
| IFD316 | VH | DNA | US20190031747; SEQ ID NO: 289 | 2055 |
| IFD317 | VH | DNA | US20190031747; SEQ ID NO: 49 | 2056 |
| IFD318 | VH | DNA | US20190031747; SEQ ID NO: 1 | 2057 |
| IFD319 | VH | DNA | US20190031747; SEQ ID NO: 81 | 2058 |
| IFD320 | VH | DNA | US20190031747; SEQ ID NO: 33 | 2059 |
| IFD321 | VH | DNA | US20190031747; SEQ ID NO: 17 | 2060 |
| IFD322 | VH | DNA | US20190031747; SEQ ID NO: 241 | 2061 |
| IFD323 | VH | DNA | US20190031747; SEQ ID NO: 225 | 2062 |
| IFD324 | VH | DNA | US20190031747; SEQ ID NO: 193 | 2063 |
| IFD325 | VH | DNA | US20190031747; SEQ ID NO: 321 | 2064 |
| IFD326 | VH | DNA | US20190031747; SEQ ID NO: 129 | 2065 |
| IFD327 | VH | DNA | US20190031747; SEQ ID NO: 257 | 2066 |
| IFD328 | VH | DNA | US20190031747; SEQ ID NO: 273 | 2067 |
| IFD329 | VH | DNA | US20190031747; SEQ ID NO: 113 | 2068 |
| IFD330 | VH | DNA | US20190031747; SEQ ID NO: 161 | 2069 |
| IFD331 | VH | DNA | US20190031747; SEQ ID NO: 65 | 2070 |
| IFD332 | VH | DNA | US20190031747; SEQ ID NO: 337 | 2071 |
| IFD333 | VH | DNA | US20190031747; SEQ ID NO: 145 | 2072 |
| IFD334 | VH | DNA | US20190031747; SEQ ID NO: 97 | 2073 |
| IFD335 | VH | PRT | US20190015509; SEQ ID NO: 2 | 2074 |
| IFD336 | VH | PRT | U.S. Pat. No. 8,562,996; SEQ ID NO: 78 | 2075 |
| IFD337 | VH | PRT | U.S. Pat. No. 8,562,996; SEQ ID NO: 55 | 2076 |
| IFD338 | VH | PRT | US20190031747; SEQ ID NO: 274 | 2077 |
| IFD339 | VH | PRT | US20190031747; SEQ ID NO: 130 | 2078 |
| IFD340 | VH | PRT | US20190031747; SEQ ID NO: 258 | 2079 |
| IFD341 | VH | PRT | US20190031747; SEQ ID NO: 162 | 2080 |
| IFD342 | VH | PRT | US20190031747; SEQ ID NO: 66 | 2081 |
| IFD343 | VH | PRT | US20190031747; SEQ ID NO: 338 | 2082 |
| IFD344 | VH | PRT | US20190031747; SEQ ID NO: 98 | 2083 |
| IFD345 | VH | PRT | US20190031747; SEQ ID NO: 146 | 2084 |
| IFD346 | VH | PRT | US20190031747; SEQ ID NO: 114 | 2085 |
| IFD347 | VH | PRT | US20190031747; SEQ ID NO: 290 | 2086 |
| IFD348 | VH | PRT | US20190031747; SEQ ID NO: 322 | 2087 |
| IFD349 | VH | PRT | US20190031747; SEQ ID NO: 210 | 2088 |
| IFD350 | VH | PRT | US20190031747; SEQ ID NO: 178 | 2089 |
| IFD351 | VH | PRT | US20190031747; SEQ ID NO: 306 | 2090 |
| IFD352 | VH | PRT | US20190031747; SEQ ID NO: 194 | 2091 |
| IFD353 | VH | PRT | US20190031747; SEQ ID NO: 226 | 2092 |
| IFD354 | VH | PRT | US20190031747; SEQ ID NO: 18 | 2093 |
| IFD355 | VH | PRT | US20190031747; SEQ ID NO: 242 | 2094 |
| IFD356 | VH | PRT | US20190031747; SEQ ID NO: 34 | 2095 |
| IFD357 | VH | PRT | US20190031747; SEQ ID NO: 50 | 2096 |
| IFD358 | VH | PRT | US20190031747; SEQ ID NO: 2 | 2097 |
| IFD359 | VH | PRT | US20190031747; SEQ ID NO: 82 | 2098 |
| IFD360 | VL | DNA | US20190015509; SEQ ID NO: 6 | 2099 |
| IFD361 | VL | DNA | U.S. Pat. No. 8,562,996; SEQ ID NO: 108 | 2100 |
| IFD362 | VL | DNA | US20190031747; SEQ ID NO: 121 | 2101 |
| IFD363 | VL | DNA | US20190031747; SEQ ID NO: 137 | 2102 |
| IFD364 | VL | DNA | US20190031747; SEQ ID NO: 201 | 2103 |
| IFD365 | VL | DNA | US20190031747; SEQ ID NO: 89 | 2104 |
| IFD366 | VL | DNA | US20190031747; SEQ ID NO: 185 | 2105 |
| IFD367 | VL | DNA | US20190031747; SEQ ID NO: 345 | 2106 |
| IFD368 | VL | DNA | US20190031747; SEQ ID NO: 9 | 2107 |
| IFD369 | VL | DNA | US20190031747; SEQ ID NO: 105 | 2108 |
| IFD370 | VL | DNA | US20190031747; SEQ ID NO: 297 | 2109 |
| IFD371 | VL | DNA | US20190031747; SEQ ID NO: 41 | 2110 |
| IFD372 | VL | DNA | US20190031747; SEQ ID NO: 25 | 2111 |
| IFD373 | VL | DNA | US20190031747; SEQ ID NO: 329 | 2112 |
| IFD374 | VL | DNA | US20190031747; SEQ ID NO: 73 | 2113 |
| IFD375 | VL | DNA | US20190031747; SEQ ID NO: 233 | 2114 |
| IFD376 | VL | DNA | US20190031747; SEQ ID NO: 217 | 2115 |
| IFD377 | VL | DNA | US20190031747; SEQ ID NO: 313 | 2116 |
| IFD378 | VL | DNA | US20190031747; SEQ ID NO: 153 | 2117 |
| IFD379 | VL | DNA | US20190031747; SEQ ID NO: 169 | 2118 |
| IFD380 | VL | DNA | US20190031747; SEQ ID NO: 249 | 2119 |
| IFD381 | VL | DNA | US20190031747; SEQ ID NO: 57 | 2120 |
| IFD382 | VL | PRT | US20190015509; SEQ ID NO: 7 | 2121 |
| IFD383 | VL | PRT | U.S. Pat. No. 8,562,996; SEQ ID NO: 79 | 2122 |
| IFD384 | LC | PRT | U.S. Pat. No. 7,122,185; SEQ ID NO: 6 | 2123 |
| IFD385 | LC | PRT | WO2018104893; SEQ ID NO: 9 | 2124 |
| IFD386 | HC | PRT | U.S. Pat. No. 7,122,185; SEQ ID NO: 9 | 2125 |
| IFD387 | HC | PRT | U.S. Pat. No. 7,122,185; SEQ ID NO: 12 | 2126 |
| IFD388 | HC | PRT | WO2018104893; SEQ ID NO: 12 | 2127 |
| IFD389 | HC | PRT | WO2018104893; SEQ ID NO: 13 | 2128 |
| IFD390 | HC | PRT | WO2018104893; SEQ ID NO: 14 | 2129 |
| IFD391 | VL | PRT | WO2018104893; SEQ ID NO: 7 | 2130 |
| IFD392 | VH | PRT | WO2018104893; SEQ ID NO: 8 | 2131 |
| IFD393 | scFv | PRT | WO2017053556; SEQ ID NO: 13 | 2132 |
| IFD394 | scFv | PRT | WO2017053556; SEQ ID NO: 17 | 2133 |
| IFD395 | scFv | PRT | WO2017053556; SEQ ID NO: 21 | 2134 |
| IFD396 | scFv | PRT | WO2017053556; SEQ ID NO: 25 | 2135 |
| IFD397 | scFv | PRT | WO2017053556; SEQ ID NO: 29 | 2136 |
| IFD398 | scFv | PRT | WO2017053556; SEQ ID NO: 57 | 2137 |
| IFD399 | scFv | PRT | WO2017053556; SEQ ID NO: 58 | 2138 |
| IFD400 | scFv | PRT | WO2017053556; SEQ ID NO: 59 | 2139 |
| IFD401 | scFv | PRT | WO2017053556; SEQ ID NO: 69 | 2140 |
| IFD402 | scFv | PRT | WO2017053556; SEQ ID NO: 61 | 2141 |

[0384] In some embodiments, the payload region of the AAV particle comprises a nucleic acid sequence encoding a polypeptide which is an antibody, an antibody-based composition, or a fragment thereof. As anon-limiting example, the antibody may be one or more of the polypeptides listed in Table 3, or variants or fragments thereof. As another non-limiting example, the antibody may be one or more of the heavy chain sequences listed in Table 3. As a non-limiting example, the antibody may be one or more of the light chain sequences listed in Table 3, or variants or fragments thereof.

[0385] In some embodiments, the payload region of the AAV particle comprises a nucleic acid sequence encoding a polypeptide comprising a heavy chain and alight chain sequence listed in Table 3, or variants or fragments thereof. The payload region may also comprise a linker between the heavy and light chain sequences. The linker may be a sequence known in the art or described in Table 2.

[0386] In some embodiments, the payload region of the AAV particle comprises a nucleic acid sequence encoding a polypeptide comprising a heavy chain and a light chain sequence listed in Table 3, or variants or fragments thereof, where the heavy chain sequence is from a different antibody than the light chain sequence. The payload region may also comprise a linker between the heavy and light chain sequences. The linker may be a sequence known in the art or described in Table 2.

[0387] In some embodiments, the payload region comprises, in the 5′ to 3′ direction, an antibody light chain sequence, a linker and a heavy chain sequence. In another embodiment, the linker is not used.

[0388] In some embodiments, the payload region comprises a nucleic acid sequence encoding, in the 5′ to 3′ direction, an antibody light chain sequence from Table 3, one or more linkers from Table 2 and a heavy chain sequence from Table 3.

[0389] In some embodiments, the payload region comprises, in the 5′ to 3′ direction, an antibody heavy chain sequence, a linker region (may comprise one or more linkers) and alight chain sequence. In another embodiment, the linker is not used.

[0390] In some embodiments, the payload region comprises a nucleic acid sequence encoding, in the 5′ to 3′ direction, an antibody heavy chain sequence from Table 3, one or more linkers from Table 2, and alight chain sequence from Table 3.

[0391] In some embodiments, the payload region comprises a nucleic acid sequence encoding a single heavy chain. As a non-limiting example, the heavy chain is an amino acid sequence or fragment thereof described in Table 3.

[0392] Shown in Table 3 are a listing of antibodies and their polynucleotides and/or polypeptides sequences. These sequences may be encoded by or included in the AAV particles of the present disclosure. Variants or fragments of the antibody sequences described in Table 3 may be utilized in the AAV particles of the present disclosure.

[0393] In some embodiments, the AAV particles may comprise a viral genome, wherein one or more components may be codon-optimized. Codon-optimization may be achieved by any method known to one with skill in the art such as, but not limited to, by a method according to Genescript, EMBOSS, Bioinformatics, NUS, NUS2, Geneinfinity, IDT, NUS3, GregThatcher, Insilico, Molbio, N2P, Snapgene, and/or VectorNTI. Antibody heavy and/or light chain sequences within the same viral genome may be codon-optimized according to the same or according to different methods.

[0394] In some cases, the payload region of the AAV particles may encode one or more isoforms or variants of heavy and light chain antibody domains. Such variants may be humanized or optimized antibody domains comprising one or more complementarity determining regions (CDRs) from the heavy and light chains listed in Table 3. CDRs of the antibodies encoded by the viral genomes of the present disclosure may be 50%, 60%, 70%, 80%, 90%, 95% identical to CDRs listed in or incorporated in the sequences of Table 3. Methods of determining CDRs are well known in the art and are described herein. Payload regions may encode antibody variants with one or more heavy chain variable domain (V_{H}) or light chain variable domain (V₄) derived from the antibody sequences in Table 3. In some cases, such variants may include bispecific antibodies. Bispecific antibodies encoded by payload regions may comprise variable domain pairs from two different antibodies.

[0395] In some embodiments, the AAV particles may comprise a heavy and a light chain of an antibody described herein and two promoters. As a non-limiting example, the AAV particles may comprise a nucleic acid sequence of a genome as described in FIG. 1 or FIG. 2 of US Patent Publication No. US20030219733, the contents of which are herein incorporated by reference in their entirety. As another non-limiting example, the AAV particles may be a dual-promoter AAV for antibody expression as described by Lewis et al (J. of. Virology, September 2002, Vol. 76(17), p 8769-8775; the contents of which are herein incorporated by reference in their entirety).

[0396] Payload regions of the viral genomes may encode any infectious disease-associated antibody, not limited to those described in Table 3, including antibodies that are known in the art and/or antibodies that are commercially available. This may include fragments of such antibodies or antibodies that have been developed to comprise one or more of such fragments [e.g., variable domains or complementarity determining regions (CDRs)].

[0397] In some embodiments, the AAV particles may have a payload region comprising any of the infectious disease-associated antibodies as described in International Publication Number WO2016059622, WO2017046658, WO2017046676, WO2017048593, WO2017048614, WO2017048902, WO2017049035, WO2017049231, WO2017049266, WO2017052679, WO2017053170, WO2017053703, WO2017053807, WO2017053889, WO2017055273, WO2017055404, WO2017055617, WO2017058115, WO2017058866, WO2017059095, WO2017059289, WO2017059551, WO2017059878, WO2017060247, WO2017060504, WO2017060857, WO2017061599, WO2017062820, WO2017062888, WO2017062952, WO2017063593, WO2017064221, WO2017068186, WO2017070364, WO2017070395, WO2017070423, WO2017070476, WO2017070613, WO2017070616, WO2017070622, WO2017070623, WO2017070624, WO2017070626, WO2017070654, WO2017073981, WO2017074074, WO2017075052, WO2017075119, WO2017075124, WO2017075188, WO2017075432, WO2017075533, WO2017075540, WO2017075615, WO2017076308, WO2017077047, WO2017078839, WO2017079112, WO2017079115, WO2017079116, WO2017079369, WO2017079443, WO2017079479, WO2017079681, WO2017079705, WO2017081066, WO2017082214, WO2017083515, WO2017083627, WO2017083750, WO2017083762, WO2017083764, WO2017084495, WO2017085212, WO2017086627, WO2017087587, WO2017087588, WO2017087589, WO2017087599, WO2017087678, WO2017087921, WO2017088269, WO2017089895, WO2017091487, WO2017092645, WO2017093448, WO2017093845, WO2017093985, WO2017095823, WO2017095875, WO2017096179, WO2017096182, WO2017096189, WO2017096221, WO2017096276, WO2017096281, WO2017096327, WO2017096329, WO2017099712, WO2017100289, WO2017102010, WO2017103088, WO2017106061, WO2017106129, WO2017106236, WO2017106326, WO2017106346, WO2017106656, WO2017109721, WO2017112536, WO2017112877, WO2017112944, WO2017114694, WO2017118321, WO2017118745, WO2017118761, WO2017120222, WO2017120280, WO2017120344, WO2017120525, WO2017120599, WO2017120996, WO2017120997, WO2017120998, WO2017123160, WO2017123556, WO2017123557, WO2017123644, WO2017123646, WO2017123685, WO2017123978, WO2017125487, WO2017125578, WO2017125871, WO2017127468, WO2017127764, WO2017128534, WO2017129064, WO2017130223, WO2017132562, WO2017133174, WO2017133175, WO2017133633, WO2017133639, WO2017133640, WO2017134140, WO2017134440, WO2017135791, WO2017136607, WO2017137542, WO2017137583, WO2017137954, WO2017139276, WO2017139587, WO2017139975, WO2017140256, WO2017143062, WO2017143270, WO2017144621, WO2017144668, WO2017144896, WO2017147248, WO2017147368, WO2017147383, WO2017147538, WO2017147719, WO2017148889, WO2017149143, WO2017149515, WO2017149538, WO2017151176, WO2017151818, WO2017151940, WO2017152076, WO2017152088, WO2017153402, WO2017153433, WO2017153438, WO2017156355, WO2017156423, WO2017156479, WO2017156500, WO2017158337, WO2017158339, WO2017159996, WO2017161206, WO2017162678, WO2017164678, WO2017165245, WO2017165398, WO2017165460, WO2017165464, WO2017165683, WO2017165734, WO2017165736, WO2017174568, WO2017174586, WO2017175176, WO2017176007, WO2017177013, WO2017177137, WO2017177175, WO2017177199, WO2017177217, WO2017178653, WO2017180536, WO2017180738, WO2017180936, WO2017180976, WO2017180993, WO2017181011, WO2017181015, WO2017181031, WO2017181039, WO2017181098, WO2017181109, WO2017181119, WO2017181420, WO2017182672, WO2017183711, WO2017186121, WO2017186784, WO2017186928, WO2017187307, WO2017188570, WO2017189432, WO2017189959, WO2017189963, WO2017189964, WO2017190100, WO2017191062, WO2017192483, WO2017192567, WO2017192589, WO2017192933, WO2017192946, WO2017193101, WO2017193107, WO2017194265, WO2017194555, WO2017194783, WO2017196819, WO2017196847, WO2017197331, WO2017197347, WO2017197376, WO2017197667, WO2017198212, WO2017199094, WO2017199250, WO2017201131, WO2017201210, WO2017201488, WO2017201493, WO2017201731, WO2017201766, WO2017202387, WO2017205014, WO2017205631, WO2017205694, WO2017205721, WO2017205726, WO2017205820, WO217205875, WO2017206621, WO2017207477, WO2017207480, WO2017207775, WO2017207791, WO2017210058, WO2017211278, WO2017211900, WO2017214298, WO2017215590, WO2017218355, WO2017218435, WO2017218515, WO2017218698, WO2017218977, WO2017219025, WO2017219029, WO2017220800, WO2017220988, WO2017220989, WO2017220990, WO2017222556, WO2017223283, WO2017223286, WO2018002339, WO2018002952, WO2018005556, WO2018005558, WO2018005559, WO2018006005, WO2018006092, WO2018006824, WO2018006882, WO2018009894, WO2018010789, WO2018011283, WO2018011421, WO2018011573, WO2018011584, WO2018011799, WO2018012952, WO2018013585, WO2018013818, WO2018013918, WO2018017497, WO2018017708, WO2018017797, WO2018017864, WO2018017964, WO2018017996, WO2018018039, WO2018019897, WO2018020476, WO2018022479, WO2018022608, WO2018022786, WO2018023093, WO2018023100, WO2018023136, WO2018025178, WO201802018, WO2018026249, WO2018026600, WO2018026715, WO2018026742, WO2018026953, WO2018026969, WO2018026992, WO2018027039, WO2018027042, WO2018027155, WO2018027185, WO2018027252, WO2018028635, WO2018029284, WO2018030777, WO2018031490, WO2018034225, WO2018034226, WO2018034227, WO2018035001, WO2018035046, WO2018035084, WO2018035311, WO2018035407, WO2018035710, WO2018036561 WO2018038096, WO2018038945, WO2018039097, WO2018039514, WO2018039626, WO2018042385, WO2018044619, WO2018044970, WO2018045018, WO2018045325, WO2018048318, WO2018048939, WO2018049124, WO2018049130, WO2018049188, WO2018049248, WO2018050783, WO2018050852, WO2018051348, WO2018052375, WO2018052789, WO2018053029, WO2018053180, WO2018053270, WO2018053434, WO2018054240, WO2018054241, WO2018056821, WO2018056897, WO2018057585, WO2018057735, WO2018057776, WO2018057823, WO2018057904, WO2018057916, WO2018057967, WO2018058002 WO2018058022, WO2018058177, WO2018059117, WO2018064190, WO2018064478, WO2018064602, WO2018064611, WO2018065552, WO2018067580, WO2018067582, WO2018067618, WO2018067991, WO2018067993, WO2018068354, WO2018069279, WO2018071345, WO2018071777, WO2018071796, WO2018071822, WO2018071873, WO2018073387, WO2018075378, WO2018075564, WO2018075591, WO2018075621, WO2018075794, WO2018075813, WO2018075820, WO2018075954, WO2018075961, WO2018075974, WO2018075980, WO2018075989, WO2018077208, WO2018077242, WO2018077893, WO2018077926, WO2018081282, WO2018081329, WO2018081590, WO2018081642, WO2018081649, WO2018081754, WO2018081755, WO2018081832, WO2018083087, WO2018083692, WO2018085358, WO2018085400, WO2018085468, WO2018085469, WO2018085731, WO2018085815, WO2018085842, WO2018086139, WO2018086599, WO2018089293, WO2018089335, WO2018089829, WO2018090057, WO2018091740, WO2018094300, WO2018094414, WO2018098354, WO2018098362, WO2018098365, WO2018098480, WO2018099968, WO2018102589, WO2018102597, WO2018102612, WO2018102746, WO2018102785, WO2018102795, WO2018103501, WO2018103502, WO2018103503, WO2018104407, WO2018104528, WO2018104556, WO2018106712, WO2018106732, WO2018106862, WO2018106864, WO2018108106, WO2018109663, WO2018111852, WO2018112426, WO2018112549, WO2018113258, WO2018115262, WO2018115485, WO2018115885, WO2018115887, WO2018118754, WO2018118780, WO2018119001, WO2018119114, WO2018119171, WO2018119474, WO2018119475, WO2018121679, WO2018124121, WO2018126232, WO2018126287, WO2018127473, WO2018127709, WO2018127710, WO2018127711, WO2018127713, WO2018127787, WO2018129400, WO2018129404, WO2018129474, WO2018129524, WO2018130657, WO2018132423, WO2018132739, WO2018133837, WO2018133842, WO2018133877, WO2018134389, WO2018134691, WO2018134787, WO2018134817, WO2018136163, WO2018136626, WO2018136823, WO2018137293, WO2018137294, WO2018137295, WO2018137576, WO2018138297, WO2018138496, WO2018138681, WO2018140242, WO2018140660, WO2018140725, WO2018140733, WO2018140845, WO2018140970, WO2018140973, WO2018141910, WO2018145125, WO2018146317, WO2018146549, WO2018148180, WO2018148223, WO2018148224, WO2018148383, WO2018149358, WO2018150029, WO2018150345, WO2018151816, WO2018152197, WO2018152452, WO2018152687, WO2018153340, WO2018154392, WO2018156250, WO2018156367, WO2018156654, WO2018156735, WO2018156791, WO2018158632, WO2018158658, WO2018159845, WO2018160731, WO2018161017, WO2018161092, WO2018161872, WO2018162944, WO2018165089, WO2018165228, WO2018165475, WO2018167322, WO2018169785, WO2018169922, WO2018169948, WO2018169953, WO2018169993, WO2018170134, WO2018170145, WO2018170188, WO2018170256, WO2018170338, WO2018170408, WO2018172957, WO2018175460, WO2018175476, WO2018175531, WO2018175752, WO2018175788, WO2018175917, WO2018175988, WO2018176505, WO2018176844, WO2018178047, WO2018178122, WO2018178123, WO2018181064, WO2018181866, WO2018183219, WO2018183293, WO2018183459, WO2018185043, WO2018185110, WO2018185526, WO2018185709, WO2018187190, WO2018187191, WO2018187332, WO2018187613, WO2018187706, WO2018187791, WO2018187799, WO2018188331, WO2018189225, WO2018189382, WO2018190719, WO2018191313, WO2018191502, WO2018191545, WO2018191723, WO2018192365, WO2018193063, WO2018193457, WO2018201096, WO2018201099, WO2018204363, WO2018204427, WO2018204520, WO2018204677, WO2018208231, WO2018208856, WO2018208868, WO2018209194, WO2018210898, WO2018213097, WO2018213204, WO2018213316, WO2018213592, WO2018215535, WO2018215571, WO2018215831, WO2018215935, WO2018215936, WO2018215937, WO2018215938, WO2018217681, WO2018217688, WO2018217940, WO2018218083, WO2018218185, WO2018218215, WO2018218219, WO2018218222, WO2018218240, WO2018218875, WO2018218876, WO2018218877, WO2018218878, WO2018218879, WO2018220100, WO2018220216, WO2018220584, WO2018221521, WO2018221892, WO2018222019, WO2018222139, WO2018222718, WO2018222722, WO2018223600, WO2018223601, WO2018224609, WO2018224611, WO2018224630, WO2018226992, WO2018229193, WO2018229194, WO2018229195, WO2018229197, WO2018229492, WO2018229530, WO2018229612, WO2018232088, WO2018232355, WO2018232372, WO2018232467, WO2018233333, WO2018233813, WO2018234576, WO2018234793, WO2018237010, WO2018237148, WO2018237192, WO2018237287, WO2018237326, WO2018237357, WO2019000105, WO2019000620, WO2019001417, WO2019003074, WO2019003164, WO2019004136, WO2019004831, WO2019006007, WO2019006043, WO2019009726, WO2019009727, WO2019009728, WO2019010486, WO2019011306, WO2019011855, WO2019012138, WO2019012141, WO2019012336, WO2019014405, WO2019014623, WO2019015673, WO2019016247, WO2019016784, WO2019018310, WO2019018629, WO2019018640, WO2019018730, WO2019023347, WO2019023396, WO2019023410, WO2019023482, WO2019023504, WO2019025865, WO2019027903, WO2019027935, WO2019028051, WO2019028182, WO2019028456, WO2019028530, WO2019028980, WO2019030377, WO2019031938, WO2019031939, WO2019032699, WO2019032898, WO2019032916, WO2019032927, WO2019032929, WO2019033057, WO2019033087, WO2019034177, WO2019036688, WO2019036725, WO2019036842, WO2019036855, WO2019036856, WO2019037711, WO2019038368, WO2019040617, WO2019040649, WO2019042153, WO2019042555, WO2019043166, WO2019044926, WO2019046225, WO2019046856, WO2019047932, WO2019050326, WO2019051127, WO2019051128, WO2019051132, WO2019051335, WO2019051470, WO2019051586, WO2019052562, WO2019053420, WO2019055842, WO2019057099, WO2019057102, WO2019057122, WO2019057772, WO2019057992, WO2019060619, WO2019062832, WO2019066535, WO2019066536, WO2019067805, WO2019067815, WO2019070435, WO2019070541, WO2019070655, WO2019070740, WO2019073058, WO2019073080, WO2019075300, WO2019075385, WO2019075433, WO2019075487, WO2019076277, WO2019076486, WO2019078591, WO2019078600, WO2019078916, WO2019079240, WO2019079249, WO2019079337, WO2019079569, WO2019079671, WO2019079772, WO2019080858, WO2019081022, WO2019081595, WO2019081692, WO2019082020, WO2019082208, WO2019083506, WO2019084018, WO2019084057, WO2019084064, WO2019084067, WO2019084552, WO2019085102, WO2019085238, WO2019086500, WO2019086512, WO2019087087, WO2019088658, WO2019089610, WO2019089755, WO2019089855, WO2019089921, WO2019089969, WO2019089982, WO2019090003, WO2019090004, WO2019090069, WO2019090074, WO2019090076, WO2019090078, WO2019090081, WO2019090082, WO2019090085, WO2019090088, WO2019090090, WO2019090110, WO2019090355, WO2019092181, WO2019092451, WO2019092452, WO2019092505, WO2019092507, WO2019092677, WO2019094095, WO2019094482, WO2019094700, WO2019094983, WO2019096136, WO2019097305, WO2019099433, WO2019099454, WO2016124768, WO2019057755, WO2018222741, WO2018209265, WO2018160722, WO2018147018, WO2018136775, WO2018136774, WO2018125813, WO2018098553, WO2018085801, WO2018034298, WO2018023976, WO2018002902, WO2017217744, WO2017205377, WO2017139153, WO2017125892, WO2017116212, WO2017074878, WO2017070603, WO2017070594, WO2017059813, and WO2017053482, the contents of each of which are herein incorporated by reference in their entirety.

[0398] In some embodiments, payloads may encode infectious disease-associated antibodies (or fragments thereof) taught in U.S. Pat. No. 8,562,996, the contents of which are herein incorporated by reference in their entirety. Such embodiments may include antibody AM14 or fragments thereof. In certain embodiments, the payload region encodes antibody AM14 or fragments thereof selected from SEQ ID NO: 78-79, 101, 108 as described in U.S. Pat. No. 8,562,996.

[0399] In some embodiments, payloads may encode infectious disease-associated antibodies (or fragments thereof) taught in U.S. Pat. No. 8,562,996, the contents of which are herein incorporated by reference in their entirety. Such embodiments may include antibody AM16 or fragments thereof. In certain embodiments, the payload region encodes antibody AM16 or fragments thereof selected from SEQ ID NO: 85-86, 116, 123 as described in U.S. Pat. No. 8,562,996.

[0400] In some embodiments, payloads may encode infectious disease-associated antibodies (or fragments thereof) taught in U.S. Pat. No. 8,562,996, the contents of which are herein incorporated by reference in their entirety. Such embodiments may include antibody AM23 or fragments thereof. In certain embodiments, the payload region encodes antibody AM23 or fragments thereof selected from SEQ ID NO: 92-93, 131, 138 as described in U.S. Pat. No. 8,562,996.

[0401] In some embodiments, payloads may encode infectious disease-associated antibodies (or fragments thereof) taught in US Patent Publication Number U520190031747, the contents of which are herein incorporated by reference in their entirety. Such embodiments may include antibodies AM22 or fragments thereof. In one embodiment, the payload region encodes antibody AM22 or fragments thereof selected from SEQ ID NO: 357-358 as described in US20190031747

[0402] In some embodiments, payloads may encode infectious disease-associated antibodies (or fragments thereof) taught in U.S. Pat. No. 8,562,996, the contents of which are herein incorporated by reference in their entirety. Such embodiments may include antibodies MEDI8897 or fragments thereof. In certain embodiments, the payload region encodes antibody MEDI8897 or fragments thereof selected from SEQ ID NO: 59-72 as described in U.S. Pat. No. 8,562,996.

[0403] In some embodiments, payloads may encode infectious disease-associated antibodies (or fragments thereof) taught in US Patent Publication Number US20190031747, the contents of which are herein incorporated by reference in their entirety. Such embodiments may include antibody REGN222 or fragments thereof. In certain embodiments, the payload region encodes antibody REGN222 or fragments thereof selected from SEQ ID NO: 1.315 and 363-364 as described in US20190031747.

[0404] In some embodiments, payloads may encode infectious disease-associated antibodies (or fragments thereof) taught in US Patent Publication Number US20190015509, the contents of which are herein incorporated by reference in their entirety. Such embodiments may include antibody MEDI8852 or fragments thereof. In certain embodiments, the payload region encodes antibody MEDI8852 or fragments thereof selected from SEQ ID NO: 1-10 as described in US20190015509.

[0405] In some embodiments, payloads may encode infectious disease-associated antibodies (or fragments thereof) taught in US Patent Publication Number US20190031747, the contents of which are herein incorporated by reference in their entirety. Such embodiments may include antibody Palivizumab or SYNAGIS, or fragments thereof. In certain embodiments, the payload region encodes antibody Palivizumab or SYNAGIS or fragments thereof selected from SEQ ID NO: 361.362 as described in US20190031747.

[0406] In some embodiments, payloads may encode infectious disease-associated antibodies (or fragments thereof) taught in U.S. Pat. No. 7,132,100, the contents of which are herein incorporated by reference in their entirety. Such embodiments may include SYNAGIS, or fragments thereof. In certain embodiments, the payload region encodes antibody SYNAGIS or fragments thereof selected from SEQ ID NO:1-6 as described in U.S. Pat. No. 7,132,100.

[0407] In some embodiments, payloads may encode infectious disease-associated antibodies (or fragments thereof) taught in US Patent Publication Number U520190031747, the contents of which are herein incorporated by reference in their entirety. Such embodiments may include antibody NUMAX or Motavizumab, or fragments thereof. In certain embodiments, the payload region encodes antibody NUMAX or Motavizumab or fragments thereof selected from SEQ ID NO: 359-360 as described in US20190031747.

[0408] In some embodiments, payloads may encode infectious disease-associated antibodies (or fragments thereof) taught in International Publication Number WO2016124768, the contents of which are herein incorporated by reference in their entirety. Such embodiments may include antibody MD3606, or fragments thereof.

[0409] In some embodiments, the payload region of the viral particle comprises one or more nucleic acid sequences encoding one or more of the infectious disease related payload antibody polypeptides listed in Tables 32-53 of U.S. provisional patent application 62/844,433, the contents of which are herein incorporated by reference in their entirety.

[0410] In some embodiments, the payload region of the viral particle comprises one or more nucleic acid sequences encoding one or more of the payload antibody polypeptides listed in Table 32 of U.S. provisional patent application 62/844,433 against Influenza virus (INFL1-INFL1085; SEQ ID NO: 23496-24580), the contents of which are herein incorporated by reference in their entirety.

[0411] In some embodiments, the payload region of the viral particle comprises one or more nucleic acid sequences, fragments or variants thereof or encodes one or more polypeptides, fragments or variants thereof described in U.S. Pat. Nos. 8,003,106 and 8,540,995, International Patent Publication No. WO2015028478, WO2012045001, US Publication No. US20150239960 and US20130251715, the contents of each of which are herein incorporated by reference in their entirety, against influenza.

[0412] In some embodiments, the payload region of the viral particle comprises one or more nucleic acid sequences encoding one or more of the payload antibody polypeptides listed in Table 33 of U.S. provisional patent application 62/844,433 against Respiratory Syncytial Virus (RSV1-RSV1088; SEQ ID NO: 24581-25668), the contents of which are herein incorporated by reference in their entirety.

[0413] In some embodiments, the payload region of the viral particle comprises one or more nucleic acid sequences, fragments or variants thereof or encodes one or more polypeptides, fragments or variants thereof described in US Publication No. US20140363427, and International Publication No. WO2004083373, the contents of each of which are herein incorporated by reference in their entirety, against RSV F or RSV G protein.

[0414] In some embodiments, the payload region of the viral particle comprises one or more nucleic acid sequences encoding one or more of the payload antibody polypeptides listed in Table 34 of U.S. provisional patent application 62/844,433 against Hepatitis B, Hepatitis C and/or Hepatitis D (HEPBD1-HEPBD317; SEQ ID NO: 25669-25985), the contents of which are herein incorporated by reference in their entirety.

[0415] In some embodiments, the payload region of the viral particle comprises one or more nucleic acid sequences, fragments or variants thereof or encodes one or more polypeptides, fragments or variants thereof described in U.S. Pat. No. 7,241,445, and U8858947, the contents of each of which are herein incorporated by reference in their entirety, against HCV.

[0416] In some embodiments, the payload region of the viral particle comprises one or more nucleic acid sequences, fragments or variants thereof or encodes one or more polypeptides, fragments or variants thereof described in US Publication No. US20150072885 and US20110046354, U.S. Pat. No. 5,204,095, European Publication No. EP0232921, EP0038642, and EP0186371, and International Publication No. WO1994011495, the contents of each of which are herein incorporated by reference in their entirety, against HBV.

[0417] In some embodiments, the payload region of the viral particle comprises one or more nucleic acid sequences, fragments or variants thereof or encodes one or more polypeptides, fragments or variants thereof described in U.S. Pat. No. 6,020,195, the contents of which are herein incorporated by reference in their entirety, against HGV (hepatitis G virus).

[0418] In some embodiments, the payload region of the viral particle comprises one or more nucleic acid sequences encoding one or more of the payload antibody polypeptides listed in Table 35 of U.S. provisional patent application 62/844,433 against Herpes Virus (HERP1-HERP109; SEQ ID NO: 25986-26094), the contents of which are herein incorporated by reference in their entirety.

[0419] In some embodiments, the payload region of the viral particle comprises one or more nucleic acid sequences, fragment or variants thereof or encodes one or more polypeptides, fragments or variants thereof described in International Publication No. WO2010109874, and WO1997026329, the contents of each of which are herein incorporated by reference in their entirety, against HSV.

[0420] In some embodiments, the payload region of the viral particle comprises one or more nucleic acid sequences, fragment or variants thereof or encodes one or more polypeptides, fragments or variants thereof described in International Publication No. WO1995031546, the contents of which are herein incorporated by reference in their entirety, against VZV.

[0421] In some embodiments, the payload region of the viral particle comprises one or more nucleic acid sequences encoding one or more of the payload antibody polypeptides listed in Table 36 of U.S. provisional patent application 62/844,433 against Coronavirus (CORV1-CORV65; SEQ ID NO: 26095-26159), the contents of which are herein incorporated by reference in their entirety.

[0422] In some embodiments, the payload region of the viral particle comprises one or more nucleic acid sequences, fragments or variants thereof or encodes one or more polypeptides, fragments or variants thereof described in U.S. Pat. No. 7,629,443, US Publication No. US20080254440, Chinese Publication No. CN103613666, CN1570638, CN101522208, CN1673231, CN1590409, CN1557838, and CN1488645, the contents of each of which are herein incorporated by reference in their entirety, against SARS.

[0423] In some embodiments, the payload region of the viral particle comprises one or more nucleic acid sequences encoding one or more of the payload antibody polypeptides listed in Table 37 of U.S. provisional patent application 62/844,433 against John Cunningham Virus (JCV1-JCV68; SEQ ID NO: 26160-26223), the contents of which are herein incorporated by reference in their entirety.

[0424] In some embodiments, the payload region of the viral particle comprises one or more nucleic acid sequences encoding one or more of the payload antibody polypeptides listed in Table 38 of U.S. provisional patent application 62/844,433 against Poxvirus (POXV1-POXV11; SEQ ID NO: 26224-26233), the contents of which are herein incorporated by reference in their entirety.

[0425] In some embodiments, the payload region of the viral particle comprises one or more nucleic acid sequences encoding one or more of the payload antibody polypeptides listed in Table 39 of U.S. provisional patent application 62/844,433 against Enterovirus 71 (ENTV1-ENTV16; SEQ ID NO: 26234-26249), the contents of which are herein incorporated by reference in their entirety.

[0426] In some embodiments, the payload region of the viral particle comprises one or more nucleic acid sequences, fragments or variants thereof or encodes one or more polypeptides, fragments or variants thereof described in Chinese Publication No. CN104357400, the contents of which are herein incorporated by reference in their entirety, against EV71.

[0427] In some embodiments, the payload region of the viral particle comprises one or more nucleic acid sequences, fragments or variants encoding MAB979, fragments or variants thereof for treating a disease and/or disorder or preventing a disease and/or disorder. As a non-limiting example, the disease and/or disorder is EV71.

[0428] In some embodiments, the payload region of the viral particle comprises one or more nucleic acid sequences encoding one or more of the payload antibody polypeptides listed in Table 40 of U.S. provisional patent application 62/844,433 against Rubella Virus (RUBV1-RUBV4; SEQ ID NO: 26250-26253), the contents of which are herein incorporated by reference in their entirety.

[0429] In some embodiments, the payload region of the viral particle comprises one or more nucleic acid sequences encoding one or more of the payload antibody polypeptides listed in Table 41 of U.S. provisional patent application 62/844,433 against Human Papilloma Virus (HPV1-HPV2; SEQ ID NO: 6896-6897), the contents of which are herein incorporated by reference in their entirety.

[0430] In some embodiments, the payload region of the viral particle comprises one or more nucleic acid sequences, fragments or variants thereof or encodes one or more polypeptides, fragments or variants thereof described in US Publication No. US20130337438, the contents of which are herein incorporated by reference in their entirety, against HPV.

[0431] In some embodiments, the payload region of the viral particle comprises one or more nucleic acid sequences encoding one or more of the broadly neutralizing payload antibody polypeptides listed in Table 42 of U.S. provisional patent application 62/844,433 against viruses (VIR1-VIR14; SEQ ID NO: 26256-26269), the contents of which are herein incorporated by reference in their entirety.

[0432] In some embodiments, the payload region of the viral particle comprises one or more nucleic acid sequences encoding one or more of the payload antibody polypeptides listed in Table 43 of U.S. provisional patent application 62/844,433 against Pseudomonas Aeruginosa (PSEU1-PSEU285; SEQ ID NO: 26270-26554), the contents of which are herein incorporated by reference in their entirety.

[0433] In some embodiments, the payload region of the viral particle comprises one or more nucleic acid sequences encoding one or more of the payload antibody polypeptides listed in Table 44 of U.S. provisional patent application 62/844,433 against Streptococcus bacteria (STRP1-STRP40; SEQ ID NO: 26555-26594), the contents of which are herein incorporated by reference in their entirety.

[0434] In some embodiments, the payload region of the viral particle comprises one or more nucleic acid sequences, fragment or variants thereof or encodes one or more polypeptides, fragments or variants thereof described in US Pub No. US20040198960 and US20130195876, the contents of each of which are herein incorporated by reference in their entirety, against Streptococcus Pneunioniae infection.

[0435] In some embodiments, the payload region of the viral particle comprises one or more nucleic acid sequences, fragments or variants encoding Afelimomab, fragments or variants thereof for treating a disease and/or disorder or preventing a disease and/or disorder. As a non-limiting example, the disease and/or disorder is sepsis.

[0436] In some embodiments, the payload region of the viral particle comprises one or more nucleic acid sequences, fragments or variants encoding Nebacumab, fragments or variants thereof for treating a disease and/or disorder or preventing a disease and/or disorder. As a non-limiting example, the disease and/or disorder is sepsis.

[0437] In some embodiments, the payload region of the viral particle comprises one or more nucleic acid sequences encoding one or more of the payload antibody polypeptides listed in Table 45 of U.S. provisional patent application 62/844,433 against Staphylococcal bacteria and related bacteria (STPH1-STPH249; SEQ ID NO: 26595-26843), the contents of which are herein incorporated by reference in their entirety.

[0438] In some embodiments, the payload region of the viral particle comprises one or more nucleic acid sequences, fragments or variants thereof or encodes one or more polypeptides, fragments or variants thereof described in International Publication No. WO2000071585, WO2013162751, WO2015089502, WO2015088346 (e.g., SEQ ID NO: 17), US Pub No. US20030224000, US20080014202, US20140037650, US20140170134, U.S. Pat. No. 8,460,666, the contents of each of which are herein incorporated by reference in their entirety, against Staphylococcus infection.

[0439] In some embodiments, the payload region of the viral particle comprises one or more nucleic acid sequences encoding one or more of the payload antibody polypeptides listed in Table 46 of U.S. provisional patent application 62/844,433 against Clostridium Tetani (CTET1-CTET57; SEQ ID NO: 26844-26900), the contents of which are herein incorporated by reference in their entirety.

[0440] In some embodiments, the payload region of the viral particle comprises one or more nucleic acid sequences encoding one or more of the payload antibody polypeptides listed in Table 47 of U.S. provisional patent application 62/844,433 against Bordetella Pertussis and/or Bordetella Parapertussis (BORT1-BORT25; SEQ ID NO: 26901-26925), the contents of which are herein incorporated by reference in their entirety.

[0441] In some embodiments, the payload region of the viral particle comprises one or more nucleic acid sequences encoding one or more of the payload antibody polypeptides listed in Table 48 of U.S. provisional patent application 62/844,433 against Mycobacteria (MYCO1-MYCO16; SEQ ID NO: 26926-26941), the contents of which are herein incorporated by reference in their entirety.

[0442] In some embodiments, the payload region of the viral particle comprises one or more nucleic acid sequences encoding one or more of the payload antibody polypeptides listed in Table 49 of U.S. provisional patent application 62/844,433 against Francisella Tularensis (FRAN1-FRAN16; SEQ ID NO: 26942-26957), the contents of which are herein incorporated by reference in their entirety.

[0443] In some embodiments, the payload region of the viral particle comprises one or more nucleic acid sequences encoding one or more of the payload antibody polypeptides listed in Table 50 of U.S. provisional patent application 62/844,433 against Bacteria (BACI1-BACI24; SEQ ID NO: 26958-26981), the contents of which are herein incorporated by reference in their entirety.

[0444] In some embodiments, the payload region of the viral particle comprises one or more nucleic acid sequences, fragments or variants encoding Doxorubicin, fragments or variants thereof for treating a disease and/or disorder or preventing a disease and/or disorder. As a non-limiting example, the disease and/or disorder is bacterial infection.

[0445] In some embodiments, the payload region of the viral particle comprises one or more nucleic acid sequences encoding one or more of the payload antibody polypeptides listed in Table 51 of U.S. provisional patent application 62/844,433 against Toxoplasma gondii (TOXO1-TOXO2; SEQ ID NO: 26982-26983), the contents of which are herein incorporated by reference in their entirety.

[0446] In some embodiments, the payload region of the viral particle comprises one or more nucleic acid sequences encoding one or more of the payload antibody polypeptides listed in Table 52 of U.S. provisional patent application 62/844,433 against Candida Yeast (CAND1; SEQ ID NO: 26984), the contents of which are herein incorporated by reference in their entirety.

[0447] In some embodiments, the payload region of the viral particle comprises one or more nucleic acid sequences encoding one or more of the payload antibody polypeptides listed in Table 53 of U.S. provisional patent application 62/844,433 (HIV1-HIV1601; SEQ ID NO: 26985-28585), the contents of which are herein incorporated by reference in their entirety.

[0448] In some embodiments, the payload region of the viral particle comprises one or more nucleic acid sequences, fragments or variants thereof or encodes one or more polypeptides, fragments or variants thereof described in European Patent Publication No. EP327000, EP478689, EP554401, EP581353 and EP711439, US Publication No. US20110104163, US20110212106, US20130215726 and US20130251726, U.S. Pat. Nos. 5,266,479, 5,804,440, 6,657,050, 8,637,036, and 9,090,675, and International Publication No. WO2012154312, WO2013163427, WO2014043386, WO2015048462, WO2015048610, WO2015048770 the contents of each of which are herein incorporated by reference in their entirety, against HIV.

### Payload Antibodies: Non-Infectious Disease

### Antibodies for the Treatment of Cancer and Immunoinflammatory Diseases

[0449] In some embodiments, the payload region of the AAV particle comprises one or more nucleic acid sequences encoding cancer and immunoinflammatory diseases-associated antibodies, variants or fragments thereof.

[0450] In some embodiments, the payload region of the AAV particle comprises one or more nucleic acid sequences encoding one or more of the payload antibody polypeptides listed in Table 4, or variants or fragments thereof.

[0451] In some embodiments, the payload region of the AAV particle comprises one or more nucleic acid sequences listed in Table 4, or variants or fragments thereof.

[0452] In some embodiments, the payload region of the AAV particle comprises a nucleic acid sequence encoding a payload antibody with at least 50% identity to one or more payload antibody polypeptides listed in Table 4. The encoded antibody polypeptide may have 50%, 51%, 52%, 53%, 54%, 55%, 56%, 57%, 58%, 59%, 60%, 61%, 62%, 63%, 64%, 65%, 66%, 67%, 68%, 69%, 70%, 71%, 72%, 73%, 74%, 75%, 76%, 77%, 78%, 79%, 80%, 81%, 82%, 83%, 84%, 85%, 86%, 87%, 88%, 89%, 90%, 91%, 92%, 93%, 94%, 95%, 96%, 97%, 98%, 99%, or 100% identity to one or more of the payload antibody polypeptides listed in Table 4, or variants or fragments thereof.

[0453] In some embodiments, the full sequence of the encoded antibody polypeptide may have 50%, 51%, 52%, 53%, 54%, 55%, 56%, 57%, 58%, 59%, 60%, 61%, 62%, 63%, 64%, 65%, 66%, 67%, 68%, 69%, 70%, 71%, 72%, 73%, 74%, 75%, 76%, 77%, 78%, 79%, 80%, 81%, 82%, 83%, 84%, 85%, 86%, 87%, 88%, 89%, 90%, 91%, 92%, 93%, 94%, 95%, 96%, 97%, 98%, 99%, or 100% identity to one or more of the payload antibody polypeptides listed in Table 4, or variants or fragments thereof.

[0454] In some embodiments, the variable region sequence(s) of the encoded antibody polypeptide may have 50%, 51%, 52%, 53%, 54%, 55%, 56%, 57%, 58%, 59%,60%, 61%, 62%, 63%, 64%, 65%, 66%, 67%, 68%, 69%, 70%, 71%, 72%, 73%, 74%, 75%, 76%, 77%, 78%, 79%, 80%, 81%, 82%, 83%,84%,85%, 86%, 87%, 88%, 89%, 90%, 91%, 92%, 93%, 94%, 95%, 96%, 97%, 98%, 99%, or 100% identity to one or more of the payload antibody polypeptides listed in Table 4, or variants or fragments thereof.

[0455] In some embodiments, the heavy chain of the encoded antibody polypeptide may have 50%, 51%, 52%, 53%, 54%, 55%, 56%, 57%, 58%, 59%, 60%, 61%, 62%, 63%, 64%, 65%, 66%, 67%, 68%, 69%, 70%, 71%, 72%, 73%, 74%, 75%, 76%, 77%, 78%, 79%, 80%, 81%, 82%, 83%, 84%, 85%, 86%, 87%, 88%, 89%, 90%, 91%, 92%, 93%, 94%, 95%, 96%, 97%, 98%, 99%, or 100% identity to one or more of the payload heavy chain antibody polypeptides listed in Table 4, or variants or fragments thereof.

[0456] In some embodiments, the light chain of the encoded antibody polypeptide may have 50%, 51%, 52%, 53%, 54%, 55%, 56%, 57%, 58%, 59%, 60%, 61%, 62%, 63%, 64%, 65%, 66%, 67%, 68%, 69%, 70%, 71%, 72%, 73%, 74%, 75%, 76%, 77%, 78%, 79%, 80%, 81%, 82%, 83%, 84%, 85%%,%, 87%,88%, 89%, 90%,91%, 92%, 93%,94%,95%, 96%,97%,98%, 99%, or 100% identity to one or more of the payload light chain antibody polypeptides listed in Table 4, or variants or fragments thereof.

[0457] In some embodiments, the CDR region of the encoded antibody polypeptide may have 50%, 51%, 52%, 53%, 54%, 55%, 56%, 57%, 58%, 59%, 60%, 61%, 62%,63%,64%, 65%, 66%,67%, 68%, 69%, 70%, 71%, 72%, 73%, 74%, 75%, 76%, 77%, 78%, 79%, 80%, 81%, 82%, 83%, 84%, 85%, 86%, 87%, 88%, 89%, 90%, 91%, 92%, 93%, 94%, 95%, 96%, 97%, 98%, 99%, or 100% identity to the CDRs of one or more of the payload antibody polypeptides listed in Table 4, or variants or fragments thereof.

[0458] In some embodiments, the payload antibody has 90% identity to one or more of the antibody polypeptides listed in Table 4, or variants or fragments thereof.

[0459] In some embodiments, the payload antibody has 91% identity to one or more of the antibody polypeptides listed in Table 4, or variants or fragments thereof.

[0460] In some embodiments, the payload antibody has 92% identity to one or more of the antibody polypeptides listed in Table 4, or variants or fragments thereof.

[0461] In some embodiments, the payload antibody has 93% identity to one or more of the antibody polypeptides listed in Table 4, or variants or fragments thereof.

[0462] In some embodiments, the payload antibody has 94% identity to one or more of the antibody polypeptides listed in Table 4, or variants or fragments thereof.

[0463] In some embodiments, the payload antibody has 95% identity to one or more of the antibody polypeptides listed in Table 4, or variants or fragments thereof.

[0464] In some embodiments, the payload antibody has 96% identity to one or more of the antibody polypeptides listed in Table 4, or variants or fragments thereof.

[0465] In some embodiments, the payload antibody has 97% identity to one or more of the antibody polypeptides listed in Table 4, or variants or fragments thereof.

[0466] In some embodiments, the payload antibody has 98% identity to one or more of the antibody polypeptides listed in Table 4, or variants or fragments thereof.

[0467] In some embodiments, the payload antibody has 99% identity to one or more of the antibody polypeptides listed in Table 4, or variants or fragments thereof.

[0468] In some embodiments, the payload antibody has 100% identity to one or more of the antibody polypeptides listed in Table 4, or variants or fragments thereof.

[0469] In some embodiments, the payload antibody may be variants of any of the antibody polypeptides listed in Table 4, that exclude one or more amino acids designated as “X” or “x” in the described polypeptide sequence, wherein X may represent any amino acid. In some embodiments, the payload nucleic acid sequence may be variants of any of the nucleic acid sequences listed in Table 4, that exclude one or more nucleic acids designated as “n” or “N” in the described nucleic acid sequence, wherein n may represent any nucleic acid.

TABLE 4
Cancer and Immunoinflammatory Antibodies

| | | Type | | SEQ |
|---|---|---|---|---|
| Ab ID | Description | (PRT/DNA) | Reference | ID NO |
| CII1 | CDR | PRT | WO2014028776; SEQ ID NO: 58 | 2168 |
| CII2 | CDR | PRT | WO2014028776; SEQ ID NO: 57 | 2169 |
| CII3 | CDR | PRT | WO2014028776; SEQ ID NO: 55 | 2170 |
| CII4 | CDR | PRT | WO2014028776; SEQ ID NO: 59 | 2171 |
| CII5 | CDR | PRT | WO2014028776; SEQ ID NO: 56 | 2172 |
| CII6 | CDR | PRT | WO2014028776; SEQ ID NO: 60 | 2173 |
| CII7 | CDR | PRT | US20180134806; SEQ ID NO: 13 | 2174 |
| CII8 | CDR | PRT | US20180134806; SEQ ID NO: 62 | 2175 |
| CII9 | CDR | PRT | US20180134806; SEQ ID NO: 63 | 2176 |
| CII10 | CDR | PRT | US20180134806; SEQ ID NO: 59 | 2177 |
| CII11 | CDR | PRT | US20180134806; SEQ ID NO: 61 | 2178 |
| CII12 | CDR | PRT | US20180134806; SEQ ID NO: 60 | 2179 |
| CII13 | CDR | PRT | US20180134806; SEQ ID NO: 9 | 2180 |
| CII14 | CDR | PRT | US20180134806; SEQ ID NO: 39 | 2181 |
| CII15 | CDR | PRT | US20180134806; SEQ ID NO: 43 | 2182 |
| CII16 | CDR | PRT | US20180134806; SEQ ID NO: 40 | 2183 |
| CII17 | CDR | PRT | US20180134806; SEQ ID NO: 42 | 2184 |
| CII18 | CDR | PRT | US20180134806; SEQ ID NO: 41 | 2185 |
| CII19 | CDR | PRT | US20180134806; SEQ ID NO: 10 | 2186 |
| CII20 | CDR | PRT | US20180134806; SEQ ID NO: 53 | 2187 |
| CII21 | CDR | PRT | US20180134806; SEQ ID NO: 56 | 2188 |
| CII22 | CDR | PRT | US20180134806; SEQ ID NO: 58 | 2189 |
| CII23 | CDR | PRT | US20180134806; SEQ ID NO: 57 | 2190 |
| CII24 | CDR | PRT | US20180134806; SEQ ID NO: 54 | 2191 |
| CII25 | CDR | PRT | US20180134806; SEQ ID NO: 55 | 2192 |
| CII26 | CDR | PRT | US20180134806; SEQ ID NO: 52 | 2193 |
| CII27 | CDR | PRT | US20180134806; SEQ ID NO: 14 | 2194 |
| CII28 | CDR | PRT | US20180134806; SEQ ID NO: 31 | 2195 |
| CII29 | CDR | PRT | US20180134806; SEQ ID NO: 32 | 2196 |
| CII30 | CDR | PRT | US20180134806; SEQ ID NO: 35 | 2197 |
| CII31 | CDR | PRT | US20180134806; SEQ ID NO: 34 | 2198 |
| CII32 | CDR | PRT | US20180134806; SEQ ID NO: 38 | 2199 |
| CII33 | CDR | PRT | US20180134806; SEQ ID NO: 37 | 2200 |
| CII34 | CDR | PRT | US20180134806; SEQ ID NO: 36 | 2201 |
| CII35 | CDR | PRT | US20180134806; SEQ ID NO: 33 | 2202 |
| CII36 | CDR | PRT | US20180134806; SEQ ID NO: 29 | 2203 |
| CII37 | CDR | PRT | US20180134806; SEQ ID NO: 30 | 2204 |
| CII38 | CDR | PRT | US20180134806; SEQ ID NO: 7 | 2205 |
| CII39 | CDR | PRT | US20180134806; SEQ ID NO: 8 | 2206 |
| CII40 | CDR | PRT | US20180134806; SEQ ID NO: 6 | 2207 |
| CII41 | CDR | PRT | US20180134806; SEQ ID NO: 47 | 2208 |
| CII42 | CDR | PRT | US20180134806; SEQ ID NO: 46 | 2209 |
| CII43 | CDR | PRT | US20180134806; SEQ ID NO: 44 | 2210 |
| CII44 | CDR | PRT | US20180134806; SEQ ID NO: 51 | 2211 |
| CII45 | CDR | PRT | US20180134806; SEQ ID NO: 45 | 2212 |
| CII46 | CDR | PRT | US20180134806; SEQ ID NO: 50 | 2213 |
| CII47 | CDR | PRT | US20180134806; SEQ ID NO: 11 | 2214 |
| CII48 | CDR | PRT | US20180134806; SEQ ID NO: 49 | 2215 |
| CII49 | CDR | PRT | US20180134806; SEQ ID NO: 48 | 2216 |
| CII50 | CDR | PRT | US20180134806; SEQ ID NO: 12 | 2217 |
| CII51 | CDR | PRT | US20190085076; SEQ ID NO: 37 | 2218 |
| CII52 | CDR | PRT | W02016201389; SEQ ID NO: 37 | 2219 |
| CII53 | CDR | PRT | US20190085076; SEQ ID NO: 28 | 2220 |
| CII54 | CDR | PRT | W02016201389; SEQ ID NO: 28 | 2221 |
| CII55 | CDR | PRT | W02016201389; SEQ ID NO: 158 | 2222 |
| CII56 | CDR | PRT | US20190085076; SEQ ID NO: 137 | 2223 |
| CII57 | CDR | PRT | W02016201389; SEQ ID NO: 137 | 2224 |
| CII58 | CDR | PRT | W02016201389; SEQ ID NO: 165 | 2225 |
| CII59 | CDR | PRT | US20190085076; SEQ ID NO: 213 | 2226 |
| CII60 | CDR | PRT | W02016201389; SEQ ID NO: 213 | 2227 |
| CII61 | CDR | PRT | W02016201389; SEQ ID NO: 168 | 2228 |
| CII62 | CDR | PRT | W02016201389; SEQ ID NO: 216 | 2229 |
| CII63 | CDR | PRT | W02016201389; SEQ ID NO: 162 | 2230 |
| CII64 | CDR | PRT | US20190085076; SEQ ID NO: 173 | 2231 |
| CII65 | CDR | PRT | W02016201389; SEQ ID NO: 173 | 2232 |
| CII66 | CDR | PRT | W02016201389; SEQ ID NO: 217 | 2233 |
| CII67 | CDR | PRT | W02016201389; SEQ ID NO: 218 | 2234 |
| CII68 | CDR | PRT | W02016201389; SEQ ID NO: 229 | 2235 |
| CII69 | CDR | PRT | W02016201389; SEQ ID NO: 164 | 2236 |
| CII70 | CDR | PRT | W02016201389; SEQ ID NO: 201 | 2237 |
| CII71 | CDR | PRT | W02016201389; SEQ ID NO: 161 | 2238 |
| CII72 | CDR | PRT | US20190085076; SEQ ID NO: 211 | 2239 |
| CII73 | CDR | PRT | W02016201389; SEQ ID NO: 211 | 2240 |
| CII74 | CDR | PRT | US20190085076; SEQ ID NO: 190 | 2241 |
| CII75 | CDR | PRT | W02016201389; SEQ ID NO: 190 | 2242 |
| CII76 | CDR | PRT | W02016201389; SEQ ID NO: 176 | 2243 |
| CII77 | CDR | PRT | W02016201389; SEQ ID NO: 167 | 2244 |
| CII78 | CDR | PRT | US20190085076; SEQ ID NO: 191 | 2245 |
| CII79 | CDR | PRT | W02016201389; SEQ ID NO: 191 | 2246 |
| CII80 | CDR | PRT | US20190085076; SEQ ID NO: 179 | 2247 |
| CII81 | CDR | PRT | W02016201389; SEQ ID NO: 179 | 2248 |
| CII82 | CDR | PRT | US20190085076; SEQ ID NO: 170 | 2249 |
| CII83 | CDR | PRT | W02016201389; SEQ ID NO: 170 | 2250 |
| CII84 | CDR | PRT | W02016201389; SEQ ID NO: 220 | 2251 |
| CII85 | CDR | PRT | W02016201389; SEQ ID NO: 178 | 2252 |
| CII86 | CDR | PRT | US20190085076; SEQ ID NO: 189 | 2253 |
| CII87 | CDR | PRT | W02016201389; SEQ ID NO: 189 | 2254 |
| CII88 | CDR | PRT | W02016201389; SEQ ID NO: 221 | 2255 |
| CII89 | CDR | PRT | W02016201389; SEQ ID NO: 206 | 2256 |
| CII90 | CDR | PRT | W02016201389; SEQ ID NO: 210 | 2257 |
| CII91 | CDR | PRT | W02016201389; SEQ ID NO: 172 | 2258 |
| CII92 | CDR | PRT | US20190085076; SEQ ID NO: 222 | 2259 |
| CII93 | CDR | PRT | W02016201389; SEQ ID NO: 222 | 2260 |
| CII94 | CDR | PRT | W02016201389; SEQ ID NO: 199 | 2261 |
| CII95 | CDR | PRT | US20190085076; SEQ ID NO: 175 | 2262 |
| CII96 | CDR | PRT | W02016201389; SEQ ID NO: 175 | 2263 |
| CII97 | CDR | PRT | US20190085076; SEQ ID NO: 163 | 2264 |
| CII98 | CDR | PRT | W02016201389; SEQ ID NO: 163 | 2265 |
| CII99 | CDR | PRT | US20190085076; SEQ ID NO: 226 | 2266 |
| CII100 | CDR | PRT | W02016201389; SEQ ID NO: 226 | 2267 |
| CII101 | CDR | PRT | W02016201389; SEQ ID NO: 166 | 2268 |
| CII102 | CDR | PRT | US20190085076; SEQ ID NO: 203 | 2269 |
| CII103 | CDR | PRT | W02016201389; SEQ ID NO: 203 | 2270 |
| CII104 | CDR | PRT | US20190085076; SEQ ID NO: 225 | 2271 |
| CII105 | CDR | PRT | W02016201389; SEQ ID NO: 225 | 2272 |
| CII106 | CDR | PRT | US20199085076; SEQ ID NO: 193 | 2273 |
| CII107 | CDR | PRT | W02016201389; SEQ ID NO: 193 | 2274 |
| CII108 | CDR | PRT | US20190085076; SEQ ID NO: 185 | 2275 |
| CII109 | CDR | PRT | W02016201389; SEQ ID NO: 185 | 2276 |
| CII110 | CDR | PRT | US20190085076; SEQ ID NO: 205 | 2277 |
| CII111 | CDR | PRT | W02016201389; SEQ ID NO: 205 | 2278 |
| CII112 | CDR | PRT | US20199085076; SEQ ID NO: 182 | 2279 |
| CII113 | CDR | PRT | W02016201389; SEQ ID NO: 182 | 2280 |
| CII114 | CDR | PRT | US20190085076; SEQ ID NO: 196 | 2281 |
| CII115 | CDR | PRT | W02016201389; SEQ ID NO: 196 | 2282 |
| CII116 | CDR | PRT | US20190085076; SEQ ID NO: 195 | 2283 |
| CII117 | CDR | PRT | W02016201389; SEQ ID NO: 195 | 2284 |
| CII118 | CDR | PRT | US20190085076; SEQ ID NO: 224 | 2285 |
| CII119 | CDR | PRT | W02016201389; SEQ ID NO: 224 | 2286 |
| CII120 | CDR | PRT | US29190085076; SEQ ID NO: 188 | 2287 |
| CII121 | CDR | PRT | W02016201389; SEQ ID NO: 188 | 2288 |
| CII122 | CDR | PRT | US20190085076; SEQ ID NO: 184 | 2289 |
| CII123 | CDR | PRT | W02016201389; SEQ ID NO: 184 | 2290 |
| CII124 | CDR | PRT | US20190085076; SEQ ID NO: 174 | 2291 |
| CII125 | CDR | PRT | W02016201389; SEQ ID NO: 174 | 2292 |
| CII126 | CDR | PRT | US20190085076; SEQ ID NO: 194 | 2293 |
| CII127 | CDR | PRT | W02016201389; SEQ ID NO: 194 | 2294 |
| CII128 | CDR | PRT | US20190085076; SEQ ID NO: 198 | 2295 |
| CII129 | CDR | PRT | W02016201389; SEQ ID NO: 198 | 2296 |
| CII130 | CDR | PRT | US20190085076; SEQ ID NO: 192 | 2297 |
| CII131 | CDR | PRT | W02016201389; SEQ ID NO: 192 | 2298 |
| CII132 | CDR | PRT | US20190085076; SEQ ID NO: 197 | 2299 |
| CII133 | CDR | PRT | W02016201389; SEQ ID NO: 197 | 2300 |
| CII134 | CDR | PRT | US20190085076; SEQ ID NO: 169 | 2301 |
| CII135 | CDR | PRT | W02016201389; SEQ ID NO: 169 | 2302 |
| CII136 | CDR | PRT | US20190085076; SEQ ID NO: 181 | 2303 |
| CII137 | CDR | PRT | W02016201389; SEQ ID NO: 181 | 2304 |
| CII138 | CDR | PRT | W02016201389; SEQ ID NO: 180 | 2305 |
| CII139 | CDR | PRT | W02016201389; SEQ ID NO: 208 | 2306 |
| CII140 | CDR | PRT | US20190085076; SEQ ID NO: 209 | 2307 |
| CII141 | CDR | PRT | W02016201389; SEQ ID NO: 209 | 2308 |
| CII142 | CDR | PRT | W02016201389; SEQ ID NO: 202 | 2309 |
| CII143 | CDR | PRT | W02016201389; SEQ ID NO: 228 | 2310 |
| CII144 | CDR | PRT | US20190085076; SEQ ID NO: 204 | 2311 |
| CII145 | CDR | PRT | W02016201389; SEQ ID NO: 204 | 2312 |
| CII146 | CDR | PRT | US20190085076; SEQ ID NO: 187 | 2313 |
| CII147 | CDR | PRT | W02016201389; SEQ ID NO: 187 | 2314 |
| CII148 | CDR | PRT | US20190085076; SEQ ID NO: 171 | 2315 |
| CII149 | CDR | PRT | W02016201389; SEQ ID NO: 171 | 2316 |
| CII150 | CDR | PRT | W02016201389; SEQ ID NO: 200 | 2317 |
| CII151 | CDR | PRT | W02016201389; SEQ ID NO: 212 | 2318 |
| CII152 | CDR | PRT | US20190085076; SEQ ID NO: 186 | 2319 |
| CII153 | CDR | PRT | W02016201389; SEQ ID NO: 186 | 2320 |
| CII154 | CDR | PRT | W02016201389; SEQ ID NO: 207 | 2321 |
| CII155 | CDR | PRT | US20190085076; SEQ ID NO: 214 | 2322 |
| CII156 | CDR | PRT | W02016201389; SEQ ID NO: 214 | 2323 |
| CII157 | CDR | PRT | W02016201389; SEQ ID NO: 227 | 2324 |
| CII158 | CDR | PRT | W02016201389; SEQ ID NO: 434 | 2325 |
| CII159 | CDR | PRT | W02016201389; SEQ ID NO: 215 | 2326 |
| CII160 | CDR | PRT | US20190085076; SEQ ID NO: 223 | 2327 |
| CII161 | CDR | PRT | W02016201389; SEQ ID NO: 223 | 2328 |
| CII162 | CDR | PRT | US20190085076; SEQ ID NO: 183 | 2329 |
| CII163 | CDR | PRT | W02016201389; SEQ ID NO: 183 | 2330 |
| CII164 | CDR | PRT | W02016201388; SEQ ID NO: 27 | 2331 |
| CII165 | CDR | PRT | W02016201389; SEQ ID NO: 230 | 2332 |
| CII166 | CDR | PRT | US20190085076; SEQ ID NO: 177 | 2333 |
| CII167 | CDR | PRT | W02016201389; SEQ ID NO: 177 | 2334 |
| CII168 | CDR | PRT | W02016201389; SEQ ID NO: 219 | 2335 |
| CII169 | CDR | PRT | US20190085076; SEQ ID NO: 35 | 2336 |
| CII170 | CDR | PRT | W02016201389; SEQ ID NO: 35 | 2337 |
| CII171 | CDR | PRT | US20190085076; SEQ ID NO: 31 | 2338 |
| CII172 | CDR | PRT | W02016201389; SEQ ID NO: 31 | 2339 |
| CII173 | CDR | PRT | US20190085076; SEQ ID NO: 33 | 2340 |
| CII174 | CDR | PRT | W02016201389; SEQ ID NO: 33 | 2341 |
| CII175 | CDR | PRT | US20190085076; SEQ ID NO: 24 | 2342 |
| CII176 | CDR | PRT | W02016201389; SEQ ID NO: 24 | 2343 |
| CII177 | CDR | PRT | W02016201389; SEQ ID NO: 29 | 2344 |
| CII178 | CDR | PRT | WO2016201388; SEQ ID NO: 188 | 2345 |
| CII179 | CDR | PRT | US20190085076; SEQ ID NO: 32 | 2346 |
| CII180 | CDR | PRT | W02016201389; SEQ ID NO: 32 | 2347 |
| CII181 | CDR | PRT | WO2019028283; SEQ ID NO: 190 | 2348 |
| CII182 | CDR | PRT | WO2019028283; SEQ ID NO: 148 | 2349 |
| CII183 | CDR | PRT | WO2016201388; SEQ ID NO: 191 | 2350 |
| CII184 | CDR | PRT | WO2019028283; SEQ ID NO: 116 | 2351 |
| CII185 | CDR | PRT | WO2019028283; SEQ ID NO: 117 | 2352 |
| CII186 | CDR | PRT | WO2019028283; SEQ ID NO: 115 | 2353 |
| CII187 | CDR | PRT | WO2019028283; SEQ ID NO: 194 | 2354 |
| CII188 | CDR | PRT | WO2019028283; SEQ ID NO: 118 | 2355 |
| CII189 | CDR | PRT | WO2019028283; SEQ ID NO: 196 | 2356 |
| CII190 | CDR | PRT | WO2019028283; SEQ ID NO: 119 | 2357 |
| CII191 | CDR | PRT | WO2019028283; SEQ ID NO: 195 | 2358 |
| CII192 | CDR | PRT | WO2019028283; SEQ ID NO: 120 | 2359 |
| CII193 | CDR | PRT | WO2019028283; SEQ ID NO: 153 | 2360 |
| CII194 | CDR | PRT | US20190085076; SEQ ID NO: 121 | 2361 |
| CII195 | CDR | PRT | W02016201389; SEQ ID NO: 121 | 2362 |
| CII196 | CDR | PRT | WO2016201388; SEQ ID NO: 21 | 2363 |
| CII197 | CDR | PRT | W02016201389; SEQ ID NO: 119 | 2364 |
| CII198 | CDR | PRT | W02016201389; SEQ ID NO: 116 | 2365 |
| CII199 | CDR | PRT | US20190085076; SEQ ID NO: 124 | 2366 |
| CII200 | CDR | PRT | W02016201389; SEQ ID NO: 124 | 2367 |
| CII201 | CDR | PRT | US20190085076; SEQ ID NO: 130 | 2368 |
| CII202 | CDR | PRT | W02016201389; SEQ ID NO: 130 | 2369 |
| CII203 | CDR | PRT | US20190085076; SEQ ID NO: 122 | 2370 |
| CII204 | CDR | PRT | W02016201389; SEQ ID NO: 122 | 2371 |
| CII205 | CDR | PRT | W02016201389; SEQ ID NO: 134 | 2372 |
| CII206 | CDR | PRT | W02016201389; SEQ ID NO: 133 | 2373 |
| CII207 | CDR | PRT | US20190085076; SEQ ID NO: 34 | 2374 |
| CII208 | CDR | PRT | W02016201389; SEQ ID NO: 34 | 2375 |
| CII209 | CDR | PRT | US20190085076; SEQ ID NO: 27 | 2376 |
| CII210 | CDR | PRT | W02016201389; SEQ ID NO: 27 | 2377 |
| CII211 | CDR | PRT | US20190085076; SEQ ID NO: 26 | 2378 |
| CII212 | CDR | PRT | W02016201389; SEQ ID NO: 26 | 2379 |
| CII213 | CDR | PRT | WO2019028283; SEQ ID NO: 106 | 2380 |
| CII214 | CDR | PRT | WO2019028283; SEQ ID NO: 107 | 2381 |
| CII215 | CDR | PRT | US20190085076; SEQ ID NO: 139 | 2382 |
| CII216 | CDR | PRT | W02016201389; SEQ ID NO: 139 | 2383 |
| CII217 | CDR | PRT | US20190085076; SEQ ID NO: 125 | 2384 |
| CII218 | CDR | PRT | W02016201389; SEQ ID NO: 125 | 2385 |
| CII219 | CDR | PRT | US20190085076; SEQ ID NO: 129 | 2386 |
| CII220 | CDR | PRT | W02016201389; SEQ ID NO: 129 | 2387 |
| CII221 | CDR | PRT | US20190085076; SEQ ID NO: 126 | 2388 |
| CII222 | CDR | PRT | W02016201389; SEQ ID NO: 126 | 2389 |
| CII223 | CDR | PRT | US20190085076; SEQ ID NO: 120 | 2390 |
| CII224 | CDR | PRT | W02016201389; SEQ ID NO: 120 | 2391 |
| CII225 | CDR | PRT | US20190085076; SEQ ID NO: 117 | 2392 |
| CII226 | CDR | PRT | W02016201389; SEQ ID NO: 117 | 2393 |
| CII227 | CDR | PRT | W02016201389; SEQ ID NO: 132 | 2394 |
| CII228 | CDR | PRT | W02016201389; SEQ ID NO: 131 | 2395 |
| CII229 | CDR | PRT | WO2016201388; SEQ ID NO: 230 | 2396 |
| CII230 | CDR | PRT | WO2016201388; SEQ ID NO: 189 | 2397 |
| CII231 | CDR | PRT | WO2019028283; SEQ ID NO: 110 | 2398 |
| CII232 | CDR | PRT | WO2019028283; SEQ ID NO: 152 | 2399 |
| CII233 | CDR | PRT | WO2019028283; SEQ ID NO: 186 | 2400 |
| CII234 | CDR | PRT | WO2019028283; SEQ ID NO: 111 | 2401 |
| CII235 | CDR | PRT | WO2019028283; SEQ ID NO: 112 | 2402 |
| CII236 | CDR | PRT | WO2019028283; SEQ ID NO: 113 | 2403 |
| CII237 | CDR | PRT | WO2019028283; SEQ ID NO: 105 | 2404 |
| CII238 | CDR | PRT | WO2019028283; SEQ ID NO: 109 | 2405 |
| CII239 | CDR | PRT | WO2019028283; SEQ ID NO: 108 | 2406 |
| CII240 | CDR | PRT | WO2019028283; SEQ ID NO: 114 | 2407 |
| CII241 | CDR | PRT | WO2016201388; SEQ ID NO: 24 | 2408 |
| CII242 | CDR | PRT | WO2016201388; SEQ ID NO: 23 | 2409 |
| CII243 | CDR | PRT | WO2016201388; SEQ ID NO: 186 | 2410 |
| CII244 | CDR | PRT | WO2016201388; SEQ ID NO: 77 | 2411 |
| CII245 | CDR | PRT | WO2016201388; SEQ ID NO: 22 | 2412 |
| CII246 | CDR | PRT | W02016201389; SEQ ID NO: 159 | 2413 |
| CII247 | CDR | PRT | WO2016201388; SEQ ID NO: 231 | 2414 |
| CII248 | CDR | PRT | WO2016201388; SEQ ID NO: 9 | 2415 |
| CII249 | CDR | PRT | WO2019028283; SEQ ID NO: 131 | 2416 |
| CII250 | CDR | PRT | W02016201389; SEQ ID NO: 10 | 2417 |
| CII251 | CDR | PRT | US20190085076; SEQ ID NO: 38 | 2418 |
| CII252 | CDR | PRT | W02016201389; SEQ ID NO: 38 | 2419 |
| CII253 | CDR | PRT | WO2016201388; SEQ ID NO: 14 | 2420 |
| CII254 | CDR | PRT | WO2016201388; SEQ ID NO: 71 | 2421 |
| CII255 | CDR | PRT | US20190085076; SEQ ID NO: 36 | 2422 |
| CII256 | CDR | PRT | W02016201389; SEQ ID NO: 36 | 2423 |
| CII257 | CDR | PRT | WO2019028283; SEQ ID NO: 192 | 2424 |
| CII258 | CDR | PRT | US20190085076; SEQ ID NO: 88 | 2425 |
| CII259 | CDR | PRT | W02016201389; SEQ ID NO: 88 | 2426 |
| CII260 | CDR | PRT | WO2016201388; SEQ ID NO: 15 | 2427 |
| CII261 | CDR | PRT | WO2016201388; SEQ ID NO: 185 | 2428 |
| CII262 | CDR | PRT | WO2016201388; SEQ ID NO: 70 | 2429 |
| CII263 | CDR | PRT | WO2016201388; SEQ ID NO: 229 | 2430 |
| CII264 | CDR | PRT | W02016201389; SEQ ID NO: 433 | 2431 |
| CII265 | CDR | PRT | US20190085076; SEQ ID NO: 80 | 2432 |
| CII266 | CDR | PRT | W02016201389; SEQ ID NO: 80 | 2433 |
| CII267 | CDR | PRT | US20190085076; SEQ ID NO: 67 | 2434 |
| CII268 | CDR | PRT | W02016201389; SEQ ID NO: 67 | 2435 |
| CII269 | CDR | PRT | US20190085076; SEQ ID NO: 151 | 2436 |
| CII270 | CDR | PRT | W02016201389; SEQ ID NO: 151 | 2437 |
| CII271 | CDR | PRT | US20190085076; SEQ ID NO: 142 | 2438 |
| CII272 | CDR | PRT | W02016201389; SEQ ID NO: 142 | 2439 |
| CII273 | CDR | PRT | US20190085076; SEQ ID NO: 145 | 2440 |
| CII274 | CDR | PRT | W02016201389; SEQ ID NO: 145 | 2441 |
| CII275 | CDR | PRT | US20190085076; SEQ ID NO: 146 | 2442 |
| CII276 | CDR | PRT | W02016201389; SEQ ID NO: 146 | 2443 |
| CII277 | CDR | PRT | WO2016201388; SEQ ID NO: 73 | 2444 |
| CII278 | CDR | PRT | W02016201389; SEQ ID NO: 22 | 2445 |
| CII279 | CDR | PRT | US20190085076; SEQ ID NO: 16 | 2446 |
| CII280 | CDR | PRT | W02016201389; SEQ ID NO: 16 | 2447 |
| CII281 | CDR | PRT | US20190085076; SEQ ID NO: 19 | 2448 |
| CII282 | CDR | PRT | W02016201389; SEQ ID NO: 19 | 2449 |
| CII283 | CDR | PRT | W02016201389; SEQ ID NO: 83 | 2450 |
| CII284 | CDR | PRT | WO2019028283; SEQ ID NO: 151 | 2451 |
| CII285 | CDR | PRT | WO2016201388; SEQ ID NO: 17 | 2452 |
| CII286 | CDR | PRT | WO2016201388; SEQ ID NO: 74 | 2453 |
| CII287 | CDR | PRT | WO2019028283; SEQ ID NO: 150 | 2454 |
| CII288 | CDR | PRT | WO2019028283; SEQ ID NO: 147 | 2455 |
| CII289 | CDR | PRT | WO2016201388; SEQ ID NO: 72 | 2456 |
| CII290 | CDR | PRT | WO2019028283; SEQ ID NO: 146 | 2457 |
| CII291 | CDR | PRT | WO2019028283; SEQ ID NO: 149 | 2458 |
| CII292 | CDR | PRT | W02016201389; SEQ ID NO: 84 | 2459 |
| CII293 | CDR | PRT | W02016201389; SEQ ID NO: 52 | 2460 |
| CII294 | CDR | PRT | W02016201389; SEQ ID NO: 56 | 2461 |
| CII295 | CDR | PRT | W02016201389; SEQ ID NO: 45 | 2462 |
| CII296 | CDR | PRT | W02016201389; SEQ ID NO: 44 | 2463 |
| CII297 | CDR | PRT | US20190085076; SEQ ID NO: 99 | 2464 |
| CII298 | CDR | PRT | W02016201389; SEQ ID NO: 99 | 2465 |
| CII299 | CDR | PRT | W02016201389; SEQ ID NO: 60 | 2466 |
| CII300 | CDR | PRT | W02016201389; SEQ ID NO: 106 | 2467 |
| CII301 | CDR | PRT | US20190085076; SEQ ID NO: 54 | 2468 |
| CII302 | CDR | PRT | W02016201389; SEQ ID NO: 54 | 2469 |
| CII303 | CDR | PRT | W02016201389; SEQ ID NO: 82 | 2470 |
| CII304 | CDR | PRT | US20190085076; SEQ ID NO: 77 | 2471 |
| CII305 | CDR | PRT | W02016201389; SEQ ID NO: 77 | 2472 |
| CII306 | CDR | PRT | US20190085076; SEQ ID NO: 51 | 2473 |
| CII307 | CDR | PRT | W02016201389; SEQ ID NO: 51 | 2474 |
| CII308 | CDR | PRT | US20190085076; SEQ ID NO: 81 | 2475 |
| CII309 | CDR | PRT | W02016201389; SEQ ID NO: 81 | 2476 |
| CII310 | CDR | PRT | W02016201389; SEQ ID NO: 42 | 2477 |
| CII311 | CDR | PRT | W02016201389; SEQ ID NO: 105 | 2478 |
| CII312 | CDR | PRT | US20190085076; SEQ ID NO: 68 | 2479 |
| CII313 | CDR | PRT | W02016201389; SEQ ID NO: 68 | 2480 |
| CII314 | CDR | PRT | W02016201389; SEQ ID NO: 40 | 2481 |
| CII315 | CDR | PRT | W02016201389; SEQ ID NO: 102 | 2482 |
| CII316 | CDR | PRT | W02016201389; SEQ ID NO: 101 | 2483 |
| CII317 | CDR | PRT | W02016201389; SEQ ID NO: 103 | 2484 |
| CII318 | CDR | PRT | W02016201389; SEQ ID NO: 93 | 2485 |
| CII319 | CDR | PRT | US20190085076; SEQ ID NO: 76 | 2486 |
| CII320 | CDR | PRT | W02016201389; SEQ ID NO: 76 | 2487 |
| CII321 | CDR | PRT | US20190085076; SEQ ID NO: 78 | 2488 |
| CII322 | CDR | PRT | W02016201389; SEQ ID NO: 78 | 2489 |
| CII323 | CDR | PRT | W02016201389; SEQ ID NO: 91 | 2490 |
| CII324 | CDR | PRT | US20190085076; SEQ ID NO: 79 | 2491 |
| CII325 | CDR | PRT | W02016201389; SEQ ID NO: 79 | 2492 |
| CII326 | CDR | PRT | US20190085076; SEQ ID NO: 72 | 2493 |
| CII327 | CDR | PRT | W02016201389; SEQ ID NO: 72 | 2494 |
| CII328 | CDR | PRT | US20190085076; SEQ ID NO: 111 | 2495 |
| CII329 | CDR | PRT | W02016201389; SEQ ID NO: 111 | 2496 |
| CII330 | CDR | PRT | US20190085076; SEQ ID NO: 115 | 2497 |
| CII331 | CDR | PRT | W02016201389; SEQ ID NO: 115 | 2498 |
| CII332 | CDR | PRT | US20190085076; SEQ ID NO: 65 | 2499 |
| CII333 | CDR | PRT | W02016201389; SEQ ID NO: 65 | 2500 |
| CII334 | CDR | PRT | US20190085076; SEQ ID NO: 109 | 2501 |
| CII335 | CDR | PRT | W02016201389; SEQ ID NO: 109 | 2502 |
| CII336 | CDR | PRT | US20190085076; SEQ ID NO: 64 | 2503 |
| CII337 | CDR | PRT | W02016201389; SEQ ID NO: 64 | 2504 |
| CII338 | CDR | PRT | W02016201389; SEQ ID NO: 113 | 2505 |
| CII339 | CDR | PRT | US20190085076; SEQ ID NO: 57 | 2506 |
| CII340 | CDR | PRT | W02016201389; SEQ ID NO: 57 | 2507 |
| CII341 | CDR | PRT | US20190085076; SEQ ID NO: 100 | 2508 |
| CII342 | CDR | PRT | W02016201389; SEQ ID NO: 100 | 2509 |
| CII343 | CDR | PRT | US20190085076; SEQ ID NO: 108 | 2510 |
| CII344 | CDR | PRT | W02016201389; SEQ ID NO: 108 | 2511 |
| CII345 | CDR | PRT | W02016201389; SEQ ID NO: 104 | 2512 |
| CII346 | CDR | PRT | W02016201389; SEQ ID NO: 114 | 2513 |
| CII347 | CDR | PRT | US20190085076; SEQ ID NO: 62 | 2514 |
| CII348 | CDR | PRT | W02016201389; SEQ ID NO: 62 | 2515 |
| CII349 | CDR | PRT | US20190085076; SEQ ID NO: 70 | 2516 |
| CII350 | CDR | PRT | W02016201389; SEQ ID NO: 70 | 2517 |
| CII351 | CDR | PRT | US20190085076; SEQ ID NO: 71 | 2518 |
| CII352 | CDR | PRT | W02016201389; SEQ ID NO: 71 | 2519 |
| CII353 | CDR | PRT | US20190085076; SEQ ID NO: 94 | 2520 |
| CII354 | CDR | PRT | W02016201389; SEQ ID NO: 94 | 2521 |
| CII355 | CDR | PRT | US20190085076; SEQ ID NO: 110 | 2522 |
| CII356 | CDR | PRT | W02016201389; SEQ ID NO: 110 | 2523 |
| CII357 | CDR | PRT | US20190085076; SEQ ID NO: 47 | 2524 |
| CII358 | CDR | PRT | W02016201389; SEQ ID NO: 47 | 2525 |
| CII359 | CDR | PRT | US20190085076; SEQ ID NO: 63 | 2526 |
| CII360 | CDR | PRT | W02016201389; SEQ ID NO: 63 | 2527 |
| CII361 | CDR | PRT | US20190085076; SEQ ID NO: 50 | 2528 |
| CII362 | CDR | PRT | W02016201389; SEQ ID NO: 50 | 2529 |
| CII363 | CDR | PRT | W02016201389; SEQ ID NO: 85 | 2530 |
| CII364 | CDR | PRT | US20190085076; SEQ ID NO: 89 | 2531 |
| CII365 | CDR | PRT | W02016201389; SEQ ID NO: 89 | 2532 |
| CII366 | CDR | PRT | US20190085076; SEQ ID NO: 61 | 2533 |
| CII367 | CDR | PRT | W02016201389; SEQ ID NO: 61 | 2534 |
| CII368 | CDR | PRT | W02016201389; SEQ ID NO: 112 | 2535 |
| CII369 | CDR | PRT | US20190085076; SEQ ID NO: 97 | 2536 |
| CII370 | CDR | PRT | W02016201389; SEQ ID NO: 97 | 2537 |
| CII371 | CDR | PRT | W02016201389; SEQ ID NO: 46 | 2538 |
| CII372 | CDR | PRT | W02016201389; SEQ ID NO: 58 | 2539 |
| CII373 | CDR | PRT | US20190085076; SEQ ID NO: 86 | 2540 |
| CII374 | CDR | PRT | W02016201389; SEQ ID NO: 86 | 2541 |
| CII375 | CDR | PRT | W02016201389; SEQ ID NO: 107 | 2542 |
| CII376 | CDR | PRT | W02016201389; SEQ ID NO: 43 | 2543 |
| CII377 | CDR | PRT | US20190085076; SEQ ID NO: 69 | 2544 |
| CII378 | CDR | PRT | W02016201389; SEQ ID NO: 69 | 2545 |
| CII379 | CDR | PRT | US20190085076; SEQ ID NO: 59 | 2546 |
| CII380 | CDR | PRT | W02016201389; SEQ ID NO: 59 | 2547 |
| CII381 | CDR | PRT | US20190085076; SEQ ID NO: 87 | 2548 |
| CII382 | CDR | PRT | W02016201389; SEQ ID NO: 87 | 2549 |
| CII383 | CDR | PRT | W02016201389; SEQ ID NO: 98 | 2550 |
| CII384 | CDR | PRT | W02016201389; SEQ ID NO: 96 | 2551 |
| CII385 | CDR | PRT | US20190085076; SEQ ID NO: 41 | 2552 |
| CII386 | CDR | PRT | W02016201389; SEQ ID NO: 41 | 2553 |
| CII387 | CDR | PRT | US20190085076; SEQ ID NO: 73 | 2554 |
| CII388 | CDR | PRT | W02016201389; SEQ ID NO: 73 | 2555 |
| CII389 | CDR | PRT | US20190085076; SEQ ID NO: 66 | 2556 |
| CII390 | CDR | PRT | W02016201389; SEQ ID NO: 66 | 2557 |
| CII391 | CDR | PRT | US20190085076; SEQ ID NO: 75 | 2558 |
| CII392 | CDR | PRT | W02016201389; SEQ ID NO: 75 | 2559 |
| CII393 | CDR | PRT | US20190085076; SEQ ID NO: 49 | 2560 |
| CII394 | CDR | PRT | W02016201389; SEQ ID NO: 49 | 2561 |
| CII395 | CDR | PRT | W02016201389; SEQ ID NO: 92 | 2562 |
| CII396 | CDR | PRT | US20190085076; SEQ ID NO: 74 | 2563 |
| CII397 | CDR | PRT | W02016201389; SEQ ID NO: 74 | 2564 |
| CII398 | CDR | PRT | US20190085076; SEQ ID NO: 55 | 2565 |
| CII399 | CDR | PRT | W02016201389; SEQ ID NO: 55 | 2566 |
| CII400 | CDR | PRT | US20190085076; SEQ ID NO: 95 | 2567 |
| CII401 | CDR | PRT | W02016201389; SEQ ID NO: 95 | 2568 |
| CII402 | CDR | PRT | US20190085076; SEQ ID NO: 48 | 2569 |
| CII403 | CDR | PRT | W02016201389; SEQ ID NO: 48 | 2570 |
| CII404 | CDR | PRT | US20190085076; SEQ ID NO: 53 | 2571 |
| CII405 | CDR | PRT | W02016201389; SEQ ID NO: 53 | 2572 |
| CII406 | CDR | PRT | W02016201389; SEQ ID NO: 39 | 2573 |
| CII407 | CDR | PRT | US20190085076; SEQ ID NO: 90 | 2574 |
| CII408 | CDR | PRT | W02016201389; SEQ ID NO: 90 | 2575 |
| CII409 | CDR | PRT | WO2016201388; SEQ ID NO: 16 | 2576 |
| CII410 | CDR | PRT | WO2016201388; SEQ ID NO: 190 | 2577 |
| CII411 | CDR | PRT | WO2016201388; SEQ ID NO: 12 | 2578 |
| CII412 | CDR | PRT | WO2016201388; SEQ ID NO: 68 | 2579 |
| CII413 | CDR | PRT | WO2016201388; SEQ ID NO: 11 | 2580 |
| CII414 | CDR | PRT | WO2016201388; SEQ ID NO: 67 | 2581 |
| CII415 | CDR | PRT | WO2019028283; SEQ ID NO: 130 | 2582 |
| CII416 | CDR | PRT | W02016201389; SEQ ID NO: 13 | 2583 |
| CII417 | CDR | PRT | US20190085076; SEQ ID NO: 15 | 2584 |
| CII418 | CDR | PRT | W02016201389; SEQ ID NO: 15 | 2585 |
| CII419 | CDR | PRT | US20190085076; SEQ ID NO: 23 | 2586 |
| CII420 | CDR | PRT | W02016201389; SEQ ID NO: 23 | 2587 |
| CII421 | CDR | PRT | W02016201389; SEQ ID NO: 14 | 2588 |
| CII422 | CDR | PRT | US20190085076; SEQ ID NO: 17 | 2589 |
| CII423 | CDR | PRT | W02016201389; SEQ ID NO: 17 | 2590 |
| CII424 | CDR | PRT | W02016201389; SEQ ID NO: 21 | 2591 |
| CII425 | CDR | PRT | WO2019028283; SEQ ID NO: 128 | 2592 |
| CII426 | CDR | PRT | WO2019028283; SEQ ID NO: 132 | 2593 |
| CII427 | CDR | PRT | WO2019028283; SEQ ID NO: 129 | 2594 |
| CII428 | CDR | PRT | US20190085076; SEQ ID NO: 11 | 2595 |
| CII429 | CDR | PRT | W02016201389; SEQ ID NO: 11 | 2596 |
| CII430 | CDR | PRT | US20190085076; SEQ ID NO: 12 | 2597 |
| CII431 | CDR | PRT | W02016201389; SEQ ID NO: 12 | 2598 |
| CII432 | CDR | PRT | US20190085076; SEQ ID NO: 20 | 2599 |
| CII433 | CDR | PRT | W02016201389; SEQ ID NO: 20 | 2600 |
| CII434 | CDR | PRT | US20190085076; SEQ ID NO: 9 | 2601 |
| CII435 | CDR | PRT | W02016201389; SEQ ID NO: 9 | 2602 |
| CII436 | CDR | PRT | WO2016201388; SEQ ID NO: 10 | 2603 |
| CII437 | CDR | PRT | WO2019028283; SEQ ID NO: 127 | 2604 |
| CII438 | CDR | PRT | WO2019028283; SEQ ID NO: 133 | 2605 |
| CII439 | CDR | PRT | WO2016201388; SEQ ID NO: 184 | 2606 |
| CII440 | CDR | PRT | US20190085076; SEQ ID NO: 18 | 2607 |
| CII441 | CDR | PRT | W02016201389; SEQ ID NO: 18 | 2608 |
| CII442 | CDR | PRT | WO2019028283; SEQ ID NO: 134 | 2609 |
| CII443 | CDR | PRT | WO2016201388; SEQ ID NO: 26 | 2610 |
| CII444 | CDR | PRT | US20190085076; SEQ ID NO: 30 | 2611 |
| CII445 | CDR | PRT | W02016201389; SEQ ID NO: 30 | 2612 |
| CII446 | CDR | PRT | WO2019028283; SEQ ID NO: 126 | 2613 |
| CII447 | CDR | PRT | WO2019028283; SEQ ID NO: 122 | 2614 |
| CII448 | CDR | PRT | WO2019028283; SEQ ID NO: 123 | 2615 |
| CII449 | CDR | PRT | W02016201389; SEQ ID NO: 157 | 2616 |
| CII450 | CDR | PRT | W02016201389; SEQ ID NO: 160 | 2617 |
| CII451 | CDR | PRT | US20190085076; SEQ ID NO: 152 | 2618 |
| CII452 | CDR | PRT | W02016201389; SEQ ID NO: 152 | 2619 |
| CII453 | CDR | PRT | US20190085076; SEQ ID NO: 148 | 2620 |
| CII454 | CDR | PRT | W02016201389; SEQ ID NO: 148 | 2621 |
| CII455 | CDR | PRT | US20190085076; SEQ ID NO: 141 | 2622 |
| CII456 | CDR | PRT | W02016201389; SEQ ID NO: 141 | 2623 |
| CII457 | CDR | PRT | WO2019028283; SEQ ID NO: 124 | 2624 |
| CII458 | CDR | PRT | WO2019028283; SEQ ID NO: 125 | 2625 |
| CII459 | CDR | PRT | WO2019028283; SEQ ID NO: 121 | 2626 |
| CII460 | CDR | PRT | WO2019028283; SEQ ID NO: 154 | 2627 |
| CII461 | CDR | PRT | WO2019028283; SEQ ID NO: 187 | 2628 |
| CII462 | CDR | PRT | W02016201389; SEQ ID NO: 138 | 2629 |
| CII463 | CDR | PRT | W02016201389; SEQ ID NO: 149 | 2630 |
| CII464 | CDR | PRT | WO2016201388; SEQ ID NO: 228 | 2631 |
| CII465 | CDR | PRT | WO2016201388; SEQ ID NO: 29 | 2632 |
| CII466 | CDR | PRT | WO2016201388; SEQ ID NO: 187 | 2633 |
| CII467 | CDR | PRT | WO2016201388; SEQ ID NO: 28 | 2634 |
| CII468 | CDR | PRT | WO2016201388; SEQ ID NO: 25 | 2635 |
| CII469 | CDR | PRT | WO2016201388; SEQ ID NO: 76 | 2636 |
| CII470 | CDR | PRT | WO2016201388; SEQ ID NO: 233 | 2637 |
| CII471 | CDR | PRT | WO2016201388; SEQ ID NO: 232 | 2638 |
| CII472 | CDR | PRT | US20190085076; SEQ ID NO: 150 | 2639 |
| CII473 | CDR | PRT | W02016201389; SEQ ID NO: 150 | 2640 |
| CII474 | CDR | PRT | W02016201389; SEQ ID NO: 155 | 2641 |
| CII475 | CDR | PRT | W02016201389; SEQ ID NO: 154 | 2642 |
| CII476 | CDR | PRT | US20190085076; SEQ ID NO: 144 | 2643 |
| CII477 | CDR | PRT | W02016201389; SEQ ID NO: 144 | 2644 |
| CII478 | CDR | PRT | WO2019028283; SEQ ID NO: 193 | 2645 |
| CII479 | CDR | PRT | W02016201389; SEQ ID NO: 25 | 2646 |
| CII480 | CDR | PRT | W02016201389; SEQ ID NO: 153 | 2647 |
| CII481 | CDR | PRT | W02016201389; SEQ ID NO: 143 | 2648 |
| CII482 | CDR | PRT | W02016201389; SEQ ID NO: 140 | 2649 |
| CII483 | CDR | PRT | W02016201389; SEQ ID NO: 147 | 2650 |
| CII484 | CDR | PRT | WO2019028283; SEQ ID NO: 157 | 2651 |
| CII485 | CDR | PRT | WO2019028283; SEQ ID NO: 155 | 2652 |
| CII486 | CDR | PRT | WO2019028283; SEQ ID NO: 188 | 2653 |
| CII487 | CDR | PRT | WO2019028283; SEQ ID NO: 140 | 2654 |
| CII488 | CDR | PRT | WO2019028283; SEQ ID NO: 137 | 2655 |
| CII489 | CDR | PRT | WO2019028283; SEQ ID NO: 144 | 2656 |
| CII490 | CDR | PRT | WO2019028283; SEQ ID NO: 135 | 2657 |
| CII491 | CDR | PRT | WO2019028283; SEQ ID NO: 138 | 2658 |
| CII492 | CDR | PRT | WO2019028283; SEQ ID NO: 145 | 2659 |
| CII493 | CDR | PRT | WO2019028283; SEQ ID NO: 142 | 2660 |
| CII494 | CDR | PRT | WO2019028283; SEQ ID NO: 141 | 2661 |
| CII495 | CDR | PRT | WO2019028283; SEQ ID NO: 139 | 2662 |
| CII496 | CDR | PRT | WO2019028283; SEQ ID NO: 191 | 2663 |
| CII497 | CDR | PRT | WO2019028283; SEQ ID NO: 143 | 2664 |
| CII498 | CDR | PRT | US20190085076; SEQ ID NO: 156 | 2665 |
| CII499 | CDR | PRT | W02016201389; SEQ ID NO: 156 | 2666 |
| CII500 | CDR | PRT | WO2016201388; SEQ ID NO: 69 | 2667 |
| CII501 | CDR | PRT | WO2016201388; SEQ ID NO: 13 | 2668 |
| CII502 | CDR | PRT | WO2016201388; SEQ ID NO: 20 | 2669 |
| CII503 | CDR | PRT | US20190085076; SEQ ID NO: 127 | 2670 |
| CII504 | CDR | PRT | W02016201389; SEQ ID NO: 127 | 2671 |
| CII505 | CDR | PRT | WO2016201388; SEQ ID NO: 19 | 2672 |
| CII506 | CDR | PRT | W02016201389; SEQ ID NO: 136 | 2673 |
| CII507 | CDR | PRT | W02016201389; SEQ ID NO: 118 | 2674 |
| CII508 | CDR | PRT | W02016201389; SEQ ID NO: 123 | 2675 |
| CII509 | CDR | PRT | WO2016201388; SEQ ID NO: 18 | 2676 |
| CII510 | CDR | PRT | WO2016201388; SEQ ID NO: 75 | 2677 |
| CII511 | CDR | PRT | W02016201389; SEQ ID NO: 135 | 2678 |
| CII512 | CDR | PRT | US20190085076; SEQ ID NO: 128 | 2679 |
| CII513 | CDR | PRT | W02016201389; SEQ ID NO: 128 | 2680 |
| CII514 | CDR | PRT | WO2019028283; SEQ ID NO: 136 | 2681 |
| CII515 | CDR | PRT | WO2019028283; SEQ ID NO: 156 | 2682 |
| CII516 | CDR | PRT | WO2019028283; SEQ ID NO: 189 | 2683 |
| CII517 | CDR | PRT | WO2018089794; SEQ ID NO: 15 | 2684 |
| CII518 | CDR | PRT | WO2018089790; SEQ ID NO: 11 | 2685 |
| CII519 | CDR | PRT | WO2018089795; SEQ ID NO: 16 | 2686 |
| CII520 | CDR | PRT | WO2018089793; SEQ ID NO: 14 | 2687 |
| CII521 | CDR | PRT | WO2018089792; SEQ ID NO: 13 | 2688 |
| CII522 | CDR | PRT | WO2018089791; SEQ ID NO: 12 | 2689 |
| CII523 | CDR | PRT | US20180333503; SEQ ID NO: 9 | 2690 |
| CII524 | CDR | PRT | US20180333503; SEQ ID NO: 6 | 2691 |
| CII525 | CDR | PRT | US20180333503; SEQ ID NO: 8 | 2692 |
| CII526 | CDR | PRT | US20180333503; SEQ ID NO: 7 | 2693 |
| CII527 | CDR | PRT | US20180333503; SEQ ID NO: 11 | 2694 |
| CII528 | CDR | PRT | US20180333503; SEQ ID NO: 10 | 2695 |
| CII529 | CDR | PRT | US20180333503; SEQ ID NO: 12 | 2696 |
| CII530 | CDR | PRT | US20190117769; SEQ ID NO: 18 | 2697 |
| CII531 | CDR | PRT | US20190117769; SEQ ID NO: 17 | 2698 |
| CII532 | CDR | PRT | US20190117769; SEQ ID NO: 20 | 2699 |
| CII533 | CDR | PRT | US20190117769; SEQ ID NO: 19 | 2700 |
| CII534 | CDR | PRT | US20190117769; SEQ ID NO: 22 | 2701 |
| CII535 | CDR | PRT | US20190117769; SEQ ID NO: 21 | 2702 |
| CII536 | CDR | PRT | US20180333503; SEQ ID NO: 21 | 2703 |
| CII537 | CDR | PRT | US20180333503; SEQ ID NO: 24 | 2704 |
| CII538 | CDR | PRT | US20180333503; SEQ ID NO: 20 | 2705 |
| CII539 | CDR | PRT | US20180333503; SEQ ID NO: 25 | 2706 |
| CII540 | CDR | PRT | US20180333503; SEQ ID NO: 23 | 2707 |
| CII541 | CDR | PRT | US20180333503; SEQ ID NO: 22 | 2708 |
| CII542 | CDR | PRT | WO2018089786; SEQ ID NO: 7 | 2709 |
| CII543 | CDR | PRT | WO2018089784; SEQ ID NO: 5 | 2710 |
| CII544 | CDR | PRT | WO2018089783; SEQ ID NO: 4 | 2711 |
| CII545 | CDR | PRT | WO2018089787; SEQ ID NO: 8 | 2712 |
| CII546 | CDR | PRT | WO2018089785; SEQ ID NO: 6 | 2713 |
| CII547 | CDR | PRT | WO2018089782; SEQ ID NO: 3 | 2714 |
| CII548 | CDR | PRT | WO2018213316; SEQ ID NO: 20 | 2715 |
| CII549 | CDR | PRT | WO2018213316; SEQ ID NO: 28 | 2716 |
| CII550 | CDR | PRT | WO2018213316; SEQ ID NO: 25 | 2717 |
| CII551 | CDR | PRT | WO2018213316; SEQ ID NO: 48 | 2718 |
| CII552 | CDR | PRT | WO2018213316; SEQ ID NO: 52 | 2719 |
| CII553 | CDR | PRT | WO2018213316; SEQ ID NO: 45 | 2720 |
| CII554 | CDR | PRT | WO2018213316; SEQ ID NO: 34 | 2721 |
| CII555 | CDR | PRT | WO2018213316; SEQ ID NO: 31 | 2722 |
| CII556 | CDR | PRT | WO2018213316; SEQ ID NO: 27 | 2723 |
| CII557 | CDR | PRT | WO2018213316; SEQ ID NO: 29 | 2724 |
| CII558 | CDR | PRT | WO2018213316; SEQ ID NO: 30 | 2725 |
| CII559 | CDR | PRT | WO2018213316; SEQ ID NO: 33 | 2726 |
| CII560 | CDR | PRT | WO2018213316; SEQ ID NO: 32 | 2727 |
| CII561 | CDR | PRT | WO2018213316; SEQ ID NO: 50 | 2728 |
| CII562 | CDR | PRT | WO2018213316; SEQ ID NO: 6 | 2729 |
| CII563 | CDR | PRT | WO2018213316; SEQ ID NO: 4 | 2730 |
| CII564 | CDR | PRT | WO2018213316; SEQ ID NO: 11 | 2731 |
| CII565 | CDR | PRT | WO2018213316; SEQ ID NO: 5 | 2732 |
| CII566 | CDR | PRT | WO2018213316; SEQ ID NO: 47 | 2733 |
| CII567 | CDR | PRT | WO2018213316; SEQ ID NO: 19 | 2734 |
| CII568 | CDR | PRT | WO2018213316; SEQ ID NO: 16 | 2735 |
| CII569 | CDR | PRT | WO2018213316; SEQ ID NO: 17 | 2736 |
| CII570 | CDR | PRT | WO2018213316; SEQ ID NO: 49 | 2737 |
| CII571 | CDR | PRT | WO2018213316; SEQ ID NO: 51 | 2738 |
| CII572 | CDR | PRT | WO2018213316; SEQ ID NO: 54 | 2739 |
| CII573 | CDR | PRT | WO2018213316; SEQ ID NO: 22 | 2740 |
| CII574 | CDR | PRT | WO2018213316; SEQ ID NO: 26 | 2741 |
| CII575 | CDR | PRT | WO2018213316; SEQ ID NO: 21 | 2742 |
| CII576 | CDR | PRT | WO2018213316; SEQ ID NO: 23 | 2743 |
| CII577 | CDR | PRT | WO2018213316; SEQ ID NO: 24 | 2744 |
| CII578 | CDR | PRT | WO2018213316; SEQ ID NO: 7 | 2745 |
| CII579 | CDR | PRT | WO2018213316; SEQ ID NO: 8 | 2746 |
| CII580 | CDR | PRT | WO2018213316; SEQ ID NO: 9 | 2747 |
| CII581 | CDR | PRT | WO2018213316; SEQ ID NO: 10 | 2748 |
| CII582 | CDR | PRT | WO2018213316; SEQ ID NO: 3 | 2749 |
| CII583 | CDR | PRT | WO2018213316; SEQ ID NO: 15 | 2750 |
| CII584 | CDR | PRT | WO2018213316; SEQ ID NO: 12 | 2751 |
| CII585 | CDR | PRT | WO2018213316; SEQ ID NO: 18 | 2752 |
| CII586 | CDR | PRT | WO2018213316; SEQ ID NO: 14 | 2753 |
| CII587 | CDR | PRT | WO2018213316; SEQ ID NO: 13 | 2754 |
| CII588 | CDR | PRT | WO2018213316; SEQ ID NO: 41 | 2755 |
| CII589 | CDR | PRT | WO2018213316; SEQ ID NO: 42 | 2756 |
| CII590 | CDR | PRT | WO2018213316; SEQ ID NO: 40 | 2757 |
| CII591 | CDR | PRT | WO2018213316; SEQ ID NO: 38 | 2758 |
| CII592 | CDR | PRT | WO2018213316; SEQ ID NO: 44 | 2759 |
| CII593 | CDR | PRT | WO2018213316; SEQ ID NO: 37 | 2760 |
| CII594 | CDR | PRT | WO2018213316; SEQ ID NO: 36 | 2761 |
| CII595 | CDR | PRT | WO2018213316; SEQ ID NO: 43 | 2762 |
| CII596 | CDR | PRT | WO2018213316; SEQ ID NO: 35 | 2763 |
| CII597 | CDR | PRT | WO2018213316; SEQ ID NO: 39 | 2764 |
| CII598 | CDR | PRT | WO2018213316; SEQ ID NO: 53 | 2765 |
| CII599 | CDR | PRT | WO2018213316; SEQ ID NO: 46 | 2766 |
| CII600 | CDR | PRT | WO2017040301; SEQ ID NO: 29 | 2767 |
| CII601 | CDR | PRT | WO2017040301; SEQ ID NO: 81 | 2768 |
| CII602 | CDR | PRT | WO2017040301; SEQ ID NO: 83 | 2769 |
| CII603 | CDR | PRT | WO2017040301; SEQ ID NO: 78 | 2770 |
| CII604 | CDR | PRT | WO2017040301; SEQ ID NO: 76 | 2771 |
| CII605 | CDR | PRT | WO2017040301; SEQ ID NO: 74 | 2772 |
| CII606 | CDR | PRT | WO2017040301; SEQ ID NO: 72 | 2773 |
| CII607 | CDR | PRT | WO2017040301; SEQ ID NO: 75 | 2774 |
| CII608 | CDR | PRT | WO2017040301; SEQ ID NO: 77 | 2775 |
| CII609 | CDR | PRT | WO2017040301; SEQ ID NO: 82 | 2776 |
| CII610 | CDR | PRT | WO2017040301; SEQ ID NO: 73 | 2777 |
| CII611 | CDR | PRT | WO2017040301; SEQ ID NO: 80 | 2778 |
| CII612 | CDR | PRT | WO2017040301; SEQ ID NO: 22 | 2779 |
| CII613 | CDR | PRT | WO2017040301; SEQ ID NO: 27 | 2780 |
| CII614 | CDR | PRT | WO2017040301; SEQ ID NO: 483 | 2781 |
| CII615 | CDR | PRT | WO2017040301; SEQ ID NO: 28 | 2782 |
| CII616 | CDR | PRT | WO2017040301; SEQ ID NO: 32 | 2783 |
| CII617 | CDR | PRT | WO2017040301; SEQ ID NO: 53 | 2784 |
| CII618 | CDR | PRT | WO2017040301; SEQ ID NO: 47 | 2785 |
| CII619 | CDR | PRT | WO2017040301; SEQ ID NO: 55 | 2786 |
| CII620 | CDR | PRT | WO2017040301; SEQ ID NO: 54 | 2787 |
| CII621 | CDR | PRT | WO2017040301; SEQ ID NO: 48 | 2788 |
| CII622 | CDR | PRT | WO2017040301; SEQ ID NO: 58 | 2789 |
| CII623 | CDR | PRT | WO2017040301; SEQ ID NO: 23 | 2790 |
| CII624 | CDR | PRT | WO2017040301; SEQ ID NO: 479 | 2791 |
| CII625 | CDR | PRT | WO2017040301; SEQ ID NO: 39 | 2792 |
| CII626 | CDR | PRT | WO2017040301; SEQ ID NO: 36 | 2793 |
| CII627 | CDR | PRT | WO2017040301; SEQ ID NO: 59 | 2794 |
| CII628 | CDR | PRT | WO2017040301; SEQ ID NO: 62 | 2795 |
| CII629 | CDR | PRT | WO2017040301; SEQ ID NO: 64 | 2796 |
| CII630 | CDR | PRT | WO2017040301; SEQ ID NO: 69 | 2797 |
| CII631 | CDR | PRT | WO2017040301; SEQ ID NO: 63 | 2798 |
| CII632 | CDR | PRT | WO2017040301; SEQ ID NO: 65 | 2799 |
| CII633 | CDR | PRT | WO2017040301; SEQ ID NO: 70 | 2800 |
| CII634 | CDR | PRT | WO2017040301; SEQ ID NO: 60 | 2801 |
| CII635 | CDR | PRT | WO2017040301; SEQ ID NO: 10 | 2802 |
| CII636 | CDR | PRT | WO2017040301; SEQ ID NO: 13 | 2803 |
| CII637 | CDR | PRT | WO2017040301; SEQ ID NO: 24 | 2804 |
| CII638 | CDR | PRT | WO2017040301; SEQ ID NO: 20 | 2805 |
| CII639 | CDR | PRT | WO2017040301; SEQ ID NO: 30 | 2806 |
| CII640 | CDR | PRT | WO2017040301; SEQ ID NO: 25 | 2807 |
| CII641 | CDR | PRT | WO2017040301; SEQ ID NO: 16 | 2808 |
| CII642 | CDR | PRT | WO2017040301; SEQ ID NO: 68 | 2809 |
| CII643 | CDR | PRT | WO2017040301; SEQ ID NO: 31 | 2810 |
| CII644 | CDR | PRT | WO2017040301; SEQ ID NO: 45 | 2811 |
| CII645 | CDR | PRT | WO2017040301; SEQ ID NO: 34 | 2812 |
| CII646 | CDR | PRT | WO2017040301; SEQ ID NO: 41 | 2813 |
| CII647 | CDR | PRT | WO2017040301; SEQ ID NO: 44 | 2814 |
| CII648 | CDR | PRT | WO2017040301; SEQ ID NO: 478 | 2815 |
| CII649 | CDR | PRT | WO2017040301; SEQ ID NO: 42 | 2816 |
| CII650 | CDR | PRT | WO2017040301; SEQ ID NO: 35 | 2817 |
| CII651 | CDR | PRT | WO2017040301; SEQ ID NO: 40 | 2818 |
| CII652 | CDR | PRT | WO2017040301; SEQ ID NO: 476 | 2819 |
| CII653 | CDR | PRT | WO2017040301; SEQ ID NO: 18 | 2820 |
| CII654 | CDR | PRT | WO2017040301; SEQ ID NO: 19 | 2821 |
| CII655 | CDR | PRT | WO2017040301; SEQ ID NO: 8 | 2822 |
| CII656 | CDR | PRT | WO2017040301; SEQ ID NO: 15 | 2823 |
| CII657 | CDR | PRT | WO2017040301; SEQ ID NO: 482 | 2824 |
| CII658 | CDR | PRT | WO2017040301; SEQ ID NO: 12 | 2825 |
| CII659 | CDR | PRT | WO2017040301; SEQ ID NO: 11 | 2826 |
| CII660 | CDR | PRT | WO2017040301; SEQ ID NO: 17 | 2827 |
| CII661 | CDR | PRT | WO2017040301; SEQ ID NO: 7 | 2828 |
| CII662 | CDR | PRT | WO2017040301; SEQ ID NO: 9 | 2829 |
| CII663 | CDR | PRT | WO2017040301; SEQ ID NO: 14 | 2830 |
| CII664 | CDR | PRT | WO2017040301; SEQ ID NO: 26 | 2831 |
| CII665 | CDR | PRT | WO2017040301; SEQ ID NO: 46 | 2832 |
| CII666 | CDR | PRT | WO2017040301; SEQ ID NO: 49 | 2833 |
| CII667 | CDR | PRT | WO2017040301; SEQ ID NO: 51 | 2834 |
| CII668 | CDR | PRT | WO2017040301; SEQ ID NO: 56 | 2835 |
| CII669 | CDR | PRT | WO2017040301; SEQ ID NO: 33 | 2836 |
| CII670 | CDR | PRT | WO2017040301; SEQ ID NO: 37 | 2837 |
| CII671 | CDR | PRT | WO2017040301; SEQ ID NO: 38 | 2838 |
| CII672 | CDR | PRT | WO2017040301; SEQ ID NO: 43 | 2839 |
| CII673 | CDR | PRT | WO2017040301; SEQ ID NO: 79 | 2840 |
| CII674 | CDR | PRT | WO2017040301; SEQ ID NO: 71 | 2841 |
| CII675 | CDR | PRT | WO2017040301; SEQ ID NO: 67 | 2842 |
| CII676 | CDR | PRT | WO2017040301; SEQ ID NO: 61 | 2843 |
| CII677 | CDR | PRT | WO2017040301; SEQ ID NO: 481 | 2844 |
| CII678 | CDR | PRT | WO2017040301; SEQ ID NO: 66 | 2845 |
| CII679 | CDR | PRT | WO2017040301; SEQ ID NO: 84 | 2846 |
| CII680 | CDR | PRT | WO2017040301; SEQ ID NO: 480 | 2847 |
| CII681 | CDR | PRT | WO2017040301; SEQ ID NO: 57 | 2848 |
| CII682 | CDR | PRT | WO2017040301; SEQ ID NO: 21 | 2849 |
| CII683 | CDR | PRT | WO2017040301; SEQ ID NO: 50 | 2850 |
| CII684 | CDR | PRT | WO2017040301; SEQ ID NO: 52 | 2851 |
| CII685 | CDR | PRT | WO2017040301; SEQ ID NO: 477 | 2852 |
| CII686 | CDR | PRT | WO2017075432; SEQ ID NO: 29 | 2853 |
| CII687 | CDR | PRT | WO2017075432; SEQ ID NO: 17 | 2854 |
| CII688 | CDR | PRT | WO2017075432; SEQ ID NO: 27 | 2855 |
| CII689 | CDR | PRT | WO2017075432; SEQ ID NO: 13 | 2856 |
| CII690 | CDR | PRT | WO2017075432; SEQ ID NO: 19 | 2857 |
| CII691 | CDR | PRT | WO2017075432; SEQ ID NO: 179 | 2858 |
| CII692 | CDR | PRT | WO2017075432; SEQ ID NO: 182 | 2859 |
| CII693 | CDR | PRT | WO2017075432; SEQ ID NO: 178 | 2860 |
| CII694 | CDR | PRT | WO2017075432; SEQ ID NO: 9 | 2861 |
| CII695 | CDR | PRT | WO2017075432; SEQ ID NO: 25 | 2862 |
| CII696 | CDR | PRT | WO2017075432; SEQ ID NO: 24 | 2863 |
| CII697 | CDR | PRT | WO2017075432; SEQ ID NO: 23 | 2864 |
| CII698 | CDR | PRT | WO2017075432; SEQ ID NO: 7 | 2865 |
| CII699 | CDR | PRT | WO2017075432; SEQ ID NO: 8 | 2866 |
| CII700 | CDR | PRT | WO2017075432; SEQ ID NO: 174 | 2867 |
| CII701 | CDR | PRT | WO2017075432; SEQ ID NO: 18 | 2868 |
| CII702 | CDR | PRT | WO2017075432; SEQ ID NO: 16 | 2869 |
| CII703 | CDR | PRT | WO2017075432; SEQ ID NO: 14 | 2870 |
| CII704 | CDR | PRT | WO2017075432; SEQ ID NO: 11 | 2871 |
| CII705 | CDR | PRT | WO2017075432; SEQ ID NO: 12 | 2872 |
| CII706 | CDR | PRT | WO2017075432; SEQ ID NO: 177 | 2873 |
| CII707 | CDR | PRT | WO2017075432; SEQ ID NO: 173 | 2874 |
| CII708 | CDR | PRT | WO2017075432; SEQ ID NO: 175 | 2875 |
| CII709 | CDR | PRT | WO2017075432; SEQ ID NO: 6 | 2876 |
| CII710 | CDR | PRT | WO2017075432; SEQ ID NO: 176 | 2877 |
| CII711 | CDR | PRT | WO2017075432; SEQ ID NO: 172 | 2878 |
| CII712 | CDR | PRT | WO2017075432; SEQ ID NO: 10 | 2879 |
| CII713 | CDR | PRT | WO2017075432; SEQ ID NO: 181 | 2880 |
| CII714 | CDR | PRT | WO2017075432; SEQ ID NO: 28 | 2881 |
| CII715 | CDR | PRT | WO2017075432; SEQ ID NO: 22 | 2882 |
| CII716 | CDR | PRT | WO2017075432; SEQ ID NO: 26 | 2883 |
| CII717 | CDR | PRT | WO2017075432; SEQ ID NO: 15 | 2884 |
| CII718 | CDR | PRT | WO2017075432; SEQ ID NO: 20 | 2885 |
| CII719 | CDR | PRT | WO2017075432; SEQ ID NO: 180 | 2886 |
| CII720 | CDR | PRT | WO2017075432; SEQ ID NO: 21 | 2887 |
| CII721 | CDR | PRT | WO2017075432; SEQ ID NO: 183 | 2888 |
| CII722 | CDR | PRT | WO2018107058; SEQ ID NO: 17 | 2889 |
| CII723 | CDR | PRT | WO2018107058; SEQ ID NO: 9 | 2890 |
| CII724 | CDR | PRT | WO2018107058; SEQ ID NO: 15 | 2891 |
| CII725 | CDR | PRT | WO2018107058; SEQ ID NO: 7 | 2892 |
| CII726 | CDR | PRT | WO2018107058; SEQ ID NO: 16 | 2893 |
| CII727 | CDR | PRT | WO2018107058; SEQ ID NO: 11 | 2894 |
| CII728 | CDR | PRT | WO2018107058; SEQ ID NO: 8 | 2895 |
| CII729 | CDR | PRT | WO2018107058; SEQ ID NO: 14 | 2896 |
| CII730 | CDR | PRT | WO2018107058; SEQ ID NO: 6 | 2897 |
| CII731 | CDR | PRT | WO2018107058; SEQ ID NO: 12 | 2898 |
| CII732 | CDR | PRT | WO2018107058; SEQ ID NO: 10 | 2899 |
| CII733 | CDR | PRT | WO2018107058; SEQ ID NO: 13 | 2900 |
| CII734 | CDR | PRT | US20190085084; SEQ ID NO: 32 | 2901 |
| CII735 | CDR | PRT | US20190085084; SEQ ID NO: 32 | 2902 |
| CII736 | CDR | PRT | WO2016164637; SEQ ID NO: 32 | 2903 |
| CII737 | CDR | PRT | US20190085084; SEQ ID NO: 27 | 2904 |
| CII738 | CDR | PRT | US20190085084; SEQ ID NO: 27 | 2905 |
| CII739 | CDR | PRT | WO2016164637; SEQ ID NO: 27 | 2906 |
| CII740 | CDR | PRT | US20190085084; SEQ ID NO: 164 | 2907 |
| CII741 | CDR | PRT | US20190085084; SEQ ID NO: 164 | 2908 |
| CII742 | CDR | PRT | WO2016164637; SEQ ID NO: 164 | 2909 |
| CII743 | CDR | PRT | US20190085084; SEQ ID NO: 163 | 2910 |
| CII744 | CDR | PRT | US20190085084; SEQ ID NO: 163 | 2911 |
| CII745 | CDR | PRT | WO2016164637; SEQ ID NO: 163 | 2912 |
| CII746 | CDR | PRT | US20190085084; SEQ ID NO: 588 | 2913 |
| CII747 | CDR | PRT | WO2016164637; SEQ ID NO: 588 | 2914 |
| CII748 | CDR | PRT | US20190085084; SEQ ID NO: 225 | 2915 |
| CII749 | CDR | PRT | US20190085084; SEQ ID NO: 225 | 2916 |
| CII750 | CDR | PRT | WO2016164637; SEQ ID NO: 225 | 2917 |
| CII751 | CDR | PRT | US20190085084; SEQ ID NO: 200 | 2918 |
| CII752 | CDR | PRT | US20190085084; SEQ ID NO: 200 | 2919 |
| CII753 | CDR | PRT | WO2016164637; SEQ ID NO: 200 | 2920 |
| CII754 | CDR | PRT | US20190085084; SEQ ID NO: 216 | 2921 |
| CII755 | CDR | PRT | US20190085084; SEQ ID NO: 216 | 2922 |
| CII756 | CDR | PRT | WO2016164637; SEQ ID NO: 216 | 2923 |
| CII757 | CDR | PRT | US20190085084; SEQ ID NO: 213 | 2924 |
| CII758 | CDR | PRT | US20190085084; SEQ ID NO: 213 | 2925 |
| CII759 | CDR | PRT | WO2016164637; SEQ ID NO: 213 | 2926 |
| CII760 | CDR | PRT | US20190085084; SEQ ID NO: 199 | 2927 |
| CII761 | CDR | PRT | US20190085084; SEQ ID NO: 199 | 2928 |
| CII762 | CDR | PRT | WO2016164637; SEQ ID NO: 199 | 2929 |
| CII763 | CDR | PRT | US20190085084; SEQ ID NO: 206 | 2930 |
| CII764 | CDR | PRT | US20190085084; SEQ ID NO: 206 | 2931 |
| CII765 | CDR | PRT | WO2016164637; SEQ ID NO: 206 | 2932 |
| CII766 | CDR | PRT | US20190085084; SEQ ID NO: 208 | 2933 |
| CII767 | CDR | PRT | US20190085084; SEQ ID NO: 208 | 2934 |
| CII768 | CDR | PRT | WO2016164637; SEQ ID NO: 208 | 2935 |
| CII769 | CDR | PRT | US20190085084; SEQ ID NO: 218 | 2936 |
| CII770 | CDR | PRT | US20190085084; SEQ ID NO: 218 | 2937 |
| CII771 | CDR | PRT | WO2016164637; SEQ ID NO: 218 | 2938 |
| CII772 | CDR | PRT | US20190085084; SEQ ID NO: 217 | 2939 |
| CII773 | CDR | PRT | US20190085084; SEQ ID NO: 217 | 2940 |
| CII774 | CDR | PRT | WO2016164637; SEQ ID NO: 217 | 2941 |
| CII775 | CDR | PRT | US20190085084; SEQ ID NO: 236 | 2942 |
| CII776 | CDR | PRT | US20190085084; SEQ ID NO: 236 | 2943 |
| CII777 | CDR | PRT | WO2016164637; SEQ ID NO: 236 | 2944 |
| CII778 | CDR | PRT | US20190085084; SEQ ID NO: 224 | 2945 |
| CII779 | CDR | PRT | US20190085084; SEQ ID NO: 224 | 2946 |
| CII780 | CDR | PRT | WO2016164637; SEQ ID NO: 224 | 2947 |
| CII781 | CDR | PRT | US20190085084; SEQ ID NO: 193 | 2948 |
| CII782 | CDR | PRT | US20190085084; SEQ ID NO: 193 | 2949 |
| CII783 | CDR | PRT | WO2016164637; SEQ ID NO: 193 | 2950 |
| CII784 | CDR | PRT | US20190085084; SEQ ID NO: 188 | 2951 |
| CII785 | CDR | PRT | US20190085084; SEQ ID NO: 188 | 2952 |
| CII786 | CDR | PRT | WO2016164637; SEQ ID NO: 188 | 2953 |
| CII787 | CDR | PRT | US20190085084; SEQ ID NO: 556 | 2954 |
| CII788 | CDR | PRT | US20190085084; SEQ ID NO: 556 | 2955 |
| CII789 | CDR | PRT | WO2016164637; SEQ ID NO: 556 | 2956 |
| CII790 | CDR | PRT | US20190085084; SEQ ID NO: 559 | 2957 |
| CII791 | CDR | PRT | US20190085084; SEQ ID NO: 559 | 2958 |
| CII792 | CDR | PRT | WO2016164637; SEQ ID NO: 559 | 2959 |
| CII793 | CDR | PRT | US20190085084; SEQ ID NO: 186 | 2960 |
| CII794 | CDR | PRT | US20190085084; SEQ ID NO: 186 | 2961 |
| CII795 | CDR | PRT | WO2016164637; SEQ ID NO: 186 | 2962 |
| CII796 | CDR | PRT | US20190085084; SEQ ID NO: 184 | 2963 |
| CII797 | CDR | PRT | US20190085084; SEQ ID NO: 184 | 2964 |
| CII798 | CDR | PRT | WO2016164637; SEQ ID NO: 184 | 2965 |
| CII799 | CDR | PRT | US20190085084; SEQ ID NO: 557 | 2966 |
| CII800 | CDR | PRT | US20190085084; SEQ ID NO: 557 | 2967 |
| CII801 | CDR | PRT | WO2016164637; SEQ ID NO: 557 | 2968 |
| CII802 | CDR | PRT | US20190085084; SEQ ID NO: 563 | 2969 |
| CII803 | CDR | PRT | US20190085084; SEQ ID NO: 563 | 2970 |
| CII804 | CDR | PRT | WO2016164637; SEQ ID NO: 563 | 2971 |
| CII805 | CDR | PRT | US20190085084; SEQ ID NO: 555 | 2972 |
| CII806 | CDR | PRT | US20190085084; SEQ ID NO: 555 | 2973 |
| CII807 | CDR | PRT | WO2016164637; SEQ ID NO: 555 | 2974 |
| CII808 | CDR | PRT | US20190085084; SEQ ID NO: 540 | 2975 |
| CII809 | CDR | PRT | US20190085084; SEQ ID NO: 540 | 2976 |
| CII810 | CDR | PRT | WO2016164637; SEQ ID NO: 540 | 2977 |
| CII811 | CDR | PRT | US20190085084; SEQ ID NO: 541 | 2978 |
| CII812 | CDR | PRT | US20190085084; SEQ ID NO: 541 | 2979 |
| CII813 | CDR | PRT | WO2016164637; SEQ ID NO: 541 | 2980 |
| CII814 | CDR | PRT | US20190085084; SEQ ID NO: 542 | 2981 |
| CII815 | CDR | PRT | US20190085084; SEQ ID NO: 542 | 2982 |
| CII816 | CDR | PRT | WO2016164637; SEQ ID NO: 542 | 2983 |
| CII817 | CDR | PRT | US20190085084; SEQ ID NO: 190 | 2984 |
| CII818 | CDR | PRT | US20190085084; SEQ ID NO: 190 | 2985 |
| CII819 | CDR | PRT | WO2016164637; SEQ ID NO: 190 | 2986 |
| CII820 | CDR | PRT | US20190085084; SEQ ID NO: 558 | 2987 |
| CII821 | CDR | PRT | US20190085084; SEQ ID NO: 558 | 2988 |
| CII822 | CDR | PRT | WO2016164637; SEQ ID NO: 558 | 2989 |
| CII823 | CDR | PRT | US20190085084; SEQ ID NO: 560 | 2990 |
| CII824 | CDR | PRT | US20190085084; SEQ ID NO: 560 | 2991 |
| CII825 | CDR | PRT | WO2016164637; SEQ ID NO: 560 | 2992 |
| CII826 | CDR | PRT | US20190085084; SEQ ID NO: 543 | 2993 |
| CII827 | CDR | PRT | US20190085084; SEQ ID NO: 543 | 2994 |
| CII828 | CDR | PRT | WO2016164637; SEQ ID NO: 543 | 2995 |
| CII829 | CDR | PRT | US20190085084; SEQ ID NO: 554 | 2996 |
| CII830 | CDR | PRT | US20190085084; SEQ ID NO: 554 | 2997 |
| CII831 | CDR | PRT | WO2016164637; SEQ ID NO: 554 | 2998 |
| CII832 | CDR | PRT | US20190085084; SEQ ID NO: 544 | 2999 |
| CII833 | CDR | PRT | US20190085084; SEQ ID NO: 544 | 3000 |
| CII834 | CDR | PRT | WO2016164637; SEQ ID NO: 544 | 3001 |
| CII835 | CDR | PRT | US20190085084; SEQ ID NO: 553 | 3002 |
| CII836 | CDR | PRT | US20190085084; SEQ ID NO: 553 | 3003 |
| CII837 | CDR | PRT | WO2016164637; SEQ ID NO: 553 | 3004 |
| CII838 | CDR | PRT | US20190085084; SEQ ID NO: 545 | 3005 |
| CII839 | CDR | PRT | US20190085084; SEQ ID NO: 545 | 3006 |
| CII840 | CDR | PRT | WO2016164637; SEQ ID NO: 545 | 3007 |
| CII841 | CDR | PRT | US20190085084; SEQ ID NO: 546 | 3008 |
| CII842 | CDR | PRT | US20190085084; SEQ ID NO: 546 | 3009 |
| CII843 | CDR | PRT | WO2016164637; SEQ ID NO: 546 | 3010 |
| CII844 | CDR | PRT | US20190085084; SEQ ID NO: 562 | 3011 |
| CII845 | CDR | PRT | US20190085084; SEQ ID NO: 562 | 3012 |
| CII846 | CDR | PRT | WO2016164637; SEQ ID NO: 562 | 3013 |
| CII847 | CDR | PRT | US20190085084; SEQ ID NO: 552 | 3014 |
| CII848 | CDR | PRT | US20190085084; SEQ ID NO: 552 | 3015 |
| CII849 | CDR | PRT | WO2016164637; SEQ ID NO: 552 | 3016 |
| CII850 | CDR | PRT | US20190085084; SEQ ID NO: 547 | 3017 |
| CII851 | CDR | PRT | US20190085084; SEQ ID NO: 547 | 3018 |
| CII852 | CDR | PRT | WO2016164637; SEQ ID NO: 547 | 3019 |
| CII853 | CDR | PRT | US20190085084; SEQ ID NO: 548 | 3020 |
| CII854 | CDR | PRT | US20190085084; SEQ ID NO: 548 | 3021 |
| CII855 | CDR | PRT | WO2016164637; SEQ ID NO: 548 | 3022 |
| CII856 | CDR | PRT | US20190085084; SEQ ID NO: 564 | 3023 |
| CII857 | CDR | PRT | US20190085084; SEQ ID NO: 564 | 3024 |
| CII858 | CDR | PRT | WO2016164637; SEQ ID NO: 564 | 3025 |
| CII859 | CDR | PRT | US20190085084; SEQ ID NO: 549 | 3026 |
| CII860 | CDR | PRT | US20190085084; SEQ ID NO: 549 | 3027 |
| CII861 | CDR | PRT | WO2016164637; SEQ ID NO: 549 | 3028 |
| CII862 | CDR | PRT | US20190085084; SEQ ID NO: 561 | 3029 |
| CII863 | CDR | PRT | US20190085084; SEQ ID NO: 561 | 3030 |
| CII864 | CDR | PRT | WO2016164637; SEQ ID NO: 561 | 3031 |
| CII865 | CDR | PRT | US20190085084; SEQ ID NO: 241 | 3032 |
| CII866 | CDR | PRT | US20190085084; SEQ ID NO: 241 | 3033 |
| CII867 | CDR | PRT | WO2016164637; SEQ ID NO: 241 | 3034 |
| CII868 | CDR | PRT | US20190085084; SEQ ID NO: 223 | 3035 |
| CII869 | CDR | PRT | US20190085084; SEQ ID NO: 223 | 3036 |
| CII870 | CDR | PRT | WO2016164637; SEQ ID NO: 223 | 3037 |
| CII871 | CDR | PRT | US20190085084; SEQ ID NO: 246 | 3038 |
| CII872 | CDR | PRT | US20190085084; SEQ ID NO: 246 | 3039 |
| CII873 | CDR | PRT | WO2016164637; SEQ ID NO: 246 | 3040 |
| CII874 | CDR | PRT | US20190085084; SEQ ID NO: 244 | 3041 |
| CII875 | CDR | PRT | US20190085084; SEQ ID NO: 244 | 3042 |
| CII876 | CDR | PRT | WO2016164637; SEQ ID NO: 244 | 3043 |
| CII877 | CDR | PRT | US20190085084; SEQ ID NO: 201 | 3044 |
| CII878 | CDR | PRT | US20190085084; SEQ ID NO: 201 | 3045 |
| CII879 | CDR | PRT | WO2016164637; SEQ ID NO: 201 | 3046 |
| CII880 | CDR | PRT | US20190085084; SEQ ID NO: 238 | 3047 |
| CII881 | CDR | PRT | US20190085084; SEQ ID NO: 238 | 3048 |
| CII882 | CDR | PRT | WO2016164637; SEQ ID NO: 238 | 3049 |
| CII883 | CDR | PRT | US20190085084; SEQ ID NO: 237 | 3050 |
| CII884 | CDR | PRT | US20190085084; SEQ ID NO: 237 | 3051 |
| CII885 | CDR | PRT | WO2016164637; SEQ ID NO: 237 | 3052 |
| CII886 | CDR | PRT | US20190085084; SEQ ID NO: 195 | 3053 |
| CII887 | CDR | PRT | US20190085084; SEQ ID NO: 195 | 3054 |
| CII888 | CDR | PRT | WO2016164637; SEQ ID NO: 195 | 3055 |
| CII889 | CDR | PRT | US20190085084; SEQ ID NO: 196 | 3056 |
| CII890 | CDR | PRT | US20190085084; SEQ ID NO: 196 | 3057 |
| CII891 | CDR | PRT | WO2016164637; SEQ ID NO: 196 | 3058 |
| CII892 | CDR | PRT | US20190085084; SEQ ID NO: 252 | 3059 |
| CII893 | CDR | PRT | US20190085084; SEQ ID NO: 252 | 3060 |
| CII894 | CDR | PRT | WO2016164637; SEQ ID NO: 252 | 3061 |
| CII895 | CDR | PRT | US20190085084; SEQ ID NO: 222 | 3062 |
| CII896 | CDR | PRT | US20190085084; SEQ ID NO: 222 | 3063 |
| CII897 | CDR | PRT | WO2016164637; SEQ ID NO: 222 | 3064 |
| CII898 | CDR | PRT | US20190085084; SEQ ID NO: 194 | 3065 |
| CII899 | CDR | PRT | US20190085084; SEQ ID NO: 194 | 3066 |
| CII900 | CDR | PRT | WO2016164637; SEQ ID NO: 194 | 3067 |
| CII901 | CDR | PRT | US20190085084; SEQ ID NO: 214 | 3068 |
| CII902 | CDR | PRT | US20190085084; SEQ ID NO: 214 | 3069 |
| CII903 | CDR | PRT | WO2016164637; SEQ ID NO: 214 | 3070 |
| CII904 | CDR | PRT | US20190085084; SEQ ID NO: 204 | 3071 |
| CII905 | CDR | PRT | US20190085084; SEQ ID NO: 204 | 3072 |
| CII906 | CDR | PRT | WO2016164637; SEQ ID NO: 204 | 3073 |
| CII907 | CDR | PRT | US20190085084; SEQ ID NO: 203 | 3074 |
| CII908 | CDR | PRT | US20190085084; SEQ ID NO: 203 | 3075 |
| CII909 | CDR | PRT | WO2016164637; SEQ ID NO: 203 | 3076 |
| CII910 | CDR | PRT | US20190085084; SEQ ID NO: 181 | 3077 |
| CII911 | CDR | PRT | US20190085084; SEQ ID NO: 181 | 3078 |
| CII912 | CDR | PRT | WO2016164637; SEQ ID NO: 181 | 3079 |
| CII913 | CDR | PRT | US20190085084; SEQ ID NO: 255 | 3080 |
| CII914 | CDR | PRT | US20190085084; SEQ ID NO: 255 | 3081 |
| CII915 | CDR | PRT | WO2016164637; SEQ ID NO: 255 | 3082 |
| CII916 | CDR | PRT | US20190085084; SEQ ID NO: 180 | 3083 |
| CII917 | CDR | PRT | US20190085084; SEQ ID NO: 180 | 3084 |
| CII918 | CDR | PRT | WO2016164637; SEQ ID NO: 180 | 3085 |
| CII919 | CDR | PRT | US20190085084; SEQ ID NO: 231 | 3086 |
| CII920 | CDR | PRT | US20190085084; SEQ ID NO: 231 | 3087 |
| CII921 | CDR | PRT | WO2016164637; SEQ ID NO: 231 | 3088 |
| CII922 | CDR | PRT | US20190085084; SEQ ID NO: 232 | 3089 |
| CII923 | CDR | PRT | US20190085084; SEQ ID NO: 232 | 3090 |
| CII924 | CDR | PRT | WO2016164637; SEQ ID NO: 232 | 3091 |
| CII925 | CDR | PRT | US20190085084; SEQ ID NO: 256 | 3092 |
| CII926 | CDR | PRT | US20190085084; SEQ ID NO: 256 | 3093 |
| CII927 | CDR | PRT | WO2016164637; SEQ ID NO: 256 | 3094 |
| CII928 | CDR | PRT | US20190085084; SEQ ID NO: 229 | 3095 |
| CII929 | CDR | PRT | US20190085084; SEQ ID NO: 229 | 3096 |
| CII930 | CDR | PRT | WO2016164637; SEQ ID NO: 229 | 3097 |
| CII931 | CDR | PRT | US20190085084; SEQ ID NO: 234 | 3098 |
| CII932 | CDR | PRT | US20190085084; SEQ ID NO: 234 | 3099 |
| CII933 | CDR | PRT | WO2016164637; SEQ ID NO: 234 | 3100 |
| CII934 | CDR | PRT | US20190085084; SEQ ID NO: 254 | 3101 |
| CII935 | CDR | PRT | US20190085084; SEQ ID NO: 254 | 3102 |
| CII936 | CDR | PRT | WO2016164637; SEQ ID NO: 254 | 3103 |
| CII937 | CDR | PRT | US20190085084; SEQ ID NO: 247 | 3104 |
| CII938 | CDR | PRT | US20190085084; SEQ ID NO: 247 | 3105 |
| CII939 | CDR | PRT | WO2016164637; SEQ ID NO: 247 | 3106 |
| CII940 | CDR | PRT | US20190085084; SEQ ID NO: 245 | 3107 |
| CII941 | CDR | PRT | US20190085084; SEQ ID NO: 245 | 3108 |
| CII942 | CDR | PRT | WO2016164637; SEQ ID NO: 245 | 3109 |
| CII943 | CDR | PRT | US20190085084; SEQ ID NO: 253 | 3110 |
| CII944 | CDR | PRT | US20190085084; SEQ ID NO: 253 | 3111 |
| CII945 | CDR | PRT | WO2016164637; SEQ ID NO: 253 | 3112 |
| CII946 | CDR | PRT | US20190085084; SEQ ID NO: 183 | 3113 |
| CII947 | CDR | PRT | US20190085084; SEQ ID NO: 183 | 3114 |
| CII948 | CDR | PRT | WO2016164637; SEQ ID NO: 183 | 3115 |
| CII949 | CDR | PRT | US20190085084; SEQ ID NO: 239 | 3116 |
| CII950 | CDR | PRT | US20190085084; SEQ ID NO: 239 | 3117 |
| CII951 | CDR | PRT | WO2016164637; SEQ ID NO: 239 | 3118 |
| CII952 | CDR | PRT | US20190085084; SEQ ID NO: 243 | 3119 |
| CII953 | CDR | PRT | US20190085084; SEQ ID NO: 243 | 3120 |
| CII954 | CDR | PRT | WO2016164637; SEQ ID NO: 243 | 3121 |
| CII955 | CDR | PRT | US20190085084; SEQ ID NO: 185 | 3122 |
| CII956 | CDR | PRT | US20190085084; SEQ ID NO: 185 | 3123 |
| CII957 | CDR | PRT | WO2016164637; SEQ ID NO: 185 | 3124 |
| CII958 | CDR | PRT | US20190085084; SEQ ID NO: 197 | 3125 |
| CII959 | CDR | PRT | US20190085084; SEQ ID NO: 197 | 3126 |
| CII960 | CDR | PRT | WO2016164637; SEQ ID NO: 197 | 3127 |
| CII961 | CDR | PRT | US20190085084; SEQ ID NO: 233 | 3128 |
| CII962 | CDR | PRT | US20190085084; SEQ ID NO: 233 | 3129 |
| CII963 | CDR | PRT | WO2016164637; SEQ ID NO: 233 | 3130 |
| CII964 | CDR | PRT | US20190085084; SEQ ID NO: 182 | 3131 |
| CII965 | CDR | PRT | US20190085084; SEQ ID NO: 182 | 3132 |
| CII966 | CDR | PRT | WO2016164637; SEQ ID NO: 182 | 3133 |
| CII967 | CDR | PRT | US20190085084; SEQ ID NO: 249 | 3134 |
| CII968 | CDR | PRT | US20190085084; SEQ ID NO: 249 | 3135 |
| CII969 | CDR | PRT | WO2016164637; SEQ ID NO: 249 | 3136 |
| CII970 | CDR | PRT | US20190085084; SEQ ID NO: 179 | 3137 |
| CII971 | CDR | PRT | US20190085084; SEQ ID NO: 179 | 3138 |
| CII972 | CDR | PRT | WO2016164637; SEQ ID NO: 179 | 3139 |
| CII973 | CDR | PRT | US20190085084; SEQ ID NO: 191 | 3140 |
| CII974 | CDR | PRT | US20190085084; SEQ ID NO: 191 | 3141 |
| CII975 | CDR | PRT | WO2016164637; SEQ ID NO: 191 | 3142 |
| CII976 | CDR | PRT | US20190085084; SEQ ID NO: 219 | 3143 |
| CII977 | CDR | PRT | US20190085084; SEQ ID NO: 219 | 3144 |
| CII978 | CDR | PRT | WO2016164637; SEQ ID NO: 219 | 3145 |
| CII979 | CDR | PRT | US20190085084; SEQ ID NO: 33 | 3146 |
| CII980 | CDR | PRT | US20190085084; SEQ ID NO: 33 | 3147 |
| CII981 | CDR | PRT | WO2016164637; SEQ ID NO: 33 | 3148 |
| CII982 | CDR | PRT | US20190085084; SEQ ID NO: 34 | 3149 |
| CII983 | CDR | PRT | US20190085084; SEQ ID NO: 34 | 3150 |
| CII984 | CDR | PRT | WO2016164637; SEQ ID NO: 34 | 3151 |
| CII985 | CDR | PRT | US20190085084; SEQ ID NO: 47 | 3152 |
| CII986 | CDR | PRT | US20190085084; SEQ ID NO: 47 | 3153 |
| CII987 | CDR | PRT | WO2016164637; SEQ ID NO: 47 | 3154 |
| CII988 | CDR | PRT | US20190085084; SEQ ID NO: 39 | 3155 |
| CII989 | CDR | PRT | US20190085084; SEQ ID NO: 39 | 3156 |
| CII990 | CDR | PRT | WO2016164637; SEQ ID NO: 39 | 3157 |
| CII991 | CDR | PRT | US20190085084; SEQ ID NO: 106 | 3158 |
| CII992 | CDR | PRT | US20190085084; SEQ ID NO: 106 | 3159 |
| CII993 | CDR | PRT | WO2016164637; SEQ ID NO: 106 | 3160 |
| CII994 | CDR | PRT | US20190085084; SEQ ID NO: 125 | 3161 |
| CII995 | CDR | PRT | US20190085084; SEQ ID NO: 125 | 3162 |
| CII996 | CDR | PRT | WO2016164637; SEQ ID NO: 125 | 3163 |
| CII997 | CDR | PRT | US20190085084; SEQ ID NO: 97 | 3164 |
| CII998 | CDR | PRT | US20190085084; SEQ ID NO: 97 | 3165 |
| CII999 | CDR | PRT | WO2016164637; SEQ ID NO: 97 | 3166 |
| CII1000 | CDR | PRT | US20190085084; SEQ ID NO: 134 | 3167 |
| CII1001 | CDR | PRT | US20190085084; SEQ ID NO: 134 | 3168 |
| CII1002 | CDR | PRT | WO2016164637; SEQ ID NO: 134 | 3169 |
| CII1003 | CDR | PRT | US20190085084; SEQ ID NO: 133 | 3170 |
| CII1004 | CDR | PRT | US20190085084; SEQ ID NO: 133 | 3171 |
| CII1005 | CDR | PRT | WO2016164637; SEQ ID NO: 133 | 3172 |
| CII1006 | CDR | PRT | US20190085084; SEQ ID NO: 138 | 3173 |
| CII1007 | CDR | PRT | WO2016164637; SEQ ID NO: 138 | 3174 |
| CII1008 | CDR | PRT | US20190085084; SEQ ID NO: 137 | 3175 |
| CII1009 | CDR | PRT | WO2016164637; SEQ ID NO: 137 | 3176 |
| CII1010 | CDR | PRT | US20190085084; SEQ ID NO: 136 | 3177 |
| CII1011 | CDR | PRT | US20190085084; SEQ ID NO: 136 | 3178 |
| CII1012 | CDR | PRT | WO2016164637; SEQ ID NO: 136 | 3179 |
| CII1013 | CDR | PRT | US20190085084; SEQ ID NO: 140 | 3180 |
| CII1014 | CDR | PRT | US20190085084; SEQ ID NO: 140 | 3181 |
| CII1015 | CDR | PRT | WO2016164637; SEQ ID NO: 140 | 3182 |
| CII1016 | CDR | PRT | US20190085084; SEQ ID NO: 135 | 3183 |
| CII1017 | CDR | PRT | US20190085084; SEQ ID NO: 135 | 3184 |
| CII1018 | CDR | PRT | WO2016164637; SEQ ID NO: 135 | 3185 |
| CII1019 | CDR | PRT | US20190085084; SEQ ID NO: 139 | 3186 |
| CII1020 | CDR | PRT | WO2016164637; SEQ ID NO: 139 | 3187 |
| CII1021 | CDR | PRT | US20190085084; SEQ ID NO: 31 | 3188 |
| CII1022 | CDR | PRT | WO2016164637; SEQ ID NO: 31 | 3189 |
| CII1023 | CDR | PRT | US20190085084; SEQ ID NO: 26 | 3190 |
| CII1024 | CDR | PRT | US20190085084; SEQ ID NO: 26 | 3191 |
| CII1025 | CDR | PRT | WO2016164637; SEQ ID NO: 26 | 3192 |
| CII1026 | CDR | PRT | US20190085084; SEQ ID NO: 29 | 3193 |
| CII1027 | CDR | PRT | US20190085084; SEQ ID NO: 29 | 3194 |
| CII1028 | CDR | PRT | WO2016164637; SEQ ID NO: 29 | 3195 |
| CII1029 | CDR | PRT | US20190085084; SEQ ID NO: 574 | 3196 |
| CII1030 | CDR | PRT | US20190085084; SEQ ID NO: 574 | 3197 |
| CII1031 | CDR | PRT | WO2016164637; SEQ ID NO: 574 | 3198 |
| CII1032 | CDR | PRT | US20190085084; SEQ ID NO: 577 | 3199 |
| CII1033 | CDR | PRT | WO2016164637; SEQ ID NO: 577 | 3200 |
| CII1034 | CDR | PRT | US20190085084; SEQ ID NO: 572 | 3201 |
| CII1035 | CDR | PRT | WO2016164637; SEQ ID NO: 572 | 3202 |
| CII1036 | CDR | PRT | US20190085084; SEQ ID NO: 573 | 3203 |
| CII1037 | CDR | PRT | US20190085084; SEQ ID NO: 573 | 3204 |
| CII1038 | CDR | PRT | WO2016164637; SEQ ID NO: 573 | 3205 |
| CII1039 | CDR | PRT | US20190085084; SEQ ID NO: 156 | 3206 |
| CII1040 | CDR | PRT | US20190085084; SEQ ID NO: 156 | 3207 |
| CII1041 | CDR | PRT | WO2016164637; SEQ ID NO: 156 | 3208 |
| CII1042 | CDR | PRT | US20190085084; SEQ ID NO: 158 | 3209 |
| CII1043 | CDR | PRT | US20190085084; SEQ ID NO: 158 | 3210 |
| CII1044 | CDR | PRT | WO2016164637; SEQ ID NO: 158 | 3211 |
| CII1045 | CDR | PRT | US20190085084; SEQ ID NO: 579 | 3212 |
| CII1046 | CDR | PRT | US20190085084; SEQ ID NO: 579 | 3213 |
| CII1047 | CDR | PRT | WO2016164637; SEQ ID NO: 579 | 3214 |
| CII1048 | CDR | PRT | US20190085084; SEQ ID NO: 578 | 3215 |
| CII1049 | CDR | PRT | WO2016164637; SEQ ID NO: 578 | 3216 |
| CII1050 | CDR | PRT | US20190085084; SEQ ID NO: 575 | 3217 |
| CII1051 | CDR | PRT | WO2016164637; SEQ ID NO: 575 | 3218 |
| CII1052 | CDR | PRT | US20190085084; SEQ ID NO: 576 | 3219 |
| CII1053 | CDR | PRT | US20190085084; SEQ ID NO: 576 | 3220 |
| CII1054 | CDR | PRT | WO2016164637; SEQ ID NO: 576 | 3221 |
| CII1055 | CDR | PRT | US20190085084; SEQ ID NO: 502 | 3222 |
| CII1056 | CDR | PRT | US20190085084; SEQ ID NO: 502 | 3223 |
| CII1057 | CDR | PRT | WO2016164637; SEQ ID NO: 502 | 3224 |
| CII1058 | CDR | PRT | US20190085084; SEQ ID NO: 160 | 3225 |
| CII1059 | CDR | PRT | US20190085084; SEQ ID NO: 160 | 3226 |
| CII1060 | CDR | PRT | WO2016164637; SEQ ID NO: 160 | 3227 |
| CII1061 | CDR | PRT | US20190085084; SEQ ID NO: 571 | 3228 |
| CII1062 | CDR | PRT | WO2016164637; SEQ ID NO: 571 | 3229 |
| CII1063 | CDR | PRT | US20190085084; SEQ ID NO: 566 | 3230 |
| CII1064 | CDR | PRT | US20190085084; SEQ ID NO: 566 | 3231 |
| CII1065 | CDR | PRT | WO2016164637; SEQ ID NO: 566 | 3232 |
| CII1066 | CDR | PRT | US20190085084; SEQ ID NO: 597 | 3233 |
| CII1067 | CDR | PRT | US20190085084; SEQ ID NO: 597 | 3234 |
| CII1068 | CDR | PRT | WO2016164637; SEQ ID NO: 597 | 3235 |
| CII1069 | CDR | PRT | US20190085084; SEQ ID NO: 593 | 3236 |
| CII1070 | CDR | PRT | US20190085084; SEQ ID NO: 593 | 3237 |
| CII1071 | CDR | PRT | WO2016164637; SEQ ID NO: 593 | 3238 |
| CII1072 | CDR | PRT | US20190085084; SEQ ID NO: 144 | 3239 |
| CII1073 | CDR | PRT | US20190085084; SEQ ID NO: 144 | 3240 |
| CII1074 | CDR | PRT | WO2016164637; SEQ ID NO: 144 | 3241 |
| CII1075 | CDR | PRT | US20190085084; SEQ ID NO: 145 | 3242 |
| CII1076 | CDR | PRT | US20190085084; SEQ ID NO: 145 | 3243 |
| CII1077 | CDR | PRT | WO2016164637; SEQ ID NO: 145 | 3244 |
| CII1078 | CDR | PRT | US20190085084; SEQ ID NO: 596 | 3245 |
| CII1079 | CDR | PRT | US20190085084; SEQ ID NO: 596 | 3246 |
| CII1080 | CDR | PRT | WO2016164637; SEQ ID NO: 596 | 3247 |
| CII1081 | CDR | PRT | US20190085084; SEQ ID NO: 147 | 3248 |
| CII1082 | CDR | PRT | US20190085084; SEQ ID NO: 147 | 3249 |
| CII1083 | CDR | PRT | WO2016164637; SEQ ID NO: 147 | 3250 |
| CII1084 | CDR | PRT | US20190085084; SEQ ID NO: 595 | 3251 |
| CII1085 | CDR | PRT | US20190085084; SEQ ID NO: 595 | 3252 |
| CII1086 | CDR | PRT | WO2016164637; SEQ ID NO: 595 | 3253 |
| CII1087 | CDR | PRT | US20190085084; SEQ ID NO: 148 | 3254 |
| CII1088 | CDR | PRT | US20190085084; SEQ ID NO: 148 | 3255 |
| CII1089 | CDR | PRT | WO2016164637; SEQ ID NO: 148 | 3256 |
| CII1090 | CDR | PRT | US20190085084; SEQ ID NO: 591 | 3257 |
| CII1091 | CDR | PRT | US20190085084; SEQ ID NO: 591 | 3258 |
| CII1092 | CDR | PRT | WO2016164637; SEQ ID NO: 591 | 3259 |
| CII1093 | CDR | PRT | US20190085084; SEQ ID NO: 592 | 3260 |
| CII1094 | CDR | PRT | US20190085084; SEQ ID NO: 592 | 3261 |
| CII1095 | CDR | PRT | WO2016164637; SEQ ID NO: 592 | 3262 |
| CII1096 | CDR | PRT | US20190085084; SEQ ID NO: 568 | 3263 |
| CII1097 | CDR | PRT | US20190085084; SEQ ID NO: 568 | 3264 |
| CII1098 | CDR | PRT | WO2016164637; SEQ ID NO: 568 | 3265 |
| CII1099 | CDR | PRT | US20190085084; SEQ ID NO: 570 | 3266 |
| CII1100 | CDR | PRT | US20190085084; SEQ ID NO: 570 | 3267 |
| CII1101 | CDR | PRT | WO2016164637; SEQ ID NO: 570 | 3268 |
| CII1102 | CDR | PRT | US20190085084; SEQ ID NO: 567 | 3269 |
| CII1103 | CDR | PRT | US20190085084; SEQ ID NO: 567 | 3270 |
| CII1104 | CDR | PRT | WO2016164637; SEQ ID NO: 567 | 3271 |
| CII1105 | CDR | PRT | US20190085084; SEQ ID NO: 130 | 3272 |
| CII1106 | CDR | PRT | US20190085084; SEQ ID NO: 130 | 3273 |
| CII1107 | CDR | PRT | WO2016164637; SEQ ID NO: 130 | 3274 |
| CII1108 | CDR | PRT | US20190085084; SEQ ID NO: 496 | 3275 |
| CII1109 | CDR | PRT | US20190085084; SEQ ID NO: 496 | 3276 |
| CII1110 | CDR | PRT | WO2016164637; SEQ ID NO: 496 | 3277 |
| CII1111 | CDR | PRT | US20190085084; SEQ ID NO: 535 | 3278 |
| CII1112 | CDR | PRT | US20190085084; SEQ ID NO: 535 | 3279 |
| CII1113 | CDR | PRT | WO2016164637; SEQ ID NO: 535 | 3280 |
| CII1114 | CDR | PRT | US20190085084; SEQ ID NO: 537 | 3281 |
| CII1115 | CDR | PRT | US20190085084; SEQ ID NO: 537 | 3282 |
| CII1116 | CDR | PRT | WO2016164637; SEQ ID NO: 537 | 3283 |
| CII1117 | CDR | PRT | US20190085084; SEQ ID NO: 533 | 3284 |
| CII1118 | CDR | PRT | US20190085084; SEQ ID NO: 533 | 3285 |
| CII1119 | CDR | PRT | WO2016164637; SEQ ID NO: 533 | 3286 |
| CII1120 | CDR | PRT | US20190085084; SEQ ID NO: 534 | 3287 |
| CII1121 | CDR | PRT | US20190085084; SEQ ID NO: 534 | 3288 |
| CII1122 | CDR | PRT | WO2016164637; SEQ ID NO: 534 | 3289 |
| CII1123 | CDR | PRT | US20190085084; SEQ ID NO: 536 | 3290 |
| CII1124 | CDR | PRT | US20190085084; SEQ ID NO: 536 | 3291 |
| CII1125 | CDR | PRT | WO2016164637; SEQ ID NO: 536 | 3292 |
| CII1126 | CDR | PRT | US20190085084; SEQ ID NO: 531 | 3293 |
| CII1127 | CDR | PRT | US20190085084; SEQ ID NO: 531 | 3294 |
| CII1128 | CDR | PRT | WO2016164637; SEQ ID NO: 531 | 3295 |
| CII1129 | CDR | PRT | US20190085084; SEQ ID NO: 155 | 3296 |
| CII1130 | CDR | PRT | US20190085084; SEQ ID NO: 155 | 3297 |
| CII1131 | CDR | PRT | WO2016164637; SEQ ID NO: 155 | 3298 |
| CII1132 | CDR | PRT | US20190085084; SEQ ID NO: 530 | 3299 |
| CII1133 | CDR | PRT | US20190085084; SEQ ID NO: 530 | 3300 |
| CII1134 | CDR | PRT | WO2016164637; SEQ ID NO: 530 | 3301 |
| CII1135 | CDR | PRT | US20190085084; SEQ ID NO: 527 | 3302 |
| CII1136 | CDR | PRT | US20190085084; SEQ ID NO: 527 | 3303 |
| CII1137 | CDR | PRT | WO2016164637; SEQ ID NO: 527 | 3304 |
| CII1138 | CDR | PRT | US20190085084; SEQ ID NO: 529 | 3305 |
| CII1139 | CDR | PRT | US20190085084; SEQ ID NO: 529 | 3306 |
| CII1140 | CDR | PRT | WO2016164637; SEQ ID NO: 529 | 3307 |
| CII1141 | CDR | PRT | US20190085084; SEQ ID NO: 525 | 3308 |
| CII1142 | CDR | PRT | US20190085084; SEQ ID NO: 525 | 3309 |
| CII1143 | CDR | PRT | WO2016164637; SEQ ID NO: 525 | 3310 |
| CII1144 | CDR | PRT | US20190085084; SEQ ID NO: 526 | 3311 |
| CII1145 | CDR | PRT | US20190085084; SEQ ID NO: 526 | 3312 |
| CII1146 | CDR | PRT | WO2016164637; SEQ ID NO: 526 | 3313 |
| CII1147 | CDR | PRT | US20190085084; SEQ ID NO: 539 | 3314 |
| CII1148 | CDR | PRT | US20190085084; SEQ ID NO: 539 | 3315 |
| CII1149 | CDR | PRT | WO2016164637; SEQ ID NO: 539 | 3316 |
| CII1150 | CDR | PRT | US20190085084; SEQ ID NO: 178 | 3317 |
| CII1151 | CDR | PRT | US20190085084; SEQ ID NO: 178 | 3318 |
| CII1152 | CDR | PRT | WO2016164637; SEQ ID NO: 178 | 3319 |
| CII1153 | CDR | PRT | US20190085084; SEQ ID NO: 538 | 3320 |
| CII1154 | CDR | PRT | US20190085084; SEQ ID NO: 538 | 3321 |
| CII1155 | CDR | PRT | WO2016164637; SEQ ID NO: 538 | 3322 |
| CII1156 | CDR | PRT | US20190085084; SEQ ID NO: 28 | 3323 |
| CII1157 | CDR | PRT | US20190085084; SEQ ID NO: 28 | 3324 |
| CII1158 | CDR | PRT | WO2016164637; SEQ ID NO: 28 | 3325 |
| CII1159 | CDR | PRT | US20190085084; SEQ ID NO: 25 | 3326 |
| CII1160 | CDR | PRT | US20190085084; SEQ ID NO: 25 | 3327 |
| CII1161 | CDR | PRT | WO2016164637; SEQ ID NO: 25 | 3328 |
| CII1162 | CDR | PRT | US20190085084; SEQ ID NO: 40 | 3329 |
| CII1163 | CDR | PRT | US20190085084; SEQ ID NO: 40 | 3330 |
| CII1164 | CDR | PRT | WO2016164637; SEQ ID NO: 40 | 3331 |
| CII1165 | CDR | PRT | US20190085084; SEQ ID NO: 38 | 3332 |
| CII1166 | CDR | PRT | US20190085084; SEQ ID NO: 38 | 3333 |
| CII1167 | CDR | PRT | WO2016164637; SEQ ID NO: 38 | 3334 |
| CII1168 | CDR | PRT | US20190085084; SEQ ID NO: 30 | 3335 |
| CII1169 | CDR | PRT | US20190085084; SEQ ID NO: 30 | 3336 |
| CII1170 | CDR | PRT | WO2016164637; SEQ ID NO: 30 | 3337 |
| CII1171 | CDR | PRT | US20190085084; SEQ ID NO: 586 | 3338 |
| CII1172 | CDR | PRT | US20190085084; SEQ ID NO: 586 | 3339 |
| CII1173 | CDR | PRT | WO2016164637; SEQ ID NO: 586 | 3340 |
| CII1174 | CDR | PRT | US20190085084; SEQ ID NO: 581 | 3341 |
| CII1175 | CDR | PRT | US20190085084; SEQ ID NO: 581 | 3342 |
| CII1176 | CDR | PRT | WO2016164637; SEQ ID NO: 581 | 3343 |
| CII1177 | CDR | PRT | US20190085084; SEQ ID NO: 602 | 3344 |
| CII1178 | CDR | PRT | US20190085084; SEQ ID NO: 602 | 3345 |
| CII1179 | CDR | PRT | WO2016164637; SEQ ID NO: 602 | 3346 |
| CII1180 | CDR | PRT | US20190085084; SEQ ID NO: 124 | 3347 |
| CII1181 | CDR | PRT | US20190085084; SEQ ID NO: 124 | 3348 |
| CII1182 | CDR | PRT | WO2016164637; SEQ ID NO: 124 | 3349 |
| CII1183 | CDR | PRT | US20190085084; SEQ ID NO: 79 | 3350 |
| CII1184 | CDR | PRT | US20190085084; SEQ ID NO: 79 | 3351 |
| CII1185 | CDR | PRT | WO2016164637; SEQ ID NO: 79 | 3352 |
| CII1186 | CDR | PRT | US20190085084; SEQ ID NO: 121 | 3353 |
| CII1187 | CDR | PRT | US20190085084; SEQ ID NO: 121 | 3354 |
| CII1188 | CDR | PRT | WO2016164637; SEQ ID NO: 121 | 3355 |
| CII1189 | CDR | PRT | US20190085084; SEQ ID NO: 90 | 3356 |
| CII1190 | CDR | PRT | US20190085084; SEQ ID NO: 90 | 3357 |
| CII1191 | CDR | PRT | WO2016164637; SEQ ID NO: 90 | 3358 |
| CII1192 | CDR | PRT | US20190085084; SEQ ID NO: 70 | 3359 |
| CII1193 | CDR | PRT | US20190085084; SEQ ID NO: 70 | 3360 |
| CII1194 | CDR | PRT | WO2016164637; SEQ ID NO: 70 | 3361 |
| CII1195 | CDR | PRT | US20190085084; SEQ ID NO: 105 | 3362 |
| CII1196 | CDR | PRT | US20190085084; SEQ ID NO: 105 | 3363 |
| CII1197 | CDR | PRT | WO2016164637; SEQ ID NO: 105 | 3364 |
| CII1198 | CDR | PRT | US20190085084; SEQ ID NO: 72 | 3365 |
| CII1199 | CDR | PRT | US20190085084; SEQ ID NO: 72 | 3366 |
| CII1200 | CDR | PRT | WO2016164637; SEQ ID NO: 72 | 3367 |
| CII1201 | CDR | PRT | US20190085084; SEQ ID NO: 100 | 3368 |
| CII1202 | CDR | PRT | US20190085084; SEQ ID NO: 100 | 3369 |
| CII1203 | CDR | PRT | WO2016164637; SEQ ID NO: 100 | 3370 |
| CII1204 | CDR | PRT | US20190085084; SEQ ID NO: 69 | 3371 |
| CII1205 | CDR | PRT | US20190085084; SEQ ID NO: 69 | 3372 |
| CII1206 | CDR | PRT | WO2016164637; SEQ ID NO: 69 | 3373 |
| CII1207 | CDR | PRT | US20190085084; SEQ ID NO: 107 | 3374 |
| CII1208 | CDR | PRT | US20190085084; SEQ ID NO: 107 | 3375 |
| CII1209 | CDR | PRT | WO2016164637; SEQ ID NO: 107 | 3376 |
| CII1210 | CDR | PRT | US20190085084; SEQ ID NO: 68 | 3377 |
| CII1211 | CDR | PRT | US20190085084; SEQ ID NO: 68 | 3378 |
| CII1212 | CDR | PRT | WO2016164637; SEQ ID NO: 68 | 3379 |
| CII1213 | CDR | PRT | US20190085084; SEQ ID NO: 45 | 3380 |
| CII1214 | CDR | PRT | US20190085084; SEQ ID NO: 45 | 3381 |
| CII1215 | CDR | PRT | WO2016164637; SEQ ID NO: 45 | 3382 |
| CII1216 | CDR | PRT | US20190085084; SEQ ID NO: 174 | 3383 |
| CII1217 | CDR | PRT | WO2016164637; SEQ ID NO: 174 | 3384 |
| CII1218 | CDR | PRT | US20190085084; SEQ ID NO: 101 | 3385 |
| CII1219 | CDR | PRT | US20190085084; SEQ ID NO: 101 | 3386 |
| CII1220 | CDR | PRT | WO2016164637; SEQ ID NO: 101 | 3387 |
| CII1221 | CDR | PRT | US20190085084; SEQ ID NO: 598 | 3388 |
| CII1222 | CDR | PRT | US20190085084; SEQ ID NO: 598 | 3389 |
| CII1223 | CDR | PRT | WO2016164637; SEQ ID NO: 598 | 3390 |
| CII1224 | CDR | PRT | US20190085084; SEQ ID NO: 109 | 3391 |
| CII1225 | CDR | PRT | US20190085084; SEQ ID NO: 109 | 3392 |
| CII1226 | CDR | PRT | WO2016164637; SEQ ID NO: 109 | 3393 |
| CII1227 | CDR | PRT | US20190085084; SEQ ID NO: 111 | 3394 |
| CII1228 | CDR | PRT | US20190085084; SEQ ID NO: 111 | 3395 |
| CII1229 | CDR | PRT | WO2016164637; SEQ ID NO: 111 | 3396 |
| CII1230 | CDR | PRT | US20190085084; SEQ ID NO: 62 | 3397 |
| CII1231 | CDR | PRT | US20190085084; SEQ ID NO: 62 | 3398 |
| CII1232 | CDR | PRT | WO2016164637; SEQ ID NO: 62 | 3399 |
| CII1233 | CDR | PRT | US20190085084; SEQ ID NO: 89 | 3400 |
| CII1234 | CDR | PRT | US20190085084; SEQ ID NO: 89 | 3401 |
| CII1235 | CDR | PRT | WO2016164637; SEQ ID NO: 89 | 3402 |
| CII1236 | CDR | PRT | US20190085084; SEQ ID NO: 48 | 3403 |
| CII1237 | CDR | PRT | US20190085084; SEQ ID NO: 48 | 3404 |
| CII1238 | CDR | PRT | WO2016164637; SEQ ID NO: 48 | 3405 |
| CII1239 | CDR | PRT | US20190085084; SEQ ID NO: 82 | 3406 |
| CII1240 | CDR | PRT | US20190085084; SEQ ID NO: 82 | 3407 |
| CII1241 | CDR | PRT | WO2016164637; SEQ ID NO: 82 | 3408 |
| CII1242 | CDR | PRT | US20190085084; SEQ ID NO: 95 | 3409 |
| CII1243 | CDR | PRT | US20190085084; SEQ ID NO: 95 | 3410 |
| CII1244 | CDR | PRT | WO2016164637; SEQ ID NO: 95 | 3411 |
| CII1245 | CDR | PRT | US20190085084; SEQ ID NO: 112 | 3412 |
| CII1246 | CDR | PRT | US20190085084; SEQ ID NO: 112 | 3413 |
| CII1247 | CDR | PRT | WO2016164637; SEQ ID NO: 112 | 3414 |
| CII1248 | CDR | PRT | US20190085084; SEQ ID NO: 55 | 3415 |
| CII1249 | CDR | PRT | US20190085084; SEQ ID NO: 55 | 3416 |
| CII1250 | CDR | PRT | WO2016164637; SEQ ID NO: 55 | 3417 |
| CII1251 | CDR | PRT | US20190085084; SEQ ID NO: 113 | 3418 |
| CII1252 | CDR | PRT | US20190085084; SEQ ID NO: 113 | 3419 |
| CII1253 | CDR | PRT | WO2016164637; SEQ ID NO: 113 | 3420 |
| CII1254 | CDR | PRT | US20190085084; SEQ ID NO: 98 | 3421 |
| CII1255 | CDR | PRT | US20190085084; SEQ ID NO: 98 | 3422 |
| CII1256 | CDR | PRT | WO2016164637; SEQ ID NO: 98 | 3423 |
| CII1257 | CDR | PRT | US20190085084; SEQ ID NO: 114 | 3424 |
| CII1258 | CDR | PRT | US20190085084; SEQ ID NO: 114 | 3425 |
| CII1259 | CDR | PRT | WO2016164637; SEQ ID NO: 114 | 3426 |
| CII1260 | CDR | PRT | US20190085084; SEQ ID NO: 44 | 3427 |
| CII1261 | CDR | PRT | US20190085084; SEQ ID NO: 44 | 3428 |
| CII1262 | CDR | PRT | WO2016164637; SEQ ID NO: 44 | 3429 |
| CII1263 | CDR | PRT | US20190085084; SEQ ID NO: 58 | 3430 |
| CII1264 | CDR | PRT | US20190085084; SEQ ID NO: 58 | 3431 |
| CII1265 | CDR | PRT | WO2016164637; SEQ ID NO: 58 | 3432 |
| CII1266 | CDR | PRT | US20190085084; SEQ ID NO: 66 | 3433 |
| CII1267 | CDR | PRT | US20190085084; SEQ ID NO: 66 | 3434 |
| CII1268 | CDR | PRT | WO2016164637; SEQ ID NO: 66 | 3435 |
| CII1269 | CDR | PRT | US20190085084; SEQ ID NO: 56 | 3436 |
| CII1270 | CDR | PRT | US20190085084; SEQ ID NO: 56 | 3437 |
| CII1271 | CDR | PRT | WO2016164637; SEQ ID NO: 56 | 3438 |
| CII1272 | CDR | PRT | US20190085084; SEQ ID NO: 99 | 3439 |
| CII1273 | CDR | PRT | US20190085084; SEQ ID NO: 99 | 3440 |
| CII1274 | CDR | PRT | WO2016164637; SEQ ID NO: 99 | 3441 |
| CII1275 | CDR | PRT | US20190085084; SEQ ID NO: 54 | 3442 |
| CII1276 | CDR | PRT | US20190085084; SEQ ID NO: 54 | 3443 |
| CII1277 | CDR | PRT | WO2016164637; SEQ ID NO: 54 | 3444 |
| CII1278 | CDR | PRT | US20190085084; SEQ ID NO: 61 | 3445 |
| CII1279 | CDR | PRT | US20190085084; SEQ ID NO: 61 | 3446 |
| CII1280 | CDR | PRT | WO2016164637; SEQ ID NO: 61 | 3447 |
| CII1281 | CDR | PRT | US20190085084; SEQ ID NO: 84 | 3448 |
| CII1282 | CDR | PRT | US20190085084; SEQ ID NO: 84 | 3449 |
| CII1283 | CDR | PRT | WO2016164637; SEQ ID NO: 84 | 3450 |
| CII1284 | CDR | PRT | US20190085084; SEQ ID NO: 104 | 3451 |
| CII1285 | CDR | PRT | US20190085084; SEQ ID NO: 104 | 3452 |
| CII1286 | CDR | PRT | WO2016164637; SEQ ID NO: 104 | 3453 |
| CII1287 | CDR | PRT | US20190085084; SEQ ID NO: 103 | 3454 |
| CII1288 | CDR | PRT | US20190085084; SEQ ID NO: 103 | 3455 |
| CII1289 | CDR | PRT | WO2016164637; SEQ ID NO: 103 | 3456 |
| CII1290 | CDR | PRT | US20190085084; SEQ ID NO: 83 | 3457 |
| CII1291 | CDR | PRT | US20190085084; SEQ ID NO: 83 | 3458 |
| CII1292 | CDR | PRT | WO2016164637; SEQ ID NO: 83 | 3459 |
| CII1293 | CDR | PRT | US20190085084; SEQ ID NO: 80 | 3460 |
| CII1294 | CDR | PRT | US20190085084; SEQ ID NO: 80 | 3461 |
| CII1295 | CDR | PRT | WO2016164637; SEQ ID NO: 80 | 3462 |
| CII1296 | CDR | PRT | US20190085084; SEQ ID NO: 91 | 3463 |
| CII1297 | CDR | PRT | US20190085084; SEQ ID NO: 91 | 3464 |
| CII1298 | CDR | PRT | WO2016164637; SEQ ID NO: 91 | 3465 |
| CII1299 | CDR | PRT | US20190085084; SEQ ID NO: 42 | 3466 |
| CII1300 | CDR | PRT | US20190085084; SEQ ID NO: 42 | 3467 |
| CII1301 | CDR | PRT | WO2016164637; SEQ ID NO: 42 | 3468 |
| CII1302 | CDR | PRT | US20190085084; SEQ ID NO: 85 | 3469 |
| CII1303 | CDR | PRT | US20190085084; SEQ ID NO: 85 | 3470 |
| CII1304 | CDR | PRT | WO2016164637; SEQ ID NO: 85 | 3471 |
| CII1305 | CDR | PRT | US20190085084; SEQ ID NO: 122 | 3472 |
| CII1306 | CDR | PRT | US20190085084; SEQ ID NO: 122 | 3473 |
| CII1307 | CDR | PRT | WO2016164637; SEQ ID NO: 122 | 3474 |
| CII1308 | CDR | PRT | US20190085084; SEQ ID NO: 41 | 3475 |
| CII1309 | CDR | PRT | US20190085084; SEQ ID NO: 41 | 3476 |
| CII1310 | CDR | PRT | WO2016164637; SEQ ID NO: 41 | 3477 |
| CII1311 | CDR | PRT | US20190085084; SEQ ID NO: 116 | 3478 |
| CII1312 | CDR | PRT | US20190085084; SEQ ID NO: 116 | 3479 |
| CII1313 | CDR | PRT | WO2016164637; SEQ ID NO: 116 | 3480 |
| CII1314 | CDR | PRT | US20190085084; SEQ ID NO: 59 | 3481 |
| CII1315 | CDR | PRT | US20190085084; SEQ ID NO: 59 | 3482 |
| CII1316 | CDR | PRT | WO2016164637; SEQ ID NO: 59 | 3483 |
| CII1317 | CDR | PRT | US20190085084; SEQ ID NO: 46 | 3484 |
| CII1318 | CDR | PRT | US20190085084; SEQ ID NO: 46 | 3485 |
| CII1319 | CDR | PRT | WO2016164637; SEQ ID NO: 46 | 3486 |
| CII1320 | CDR | PRT | US20190085084; SEQ ID NO: 64 | 3487 |
| CII1321 | CDR | PRT | US20190085084; SEQ ID NO: 64 | 3488 |
| CII1322 | CDR | PRT | WO2016164637; SEQ ID NO: 64 | 3489 |
| CII1323 | CDR | PRT | US20190085084; SEQ ID NO: 50 | 3490 |
| CII1324 | CDR | PRT | US20190085084; SEQ ID NO: 50 | 3491 |
| CII1325 | CDR | PRT | WO2016164637; SEQ ID NO: 50 | 3492 |
| CII1326 | CDR | PRT | US20190085084; SEQ ID NO: 118 | 3493 |
| CII1327 | CDR | PRT | US20190085084; SEQ ID NO: 118 | 3494 |
| CII1328 | CDR | PRT | WO2016164637; SEQ ID NO: 118 | 3495 |
| CII1329 | CDR | PRT | US20190085084; SEQ ID NO: 60 | 3496 |
| CII1330 | CDR | PRT | US20190085084; SEQ ID NO: 60 | 3497 |
| CII1331 | CDR | PRT | WO2016164637; SEQ ID NO: 60 | 3498 |
| CII1332 | CDR | PRT | US20190085084; SEQ ID NO: 65 | 3499 |
| CII1333 | CDR | PRT | US20190085084; SEQ ID NO: 65 | 3500 |
| CII1334 | CDR | PRT | WO2016164637; SEQ ID NO: 65 | 3501 |
| CII1335 | CDR | PRT | US20190085084; SEQ ID NO: 74 | 3502 |
| CII1336 | CDR | PRT | US20190085084; SEQ ID NO: 74 | 3503 |
| CII1337 | CDR | PRT | WO2016164637; SEQ ID NO: 74 | 3504 |
| CII1338 | CDR | PRT | US20190085084; SEQ ID NO: 43 | 3505 |
| CII1339 | CDR | PRT | US20190085084; SEQ ID NO: 43 | 3506 |
| CII1340 | CDR | PRT | WO2016164637; SEQ ID NO: 43 | 3507 |
| CII1341 | CDR | PRT | US20190085084; SEQ ID NO: 123 | 3508 |
| CII1342 | CDR | PRT | US20190085084; SEQ ID NO: 123 | 3509 |
| CII1343 | CDR | PRT | WO2016164637; SEQ ID NO: 123 | 3510 |
| CII1344 | CDR | PRT | US20190085084; SEQ ID NO: 115 | 3511 |
| CII1345 | CDR | PRT | US20190085084; SEQ ID NO: 115 | 3512 |
| CII1346 | CDR | PRT | WO2016164637; SEQ ID NO: 115 | 3513 |
| CII1347 | CDR | PRT | US20190085084; SEQ ID NO: 49 | 3514 |
| CII1348 | CDR | PRT | US20190085084; SEQ ID NO: 49 | 3515 |
| CII1349 | CDR | PRT | WO2016164637; SEQ ID NO: 49 | 3516 |
| CII1350 | CDR | PRT | US20190085084; SEQ ID NO: 52 | 3517 |
| CII1351 | CDR | PRT | US20190085084; SEQ ID NO: 52 | 3518 |
| CII1352 | CDR | PRT | WO2016164637; SEQ ID NO: 52 | 3519 |
| CII1353 | CDR | PRT | US20190085084; SEQ ID NO: 88 | 3520 |
| CII1354 | CDR | PRT | US20190085084; SEQ ID NO: 88 | 3521 |
| CII1355 | CDR | PRT | WO2016164637; SEQ ID NO: 88 | 3522 |
| CII1356 | CDR | PRT | US20190085084; SEQ ID NO: 22 | 3523 |
| CII1357 | CDR | PRT | US20190085084; SEQ ID NO: 22 | 3524 |
| CII1358 | CDR | PRT | WO2016164637; SEQ ID NO: 22 | 3525 |
| CII1359 | CDR | PRT | US20190085084; SEQ ID NO: 16 | 3526 |
| CII1360 | CDR | PRT | US20190085084; SEQ ID NO: 16 | 3527 |
| CII1361 | CDR | PRT | WO2016164637; SEQ ID NO: 16 | 3528 |
| CII1362 | CDR | PRT | US20190085084; SEQ ID NO: 21 | 3529 |
| CII1363 | CDR | PRT | WO2016164637; SEQ ID NO: 21 | 3530 |
| CII1364 | CDR | PRT | US20190085084; SEQ ID NO: 12 | 3531 |
| CII1365 | CDR | PRT | US20190085084; SEQ ID NO: 12 | 3532 |
| CII1366 | CDR | PRT | WO2016164637; SEQ ID NO: 12 | 3533 |
| CII1367 | CDR | PRT | US20190085084; SEQ ID NO: 15 | 3534 |
| CII1368 | CDR | PRT | US20190085084; SEQ ID NO: 15 | 3535 |
| CII1369 | CDR | PRT | WO2016164637; SEQ ID NO: 15 | 3536 |
| CII1370 | CDR | PRT | US20190085084; SEQ ID NO: 24 | 3537 |
| CII1371 | CDR | PRT | US20190085084; SEQ ID NO: 24 | 3538 |
| CII1372 | CDR | PRT | WO2016164637; SEQ ID NO: 24 | 3539 |
| CII1373 | CDR | PRT | US20190085084; SEQ ID NO: 8 | 3540 |
| CII1374 | CDR | PRT | US20190085084; SEQ ID NO: 8 | 3541 |
| CII1375 | CDR | PRT | WO2016164637; SEQ ID NO: 8 | 3542 |
| CII1376 | CDR | PRT | US20190085084; SEQ ID NO: 7 | 3543 |
| CII1377 | CDR | PRT | US20190085084; SEQ ID NO: 7 | 3544 |
| CII1378 | CDR | PRT | WO2016164637; SEQ ID NO: 7 | 3545 |
| CII1379 | CDR | PRT | US20190085084; SEQ ID NO: 512 | 3546 |
| CII1380 | CDR | PRT | US20190085084; SEQ ID NO: 512 | 3547 |
| CII1381 | CDR | PRT | WO2016164637; SEQ ID NO: 512 | 3548 |
| CII1382 | CDR | PRT | US20190085084; SEQ ID NO: 6 | 3549 |
| CII1383 | CDR | PRT | US20190085084; SEQ ID NO: 6 | 3550 |
| CII1384 | CDR | PRT | WO2016164637; SEQ ID NO: 6 | 3551 |
| CII1385 | CDR | PRT | US20190085084; SEQ ID NO: 9 | 3552 |
| CII1386 | CDR | PRT | US20190085084; SEQ ID NO: 9 | 3553 |
| CII1387 | CDR | PRT | WO2016164637; SEQ ID NO: 9 | 3554 |
| CII1388 | CDR | PRT | US20190085084; SEQ ID NO: 11 | 3555 |
| CII1389 | CDR | PRT | US20190085084; SEQ ID NO: 11 | 3556 |
| CII1390 | CDR | PRT | WO2016164637; SEQ ID NO: 11 | 3557 |
| CII1391 | CDR | PRT | US20190085084; SEQ ID NO: 20 | 3558 |
| CII1392 | CDR | PRT | US20190085084; SEQ ID NO: 20 | 3559 |
| CII1393 | CDR | PRT | WO2016164637; SEQ ID NO: 20 | 3560 |
| CII1394 | CDR | PRT | US20190085084; SEQ ID NO: 14 | 3561 |
| CII1395 | CDR | PRT | US20190085084; SEQ ID NO: 14 | 3562 |
| CII1396 | CDR | PRT | WO2016164637; SEQ ID NO: 14 | 3563 |
| CII1397 | CDR | PRT | US20190085084; SEQ ID NO: 13 | 3564 |
| CII1398 | CDR | PRT | US20190085084; SEQ ID NO: 13 | 3565 |
| CII1399 | CDR | PRT | WO2016164637; SEQ ID NO: 13 | 3566 |
| CII1400 | CDR | PRT | US20190085084; SEQ ID NO: 508 | 3567 |
| CII1401 | CDR | PRT | US20190085084; SEQ ID NO: 508 | 3568 |
| CII1402 | CDR | PRT | WO2016164637; SEQ ID NO: 508 | 3569 |
| CII1403 | CDR | PRT | US20190085084; SEQ ID NO: 585 | 3570 |
| CII1404 | CDR | PRT | US20190085084; SEQ ID NO: 585 | 3571 |
| CII1405 | CDR | PRT | WO2016164637; SEQ ID NO: 585 | 3572 |
| CII1406 | CDR | PRT | US20190085084; SEQ ID NO: 10 | 3573 |
| CII1407 | CDR | PRT | US20190085084; SEQ ID NO: 10 | 3574 |
| CII1408 | CDR | PRT | WO2016164637; SEQ ID NO: 10 | 3575 |
| CII1409 | CDR | PRT | US20190085084; SEQ ID NO: 584 | 3576 |
| CII1410 | CDR | PRT | US20190085084; SEQ ID NO: 584 | 3577 |
| CII1411 | CDR | PRT | WO2016164637; SEQ ID NO: 584 | 3578 |
| CII1412 | CDR | PRT | US20190085084; SEQ ID NO: 580 | 3579 |
| CII1413 | CDR | PRT | US20190085084; SEQ ID NO: 580 | 3580 |
| CII1414 | CDR | PRT | WO2016164637; SEQ ID NO: 580 | 3581 |
| CII1415 | CDR | PRT | US20190085084; SEQ ID NO: 35 | 3582 |
| CII1416 | CDR | PRT | US20190085084; SEQ ID NO: 35 | 3583 |
| CII1417 | CDR | PRT | WO2016164637; SEQ ID NO: 35 | 3584 |
| CII1418 | CDR | PRT | US20190085084; SEQ ID NO: 37 | 3585 |
| CII1419 | CDR | PRT | US20190085084; SEQ ID NO: 37 | 3586 |
| CII1420 | CDR | PRT | WO2016164637; SEQ ID NO: 37 | 3587 |
| CII1421 | CDR | PRT | US20190085084; SEQ ID NO: 157 | 3588 |
| CII1422 | CDR | PRT | US20190085084; SEQ ID NO: 157 | 3589 |
| CII1423 | CDR | PRT | WO2016164637; SEQ ID NO: 157 | 3590 |
| CII1424 | CDR | PRT | US20190085084; SEQ ID NO: 151 | 3591 |
| CII1425 | CDR | PRT | US20190085084; SEQ ID NO: 151 | 3592 |
| CII1426 | CDR | PRT | WO2016164637; SEQ ID NO: 151 | 3593 |
| CII1427 | CDR | PRT | US20190085084; SEQ ID NO: 152 | 3594 |
| CII1428 | CDR | PRT | US20190085084; SEQ ID NO: 152 | 3595 |
| CII1429 | CDR | PRT | WO2016164637; SEQ ID NO: 152 | 3596 |
| CII1430 | CDR | PRT | US20190085084; SEQ ID NO: 165 | 3597 |
| CII1431 | CDR | PRT | US20190085084; SEQ ID NO: 165 | 3598 |
| CII1432 | CDR | PRT | WO2016164637; SEQ ID NO: 165 | 3599 |
| CII1433 | CDR | PRT | US20190085084; SEQ ID NO: 162 | 3600 |
| CII1434 | CDR | PRT | US20190085084; SEQ ID NO: 162 | 3601 |
| CII1435 | CDR | PRT | WO2016164637; SEQ ID NO: 162 | 3602 |
| CII1436 | CDR | PRT | US20190085084; SEQ ID NO: 161 | 3603 |
| CII1437 | CDR | PRT | US20190085084; SEQ ID NO: 161 | 3604 |
| CII1438 | CDR | PRT | WO2016164637; SEQ ID NO: 161 | 3605 |
| CII1439 | CDR | PRT | US20190085084; SEQ ID NO: 177 | 3606 |
| CII1440 | CDR | PRT | US20190085084; SEQ ID NO: 177 | 3607 |
| CII1441 | CDR | PRT | WO2016164637; SEQ ID NO: 177 | 3608 |
| CII1442 | CDR | PRT | US20190085084; SEQ ID NO: 171 | 3609 |
| CII1443 | CDR | PRT | US20190085084; SEQ ID NO: 171 | 3610 |
| CII1444 | CDR | PRT | WO2016164637; SEQ ID NO: 171 | 3611 |
| CII1445 | CDR | PRT | US20190085084; SEQ ID NO: 169 | 3612 |
| CII1446 | CDR | PRT | US20190085084; SEQ ID NO: 169 | 3613 |
| CII1447 | CDR | PRT | WO2016164637; SEQ ID NO: 169 | 3614 |
| CII1448 | CDR | PRT | US20190085084; SEQ ID NO: 600 | 3615 |
| CII1449 | CDR | PRT | US20190085084; SEQ ID NO: 600 | 3616 |
| CII1450 | CDR | PRT | WO2016164637; SEQ ID NO: 600 | 3617 |
| CII1451 | CDR | PRT | US20190085084; SEQ ID NO: 603 | 3618 |
| CII1452 | CDR | PRT | US20190085084; SEQ ID NO: 603 | 3619 |
| CII1453 | CDR | PRT | WO2016164637; SEQ ID NO: 603 | 3620 |
| CII1454 | CDR | PRT | US20190085084; SEQ ID NO: 599 | 3621 |
| CII1455 | CDR | PRT | US20190085084; SEQ ID NO: 599 | 3622 |
| CII1456 | CDR | PRT | WO2016164637; SEQ ID NO: 599 | 3623 |
| CII1457 | CDR | PRT | US20190085084; SEQ ID NO: 601 | 3624 |
| CII1458 | CDR | PRT | US20190085084; SEQ ID NO: 601 | 3625 |
| CII1459 | CDR | PRT | WO2016164637; SEQ ID NO: 601 | 3626 |
| CII1460 | CDR | PRT | US20190085084; SEQ ID NO: 173 | 3627 |
| CII1461 | CDR | PRT | US20190085084; SEQ ID NO: 173 | 3628 |
| CII1462 | CDR | PRT | WO2016164637; SEQ ID NO: 173 | 3629 |
| CII1463 | CDR | PRT | US20190085084; SEQ ID NO: 170 | 3630 |
| CII1464 | CDR | PRT | US20190085084; SEQ ID NO: 170 | 3631 |
| CII1465 | CDR | PRT | WO2016164637; SEQ ID NO: 170 | 3632 |
| CII1466 | CDR | PRT | US20190085084; SEQ ID NO: 551 | 3633 |
| CII1467 | CDR | PRT | US20190085084; SEQ ID NO: 551 | 3634 |
| CII1468 | CDR | PRT | WO2016164637; SEQ ID NO: 551 | 3635 |
| CII1469 | CDR | PRT | US20190085084; SEQ ID NO: 528 | 3636 |
| CII1470 | CDR | PRT | WO2016164637; SEQ ID NO: 528 | 3637 |
| CII1471 | CDR | PRT | US20190085084; SEQ ID NO: 532 | 3638 |
| CII1472 | CDR | PRT | US20190085084; SEQ ID NO: 532 | 3639 |
| CII1473 | CDR | PRT | WO2016164637; SEQ ID NO: 532 | 3640 |
| CII1474 | CDR | PRT | US20190085084; SEQ ID NO: 166 | 3641 |
| CII1475 | CDR | PRT | WO2016164637; SEQ ID NO: 166 | 3642 |
| CII1476 | CDR | PRT | US20190085084; SEQ ID NO: 550 | 3643 |
| CII1477 | CDR | PRT | WO2016164637; SEQ ID NO: 550 | 3644 |
| CII1478 | CDR | PRT | US20190085084; SEQ ID NO: 36 | 3645 |
| CII1479 | CDR | PRT | US20190085084; SEQ ID NO: 36 | 3646 |
| CII1480 | CDR | PRT | WO2016164637; SEQ ID NO: 36 | 3647 |
| CII1481 | CDR | PRT | US20190085084; SEQ ID NO: 506 | 3648 |
| CII1482 | CDR | PRT | US20190085084; SEQ ID NO: 506 | 3649 |
| CII1483 | CDR | PRT | WO2016164637; SEQ ID NO: 506 | 3650 |
| CII1484 | CDR | PRT | US20190085084; SEQ ID NO: 494 | 3651 |
| CII1485 | CDR | PRT | US20190085084; SEQ ID NO: 494 | 3652 |
| CII1486 | CDR | PRT | WO2016164637; SEQ ID NO: 494 | 3653 |
| CII1487 | CDR | PRT | US20190085084; SEQ ID NO: 493 | 3654 |
| CII1488 | CDR | PRT | US20190085084; SEQ ID NO: 493 | 3655 |
| CII1489 | CDR | PRT | WO2016164637; SEQ ID NO: 493 | 3656 |
| CII1490 | CDR | PRT | US20190085084; SEQ ID NO: 150 | 3657 |
| CII1491 | CDR | PRT | US20190085084; SEQ ID NO: 150 | 3658 |
| CII1492 | CDR | PRT | WO2016164637; SEQ ID NO: 150 | 3659 |
| CII1493 | CDR | PRT | US20190085084; SEQ ID NO: 499 | 3660 |
| CII1494 | CDR | PRT | US20190085084; SEQ ID NO: 499 | 3661 |
| CII1495 | CDR | PRT | WO2016164637; SEQ ID NO: 499 | 3662 |
| CII1496 | CDR | PRT | US20190085084; SEQ ID NO: 500 | 3663 |
| CII1497 | CDR | PRT | US20190085084; SEQ ID NO: 500 | 3664 |
| CII1498 | CDR | PRT | WO2016164637; SEQ ID NO: 500 | 3665 |
| CII1499 | CDR | PRT | US20190085084; SEQ ID NO: 501 | 3666 |
| CII1500 | CDR | PRT | US20190085084; SEQ ID NO: 501 | 3667 |
| CII1501 | CDR | PRT | WO2016164637; SEQ ID NO: 501 | 3668 |
| CII1502 | CDR | PRT | US20190085084; SEQ ID NO: 507 | 3669 |
| CII1503 | CDR | PRT | US20190085084; SEQ ID NO: 507 | 3670 |
| CII1504 | CDR | PRT | WO2016164637; SEQ ID NO: 507 | 3671 |
| CII1505 | CDR | PRT | US20190085084; SEQ ID NO: 503 | 3672 |
| CII1506 | CDR | PRT | US20190085084; SEQ ID NO: 503 | 3673 |
| CII1507 | CDR | PRT | WO2016164637; SEQ ID NO: 503 | 3674 |
| CII1508 | CDR | PRT | US20190085084; SEQ ID NO: 497 | 3675 |
| CII1509 | CDR | PRT | US20190085084; SEQ ID NO: 497 | 3676 |
| CII1510 | CDR | PRT | WO2016164637; SEQ ID NO: 497 | 3677 |
| CII1511 | CDR | PRT | US20190085084; SEQ ID NO: 153 | 3678 |
| CII1512 | CDR | PRT | US20190085084; SEQ ID NO: 153 | 3679 |
| CII1513 | CDR | PRT | WO2016164637; SEQ ID NO: 153 | 3680 |
| CII1514 | CDR | PRT | US20190085084; SEQ ID NO: 505 | 3681 |
| CII1515 | CDR | PRT | US20190085084; SEQ ID NO: 505 | 3682 |
| CII1516 | CDR | PRT | WO2016164637; SEQ ID NO: 505 | 3683 |
| CII1517 | CDR | PRT | US20190085084; SEQ ID NO: 504 | 3684 |
| CII1518 | CDR | PRT | US20190085084; SEQ ID NO: 504 | 3685 |
| CII1519 | CDR | PRT | WO2016164637; SEQ ID NO: 504 | 3686 |
| CII1520 | CDR | PRT | US20190085084; SEQ ID NO: 498 | 3687 |
| CII1521 | CDR | PRT | US20190085084; SEQ ID NO: 498 | 3688 |
| CII1522 | CDR | PRT | WO2016164637; SEQ ID NO: 498 | 3689 |
| CII1523 | CDR | PRT | US20190085084; SEQ ID NO: 495 | 3690 |
| CII1524 | CDR | PRT | US20190085084; SEQ ID NO: 495 | 3691 |
| CII1525 | CDR | PRT | WO2016164637; SEQ ID NO: 495 | 3692 |
| CII1526 | CDR | PRT | US20190085084; SEQ ID NO: 510 | 3693 |
| CII1527 | CDR | PRT | US20190085084; SEQ ID NO: 510 | 3694 |
| CII1528 | CDR | PRT | WO2016164637; SEQ ID NO: 510 | 3695 |
| CII1529 | CDR | PRT | US20190085084; SEQ ID NO: 583 | 3696 |
| CII1530 | CDR | PRT | WO2016164637; SEQ ID NO: 583 | 3697 |
| CII1531 | CDR | PRT | US20190085084; SEQ ID NO: 590 | 3698 |
| CII1532 | CDR | PRT | US20190085084; SEQ ID NO: 590 | 3699 |
| CII1533 | CDR | PRT | WO2016164637; SEQ ID NO: 590 | 3700 |
| CII1534 | CDR | PRT | US20190085084; SEQ ID NO: 511 | 3701 |
| CII1535 | CDR | PRT | US20190085084; SEQ ID NO: 511 | 3702 |
| CII1536 | CDR | PRT | WO2016164637; SEQ ID NO: 511 | 3703 |
| CII1537 | CDR | PRT | US20190085084; SEQ ID NO: 589 | 3704 |
| CII1538 | CDR | PRT | US20190085084; SEQ ID NO: 589 | 3705 |
| CII1539 | CDR | PRT | WO2016164637; SEQ ID NO: 589 | 3706 |
| CII1540 | CDR | PRT | US20190085084; SEQ ID NO: 565 | 3707 |
| CII1541 | CDR | PRT | US20190085084; SEQ ID NO: 565 | 3708 |
| CII1542 | CDR | PRT | WO2016164637; SEQ ID NO: 565 | 3709 |
| CII1543 | CDR | PRT | US20190085084; SEQ ID NO: 481 | 3710 |
| CII1544 | CDR | PRT | US20190085084; SEQ ID NO: 481 | 3711 |
| CII1545 | CDR | PRT | WO2016164637; SEQ ID NO: 481 | 3712 |
| CII1546 | CDR | PRT | US20190085084; SEQ ID NO: 172 | 3713 |
| CII1547 | CDR | PRT | US20190085084; SEQ ID NO: 172 | 3714 |
| CII1548 | CDR | PRT | WO2016164637; SEQ ID NO: 172 | 3715 |
| CII1549 | CDR | PRT | US20190085084; SEQ ID NO: 175 | 3716 |
| CII1550 | CDR | PRT | US20190085084; SEQ ID NO: 175 | 3717 |
| CII1551 | CDR | PRT | WO2016164637; SEQ ID NO: 175 | 3718 |
| CII1552 | CDR | PRT | US20190085084; SEQ ID NO: 149 | 3719 |
| CII1553 | CDR | PRT | US20190085084; SEQ ID NO: 149 | 3720 |
| CII1554 | CDR | PRT | WO2016164637; SEQ ID NO: 149 | 3721 |
| CII1555 | CDR | PRT | US20190085084; SEQ ID NO: 594 | 3722 |
| CII1556 | CDR | PRT | US20190085084; SEQ ID NO: 594 | 3723 |
| CII1557 | CDR | PRT | WO2016164637; SEQ ID NO: 594 | 3724 |
| CII1558 | CDR | PRT | US20190085084; SEQ ID NO: 142 | 3725 |
| CII1559 | CDR | PRT | US20190085084; SEQ ID NO: 142 | 3726 |
| CII1560 | CDR | PRT | WO2016164637; SEQ ID NO: 142 | 3727 |
| CII1561 | CDR | PRT | US20190085084; SEQ ID NO: 587 | 3728 |
| CII1562 | CDR | PRT | WO2016164637; SEQ ID NO: 587 | 3729 |
| CII1563 | CDR | PRT | US20190085084; SEQ ID NO: 582 | 3730 |
| CII1564 | CDR | PRT | WO2016164637; SEQ ID NO: 582 | 3731 |
| CII1565 | CDR | PRT | US20190085084; SEQ ID NO: 517 | 3732 |
| CII1566 | CDR | PRT | US20190085084; SEQ ID NO: 517 | 3733 |
| CII1567 | CDR | PRT | WO2016164637; SEQ ID NO: 517 | 3734 |
| CII1568 | CDR | PRT | US20190085084; SEQ ID NO: 489 | 3735 |
| CII1569 | CDR | PRT | US20190085084; SEQ ID NO: 489 | 3736 |
| CII1570 | CDR | PRT | WO2016164637; SEQ ID NO: 489 | 3737 |
| CII1571 | CDR | PRT | US20190085084; SEQ ID NO: 487 | 3738 |
| CII1572 | CDR | PRT | WO2016164637; SEQ ID NO: 487 | 3739 |
| CII1573 | CDR | PRT | US20190085084; SEQ ID NO: 482 | 3740 |
| CII1574 | CDR | PRT | US20190085084; SEQ ID NO: 482 | 3741 |
| CII1575 | CDR | PRT | WO2016164637; SEQ ID NO: 482 | 3742 |
| CII1576 | CDR | PRT | US20190085084; SEQ ID NO: 491 | 3743 |
| CII1577 | CDR | PRT | US20190085084; SEQ ID NO: 491 | 3744 |
| CII1578 | CDR | PRT | WO2016164637; SEQ ID NO: 491 | 3745 |
| CII1579 | CDR | PRT | US20190085084; SEQ ID NO: 486 | 3746 |
| CII1580 | CDR | PRT | US20190085084; SEQ ID NO: 486 | 3747 |
| CII1581 | CDR | PRT | WO2016164637; SEQ ID NO: 486 | 3748 |
| CII1582 | CDR | PRT | US20190085084; SEQ ID NO: 485 | 3749 |
| CII1583 | CDR | PRT | US20190085084; SEQ ID NO: 485 | 3750 |
| CII1584 | CDR | PRT | WO2016164637; SEQ ID NO: 485 | 3751 |
| CII1585 | CDR | PRT | US20190085084; SEQ ID NO: 492 | 3752 |
| CII1586 | CDR | PRT | US20190085084; SEQ ID NO: 492 | 3753 |
| CII1587 | CDR | PRT | WO2016164637; SEQ ID NO: 492 | 3754 |
| CII1588 | CDR | PRT | US20190085084; SEQ ID NO: 488 | 3755 |
| CII1589 | CDR | PRT | US20190085084; SEQ ID NO: 488 | 3756 |
| CII1590 | CDR | PRT | WO2016164637; SEQ ID NO: 488 | 3757 |
| CII1591 | CDR | PRT | US20190085084; SEQ ID NO: 490 | 3758 |
| CII1592 | CDR | PRT | US20190085084; SEQ ID NO: 490 | 3759 |
| CII1593 | CDR | PRT | WO2016164637; SEQ ID NO: 490 | 3760 |
| CII1594 | CDR | PRT | US20190085084; SEQ ID NO: 569 | 3761 |
| CII1595 | CDR | PRT | US20190085084; SEQ ID NO: 569 | 3762 |
| CII1596 | CDR | PRT | WO2016164637; SEQ ID NO: 569 | 3763 |
| CII1597 | CDR | PRT | US20190085084; SEQ ID NO: 126 | 3764 |
| CII1598 | CDR | PRT | US20190085084; SEQ ID NO: 126 | 3765 |
| CII1599 | CDR | PRT | WO2016164637; SEQ ID NO: 126 | 3766 |
| CII1600 | CDR | PRT | US20190085084; SEQ ID NO: 520 | 3767 |
| CII1601 | CDR | PRT | US20190085084; SEQ ID NO: 520 | 3768 |
| CII1602 | CDR | PRT | WO2016164637; SEQ ID NO: 520 | 3769 |
| CII1603 | CDR | PRT | US20190085084; SEQ ID NO: 522 | 3770 |
| CII1604 | CDR | PRT | US20190085084; SEQ ID NO: 522 | 3771 |
| CII1605 | CDR | PRT | WO2016164637; SEQ ID NO: 522 | 3772 |
| CII1606 | CDR | PRT | US20190085084; SEQ ID NO: 524 | 3773 |
| CII1607 | CDR | PRT | US20190085084; SEQ ID NO: 524 | 3774 |
| CII1608 | CDR | PRT | WO2016164637; SEQ ID NO: 524 | 3775 |
| CII1609 | CDR | PRT | US20190085084; SEQ ID NO: 519 | 3776 |
| CII1610 | CDR | PRT | US20190085084; SEQ ID NO: 519 | 3777 |
| CII1611 | CDR | PRT | WO2016164637; SEQ ID NO: 519 | 3778 |
| CII1612 | CDR | PRT | US20190085084; SEQ ID NO: 521 | 3779 |
| CII1613 | CDR | PRT | US20190085084; SEQ ID NO: 521 | 3780 |
| CII1614 | CDR | PRT | WO2016164637; SEQ ID NO: 521 | 3781 |
| CII1615 | CDR | PRT | US20190085084; SEQ ID NO: 523 | 3782 |
| CII1616 | CDR | PRT | US20190085084; SEQ ID NO: 523 | 3783 |
| CII1617 | CDR | PRT | WO2016164637; SEQ ID NO: 523 | 3784 |
| CII1618 | CDR | PRT | US20190085084; SEQ ID NO: 516 | 3785 |
| CII1619 | CDR | PRT | US20190085084; SEQ ID NO: 516 | 3786 |
| CII1620 | CDR | PRT | WO2016164637; SEQ ID NO: 516 | 3787 |
| CII1621 | CDR | PRT | US20190085084; SEQ ID NO: 513 | 3788 |
| CII1622 | CDR | PRT | US20190085084; SEQ ID NO: 513 | 3789 |
| CII1623 | CDR | PRT | WO2016164637; SEQ ID NO: 513 | 3790 |
| CII1624 | CDR | PRT | US20190085084; SEQ ID NO: 127 | 3791 |
| CII1625 | CDR | PRT | US20190085084; SEQ ID NO: 127 | 3792 |
| CII1626 | CDR | PRT | WO2016164637; SEQ ID NO: 127 | 3793 |
| CII1627 | CDR | PRT | US20190085084; SEQ ID NO: 515 | 3794 |
| CII1628 | CDR | PRT | US20190085084; SEQ ID NO: 515 | 3795 |
| CII1629 | CDR | PRT | WO2016164637; SEQ ID NO: 515 | 3796 |
| CII1630 | CDR | PRT | US20190085084; SEQ ID NO: 484 | 3797 |
| CII1631 | CDR | PRT | WO2016164637; SEQ ID NO: 484 | 3798 |
| CII1632 | CDR | PRT | US20190085084; SEQ ID NO: 514 | 3799 |
| CII1633 | CDR | PRT | WO2016164637; SEQ ID NO: 514 | 3800 |
| CII1634 | CDR | PRT | US20190085084; SEQ ID NO: 129 | 3801 |
| CII1635 | CDR | PRT | US20190085084; SEQ ID NO: 129 | 3802 |
| CII1636 | CDR | PRT | WO2016164637; SEQ ID NO: 129 | 3803 |
| CII1637 | CDR | PRT | US20190085084; SEQ ID NO: 483 | 3804 |
| CII1638 | CDR | PRT | US20190085084; SEQ ID NO: 483 | 3805 |
| CII1639 | CDR | PRT | WO2016164637; SEQ ID NO: 483 | 3806 |
| CII1640 | CDR | PRT | US20190085084; SEQ ID NO: 480 | 3807 |
| CII1641 | CDR | PRT | US20190085084; SEQ ID NO: 480 | 3808 |
| CII1642 | CDR | PRT | WO2016164637; SEQ ID NO: 480 | 3809 |
| CII1643 | CDR | PRT | US20190085084; SEQ ID NO: 518 | 3810 |
| CII1644 | CDR | PRT | US20190085084; SEQ ID NO: 518 | 3811 |
| CII1645 | CDR | PRT | WO2016164637; SEQ ID NO: 518 | 3812 |
| CII1646 | CDR | PRT | US20190085084; SEQ ID NO: 509 | 3813 |
| CII1647 | CDR | PRT | WO2016164637; SEQ ID NO: 509 | 3814 |
| CII1648 | CDR | PRT | WO2014028776; SEQ ID NO: 77 | 3815 |
| CII1649 | CDR | PRT | WO2014028776; SEQ ID NO: 80 | 3816 |
| CII1650 | CDR | PRT | WO2014028776; SEQ ID NO: 79 | 3817 |
| CII1651 | CDR | PRT | WO2014028776; SEQ ID NO: 78 | 3818 |
| CII1652 | CDR | PRT | WO2014028776; SEQ ID NO: 76 | 3819 |
| CII1653 | CDR | PRT | WO2014028776; SEQ ID NO: 81 | 3820 |
| CII1654 | CDR | PRT | WO2010129469; SEQ ID NO: 5 | 3821 |
| CII1655 | CDR | PRT | WO2010129469; SEQ ID NO: 6 | 3822 |
| CII1656 | CDR | PRT | WO2010129469; SEQ ID NO: 33 | 3823 |
| CII1657 | CDR | PRT | WO2010129469; SEQ ID NO: 34 | 3824 |
| CII1658 | CDR | PRT | WO2010129469; SEQ ID NO: 31 | 3825 |
| CII1659 | CDR | PRT | WO2010129469; SEQ ID NO: 30 | 3826 |
| CII1660 | CDR | PRT | WO2010129469; SEQ ID NO: 28 | 3827 |
| CII1661 | CDR | PRT | WO2010129469; SEQ ID NO: 27 | 3828 |
| CII1662 | CDR | PRT | WO2010129469; SEQ ID NO: 29 | 3829 |
| CII1663 | CDR | PRT | WO2010129469; SEQ ID NO: 32 | 3830 |
| CII1664 | CDR | PRT | WO2018140121; WO2018147919; SEQ | 3831 |
| | | | ID NO: 5 | |
| CII1665 | CDR | PRT | WO2018140121; WO2018147917; SEQ | 3832 |
| | | | ID NO: 3 | |
| CII1666 | CDR | PRT | WO2010129469; SEQ ID NO: 8 | 3833 |
| CII1667 | CDR | PRT | WO2010129469; SEQ ID NO: 24 | 3834 |
| CII1668 | CDR | PRT | WO2010129469; SEQ ID NO: 12 | 3835 |
| CII1669 | CDR | PRT | WO2010129469; SEQ ID NO: 20 | 3836 |
| CII1670 | CDR | PRT | WO2010129469; SEQ ID NO: 16 | 3837 |
| CII1671 | CDR | PRT | WO2010129469; SEQ ID NO: 25 | 3838 |
| CII1672 | CDR | PRT | WO2010129469; SEQ ID NO: 21 | 3839 |
| CII1673 | CDR | PRT | WO2010129469; SEQ ID NO: 11 | 3840 |
| CII1674 | CDR | PRT | WO2010129469; SEQ ID NO: 18 | 3841 |
| CII1675 | CDR | PRT | WO2010129469; SEQ ID NO: 15 | 3842 |
| CII1676 | CDR | PRT | WO2010129469; SEQ ID NO: 17 | 3843 |
| CII1677 | CDR | PRT | WO2010129469; SEQ ID NO: 23 | 3844 |
| CII1678 | CDR | PRT | WO2010129469; SEQ ID NO: 13 | 3845 |
| CII1679 | CDR | PRT | WO2010129469; SEQ ID NO: 14 | 3846 |
| CII1680 | CDR | PRT | WO2010129469; SEQ ID NO: 19 | 3847 |
| CII1681 | CDR | PRT | WO2018140121; WO2018147920; SEQ | 3848 |
| | | | ID NO: 6 | |
| CII1682 | CDR | PRT | WO2010129469; SEQ ID NO: 22 | 3849 |
| CII1683 | CDR | PRT | WO2010129469; SEQ ID NO: 26 | 3850 |
| CII1684 | CDR | PRT | WO2010129469; SEQ ID NO: 3 | 3851 |
| CII1685 | CDR | PRT | WO2010129469; SEQ ID NO: 7 | 3852 |
| CII1686 | CDR | PRT | WO2018140121; WO2018147918; SEQ | 3853 |
| | | | ID NO: 4 | |
| CII1687 | CDR | PRT | WO2018140121; WO2018147915; SEQ | 3854 |
| | | | ID NO: 1 | |
| CII1688 | CDR | PRT | WO2010129469; SEQ ID NO: 35 | 3855 |
| CII1689 | CDR | PRT | WO2010129469; SEQ ID NO: 4 | 3856 |
| CII1690 | CDR | PRT | WO2018140121; WO2018147916; SEQ | 3857 |
| | | | ID NO: 2 | |
| CII1691 | CDR | PRT | WO2017062672; SEQ ID NO: 741 | 3858 |
| CII1692 | CDR | PRT | WO2016023019; SEQ ID NO: 145 | 3859 |
| CII1693 | CDR | PRT | WO2017062672; SEQ ID NO: 31 | 3860 |
| CII1694 | CDR | PRT | WO2016023019; SEQ ID NO: 26 | 3861 |
| CII1695 | CDR | PRT | WO2016023019; SEQ ID NO: 118 | 3862 |
| CII1696 | CDR | PRT | WO2016023019; SEQ ID NO: 117 | 3863 |
| CII1697 | CDR | PRT | WO2016023019; SEQ ID NO: 70 | 3864 |
| CII1698 | CDR | PRT | WO2016023019; SEQ ID NO: 69 | 3865 |
| CII1699 | CDR | PRT | WO2016023019; SEQ ID NO: 50 | 3866 |
| CII1700 | CDR | PRT | WO2016023019; SEQ ID NO: 83 | 3867 |
| CII1701 | CDR | PRT | WO2016023019; SEQ ID NO: 71 | 3868 |
| CII1702 | CDR | PRT | WO2016023019; SEQ ID NO: 67 | 3869 |
| CII1703 | CDR | PRT | WO2016023019; SEQ ID NO: 103 | 3870 |
| CII1704 | CDR | PRT | WO2016023019; SEQ ID NO: 68 | 3871 |
| CII1705 | CDR | PRT | WO2016023019; SEQ ID NO: 86 | 3872 |
| CII1706 | CDR | PRT | WO2016023019; SEQ ID NO: 51 | 3873 |
| CII1707 | CDR | PRT | WO2016023019; SEQ ID NO: 85 | 3874 |
| CII1708 | CDR | PRT | WO2016023019; SEQ ID NO: 77 | 3875 |
| CII1709 | CDR | PRT | WO2016023019; SEQ ID NO: 102 | 3876 |
| CII1710 | CDR | PRT | WO2016023019; SEQ ID NO: 98 | 3877 |
| CII1711 | CDR | PRT | WO2016023019; SEQ ID NO: 406 | 3878 |
| CII1712 | CDR | PRT | WO2016023019; SEQ ID NO: 60 | 3879 |
| CII1713 | CDR | PRT | WO2016023019; SEQ ID NO: 107 | 3880 |
| CII1714 | CDR | PRT | WO2016023019; SEQ ID NO: 104 | 3881 |
| CII1715 | CDR | PRT | WO2016023019; SEQ ID NO: 84 | 3882 |
| CII1716 | CDR | PRT | WO2016023019; SEQ ID NO: 54 | 3883 |
| CII1717 | CDR | PRT | WO2016023019; SEQ ID NO: 96 | 3884 |
| CII1718 | CDR | PRT | WO2016023019; SEQ ID NO: 92 | 3885 |
| CII1719 | CDR | PRT | WO2016023019; SEQ ID NO: 65 | 3886 |
| CII1720 | CDR | PRT | WO2016023019; SEQ ID NO: 105 | 3887 |
| CII1721 | CDR | PRT | WO2016023019; SEQ ID NO: 108 | 3888 |
| CII1722 | CDR | PRT | WO2016023019; SEQ ID NO: 78 | 3889 |
| CII1723 | CDR | PRT | WO2016023019; SEQ ID NO: 114 | 3890 |
| CII1724 | CDR | PRT | WO2016023019; SEQ ID NO: 400 | 3891 |
| CII1725 | CDR | PRT | WO2016023019; SEQ ID NO: 59 | 3892 |
| CII1726 | CDR | PRT | WO2017062672; SEQ ID NO: 91 | 3893 |
| CII1727 | CDR | PRT | WO2017062672; SEQ ID NO: 763 | 3894 |
| CII1728 | CDR | PRT | WO2016023019; SEQ ID NO: 52 | 3895 |
| CII1729 | CDR | PRT | WO2016023019; SEQ ID NO: 82 | 3896 |
| CII1730 | CDR | PRT | WO2016023019; SEQ ID NO: 109 | 3897 |
| CII1731 | CDR | PRT | WO2016023019; SEQ ID NO: 113 | 3898 |
| CII1732 | CDR | PRT | WO2016023019; SEQ ID NO: 112 | 3899 |
| CII1733 | CDR | PRT | WO2017062672; SEQ ID NO: 86 | 3900 |
| CII1734 | CDR | PRT | WO2016023019; SEQ ID NO: 97 | 3901 |
| CII1735 | CDR | PRT | WO2016023019; SEQ ID NO: 95 | 3902 |
| CII1736 | CDR | PRT | WO2016023019; SEQ ID NO: 63 | 3903 |
| CII1737 | CDR | PRT | WO2016023019; SEQ ID NO: 87 | 3904 |
| CII1736 | CDR | PRT | WO2016023019; SEQ ID NO: 91 | 3905 |
| CII1739 | CDR | PRT | WO2016023019; SEQ ID NO: 110 | 3906 |
| CII1748 | CDR | PRT | WO2016023019; SEQ ID NO: 62 | 3907 |
| CII1741 | CDR | PRT | WO2016023019; SEQ ID NO: 93 | 3908 |
| CII1742 | CDR | PRT | WO2016023019; SEQ ID NO: 57 | 3909 |
| CII1743 | CDR | PRT | WO2016023019; SEQ ID NO: 73 | 3910 |
| CII1744 | CDR | PRT | WO2016023019; SEQ ID NO: 99 | 3911 |
| CII1745 | CDR | PRT | WO2016023019; SEQ ID NO: 55 | 3912 |
| CII1746 | CDR | PRT | WO2016023019; SEQ ID NO: 80 | 3913 |
| CII1747 | CDR | PRT | WO2016023019; SEQ ID NO: 53 | 3914 |
| CII1748 | CDR | PRT | WO2016023019; SEQ ID NO: 90 | 3915 |
| CII1749 | CDR | PRT | WO2016023019; SEQ ID NO: 64 | 3916 |
| CII1750 | CDR | PRT | WO2016023019; SEQ ID NO: 119 | 3917 |
| CII1751 | CDR | PRT | WO2017062672; SEQ ID NO: 709 | 3918 |
| CII1752 | CDR | PRT | WO2016023019; SEQ ID NO: 72 | 3919 |
| CII1753 | CDR | PRT | WO2016023019; SEQ ID NO: 61 | 3920 |
| CII1754 | CDR | PRT | WO2016023019; SEQ ID NO: 94 | 3921 |
| CII1755 | CDR | PRT | WO2016023019; SEQ ID NO: 74 | 3922 |
| CII1756 | CDR | PRT | WO2016023019; SEQ ID NO: 101 | 3923 |
| CII1757 | CDR | PRT | WO2016023019; SEQ ID NO: 100 | 3924 |
| CII1758 | CDR | PRT | WO2016023019; SEQ ID NO: 58 | 3925 |
| CII1759 | CDR | PRT | WO2019028292; SEQ ID NO: 138 | 3926 |
| CII1760 | CDR | PRT | WO2019028292; SEQ ID NO: 182 | 3927 |
| CII1761 | CDR | PRT | WO2019028292; SEQ ID NO: 183 | 3928 |
| CII1762 | CDR | PRT | WO2017062672; SEQ ID NO: 97 | 3929 |
| CII1763 | CDR | PRT | WO2019028292; SEQ ID NO: 126 | 3930 |
| CII1764 | CDR | PRT | WO2019028292; SEQ ID NO: 181 | 3931 |
| CII1765 | CDR | PRT | WO2019028292; SEQ ID NO: 123 | 3932 |
| CII1766 | CDR | PRT | WO2016023019; SEQ ID NO: 88 | 3933 |
| CII1767 | CDR | PRT | WO2016023019; SEQ ID NO: 89 | 3934 |
| CII1768 | CDR | PRT | WO2017062672; SEQ ID NO: 101 | 3935 |
| CII1769 | CDR | PRT | WO2016023019; SEQ ID NO: 75 | 3936 |
| CII1770 | CDR | PRT | WO2016023019; SEQ ID NO: 66 | 3937 |
| CII1771 | CDR | PRT | WO2016023019; SEQ ID NO: 106 | 3938 |
| CII1772 | CDR | PRT | WO2016023019; SEQ ID NO: 111 | 3939 |
| CII1773 | CDR | PRT | WO2016023019; SEQ ID NO: 79 | 3940 |
| CII1774 | CDR | PRT | WO2016023019; SEQ ID NO: 56 | 3941 |
| CII1775 | CDR | PRT | WO2016023019; SEQ ID NO: 81 | 3942 |
| CII1776 | CDR | PRT | WO2016023019; SEQ ID NO: 116 | 3943 |
| CII1777 | CDR | PRT | WO2016023019; SEQ ID NO: 76 | 3944 |
| CII1778 | CDR | PRT | WO2016023019; SEQ ID NO: 115 | 3945 |
| CII1779 | CDR | PRT | WO2017062672; SEQ ID NO: 767 | 3946 |
| CII1780 | CDR | PRT | WO2017062672; SEQ ID NO: 710 | 3947 |
| CII1781 | CDR | PRT | WO2017062672; SEQ ID NO: 770 | 3948 |
| CII1782 | CDR | PRT | WO2017062672; SEQ ID NO: 764 | 3949 |
| CII1783 | CDR | PRT | WO2016023019; SEQ ID NO: 142 | 3950 |
| CII1784 | CDR | PRT | WO2016023019; SEQ ID NO: 139 | 3951 |
| CII1785 | CDR | PRT | WO2016023019; SEQ ID NO: 146 | 3952 |
| CII1786 | CDR | PRT | WO2016023019; SEQ ID NO: 144 | 3953 |
| CII1787 | CDR | PRT | WO2016023019; SEQ ID NO: 149 | 3954 |
| CII1788 | CDR | PRT | WO2016023019; SEQ ID NO: 148 | 3955 |
| CII1789 | CDR | PRT | WO2017062672; SEQ ID NO: 84 | 3956 |
| CII1790 | CDR | PRT | WO2016023019; SEQ ID NO: 49 | 3957 |
| CII1791 | CDR | PRT | WO2017062672; SEQ ID NO: 73 | 3958 |
| CII1792 | CDR | PRT | WO2017062672; SEQ ID NO: 743 | 3959 |
| CII1793 | CDR | PRT | WO2017062672; SEQ ID NO: 62 | 3960 |
| CII1794 | CDR | PRT | WO2017062672; SEQ ID NO: 63 | 3961 |
| CII1795 | CDR | PRT | WO2017062672; SEQ ID NO: 699 | 3962 |
| CII1796 | CDR | PRT | WO2017062672; SEQ ID NO: 40 | 3963 |
| CII1797 | CDR | PRT | WO2017062672; SEQ ID NO: 65 | 3964 |
| CII1798 | CDR | PRT | WO2017062672; SEQ ID NO: 52 | 3965 |
| CII1799 | CDR | PRT | WO2017062672; SEQ ID NO: 57 | 3966 |
| CII1800 | CDR | PRT | WO2017062672; SEQ ID NO: 56 | 3967 |
| CII1801 | CDR | PRT | WO2017062672; SEQ ID NO: 51 | 3968 |
| CII1802 | CDR | PRT | WO2017062672; SEQ ID NO: 831 | 3969 |
| CII1803 | CDR | PRT | WO2016023019; SEQ ID NO: 4 | 3970 |
| CII1804 | CDR | PRT | WO2016023019; SEQ ID NO: 3 | 3971 |
| CII1805 | CDR | PRT | WO2016023019; SEQ ID NO: 16 | 3972 |
| CII1806 | CDR | PRT | WO2016023019; SEQ ID NO: 23 | 3973 |
| CII1807 | CDR | PRT | WO2016023019; SEQ ID NO: 18 | 3974 |
| CII1808 | CDR | PRT | WO2016023019; SEQ ID NO: 17 | 3975 |
| CII1809 | CDR | PRT | WO2017062672; SEQ ID NO: 753 | 3976 |
| CII1810 | CDR | PRT | WO2017062672; SEQ ID NO: 48 | 3977 |
| CII1811 | CDR | PRT | WO2017062672; SEQ ID NO: 32 | 3978 |
| CII1812 | CDR | PRT | WO2017062672; SEQ ID NO: 833 | 3979 |
| CII1813 | CDR | PRT | WO2017062672; SEQ ID NO: 832 | 3980 |
| CII1814 | CDR | PRT | WO2016023019; SEQ ID NO: 150 | 3981 |
| CII1815 | CDR | PRT | WO2016023019; SEQ ID NO: 408 | 3982 |
| CII1816 | CDR | PRT | WO2017062672; SEQ ID NO: 697 | 3983 |
| CII1817 | CDR | PRT | WO2016023019; SEQ ID NO: 143 | 3984 |
| CII1818 | CDR | PRT | WO2016023019; SEQ ID NO: 141 | 3985 |
| CII1819 | CDR | PRT | WO2016023019; SEQ ID NO: 138 | 3986 |
| CII1820 | CDR | PRT | WO2016023019; SEQ ID NO: 402 | 3987 |
| CII1821 | CDR | PRT | WO2016023019; SEQ ID NO: 27 | 3988 |
| CII1822 | CDR | PRT | WO2016023019; SEQ ID NO: 28 | 3989 |
| CII1823 | CDR | PRT | WO2017062672; SEQ ID NO: 702 | 3990 |
| CII1824 | CDR | PRT | WO2016023019; SEQ ID NO: 24 | 3991 |
| CII1825 | CDR | PRT | WO2016023019; SEQ ID NO: 13 | 3992 |
| CII1826 | CDR | PRT | WO2016023019; SEQ ID NO: 14 | 3993 |
| CII1827 | CDR | PRT | WO2016023019; SEQ ID NO: 8 | 3994 |
| CII1828 | CDR | PRT | WO2016023019; SEQ ID NO: 15 | 3995 |
| CII1829 | CDR | PRT | WO2016023019; SEQ ID NO: 5 | 3996 |
| CII1830 | CDR | PRT | WO2017062672; SEQ ID NO: 42 | 3997 |
| CII1831 | CDR | PRT | WO2017062672; SEQ ID NO: 700 | 3998 |
| CII1832 | CDR | PRT | WO2017062672; SEQ ID NO: 582 | 3999 |
| CII1833 | CDR | PRT | WO2017062672; SEQ ID NO: 70 | 4000 |
| CII1834 | CDR | PRT | WO2017062672; SEQ ID NO: 80 | 4001 |
| CII1835 | CDR | PRT | WO2017062672; SEQ ID NO: 755 | 4002 |
| CII1836 | CDR | PRT | WO2017062672; SEQ ID NO: 81 | 4003 |
| CII1837 | CDR | PRT | WO2017062672; SEQ ID NO: 72 | 4004 |
| CII1838 | CDR | PRT | WO2017062672; SEQ ID NO: 586 | 4005 |
| CII1839 | CDR | PRT | WO2017062672; SEQ ID NO: 67 | 4006 |
| CII1840 | CDR | PRT | WO2017062672; SEQ ID NO: 77 | 4007 |
| CII1841 | CDR | PRT | WO2017062672; SEQ ID NO: 757 | 4008 |
| CII1842 | CDR | PRT | WO2017062672; SEQ ID NO: 79 | 4009 |
| CII1843 | CDR | PRT | WO2017062672; SEQ ID NO: 71 | 4010 |
| CII1844 | CDR | PRT | WO2017062672; SEQ ID NO: 758 | 4011 |
| CII1845 | CDR | PRT | WO2017062672; SEQ ID NO: 78 | 4012 |
| CII1846 | CDR | PRT | WO2017062672; SEQ ID NO: 76 | 4013 |
| CII1847 | CDR | PRT | WO2017062672; SEQ ID NO: 756 | 4014 |
| CII1848 | CDR | PRT | WO2017062672; SEQ ID NO: 587 | 4015 |
| CII1849 | CDR | PRT | WO2017062672; SEQ ID NO: 68 | 4016 |
| CII1850 | CDR | PRT | WO2017062672; SEQ ID NO: 841 | 4017 |
| CII1851 | CDR | PRT | WO2017062672; SEQ ID NO: 842 | 4018 |
| CII1852 | CDR | PRT | WO2017062672; SEQ ID NO: 837 | 4019 |
| CII1853 | CDR | PRT | WO2017062672; SEQ ID NO: 836 | 4020 |
| CII1854 | CDR | PRT | WO2017062672; SEQ ID NO: 762 | 4021 |
| CII1855 | CDR | PRT | WO2017062672; SEQ ID NO: 760 | 4022 |
| CII1856 | CDR | PRT | WO2017062672; SEQ ID NO: 759 | 4023 |
| CII1857 | CDR | PRT | WO2017062672; SEQ ID NO: 83 | 4024 |
| CII1858 | CDR | PRT | WO2016023019; SEQ ID NO: 30 | 4025 |
| CII1859 | CDR | PRT | WO2016023019; SEQ ID NO: 29 | 4026 |
| CII1860 | CDR | PRT | WO2016023019; SEQ ID NO: 399 | 4027 |
| CII1861 | CDR | PRT | WO2016023019; SEQ ID NO: 31 | 4028 |
| CII1862 | CDR | PRT | WO2016023019; SEQ ID NO: 34 | 4029 |
| CII1863 | CDR | PRT | WO2016023019; SEQ ID NO: 405 | 4030 |
| CII1864 | CDR | PRT | WO2016023019; SEQ ID NO: 33 | 4031 |
| CII1865 | CDR | PRT | WO2017062672; SEQ ID NO: 30 | 4032 |
| CII1866 | CDR | PRT | WO2016023019; SEQ ID NO: 152 | 4033 |
| CII1867 | CDR | PRT | WO2017062672; SEQ ID NO: 21 | 4034 |
| CII1868 | CDR | PRT | WO2017062672; SEQ ID NO: 745 | 4035 |
| CII1869 | CDR | PRT | WO2017062672; SEQ ID NO: 12 | 4036 |
| CII1870 | CDR | PRT | WO2017062672; SEQ ID NO: 22 | 4037 |
| CII1871 | CDR | PRT | WO2017062672; SEQ ID NO: 23 | 4038 |
| CII1872 | CDR | PRT | WO2017062672; SEQ ID NO: 11 | 4039 |
| CII1873 | CDR | PRT | WO2017062672; SEQ ID NO: 16 | 4040 |
| CII1874 | CDR | PRT | WO2017062672; SEQ ID NO: 10 | 4041 |
| CII1875 | CDR | PRT | WO2017062672; SEQ ID NO: 581 | 4042 |
| CII1876 | CDR | PRT | WO2016023019; SEQ ID NO: 127 | 4043 |
| CII1877 | CDR | PRT | WO2017062672; SEQ ID NO: 828 | 4044 |
| CII1878 | CDR | PRT | WO2017062672; SEQ ID NO: 740 | 4045 |
| CII1879 | CDR | PRT | WO2017062672; SEQ ID NO: 33 | 4046 |
| CII1880 | CDR | PRT | WO2017062672; SEQ ID NO: 28 | 4047 |
| CII1881 | CDR | PRT | WO2019028292; SEQ ID NO: 131 | 4048 |
| CII1882 | CDR | PRT | WO2019028292; SEQ ID NO: 193 | 4049 |
| CII1883 | CDR | PRT | WO2019028292; SEQ ID NO: 134 | 4050 |
| CII1884 | CDR | PRT | WO2017062672; SEQ ID NO: 739 | 4051 |
| CII1885 | CDR | PRT | WO2019028292; SEQ ID NO: 140 | 4052 |
| CII1886 | CDR | PRT | WO2019028292; SEQ ID NO: 128 | 4053 |
| CII1887 | CDR | PRT | WO2016023019; SEQ ID NO: 208 | 4054 |
| CII1888 | CDR | PRT | WO2016023019; SEQ ID NO: 151 | 4055 |
| CII1889 | CDR | PRT | WO2017062672; SEQ ID NO: 707 | 4056 |
| CII1890 | CDR | PRT | WO2016023019; SEQ ID NO: 40 | 4057 |
| CII1891 | CDR | PRT | WO2019028292; SEQ ID NO: 197 | 4058 |
| CII1892 | CDR | PRT | WO2019028292; SEQ ID NO: 195 | 4059 |
| CII1893 | CDR | PRT | WO2017062672; SEQ ID NO: 27 | 4060 |
| CII1894 | CDR | PRT | WO2017062672; SEQ ID NO: 55 | 4061 |
| CII1895 | CDR | PRT | WO2017062672; SEQ ID NO: 26 | 4062 |
| CII1896 | CDR | PRT | WO2016023019; SEQ ID NO: 228 | 4063 |
| CII1897 | CDR | PRT | WO2017062672; SEQ ID NO: 36 | 4064 |
| CII1898 | CDR | PRT | WO2017062672; SEQ ID NO: 742 | 4065 |
| CII1899 | CDR | PRT | WO2016023019; SEQ ID NO: 36 | 4066 |
| CII1900 | CDR | PRT | WO2017062672; SEQ ID NO: 24 | 4067 |
| CII1901 | CDR | PRT | WO2016023019; SEQ ID NO: 128 | 4068 |
| CII1902 | CDR | PRT | WO2016023019; SEQ ID NO: 122 | 4069 |
| CII1903 | CDR | PRT | WO2016023019; SEQ ID NO: 133 | 4070 |
| CII1904 | CDR | PRT | WO2017062672; SEQ ID NO: 41 | 4071 |
| CII1905 | CDR | PRT | WO2017062672; SEQ ID NO: 34 | 4072 |
| CII1906 | CDR | PRT | WO2017062672; SEQ ID NO: 46 | 4073 |
| CII1907 | CDR | PRT | WO2016023019; SEQ ID NO: 227 | 4074 |
| CII1908 | CDR | PRT | WO2016023019; SEQ ID NO: 211 | 4075 |
| CII1909 | CDR | PRT | WO2016023019; SEQ ID NO: 175 | 4076 |
| CII1910 | CDR | PRT | WO2016023019; SEQ ID NO: 220 | 4077 |
| CII1911 | CDR | PRT | WO2016023019; SEQ ID NO: 231 | 4078 |
| CII1912 | CDR | PRT | WO2016023019; SEQ ID NO: 174 | 4079 |
| CII1913 | CDR | PRT | WO2016023019; SEQ ID NO: 213 | 4080 |
| CII1914 | CDR | PRT | WO2016023019; SEQ ID NO: 226 | 4081 |
| CII1915 | CDR | PRT | WO2016023019; SEQ ID NO: 214 | 4082 |
| CII1916 | CDR | PRT | WO2016023019; SEQ ID NO: 222 | 4083 |
| CII1917 | CDR | PRT | WO2016023019; SEQ ID NO: 176 | 4084 |
| CII1918 | CDR | PRT | WO2016023019; SEQ ID NO: 173 | 4085 |
| CII1919 | CDR | PRT | WO2016023019; SEQ ID NO: 409 | 4086 |
| CII1920 | CDR | PRT | WO2016023019; SEQ ID NO: 156 | 4087 |
| CII1921 | CDR | PRT | WO2016023019; SEQ ID NO: 184 | 4088 |
| CII1922 | CDR | PRT | WO2016023019; SEQ ID NO: 221 | 4089 |
| CII1923 | CDR | PRT | WO2016023019; SEQ ID NO: 215 | 4090 |
| CII1924 | CDR | PRT | WO2016023019; SEQ ID NO: 163 | 4091 |
| CII1925 | CDR | PRT | WO2016023019; SEQ ID NO: 177 | 4092 |
| CII1926 | CDR | PRT | WO2016023019; SEQ ID NO: 234 | 4093 |
| CII1927 | CDR | PRT | WO2016023019; SEQ ID NO: 164 | 4094 |
| CII1928 | CDR | PRT | WO2016023019; SEQ ID NO: 202 | 4095 |
| CII1929 | CDR | PRT | WO2016023019; SEQ ID NO: 167 | 4096 |
| CII1930 | CDR | PRT | WO2016023019; SEQ ID NO: 169 | 4097 |
| CII1931 | CDR | PRT | WO2016023019; SEQ ID NO: 170 | 4098 |
| CII1932 | CDR | PRT | WO2016023019; SEQ ID NO: 168 | 4099 |
| CII1933 | CDR | PRT | WO2016023019; SEQ ID NO: 172 | 4100 |
| CII1934 | CDR | PRT | WO2016023019; SEQ ID NO: 161 | 4101 |
| CII1935 | CDR | PRT | WO2016023019; SEQ ID NO: 191 | 4102 |
| CII1936 | CDR | PRT | WO2016023019; SEQ ID NO: 186 | 4103 |
| CII1937 | CDR | PRT | WO2016023019; SEQ ID NO: 162 | 4104 |
| CII1938 | CDR | PRT | WO2016023019; SEQ ID NO: 209 | 4105 |
| CII1939 | CDR | PRT | WO2017062672; SEQ ID NO: 701 | 4106 |
| CII1940 | CDR | PRT | WO2017062672; SEQ ID NO: 698 | 4107 |
| CII1941 | CDR | PRT | WO2016023019; SEQ ID NO: 160 | 4108 |
| CII1942 | CDR | PRT | WO2016023019; SEQ ID NO: 189 | 4109 |
| CII1943 | CDR | PRT | WO2016023019; SEQ ID NO: 196 | 4110 |
| CII1944 | CDR | PRT | WO2016023019; SEQ ID NO: 187 | 4111 |
| CII1945 | CDR | PRT | WO2016023019; SEQ ID NO: 235 | 4112 |
| CII1946 | CDR | PRT | WO2016023019; SEQ ID NO: 153 | 4113 |
| CII1947 | CDR | PRT | WO2016023019; SEQ ID NO: 205 | 4114 |
| CII1948 | CDR | PRT | WO2016023019; SEQ ID NO: 195 | 4115 |
| CII1949 | CDR | PRT | WO2017062672; SEQ ID NO: 744 | 4116 |
| CII1950 | CDR | PRT | WO2016023019; SEQ ID NO: 155 | 4117 |
| CII1951 | CDR | PRT | WO2016023019; SEQ ID NO: 180 | 4118 |
| CII1952 | CDR | PRT | WO2016023019; SEQ ID NO: 182 | 4119 |
| CII1953 | CDR | PRT | WO2016023019; SEQ ID NO: 199 | 4120 |
| CII1954 | CDR | PRT | WO2016023019; SEQ ID NO: 219 | 4121 |
| CII1955 | CDR | PRT | WO2016023019; SEQ ID NO: 188 | 4122 |
| CII1956 | CDR | PRT | WO2016023019; SEQ ID NO: 218 | 4123 |
| CII1957 | CDR | PRT | WO2016023019; SEQ ID NO: 210 | 4124 |
| CII1958 | CDR | PRT | WO2016023019; SEQ ID NO: 198 | 4125 |
| CII1959 | CDR | PRT | WO2016023019; SEQ ID NO: 159 | 4126 |
| CII1960 | CDR | PRT | WO2016023019; SEQ ID NO: 232 | 4127 |
| CII1961 | CDR | PRT | WO2016023019; SEQ ID NO: 216 | 4128 |
| CII1962 | CDR | PRT | WO2016023019; SEQ ID NO: 217 | 4129 |
| CII1963 | CDR | PRT | WO2016023019; SEQ ID NO: 197 | 4130 |
| CII1964 | CDR | PRT | WO2016023019; SEQ ID NO: 223 | 4131 |
| CII1965 | CDR | PRT | WO2016023019; SEQ ID NO: 206 | 4132 |
| CII1966 | CDR | PRT | WO2016023019; SEQ ID NO: 200 | 4133 |
| CII1967 | CDR | PRT | WO2016023019; SEQ ID NO: 158 | 4134 |
| CII1968 | CDR | PRT | WO2016023019; SEQ ID NO: 192 | 4135 |
| CII1969 | CDR | PRT | WO2016023019; SEQ ID NO: 179 | 4136 |
| CII1970 | CDR | PRT | WO2016023019; SEQ ID NO: 204 | 4137 |
| CII1971 | CDR | PRT | WO2016023019; SEQ ID NO: 185 | 4138 |
| CII1972 | CDR | PRT | WO2016023019; SEQ ID NO: 230 | 4139 |
| CII1973 | CDR | PRT | WO2016023019; SEQ ID NO: 212 | 4140 |
| CII1974 | CDR | PRT | WO2016023019; SEQ ID NO: 233 | 4141 |
| CII1975 | CDR | PRT | WO2017062672; SEQ ID NO: 746 | 4142 |
| CII1976 | CDR | PRT | WO2016023019; SEQ ID NO: 166 | 4143 |
| CII1977 | CDR | PRT | WO2016023019; SEQ ID NO: 403 | 4144 |
| CII1978 | CDR | PRT | WO2016023019; SEQ ID NO: 207 | 4145 |
| CII1979 | CDR | PRT | WO2016023019; SEQ ID NO: 224 | 4146 |
| CII1980 | CDR | PRT | WO2016023019; SEQ ID NO: 165 | 4147 |
| CII1981 | CDR | PRT | WO2016023019; SEQ ID NO: 181 | 4148 |
| CII1982 | CDR | PRT | WO2016023019; SEQ ID NO: 190 | 4149 |
| CII1983 | CDR | PRT | WO2016023019; SEQ ID NO: 194 | 4150 |
| CII1984 | CDR | PRT | WO2017062672; SEQ ID NO: 38 | 4151 |
| CII1985 | CDR | PRT | WO2016023019; SEQ ID NO: 201 | 4152 |
| CII1986 | CDR | PRT | WO2016023019; SEQ ID NO: 193 | 4153 |
| CII1987 | CDR | PRT | WO2016023019; SEQ ID NO: 154 | 4154 |
| CII1988 | CDR | PRT | WO2016023019; SEQ ID NO: 157 | 4155 |
| CII1989 | CDR | PRT | WO2016023019; SEQ ID NO: 225 | 4156 |
| CII1990 | CDR | PRT | WO2016023019; SEQ ID NO: 236 | 4157 |
| CII1991 | CDR | PRT | WO2016023019; SEQ ID NO: 178 | 4158 |
| CII1992 | CDR | PRT | WO2016023019; SEQ ID NO: 183 | 4159 |
| CII1993 | CDR | PRT | WO2016023019; SEQ ID NO: 203 | 4160 |
| CII1994 | CDR | PRT | WO2016023019; SEQ ID NO: 229 | 4161 |
| CII1995 | CDR | PRT | WO2016023019; SEQ ID NO: 171 | 4162 |
| CII1996 | CDR | PRT | WO2017062672; SEQ ID NO: 47 | 4163 |
| CII1997 | CDR | PRT | WO2017062672; SEQ ID NO: 35 | 4164 |
| CII1998 | CDR | PRT | WO2017062672; SEQ ID NO: 9 | 4165 |
| CII1999 | CDR | PRT | WO2017062672; SEQ ID NO: 17 | 4166 |
| CII2000 | CDR | PRT | WO2016023019; SEQ ID NO: 136 | 4167 |
| CII2001 | CDR | PRT | WO2016023019; SEQ ID NO: 132 | 4168 |
| CII2002 | CDR | PRT | WO2016023019; SEQ ID NO: 135 | 4169 |
| CII2003 | CDR | PRT | WO2017062672; SEQ ID NO: 738 | 4170 |
| CII2004 | CDR | PRT | WO2016023019; SEQ ID NO: 130 | 4171 |
| CII2005 | CDR | PRT | WO2016023019; SEQ ID NO: 129 | 4172 |
| CII2006 | CDR | PRT | WO2016023019; SEQ ID NO: 131 | 4173 |
| CII2007 | CDR | PRT | WO2016023019; SEQ ID NO: 125 | 4174 |
| CII2008 | CDR | PRT | WO2016023019; SEQ ID NO: 121 | 4175 |
| CII2009 | CDR | PRT | WO2016023019; SEQ ID NO: 137 | 4176 |
| CII2010 | CDR | PRT | WO2016023019; SEQ ID NO: 126 | 4177 |
| CII2011 | CDR | PRT | WO2016023019; SEQ ID NO: 120 | 4178 |
| CII2012 | CDR | PRT | WO2016023019; SEQ ID NO: 401 | 4179 |
| CII2013 | CDR | PRT | WO2016023019; SEQ ID NO: 123 | 4180 |
| CII2014 | CDR | PRT | WO2016023019; SEQ ID NO: 407 | 4181 |
| CII2015 | CDR | PRT | WO2016023019; SEQ ID NO: 124 | 4182 |
| CII2016 | CDR | PRT | WO2017062672; SEQ ID NO: 20 | 4183 |
| CII2017 | CDR | PRT | WO2019028292; SEQ ID NO: 167 | 4184 |
| CII2018 | CDR | PRT | WO2019028292; SEQ ID NO: 168 | 4185 |
| CII2019 | CDR | PRT | WO2019028292; SEQ ID NO: 125 | 4186 |
| CII2020 | CDR | PRT | WO2019028292; SEQ ID NO: 165 | 4187 |
| CII2021 | CDR | PRT | WO2019028292; SEQ ID NO: 169 | 4188 |
| CII2022 | CDR | PRT | WO2019028292; SEQ ID NO: 170 | 4189 |
| CII2023 | CDR | PRT | WO2019028292; SEQ ID NO: 166 | 4190 |
| CII2024 | CDR | PRT | WO2019028292; SEQ ID NO: 171 | 4191 |
| CII2025 | CDR | PRT | WO2019028292; SEQ ID NO: 172 | 4192 |
| CII2026 | CDR | PRT | WO2017062672; SEQ ID NO: 888 | 4193 |
| CII2027 | CDR | PRT | WO2019028292; SEQ ID NO: 173 | 4194 |
| CII2028 | CDR | PRT | WO2019028292; SEQ ID NO: 143 | 4195 |
| CII2029 | CDR | PRT | WO2019028292; SEQ ID NO: 179 | 4196 |
| CII2030 | CDR | PRT | WO2019028292; SEQ ID NO: 163 | 4197 |
| CII2031 | CDR | PRT | WO2019028292; SEQ ID NO: 177 | 4198 |
| CII2032 | CDR | PRT | WO2019028292; SEQ ID NO: 137 | 4199 |
| CII2033 | CDR | PRT | WO2019028292; SEQ ID NO: 141 | 4200 |
| CII2034 | CDR | PRT | WO2019028292; SEQ ID NO: 180 | 4201 |
| CII2035 | CDR | PRT | WO2019028292; SEQ ID NO: 135 | 4202 |
| CII2036 | CDR | PRT | WO2019028292; SEQ ID NO: 162 | 4203 |
| CII2037 | CDR | PRT | WO2019028292; SEQ ID NO: 174 | 4204 |
| CII2038 | CDR | PRT | WO2019028292; SEQ ID NO: 175 | 4205 |
| CII2039 | CDR | PRT | WO2019028292; SEQ ID NO: 133 | 4206 |
| CII2040 | CDR | PRT | WO2019028292; SEQ ID NO: 178 | 4207 |
| CII2041 | CDR | PRT | WO2019028292; SEQ ID NO: 164 | 4208 |
| CII2042 | CDR | PRT | WO2019028292; SEQ ID NO: 176 | 4209 |
| CII2043 | CDR | PRT | WO2019028292; SEQ ID NO: 122 | 4210 |
| CII2044 | CDR | PRT | WO2017062672; SEQ ID NO: 88 | 4211 |
| CII2045 | CDR | PRT | WO2019028292; SEQ ID NO: 185 | 4212 |
| CII2046 | CDR | PRT | WO2016023019; SEQ ID NO: 134 | 4213 |
| CII2047 | CDR | PRT | WO2017062672; SEQ ID NO: 14 | 4214 |
| CII2048 | CDR | PRT | WO2017062672; SEQ ID NO: 19 | 4215 |
| CII2049 | CDR | PRT | WO2019028292; SEQ ID NO: 130 | 4216 |
| CII2050 | CDR | PRT | WO2019028292; SEQ ID NO: 142 | 4217 |
| CII2051 | CDR | PRT | WO2019028292; SEQ ID NO: 144 | 4218 |
| CII2052 | CDR | PRT | WO2019028292; SEQ ID NO: 184 | 4219 |
| CII2053 | CDR | PRT | WO2017062672; SEQ ID NO: 15 | 4220 |
| CII2054 | CDR | PRT | WO2017062672; SEQ ID NO: 827 | 4221 |
| CII2055 | CDR | PRT | WO2019028292; SEQ ID NO: 187 | 4222 |
| CII2056 | CDR | PRT | WO2019028292; SEQ ID NO: 190 | 4223 |
| CII2057 | CDR | PRT | WO2019028292; SEQ ID NO: 189 | 4224 |
| CII2058 | CDR | PRT | WO2019028292; SEQ ID NO: 188 | 4225 |
| CII2059 | CDR | PRT | WO2017062672; SEQ ID NO: 18 | 4226 |
| CII2060 | CDR | PRT | WO2019028292; SEQ ID NO: 139 | 4227 |
| CII2061 | CDR | PRT | WO2019028292; SEQ ID NO: 186 | 4228 |
| CII2062 | CDR | PRT | WO2019028292; SEQ ID NO: 192 | 4229 |
| CII2063 | CDR | PRT | WO2019028292; SEQ ID NO: 191 | 4230 |
| CII2064 | CDR | PRT | WO2017062672; SEQ ID NO: 826 | 4231 |
| CII2065 | CDR | PRT | WO2019028292; SEQ ID NO: 127 | 4232 |
| CII2066 | CDR | PRT | WO2017062672; SEQ ID NO: 704 | 4233 |
| CII2067 | CDR | PRT | WO2017062672; SEQ ID NO: 13 | 4234 |
| CII2068 | CDR | PRT | WO2016023019; SEQ ID NO: 140 | 4235 |
| CII2069 | CDR | PRT | WO2017062672; SEQ ID NO: 695 | 4236 |
| CII2070 | CDR | PRT | WO2019028292; SEQ ID NO: 196 | 4237 |
| CII2071 | CDR | PRT | WO2017062672; SEQ ID NO: 737 | 4238 |
| CII2072 | CDR | PRT | WO2017062672; SEQ ID NO: 694 | 4239 |
| CII2073 | CDR | PRT | WO2017062672; SEQ ID NO: 736 | 4240 |
| CII2074 | CDR | PRT | WO2017062672; SEQ ID NO: 45 | 4241 |
| CII2075 | CDR | PRT | WO2017062672; SEQ ID NO: 749 | 4242 |
| CII2076 | CDR | PRT | WO2017062672; SEQ ID NO: 748 | 4243 |
| CII2077 | CDR | PRT | WO2017062672; SEQ ID NO: 747 | 4244 |
| CII2078 | CDR | PRT | WO2017062672; SEQ ID NO: 750 | 4245 |
| CII2079 | CDR | PRT | WO2017062672; SEQ ID NO: 751 | 4246 |
| CII2080 | CDR | PRT | WO2016023019; SEQ ID NO: 43 | 4247 |
| CII2081 | CDR | PRT | WO2016023019; SEQ ID NO: 46 | 4248 |
| CII2082 | CDR | PRT | WO2016023019; SEQ ID NO: 32 | 4249 |
| CII2083 | CDR | PRT | WO2016023019; SEQ ID NO: 38 | 4250 |
| CII2084 | CDR | PRT | WO2016023019; SEQ ID NO: 37 | 4251 |
| CII2085 | CDR | PRT | WO2017062672; SEQ ID NO: 693 | 4252 |
| CII2086 | CDR | PRT | WO2017062672; SEQ ID NO: 690 | 4253 |
| CII2087 | CDR | PRT | WO2017062672; SEQ ID NO: 692 | 4254 |
| CII2088 | CDR | PRT | WO2017062672; SEQ ID NO: 691 | 4255 |
| CII2089 | CDR | PRT | WO2017062672; SEQ ID NO: 735 | 4256 |
| CII2090 | CDR | PRT | WO2017062672; SEQ ID NO: 734 | 4257 |
| CII2091 | CDR | PRT | WO2017062672; SEQ ID NO: 39 | 4258 |
| CII2092 | CDR | PRT | WO2017062672; SEQ ID NO: 583 | 4259 |
| CII2093 | CDR | PRT | WO2017062672; SEQ ID NO: 44 | 4260 |
| CII2094 | CDR | PRT | WO2017062672; SEQ ID NO: 43 | 4261 |
| CII2095 | CDR | PRT | WO2019028292; SEQ ID NO: 129 | 4262 |
| CII2096 | CDR | PRT | WO2019028292; SEQ ID NO: 194 | 4263 |
| CII2097 | CDR | PRT | WO2017062672; SEQ ID NO: 96 | 4264 |
| CII2098 | CDR | PRT | WO2017062672; SEQ ID NO: 703 | 4265 |
| CII2099 | CDR | PRT | WO2017062672; SEQ ID NO: 705 | 4266 |
| CII2100 | CDR | PRT | WO2017062672; SEQ ID NO: 769 | 4267 |
| CII2101 | CDR | PRT | WO2017062672; SEQ ID NO: 768 | 4268 |
| CII2102 | CDR | PRT | WO2017062672; SEQ ID NO: 85 | 4269 |
| CII2103 | CDR | PRT | WO2017062672; SEQ ID NO: 588 | 4270 |
| CII2104 | CDR | PRT | WO2017062672; SEQ ID NO: 93 | 4271 |
| CII2105 | CDR | PRT | WO2017062672; SEQ ID NO: 87 | 4272 |
| CII2106 | CDR | PRT | WO2017062672; SEQ ID NO: 706 | 4273 |
| CII2107 | CDR | PRT | WO2017062672; SEQ ID NO: 69 | 4274 |
| CII2108 | CDR | PRT | WO2017062672; SEQ ID NO: 585 | 4275 |
| CII2109 | CDR | PRT | WO2017062672; SEQ ID NO: 74 | 4276 |
| CII2110 | CDR | PRT | WO2017062672; SEQ ID NO: 838 | 4277 |
| CII2111 | CDR | PRT | WO2017062672; SEQ ID NO: 75 | 4278 |
| CII2112 | CDR | PRT | WO2017062672; SEQ ID NO: 761 | 4279 |
| CII2113 | CDR | PRT | WO2017062672; SEQ ID NO: 82 | 4280 |
| CII2114 | CDR | PRT | WO2017062672; SEQ ID NO: 66 | 4281 |
| CII2115 | CDR | PRT | WO2017062672; SEQ ID NO: 708 | 4282 |
| CII2116 | CDR | PRT | WO2017062672; SEQ ID NO: 99 | 4283 |
| CII2117 | CDR | PRT | WO2016023019; SEQ ID NO: 25 | 4284 |
| CII2118 | CDR | PRT | WO2016023019; SEQ ID NO: 39 | 4285 |
| CII2119 | CDR | PRT | WO2016023019; SEQ ID NO: 41 | 4286 |
| CII2120 | CDR | PRT | WO2017062672; SEQ ID NO: 766 | 4287 |
| CII2121 | CDR | PRT | WO2017062672; SEQ ID NO: 589 | 4288 |
| CII2122 | CDR | PRT | WO2017062672; SEQ ID NO: 90 | 4289 |
| CII2123 | CDR | PRT | WO2017062672; SEQ ID NO: 98 | 4290 |
| CII2124 | CDR | PRT | WO2017062672; SEQ ID NO: 89 | 4291 |
| CII2125 | CDR | PRT | WO2017062672; SEQ ID NO: 102 | 4292 |
| CII2126 | CDR | PRT | WO2017062672; SEQ ID NO: 92 | 4293 |
| CII2127 | CDR | PRT | WO2017062672; SEQ ID NO: 100 | 4294 |
| CII2128 | CDR | PRT | WO2017062672; SEQ ID NO: 95 | 4295 |
| CII2129 | CDR | PRT | WO2017062672; SEQ ID NO: 765 | 4296 |
| CII2130 | CDR | PRT | WO2017062672; SEQ ID NO: 94 | 4297 |
| CII2131 | CDR | PRT | WO2017062672; SEQ ID NO: 25 | 4298 |
| CII2132 | CDR | PRT | WO2016023019; SEQ ID NO: 147 | 4299 |
| CII2133 | CDR | PRT | WO2017062672; SEQ ID NO: 29 | 4300 |
| CII2134 | CDR | PRT | WO2017062672; SEQ ID NO: 696 | 4301 |
| CII2135 | CDR | PRT | WO2016023019; SEQ ID NO: 42 | 4302 |
| CII2136 | CDR | PRT | WO2016023019; SEQ ID NO: 44 | 4303 |
| CII2137 | CDR | PRT | WO2016023019; SEQ ID NO: 35 | 4304 |
| CII2138 | CDR | PRT | WO2016023019; SEQ ID NO: 45 | 4305 |
| CII2139 | CDR | PRT | WO2017062672; SEQ ID NO: 37 | 4306 |
| CII2140 | CDR | PRT | WO2017062672; SEQ ID NO: 840 | 4307 |
| CII2141 | CDR | PRT | WO2017062672; SEQ ID NO: 839 | 4308 |
| CII2142 | CDR | PRT | WO2019028292; SEQ ID NO: 157 | 4309 |
| CII2143 | CDR | PRT | WO2017062672; SEQ ID NO: 59 | 4310 |
| CII2144 | CDR | PRT | WO2019028292; SEQ ID NO: 158 | 4311 |
| CII2145 | CDR | PRT | WO2019028292; SEQ ID NO: 136 | 4312 |
| CII2146 | CDR | PRT | WO2019028292; SEQ ID NO: 160 | 4313 |
| CII2147 | CDR | PRT | WO2019028292; SEQ ID NO: 159 | 4314 |
| CII2148 | CDR | PRT | WO2019028292; SEQ ID NO: 132 | 4315 |
| CII2149 | CDR | PRT | WO2017062672; SEQ ID NO: 60 | 4316 |
| CII2150 | CDR | PRT | WO2019028292; SEQ ID NO: 124 | 4317 |
| CII2151 | CDR | PRT | WO2019028292; SEQ ID NO: 161 | 4318 |
| CII2152 | CDR | PRT | WO2019028292; SEQ ID NO: 121 | 4319 |
| CII2153 | CDR | PRT | WO2017062672; SEQ ID NO: 61 | 4320 |
| CII2154 | CDR | PRT | WO2016023019; SEQ ID NO: 47 | 4321 |
| CII2155 | CDR | PRT | WO2016023019; SEQ ID NO: 48 | 4322 |
| CII2156 | CDR | PRT | WO2017062672; SEQ ID NO: 54 | 4323 |
| CII2157 | CDR | PRT | WO2017062672; SEQ ID NO: 752 | 4324 |
| CII2158 | CDR | PRT | WO2017062672; SEQ ID NO: 584 | 4325 |
| CII2159 | CDR | PRT | WO2016023019; SEQ ID NO: 10 | 4326 |
| CII2160 | CDR | PRT | WO2016023019; SEQ ID NO: 9 | 4327 |
| CII2161 | CDR | PRT | WO2016023019; SEQ ID NO: 11 | 4328 |
| CII2162 | CDR | PRT | WO2016023019; SEQ ID NO: 404 | 4329 |
| CII2163 | CDR | PRT | WO2017062672; SEQ ID NO: 64 | 4330 |
| CII2164 | CDR | PRT | WO2017062672; SEQ ID NO: 50 | 4331 |
| CII2165 | CDR | PRT | WO2017062672; SEQ ID NO: 754 | 4332 |
| CII2166 | CDR | PRT | WO2017062672; SEQ ID NO: 49 | 4333 |
| CII2167 | CDR | PRT | WO2016023019; SEQ ID NO: 19 | 4334 |
| CII2168 | CDR | PRT | WO2016023019; SEQ ID NO: 20 | 4335 |
| CII2169 | CDR | PRT | WO2016023019; SEQ ID NO: 21 | 4336 |
| CII2170 | CDR | PRT | WO2016023019; SEQ ID NO: 22 | 4337 |
| CII2171 | CDR | PRT | WO2016023019; SEQ ID NO: 12 | 4338 |
| CII2172 | CDR | PRT | WO2016023019; SEQ ID NO: 398 | 4339 |
| CII2173 | CDR | PRT | WO2016023019; SEQ ID NO: 6 | 4340 |
| CII2174 | CDR | PRT | WO2016023019; SEQ ID NO: 7 | 4341 |
| CII2175 | CDR | PRT | WO2017062672; SEQ ID NO: 58 | 4342 |
| CII2176 | CDR | PRT | WO2017062672; SEQ ID NO: 830 | 4343 |
| CII2177 | CDR | PRT | WO2017062672; SEQ ID NO: 53 | 4344 |
| CII2178 | CDR | PRT | WO2017062672; SEQ ID NO: 835 | 4345 |
| CII2179 | CDR | PRT | WO2017062672; SEQ ID NO: 834 | 4346 |
| CII2180 | CDR | PRT | WO2017062672; SEQ ID NO: 829 | 4347 |
| CII2181 | CDR | PRT | WO2014028776; SEQ ID NO: 69 | 4348 |
| CII2182 | CDR | PRT | WO2014028776; SEQ ID NO: 71 | 4349 |
| CII2183 | CDR | PRT | WO2014028776; SEQ ID NO: 70 | 4350 |
| CII2184 | CDR | PRT | WO2014028776; SEQ ID NO: 68 | 4351 |
| CII2185 | CDR | PRT | WO2014028776; SEQ ID NO: 72 | 4352 |
| CII2186 | CDR | PRT | WO2014028776; SEQ ID NO: 73 | 4353 |
| CII2187 | CDR | PRT | WO2018140510; SEQ ID NO: 8 | 4354 |
| CII2188 | CDR | PRT | WO2918149510; SEQ ID NO: 10 | 4355 |
| CII2189 | CDR | PRT | US20180051086; SEQ ID NO: 9 | 4356 |
| CII2190 | CDR | PRT | US20180051086; SEQ ID NO: 10 | 4357 |
| CII2191 | CDR | PRT | US20180051086; SEQ ID NO: 12 | 4358 |
| CII2192 | CDR | PRT | WO2018140510; SEQ ID NO: 3 | 4359 |
| CII2193 | CDR | PRT | US20180051086; SEQ ID NO: 13 | 4360 |
| CII2194 | CDR | PRT | WO2018140510; SEQ ID NO: 5 | 4361 |
| CII2195 | CDR | PRT | WO2018140510; SEQ ID NO: 9 | 4362 |
| CII2196 | CDR | PRT | US20180051086; SEQ ID NO: 11 | 4363 |
| CII2197 | CDR | PRT | US20180051086; SEQ ID NO: 8 | 4364 |
| CII2198 | CDR | PRT | WO2018140510; SEQ ID NO: 4 | 4365 |
| CII2199 | FAb | PRT | WO2018162430; SEQ ID NO: 4 | 4366 |
| CII2200 | FAb | PRT | WO2018162430; SEQ ID NO: 2 | 4367 |
| CII2201 | FAb | PRT | WO2018162430; SEQ ID NO: 1 | 4368 |
| CII2202 | FAb | PRT | WO2018162430; SEQ ID NO: 3 | 4369 |
| CII2203 | Fc | PRT | WO2019028292; SEQ ID NO: 154 | 4370 |
| CII2204 | Fc | PRT | WO2019028292; SEQ ID NO: 155 | 4371 |
| CII2205 | Fc | PRT | WO2019028292; SEQ ID NO: 156 | 4372 |
| CII2206 | Fc | PRT | WO2019028292; SEQ ID NO: 148 | 4373 |
| CII2207 | Fc | PRT | WO2019028292; SEQ ID NO: 149 | 4374 |
| CII2208 | Fc | PRT | WO2019028292; SEQ ID NO: 150 | 4375 |
| CII2209 | Fc | PRT | WO2019028292; SEQ ID NO: 153 | 4376 |
| CII2210 | Fc | PRT | WO2019028292; SEQ ID NO: 146 | 4377 |
| CII2211 | Fc | PRT | WO2019028292; SEQ ID NO: 147 | 4378 |
| CII2212 | Fc | PRT | WO2019028292; SEQ ID NO: 151 | 4379 |
| CII2213 | Fc | PRT | WO2019028292; SEQ ID NO: 152 | 4380 |
| CII2214 | Fc | PRT | US20180221480; SEQ ID NO: 14 | 4381 |
| CII2215 | FR | PRT | WO2016201388; SEQ ID NO: 81 | 4382 |
| CII2216 | FR | PRT | WO2016201388; SEQ ID NO: 80 | 4383 |
| CII2217 | FR | PRT | W02016201389; SEQ ID NO: 239 | 4384 |
| CII2218 | FR | PRT | W02016201389; SEQ ID NO: 242 | 4385 |
| CII2219 | FR | PRT | W02016201389; SEQ ID NO: 237 | 4386 |
| CII2220 | FR | PRT | W02016201389; SEQ ID NO: 235 | 4387 |
| CII2221 | FR | PRT | W02016201389; SEQ ID NO: 236 | 4388 |
| CII2222 | FR | PRT | WO2016201388; SEQ ID NO: 79 | 4389 |
| CII2223 | FR | PRT | WO2016201388; SEQ ID NO: 234 | 4390 |
| CII2224 | FR | PRT | W02016201389; SEQ ID NO: 241 | 4391 |
| CII2225 | FR | PRT | W02016201389; SEQ ID NO: 232 | 4392 |
| CII2226 | FR | PRT | W02016201389; SEQ ID NO: 238 | 4393 |
| CII2227 | FR | PRT | W02016201389; SEQ ID NO: 231 | 4394 |
| CII2228 | FR | PRT | W02016201389; SEQ ID NO: 240 | 4395 |
| CII2229 | FR | PRT | W02016201389; SEQ ID NO: 234 | 4396 |
| CII2230 | FR | PRT | W02016201389; SEQ ID NO: 243 | 4397 |
| CII2231 | FR | PRT | W02016201389; SEQ ID NO: 233 | 4398 |
| CII2232 | FR | PRT | WO2016201388; SEQ ID NO: 107 | 4399 |
| CII2233 | FR | PRT | WO2016201388; SEQ ID NO: 106 | 4400 |
| CII2234 | FR | PRT | WO2016201388; SEQ ID NO: 105 | 4401 |
| CII2235 | FR | PRT | WO2016201388; SEQ ID NO: 240 | 4402 |
| CII2236 | FR | PRT | WO2016201388; SEQ ID NO: 96 | 4403 |
| CII2237 | FR | PRT | W02016201389; SEQ ID NO: 259 | 4404 |
| CII2238 | FR | PRT | WO2016201388; SEQ ID NO: 239 | 4405 |
| CII2239 | FR | PRT | WO2016201388; SEQ ID NO: 95 | 4406 |
| CII2240 | FR | PRT | W02016201389; SEQ ID NO: 267 | 4407 |
| CII2241 | FR | PRT | W02016201389; SEQ ID NO: 263 | 4408 |
| CII2242 | FR | PRT | WO2016201388; SEQ ID NO: 94 | 4409 |
| CII2243 | FR | PRT | WO2016201388; SEQ ID NO: 93 | 4410 |
| CII2244 | FR | PRT | WO2016201388; SEQ ID NO: 92 | 4411 |
| CII2245 | FR | PRT | W02016201389; SEQ ID NO: 258 | 4412 |
| CII2246 | FR | PRT | WO2016201388; SEQ ID NO: 238 | 4413 |
| CII2247 | FR | PRT | WO2019028283; SEQ ID NO: 164 | 4414 |
| CII2248 | FR | PRT | W02016201389; SEQ ID NO: 248 | 4415 |
| CII2249 | FR | PRT | W02016201389; SEQ ID NO: 250 | 4416 |
| CII2250 | FR | PRT | W02016201389; SEQ ID NO: 251 | 4417 |
| CII2251 | FR | PRT | WO2016201388; SEQ ID NO: 237 | 4418 |
| CII2252 | FR | PRT | WO2016201388; SEQ ID NO: 91 | 4419 |
| CII2253 | FR | PRT | WO2016201388; SEQ ID NO: 87 | 4420 |
| CII2254 | FR | PRT | WO2016201388; SEQ ID NO: 88 | 4421 |
| CII2255 | FR | PRT | W02016201389; SEQ ID NO: 255 | 4422 |
| CII2256 | FR | PRT | W02016201389; SEQ ID NO: 257 | 4423 |
| CII2257 | FR | PRT | W02016201389; SEQ ID NO: 249 | 4424 |
| CII2258 | FR | PRT | WO2016201388; SEQ ID NO: 90 | 4425 |
| CII2259 | FR | PRT | W02016201389; SEQ ID NO: 254 | 4426 |
| CII2260 | FR | PRT | W02016201389; SEQ ID NO: 252 | 4427 |
| CII2261 | FR | PRT | W02016201389; SEQ ID NO: 253 | 4428 |
| CII2262 | FR | PRT | W02016201389; SEQ ID NO: 256 | 4429 |
| CII2263 | FR | PRT | WO2016201388; SEQ ID NO: 89 | 4430 |
| CII2264 | FR | PRT | WO2016201388; SEQ ID NO: 99 | 4431 |
| CII2265 | FR | PRT | WO2016201388; SEQ ID NO: 104 | 4432 |
| CII2266 | FR | PRT | W02016201389; SEQ ID NO: 262 | 4433 |
| CII2267 | FR | PRT | WO2016201388; SEQ ID NO: 235 | 4434 |
| CII2268 | FR | PRT | W02016201389; SEQ ID NO: 266 | 4435 |
| CII2269 | FR | PRT | W02016201389; SEQ ID NO: 265 | 4436 |
| CII2270 | FR | PRT | WO2016201388; SEQ ID NO: 98 | 4437 |
| CII2271 | FR | PRT | WO2016201388; SEQ ID NO: 97 | 4438 |
| CII2272 | FR | PRT | W02016201389; SEQ ID NO: 264 | 4439 |
| CII2273 | FR | PRT | W02016201389; SEQ ID NO: 261 | 4440 |
| CII2274 | FR | PRT | W02016201389; SEQ ID NO: 260 | 4441 |
| CII2275 | FR | PRT | W02016201389; SEQ ID NO: 277 | 4442 |
| CII2276 | FR | PRT | W02016201389; SEQ ID NO: 273 | 4443 |
| CII2277 | FR | PRT | W02016201389; SEQ ID NO: 276 | 4444 |
| CII2278 | FR | PRT | W02016201389; SEQ ID NO: 274 | 4445 |
| CII2279 | FR | PRT | W02016201389; SEQ ID NO: 275 | 4446 |
| CII2280 | FR | PRT | W02016201389; SEQ ID NO: 278 | 4447 |
| CII2281 | FR | PRT | WO2016201388; SEQ ID NO: 82 | 4448 |
| CII2282 | FR | PRT | W02016201389; SEQ ID NO: 284 | 4449 |
| CII2283 | FR | PRT | WO2016201388; SEQ ID NO: 110 | 4450 |
| CII2284 | FR | PRT | W02016201389; SEQ ID NO: 282 | 4451 |
| CII2285 | FR | PRT | WO2016201388; SEQ ID NO: 109 | 4452 |
| CII2286 | FR | PRT | W02016201389; SEQ ID NO: 279 | 4453 |
| CII2287 | FR | PRT | W02016201389; SEQ ID NO: 283 | 4454 |
| CII2288 | FR | PRT | WO2016201388; SEQ ID NO: 111 | 4455 |
| CII2289 | FR | PRT | WO2016201388; SEQ ID NO: 108 | 4456 |
| CII2290 | FR | PRT | W02016201389; SEQ ID NO: 281 | 4457 |
| CII2291 | FR | PRT | W02016201389; SEQ ID NO: 280 | 4458 |
| CII2292 | FR | PRT | W02016201389; SEQ ID NO: 272 | 4459 |
| CII2293 | FR | PRT | W02016201389; SEQ ID NO: 270 | 4460 |
| CII2294 | FR | PRT | WO2016201388; SEQ ID NO: 86 | 4461 |
| CII2295 | FR | PRT | WO2016201388; SEQ ID NO: 84 | 4462 |
| CII2296 | FR | PRT | WO2016201388; SEQ ID NO: 100 | 4463 |
| CII2297 | FR | PRT | WO2016201388; SEQ ID NO: 102 | 4464 |
| CII2298 | FR | PRT | W02016201389; SEQ ID NO: 271 | 4465 |
| CII2299 | FR | PRT | W02016201389; SEQ ID NO: 268 | 4466 |
| CII2300 | FR | PRT | W02016201389; SEQ ID NO: 269 | 4467 |
| CII2301 | FR | PRT | WO2016201388; SEQ ID NO: 103 | 4468 |
| CII2302 | FR | PRT | WO2016201388; SEQ ID NO: 101 | 4469 |
| CII2303 | FR | PRT | W02016201389; SEQ ID NO: 247 | 4470 |
| CII2304 | FR | PRT | W02016201389; SEQ ID NO: 246 | 4471 |
| CII2305 | FR | PRT | W02016201389; SEQ ID NO: 244 | 4472 |
| CII2306 | FR | PRT | WO2016201388; SEQ ID NO: 85 | 4473 |
| CII2307 | FR | PRT | WO2016201388; SEQ ID NO: 83 | 4474 |
| CII2308 | FR | PRT | W02016201389; SEQ ID NO: 245 | 4475 |
| CII2309 | FR | PRT | WO2016201388; SEQ ID NO: 236 | 4476 |
| CII2310 | FR | PRT | WO2016201388; SEQ ID NO: 78 | 4477 |
| CII2311 | FR | PRT | WO2018213316; SEQ ID NO: 59 | 4478 |
| CII2312 | FR | PRT | WO2018213316; SEQ ID NO: 60 | 4479 |
| CII2313 | FR | PRT | WO2018213316; SEQ ID NO: 56 | 4480 |
| CII2314 | FR | PRT | WO2018213316; SEQ ID NO: 57 | 4481 |
| CII2315 | FR | PRT | WO2018213316; SEQ ID NO: 61 | 4482 |
| CII2316 | FR | PRT | WO2018213316; SEQ ID NO: 58 | 4483 |
| CII2317 | FR | PRT | WO2018213316; SEQ ID NO: 78 | 4484 |
| CII2318 | FR | PRT | WO2018213316; SEQ ID NO: 83 | 4485 |
| CII2319 | FR | PRT | WO2018213316; SEQ ID NO: 77 | 4486 |
| CII2320 | FR | PRT | WO2018213316; SEQ ID NO: 76 | 4487 |
| CII2321 | FR | PRT | WO2018213316; SEQ ID NO: 74 | 4488 |
| CII2322 | FR | PRT | WO2018213316; SEQ ID NO: 75 | 4489 |
| CII2323 | FR | PRT | WO2018213316; SEQ ID NO: 73 | 4490 |
| CII2324 | FR | PRT | WO2018213316; SEQ ID NO: 68 | 4491 |
| CII2325 | FR | PRT | WO2018213316; SEQ ID NO: 72 | 4492 |
| CII2326 | FR | PRT | WO2018213316; SEQ ID NO: 71 | 4493 |
| CII2327 | FR | PRT | WO2018213316; SEQ ID NO: 70 | 4494 |
| CII2328 | FR | PRT | WO2018213316; SEQ ID NO: 69 | 4495 |
| CII2329 | FR | PRT | WO2018213316; SEQ ID NO: 95 | 4496 |
| CII2330 | FR | PRT | WO2018213316; SEQ ID NO: 94 | 4497 |
| CII2331 | FR | PRT | WO2018213316; SEQ ID NO: 99 | 4498 |
| CII2332 | FR | PRT | WO2018213316; SEQ ID NO: 93 | 4499 |
| CII2333 | FR | PRT | WO2018213316; SEQ ID NO: 96 | 4500 |
| CII2334 | FR | PRT | WO2018213316; SEQ ID NO: 88 | 4501 |
| CII2335 | FR | PRT | WO2018213316; SEQ ID NO: 92 | 4502 |
| CII2336 | FR | PRT | WO2018213316; SEQ ID NO: 89 | 4503 |
| CII2337 | FR | PRT | WO2018213316; SEQ ID NO: 91 | 4504 |
| CII2338 | FR | PRT | WO2018213316; SEQ ID NO: 98 | 4505 |
| CII2339 | FR | PRT | WO2018213316; SEQ ID NO: 90 | 4506 |
| CII2340 | FR | PRT | WO2018213316; SEQ ID NO: 55 | 4507 |
| CII2341 | FR | PRT | WO2018213316; SEQ ID NO: 79 | 4508 |
| CII2342 | FR | PRT | WO2018213316; SEQ ID NO: 80 | 4509 |
| CII2343 | FR | PRT | WO2018213316; SEQ ID NO: 82 | 4510 |
| CII2344 | FR | PRT | WO2018213316; SEQ ID NO: 81 | 4511 |
| CII2345 | FR | PRT | WO2018213316; SEQ ID NO: 97 | 4512 |
| CII2346 | FR | PRT | WO2018213316; SEQ ID NO: 100 | 4513 |
| CII2347 | FR | PRT | WO2018213316; SEQ ID NO: 101 | 4514 |
| CII2348 | FR | PRT | WO2018213316; SEQ ID NO: 102 | 4515 |
| CII2349 | FR | PRT | WO2018213316; SEQ ID NO: 103 | 4516 |
| CII2350 | FR | PRT | WO2018213316; SEQ ID NO: 87 | 4517 |
| CII2351 | FR | PRT | WO2018213316; SEQ ID NO: 86 | 4518 |
| CII2352 | FR | PRT | WO2018213316; SEQ ID NO: 85 | 4519 |
| CII2353 | FR | PRT | WO2018213316; SEQ ID NO: 84 | 4520 |
| CII2354 | FR | PRT | WO2018213316; SEQ ID NO: 62 | 4521 |
| CII2355 | FR | PRT | WO2018213316; SEQ ID NO: 65 | 4522 |
| CII2356 | FR | PRT | WO2018213316; SEQ ID NO: 63 | 4523 |
| CII2357 | FR | PRT | WO2018213316; SEQ ID NO: 64 | 4524 |
| CII2358 | FR | PRT | WO2018213316; SEQ ID NO: 66 | 4525 |
| CII2359 | FR | PRT | WO2018213316; SEQ ID NO: 67 | 4526 |
| CII2360 | FR | PRT | WO2017040301; SEQ ID NO: 165 | 4527 |
| CII2361 | FR | PRT | WO2017040301; SEQ ID NO: 97 | 4528 |
| CII2362 | FR | PRT | WO2017040301; SEQ ID NO: 86 | 4529 |
| CII2363 | FR | PRT | WO2017040301; SEQ ID NO: 88 | 4530 |
| CII2364 | FR | PRT | WO2017040301; SEQ ID NO: 94 | 4531 |
| CII2365 | FR | PRT | WO2017040301; SEQ ID NO: 93 | 4532 |
| CII2366 | FR | PRT | WO2017040301; SEQ ID NO: 175 | 4533 |
| CII2367 | FR | PRT | WO2017040301; SEQ ID NO: 170 | 4534 |
| CII2368 | FR | PRT | WO2017040301; SEQ ID NO: 171 | 4535 |
| CII2369 | FR | PRT | WO2017040301; SEQ ID NO: 95 | 4536 |
| CII2370 | FR | PRT | WO2017040301; SEQ ID NO: 90 | 4537 |
| CII2371 | FR | PRT | WO2017040301; SEQ ID NO: 85 | 4538 |
| CII2372 | FR | PRT | WO2017040301; SEQ ID NO: 89 | 4539 |
| CII2373 | FR | PRT | WO2017040301; SEQ ID NO: 163 | 4540 |
| CII2374 | FR | PRT | WO2017040301; SEQ ID NO: 166 | 4541 |
| CII2375 | FR | PRT | WO2017040301; SEQ ID NO: 168 | 4542 |
| CII2376 | FR | PRT | WO2017040301; SEQ ID NO: 173 | 4543 |
| CII2377 | FR | PRT | WO2017040301; SEQ ID NO: 169 | 4544 |
| CII2378 | FR | PRT | WO2017040301; SEQ ID NO: 167 | 4545 |
| CII2379 | FR | PRT | WO2017040301; SEQ ID NO: 144 | 4546 |
| CII2380 | FR | PRT | WO2017040301; SEQ ID NO: 149 | 4547 |
| CII2381 | FR | PRT | WO2017040301; SEQ ID NO: 139 | 4548 |
| CII2382 | FR | PRT | WO2017040301; SEQ ID NO: 131 | 4549 |
| CII2383 | FR | PRT | WO2017040301; SEQ ID NO: 124 | 4550 |
| CII2384 | FR | PRT | WO2017040301; SEQ ID NO: 128 | 4551 |
| CII2385 | FR | PRT | WO2017040301; SEQ ID NO: 129 | 4552 |
| CII2386 | FR | PRT | WO2017040301; SEQ ID NO: 130 | 4553 |
| CII2387 | FR | PRT | WO2017040301; SEQ ID NO: 132 | 4554 |
| CII2388 | FR | PRT | WO2017040301; SEQ ID NO: 133 | 4555 |
| CII2389 | FR | PRT | WO2017040301; SEQ ID NO: 134 | 4556 |
| CII2390 | FR | PRT | WO2017040301; SEQ ID NO: 135 | 4557 |
| CII2391 | FR | PRT | WO2017040301; SEQ ID NO: 136 | 4558 |
| CII2392 | FR | PRT | WO2017040301; SEQ ID NO: 126 | 4559 |
| CII2393 | FR | PRT | WO2017040301; SEQ ID NO: 125 | 4560 |
| CII2394 | FR | PRT | WO2017040301; SEQ ID NO: 127 | 4561 |
| CII2395 | FR | PRT | WO2017040301; SEQ ID NO: 114 | 4562 |
| CII2396 | FR | PRT | WO2017040301; SEQ ID NO: 104 | 4563 |
| CII2397 | FR | PRT | WO2017040301; SEQ ID NO: 123 | 4564 |
| CII2398 | FR | PRT | WO2017040301; SEQ ID NO: 119 | 4565 |
| CII2399 | FR | PRT | WO2017040301; SEQ ID NO: 112 | 4566 |
| CII2400 | FR | PRT | WO2017040301; SEQ ID NO: 174 | 4567 |
| CII2401 | FR | PRT | WO2017040301; SEQ ID NO: 111 | 4568 |
| CII2402 | FR | PRT | WO2017040301; SEQ ID NO: 115 | 4569 |
| CII2403 | FR | PRT | WO2017040301; SEQ ID NO: 121 | 4570 |
| CII2404 | FR | PRT | WO2017040301; SEQ ID NO: 116 | 4571 |
| CII2405 | FR | PRT | WO2017040301; SEQ ID NO: 113 | 4572 |
| CII2406 | FR | PRT | WO2017040301; SEQ ID NO: 118 | 4573 |
| CII2407 | FR | PRT | WO2017040301; SEQ ID NO: 120 | 4574 |
| CII2408 | FR | PRT | WO2017040301; SEQ ID NO: 117 | 4575 |
| CII2409 | FR | PRT | WO2017040301; SEQ ID NO: 122 | 4576 |
| CII2410 | FR | PRT | WO2017040301; SEQ ID NO: 92 | 4577 |
| CII2411 | FR | PRT | WO2017040301; SEQ ID NO: 145 | 4578 |
| CII2412 | FR | PRT | WO2017040301; SEQ ID NO: 91 | 4579 |
| CII2413 | FR | PRT | WO2017040301; SEQ ID NO: 164 | 4580 |
| CII2414 | FR | PRT | WO2017040301; SEQ ID NO: 146 | 4581 |
| CII2415 | FR | PRT | WO2017040301; SEQ ID NO: 141 | 4582 |
| CII2416 | FR | PRT | WO2017040301; SEQ ID NO: 143 | 4583 |
| CII2417 | FR | PRT | WO2017040301; SEQ ID NO: 138 | 4584 |
| CII2418 | FR | PRT | WO2017040301; SEQ ID NO: 148 | 4585 |
| CII2419 | FR | PRT | WO2017040301; SEQ ID NO: 137 | 4586 |
| CII2420 | FR | PRT | WO2017040301; SEQ ID NO: 140 | 4587 |
| CII2421 | FR | PRT | WO2017040301; SEQ ID NO: 142 | 4588 |
| CII2422 | FR | PRT | WO2017040301; SEQ ID NO: 147 | 4589 |
| CII2423 | FR | PRT | WO2017040301; SEQ ID NO: 162 | 4590 |
| CII2424 | FR | PRT | WO2017040301; SEQ ID NO: 172 | 4591 |
| CII2425 | FR | PRT | WO2017040301; SEQ ID NO: 87 | 4592 |
| CII2426 | FR | PRT | WO2017040301; SEQ ID NO: 178 | 4593 |
| CII2427 | FR | PRT | WO2017040301; SEQ ID NO: 183 | 4594 |
| CII2428 | FR | PRT | WO2017040301; SEQ ID NO: 184 | 4595 |
| CII2429 | FR | PRT | WO2017040301; SEQ ID NO: 188 | 4596 |
| CII2430 | FR | PRT | WO2017040301; SEQ ID NO: 180 | 4597 |
| CII2431 | FR | PRT | WO2017040301; SEQ ID NO: 176 | 4598 |
| CII2432 | FR | PRT | WO2017040301; SEQ ID NO: 177 | 4599 |
| CII2433 | FR | PRT | WO2017040301; SEQ ID NO: 179 | 4600 |
| CII2434 | FR | PRT | WO2017040301; SEQ ID NO: 181 | 4601 |
| CII2435 | FR | PRT | WO2017040301; SEQ ID NO: 185 | 4602 |
| CII2436 | FR | PRT | WO2017040301; SEQ ID NO: 186 | 4603 |
| CII2437 | FR | PRT | WO2017040301; SEQ ID NO: 182 | 4604 |
| CII2438 | FR | PRT | WO2017040301; SEQ ID NO: 187 | 4605 |
| CII2439 | FR | PRT | WO2017040301; SEQ ID NO: 151 | 4606 |
| CII2440 | FR | PRT | WO2017040301; SEQ ID NO: 156 | 4607 |
| CII2441 | FR | PRT | WO2017040301; SEQ ID NO: 154 | 4608 |
| CII2442 | FR | PRT | WO2017040301; SEQ ID NO: 159 | 4609 |
| CII2443 | FR | PRT | WO2017040301; SEQ ID NO: 150 | 4610 |
| CII2444 | FR | PRT | WO2017040301; SEQ ID NO: 153 | 4611 |
| CII2445 | FR | PRT | WO2017040301; SEQ ID NO: 155 | 4612 |
| CII2446 | FR | PRT | WO2017040301; SEQ ID NO: 160 | 4613 |
| CII2447 | FR | PRT | WO2017040301; SEQ ID NO: 152 | 4614 |
| CII2448 | FR | PRT | WO2017040301; SEQ ID NO: 157 | 4615 |
| CII2449 | FR | PRT | WO2017040301; SEQ ID NO: 161 | 4616 |
| CII2450 | FR | PRT | WO2017040301; SEQ ID NO: 158 | 4617 |
| CII2451 | FR | PRT | WO2017040301; SEQ ID NO: 109 | 4618 |
| CII2452 | FR | PRT | WO2017040301; SEQ ID NO: 106 | 4619 |
| CII2453 | FR | PRT | WO2017040301; SEQ ID NO: 102 | 4620 |
| CII2454 | FR | PRT | WO2017040301; SEQ ID NO: 103 | 4621 |
| CII2455 | FR | PRT | WO2017040301; SEQ ID NO: 108 | 4622 |
| CII2456 | FR | PRT | WO2017040301; SEQ ID NO: 98 | 4623 |
| CII2457 | FR | PRT | WO2017040301; SEQ ID NO: 99 | 4624 |
| CII2458 | FR | PRT | WO2017040301; SEQ ID NO: 107 | 4625 |
| CII2459 | FR | PRT | WO2017040301; SEQ ID NO: 101 | 4626 |
| CII2460 | FR | PRT | WO2017040301; SEQ ID NO: 100 | 4627 |
| CII2461 | FR | PRT | WO2017040301; SEQ ID NO: 105 | 4628 |
| CII2462 | FR | PRT | WO2017040301; SEQ ID NO: 110 | 4629 |
| CII2463 | FR | PRT | WO2017040301; SEQ ID NO: 96 | 4630 |
| CII2464 | FR | PRT | WO2017075432; SEQ ID NO: 171 | 4631 |
| CII2465 | FR | PRT | WO2017075432; SEQ ID NO: 33 | 4632 |
| CII2466 | FR | PRT | WO2017075432; SEQ ID NO: 30 | 4633 |
| CII2467 | FR | PRT | WO2017075432; SEQ ID NO: 185 | 4634 |
| CII2468 | FR | PRT | WO2017075432; SEQ ID NO: 54 | 4635 |
| CII2469 | FR | PRT | WO2017075432; SEQ ID NO: 184 | 4636 |
| CII2470 | FR | PRT | WO2017075432; SEQ ID NO: 31 | 4637 |
| CII2471 | FR | PRT | WO2017075432; SEQ ID NO: 56 | 4638 |
| CII2472 | FR | PRT | WO2017075432; SEQ ID NO: 47 | 4639 |
| CII2473 | FR | PRT | WO2017075432; SEQ ID NO: 190 | 4640 |
| CII2474 | FR | PRT | WO2017075432; SEQ ID NO: 191 | 4641 |
| CII2475 | FR | PRT | WO2017075432; SEQ ID NO: 45 | 4642 |
| CII2476 | FR | PRT | WO2017075432; SEQ ID NO: 44 | 4643 |
| CII2477 | FR | PRT | WO2017075432; SEQ ID NO: 46 | 4644 |
| CII2478 | FR | PRT | WO2017075432; SEQ ID NO: 42 | 4645 |
| CII2479 | FR | PRT | WO2017075432; SEQ ID NO: 189 | 4646 |
| CII2480 | FR | PRT | WO2017075432; SEQ ID NO: 55 | 4647 |
| CII2481 | FR | PRT | WO2017075432; SEQ ID NO: 38 | 4648 |
| CII2482 | FR | PRT | WO2017075432; SEQ ID NO: 188 | 4649 |
| CII2483 | FR | PRT | WO2017075432; SEQ ID NO: 43 | 4650 |
| CII2484 | FR | PRT | WO2017075432; SEQ ID NO: 41 | 4651 |
| CII2485 | FR | PRT | WO2017075432; SEQ ID NO: 40 | 4652 |
| CII2486 | FR | PRT | WO2017075432; SEQ ID NO: 39 | 4653 |
| CII2487 | FR | PRT | WO2017075432; SEQ ID NO: 32 | 4654 |
| CII2488 | FR | PRT | WO2017075432; SEQ ID NO: 34 | 4655 |
| CII2489 | FR | PRT | WO2017075432; SEQ ID NO: 57 | 4656 |
| CII2490 | FR | PRT | WO2017075432; SEQ ID NO: 49 | 4657 |
| CII2491 | FR | PRT | WO2017075432; SEQ ID NO: 48 | 4658 |
| CII2492 | FR | PRT | WO2017075432; SEQ ID NO: 50 | 4659 |
| CII2493 | FR | PRT | WO2017075432; SEQ ID NO: 59 | 4660 |
| CII2494 | FR | PRT | WO2017075432; SEQ ID NO: 196 | 4661 |
| CII2495 | FR | PRT | WO2017075432; SEQ ID NO: 58 | 4662 |
| CII2496 | FR | PRT | WO2017075432; SEQ ID NO: 60 | 4663 |
| CII2497 | FR | PRT | WO2017075432; SEQ ID NO: 37 | 4664 |
| CII2498 | FR | PRT | WO2017075432; SEQ ID NO: 36 | 4665 |
| CII2499 | FR | PRT | WO2017075432; SEQ ID NO: 35 | 4666 |
| CII2500 | FR | PRT | WO2017075432; SEQ ID NO: 52 | 4667 |
| CII2501 | FR | PRT | WO2017075432; SEQ ID NO: 53 | 4668 |
| CII2502 | FR | PRT | WO2017075432; SEQ ID NO: 192 | 4669 |
| CII2503 | FR | PRT | WO2017075432; SEQ ID NO: 193 | 4670 |
| CII2504 | FR | PRT | WO2017075432; SEQ ID NO: 51 | 4671 |
| CII2505 | FR | PRT | WO2017075432; SEQ ID NO: 186 | 4672 |
| CII2506 | FR | PRT | WO2017075432; SEQ ID NO: 187 | 4673 |
| CII2507 | FR | PRT | WO2017075432; SEQ ID NO: 194 | 4674 |
| CII2508 | FR | PRT | WO2017075432; SEQ ID NO: 195 | 4675 |
| CII2509 | FR | PRT | WO2018107058; SEQ ID NO: 22 | 4676 |
| CII2510 | FR | PRT | WO2018107058; SEQ ID NO: 26 | 4677 |
| CII2511 | FR | PRT | WO2018107058; SEQ ID NO: 18 | 4678 |
| CII2512 | FR | PRT | WO2018107058; SEQ ID NO: 25 | 4679 |
| CII2513 | FR | PRT | WO2018107058; SEQ ID NO: 33 | 4680 |
| CII2514 | FR | PRT | WO2018107058; SEQ ID NO: 24 | 4681 |
| CII2515 | FR | PRT | WO2018107058; SEQ ID NO: 32 | 4682 |
| CII2516 | FR | PRT | WO2018107058; SEQ ID NO: 30 | 4683 |
| CII2517 | FR | PRT | WO2018107058; SEQ ID NO: 21 | 4684 |
| CII2518 | FR | PRT | WO2018107058; SEQ ID NO: 29 | 4685 |
| CII2519 | FR | PRT | WO2018107058; SEQ ID NO: 27 | 4686 |
| CII2520 | FR | PRT | WO2018107058; SEQ ID NO: 19 | 4687 |
| CII2521 | FR | PRT | WO2018107058; SEQ ID NO: 23 | 4688 |
| CII2522 | FR | PRT | WO2018107058; SEQ ID NO: 31 | 4689 |
| CII2523 | FR | PRT | WO2018107058; SEQ ID NO: 28 | 4690 |
| CII2524 | FR | PRT | WO2018107058; SEQ ID NO: 20 | 4691 |
| CII2525 | FR | PRT | WO2016164637; SEQ ID NO: 268 | 4692 |
| CII2526 | FR | PRT | US20190085084; SEQ ID NO: 258 | 4693 |
| CII2527 | FR | PRT | WO2016164637; SEQ ID NO: 258 | 4694 |
| CII2528 | FR | PRT | US20190085084; SEQ ID NO: 263 | 4695 |
| CII2529 | FR | PRT | WO2016164637; SEQ ID NO: 263 | 4696 |
| CII2530 | FR | PRT | US20190085084; SEQ ID NO: 259 | 4697 |
| CII2531 | FR | PRT | WO2016164637; SEQ ID NO: 259 | 4698 |
| CII2532 | FR | PRT | US20190085084; SEQ ID NO: 267 | 4699 |
| CII2533 | FR | PRT | WO2016164637; SEQ ID NO: 267 | 4700 |
| CII2534 | FR | PRT | US20190085084; SEQ ID NO: 261 | 4701 |
| CII2535 | FR | PRT | WO2016164637; SEQ ID NO: 261 | 4702 |
| CII2536 | FR | PRT | US20190085084; SEQ ID NO: 264 | 4703 |
| CII2537 | FR | PRT | WO2016164637; SEQ ID NO: 264 | 4704 |
| CII2538 | FR | PRT | US20190085084; SEQ ID NO: 262 | 4705 |
| CII2539 | FR | PRT | WO2016164637; SEQ ID NO: 262 | 4706 |
| CII2540 | FR | PRT | US20190085084; SEQ ID NO: 257 | 4707 |
| CII2541 | FR | PRT | WO2016164637; SEQ ID NO: 257 | 4708 |
| CII2542 | FR | PRT | US20190085084; SEQ ID NO: 266 | 4709 |
| CII2543 | FR | PRT | WO2016164637; SEQ ID NO: 266 | 4710 |
| CII2544 | FR | PRT | US20190085084; SEQ ID NO: 260 | 4711 |
| CII2545 | FR | PRT | WO2016164637; SEQ ID NO: 260 | 4712 |
| CII2546 | FR | PRT | US20190085084; SEQ ID NO: 265 | 4713 |
| CII2547 | FR | PRT | WO2016164637; SEQ ID NO: 265 | 4714 |
| CII2548 | FR | PRT | US20190085084; SEQ ID NO: 289 | 4715 |
| CII2549 | FR | PRT | WO2016164637; SEQ ID NO: 289 | 4716 |
| CII2550 | FR | PRT | US20190085084; SEQ ID NO: 288 | 4717 |
| CII2551 | FR | PRT | WO2016164637; SEQ ID NO: 288 | 4718 |
| CII2552 | FR | PRT | US20190085084; SEQ ID NO: 287 | 4719 |
| CII2553 | FR | PRT | WO2016164637; SEQ ID NO: 287 | 4720 |
| CII2554 | FR | PRT | US20190085084; SEQ ID NO: 295 | 4721 |
| CII2555 | FR | PRT | WO2016164637; SEQ ID NO: 295 | 4722 |
| CII2556 | FR | PRT | US20190085084; SEQ ID NO: 283 | 4723 |
| CII2557 | FR | PRT | WO2016164637; SEQ ID NO: 283 | 4724 |
| CII2558 | FR | PRT | US20190085084; SEQ ID NO: 31 | 4725 |
| CII2559 | FR | PRT | US20190085084; SEQ ID NO: 281 | 4726 |
| CII2560 | FR | PRT | WO2016164637; SEQ ID NO: 281 | 4727 |
| CII2561 | FR | PRT | US20190085084; SEQ ID NO: 279 | 4728 |
| CII2562 | FR | PRT | WO2016164637; SEQ ID NO: 279 | 4729 |
| CII2563 | FR | PRT | US20190085084; SEQ ID NO: 276 | 4730 |
| CII2564 | FR | PRT | WO2016164637; SEQ ID NO: 276 | 4731 |
| CII2565 | FR | PRT | US20190085084; SEQ ID NO: 280 | 4732 |
| CII2566 | FR | PRT | WO2016164637; SEQ ID NO: 280 | 4733 |
| CII2567 | FR | PRT | US20190085084; SEQ ID NO: 282 | 4734 |
| CII2568 | FR | PRT | WO2016164637; SEQ ID NO: 282 | 4735 |
| CII2569 | FR | PRT | US20190085084; SEQ ID NO: 277 | 4736 |
| CII2570 | FR | PRT | WO2016164637; SEQ ID NO: 277 | 4737 |
| CII2571 | FR | PRT | US20190085084; SEQ ID NO: 278 | 4738 |
| CII2572 | FR | PRT | WO2016164637; SEQ ID NO: 278 | 4739 |
| CII2573 | FR | PRT | US20190085084; SEQ ID NO: 294 | 4740 |
| CII2574 | FR | PRT | WO2016164637; SEQ ID NO: 294 | 4741 |
| CII2575 | FR | PRT | US20190085084; SEQ ID NO: 291 | 4742 |
| CII2576 | FR | PRT | WO2016164637; SEQ ID NO: 291 | 4743 |
| CII2577 | FR | PRT | US20190085084; SEQ ID NO: 292 | 4744 |
| CII2578 | FR | PRT | WO2016164637; SEQ ID NO: 292 | 4745 |
| CII2579 | FR | PRT | US20190085084; SEQ ID NO: 290 | 4746 |
| CII2580 | FR | PRT | WO2016164637; SEQ ID NO: 290 | 4747 |
| CII2581 | FR | PRT | US20190085084; SEQ ID NO: 284 | 4748 |
| CII2582 | FR | PRT | WO2016164637; SEQ ID NO: 284 | 4749 |
| CII2583 | FR | PRT | US20190085084; SEQ ID NO: 285 | 4750 |
| CII2584 | FR | PRT | WO2016164637; SEQ ID NO: 285 | 4751 |
| CII2585 | FR | PRT | US20190085084; SEQ ID NO: 310 | 4752 |
| CII2586 | FR | PRT | WO2016164637; SEQ ID NO: 310 | 4753 |
| CII2587 | FR | PRT | US20190085084; SEQ ID NO: 307 | 4754 |
| CII2588 | FR | PRT | WO2016164637; SEQ ID NO: 307 | 4755 |
| CII2589 | FR | PRT | US20190085084; SEQ ID NO: 306 | 4756 |
| CII2590 | FR | PRT | WO2016164637; SEQ ID NO: 306 | 4757 |
| CII2591 | FR | PRT | US20190085084; SEQ ID NO: 308 | 4758 |
| CII2592 | FR | PRT | WO2016164637; SEQ ID NO: 308 | 4759 |
| CII2593 | FR | PRT | US20190085084; SEQ ID NO: 309 | 4760 |
| CII2594 | FR | PRT | WO2016164637; SEQ ID NO: 309 | 4761 |
| CII2595 | FR | PRT | US20199085084; SEQ ID NO: 305 | 4762 |
| CII2596 | FR | PRT | WO2016164637; SEQ ID NO: 305 | 4763 |
| CII2597 | FR | PRT | US20190085084; SEQ ID NO: 302 | 4764 |
| CII2598 | FR | PRT | WO2016164637; SEQ ID NO: 302 | 4765 |
| CII2599 | FR | PRT | US20190085084; SEQ ID NO: 304 | 4766 |
| CII2600 | FR | PRT | WO2016164637; SEQ ID NO: 304 | 4767 |
| CII2601 | FR | PRT | US20190085084; SEQ ID NO: 303 | 4768 |
| CII2602 | FR | PRT | WO2016164637; SEQ ID NO: 303 | 4769 |
| CII2603 | FR | PRT | US29190085084; SEQ ID NO: 315 | 4770 |
| CII2604 | FR | PRT | WO2016164637; SEQ ID NO: 315 | 4771 |
| CII2605 | FR | PRT | US20190085084; SEQ ID NO: 312 | 4772 |
| CII2606 | FR | PRT | WO2016164637; SEQ ID NO: 312 | 4773 |
| CII2607 | FR | PRT | US20190085084; SEQ ID NO: 313 | 4774 |
| CII2608 | FR | PRT | WO2016164637; SEQ ID NO: 313 | 4775 |
| CII2609 | FR | PRT | US29190085084; SEQ ID NO: 311 | 4776 |
| CII2610 | FR | PRT | WO2016164637; SEQ ID NO: 311 | 4777 |
| CII2611 | FR | PRT | US20190085084; SEQ ID NO: 314 | 4778 |
| CII2612 | FR | PRT | WO2016164637; SEQ ID NO: 314 | 4779 |
| CII2613 | FR | PRT | US20190085084; SEQ ID NO: 300 | 4780 |
| CII2614 | FR | PRT | WO2016164637; SEQ ID NO: 300 | 4781 |
| CII2615 | FR | PRT | US20190085084; SEQ ID NO: 299 | 4782 |
| CII2616 | FR | PRT | WO2016164637; SEQ ID NO: 299 | 4783 |
| CII2617 | FR | PRT | US20190085084; SEQ ID NO: 297 | 4784 |
| CII2618 | FR | PRT | WO2016164637; SEQ ID NO: 297 | 4785 |
| CII2619 | FR | PRT | US20190085084; SEQ ID NO: 298 | 4786 |
| CII2620 | FR | PRT | WO2016164637; SEQ ID NO: 298 | 4787 |
| CII2621 | FR | PRT | US20190085084; SEQ ID NO: 296 | 4788 |
| CII2622 | FR | PRT | WO2016164637; SEQ ID NO: 296 | 4789 |
| CII2623 | FR | PRT | US20190085084; SEQ ID NO: 301 | 4790 |
| CII2624 | FR | PRT | WO2016164637; SEQ ID NO: 301 | 4791 |
| CII2625 | FR | PRT | WO2016164637; SEQ ID NO: 272 | 4792 |
| CII2626 | FR | PRT | US20190085084; SEQ ID NO: 271 | 4793 |
| CII2627 | FR | PRT | WO2016164637; SEQ ID NO: 271 | 4794 |
| CII2628 | FR | PRT | US20190085084; SEQ ID NO: 275 | 4795 |
| CII2629 | FR | PRT | WO2016164637; SEQ ID NO: 275 | 4796 |
| CII2630 | FR | PRT | US20190085084; SEQ ID NO: 274 | 4797 |
| CII2631 | FR | PRT | WO2016164637; SEQ ID NO: 274 | 4798 |
| CII2632 | FR | PRT | US20190085084; SEQ ID NO: 270 | 4799 |
| CII2633 | FR | PRT | WO2016164637; SEQ ID NO: 270 | 4800 |
| CII2634 | FR | PRT | US20190085084; SEQ ID NO: 269 | 4801 |
| CII2635 | FR | PRT | WO2016164637; SEQ ID NO: 269 | 4802 |
| CII2636 | FR | PRT | US20190085084; SEQ ID NO: 273 | 4803 |
| CII2637 | FR | PRT | WO2016164637; SEQ ID NO: 273 | 4804 |
| CII2638 | FR | PRT | WO2017062672; SEQ ID NO: 723 | 4805 |
| CII2639 | FR | PRT | WO2017062672; SEQ ID NO: 775 | 4806 |
| CII2640 | FR | PRT | WO2017062672; SEQ ID NO: 114 | 4807 |
| CII2641 | FR | PRT | WO2017062672; SEQ ID NO: 774 | 4808 |
| CII2642 | FR | PRT | WO2017062672; SEQ ID NO: 592 | 4809 |
| CII2643 | FR | PRT | WO2017062672; SEQ ID NO: 713 | 4810 |
| CII2644 | FR | PRT | WO2017062672; SEQ ID NO: 711 | 4811 |
| CII2645 | FR | PRT | WO2017062672; SEQ ID NO: 714 | 4812 |
| CII2646 | FR | PRT | WO2017062672; SEQ ID NO: 118 | 4813 |
| CII2647 | FR | PRT | WO2017062672; SEQ ID NO: 103 | 4814 |
| CII2648 | FR | PRT | WO2017062672; SEQ ID NO: 722 | 4815 |
| CII2649 | FR | PRT | WO2017062672; SEQ ID NO: 208 | 4816 |
| CII2650 | FR | PRT | WO2017062672; SEQ ID NO: 194 | 4817 |
| CII2651 | FR | PRT | WO2017062672; SEQ ID NO: 195 | 4818 |
| CII2652 | FR | PRT | WO2017062672; SEQ ID NO: 204 | 4819 |
| CII2653 | FR | PRT | WO2017062672; SEQ ID NO: 206 | 4820 |
| CII2654 | FR | PRT | WO2017062672; SEQ ID NO: 199 | 4821 |
| CII2655 | FR | PRT | WO2017062672; SEQ ID NO: 197 | 4822 |
| CII2656 | FR | PRT | WO2017062672; SEQ ID NO: 192 | 4823 |
| CII2657 | FR | PRT | WO2017062672; SEQ ID NO: 188 | 4824 |
| CII2658 | FR | PRT | WO2017062672; SEQ ID NO: 116 | 4825 |
| CII2659 | FR | PRT | WO2017062672; SEQ ID NO: 712 | 4826 |
| CII2660 | FR | PRT | WO2017062672; SEQ ID NO: 110 | 4827 |
| CII2661 | FR | PRT | WO2017062672; SEQ ID NO: 773 | 4828 |
| CII2662 | FR | PRT | WO2017062672; SEQ ID NO: 111 | 4829 |
| CII2663 | FR | PRT | WO2017062672; SEQ ID NO: 115 | 4830 |
| CII2664 | FR | PRT | WO2017062672; SEQ ID NO: 107 | 4831 |
| CII2665 | FR | PRT | WO2017062672; SEQ ID NO: 105 | 4832 |
| CII2666 | FR | PRT | WO2017062672; SEQ ID NO: 203 | 4833 |
| CII2667 | FR | PRT | WO2017062672; SEQ ID NO: 193 | 4834 |
| CII2668 | FR | PRT | WO2017062672; SEQ ID NO: 196 | 4835 |
| CII2669 | FR | PRT | WO2017062672; SEQ ID NO: 200 | 4836 |
| CII2670 | FR | PRT | WO2017062672; SEQ ID NO: 205 | 4837 |
| CII2671 | FR | PRT | WO2017062672; SEQ ID NO: 599 | 4838 |
| CII2672 | FR | PRT | WO2017062672; SEQ ID NO: 804 | 4839 |
| CII2673 | FR | PRT | WO2017062672; SEQ ID NO: 198 | 4840 |
| CII2674 | FR | PRT | WO2017062672; SEQ ID NO: 191 | 4841 |
| CII2675 | FR | PRT | WO2017062672; SEQ ID NO: 159 | 4842 |
| CII2676 | FR | PRT | WO2017062672; SEQ ID NO: 165 | 4843 |
| CII2677 | FR | PRT | WO2017062672; SEQ ID NO: 156 | 4844 |
| CII2678 | FR | PRT | WO2017062672; SEQ ID NO: 168 | 4845 |
| CII2679 | FR | PRT | WO2017062672; SEQ ID NO: 157 | 4846 |
| CII2680 | FR | PRT | WO2017062672; SEQ ID NO: 719 | 4847 |
| CII2681 | FR | PRT | WO2017062672; SEQ ID NO: 170 | 4848 |
| CII2682 | FR | PRT | WO2017062672; SEQ ID NO: 160 | 4849 |
| CII2683 | FR | PRT | WO2017062672; SEQ ID NO: 172 | 4850 |
| CII2684 | FR | PRT | WO2017062672; SEQ ID NO: 164 | 4851 |
| CII2685 | FR | PRT | WO2017062672; SEQ ID NO: 785 | 4852 |
| CII2686 | FR | PRT | WO2017062672; SEQ ID NO: 149 | 4853 |
| CII2687 | FR | PRT | WO2017062672; SEQ ID NO: 151 | 4854 |
| CII2688 | FR | PRT | WO2017062672; SEQ ID NO: 148 | 4855 |
| CII2689 | FR | PRT | WO2017062672; SEQ ID NO: 152 | 4856 |
| CII2690 | FR | PRT | WO2017062672; SEQ ID NO: 155 | 4857 |
| CII2691 | FR | PRT | WO2017062672; SEQ ID NO: 154 | 4858 |
| CII2692 | FR | PRT | WO2017062672; SEQ ID NO: 150 | 4859 |
| CII2693 | FR | PRT | WO2017062672; SEQ ID NO: 153 | 4860 |
| CII2694 | FR | PRT | WO2017062672; SEQ ID NO: 202 | 4861 |
| CII2695 | FR | PRT | WO2017062672; SEQ ID NO: 784 | 4862 |
| CII2696 | FR | PRT | WO2017062672; SEQ ID NO: 201 | 4863 |
| CII2697 | FR | PRT | WO2017062672; SEQ ID NO: 782 | 4864 |
| CII2698 | FR | PRT | WO2017062672; SEQ ID NO: 134 | 4865 |
| CII2699 | FR | PRT | WO2017062672; SEQ ID NO: 136 | 4866 |
| CII2700 | FR | PRT | WO2017062672; SEQ ID NO: 132 | 4867 |
| CII2701 | FR | PRT | WO2017062672; SEQ ID NO: 138 | 4868 |
| CII2702 | FR | PRT | WO2017062672; SEQ ID NO: 848 | 4869 |
| CII2703 | FR | PRT | WO2017062672; SEQ ID NO: 143 | 4870 |
| CII2704 | FR | PRT | WO2017062672; SEQ ID NO: 135 | 4871 |
| CII2705 | FR | PRT | WO2017062672; SEQ ID NO: 137 | 4872 |
| CII2706 | FR | PRT | WO2017062672; SEQ ID NO: 140 | 4873 |
| CII2707 | FR | PRT | WO2017062672; SEQ ID NO: 144 | 4874 |
| CII2708 | FR | PRT | WO2017062672; SEQ ID NO: 781 | 4875 |
| CII2709 | FR | PRT | WO2017062672; SEQ ID NO: 715 | 4876 |
| CII2710 | FR | PRT | WO2017062672; SEQ ID NO: 594 | 4877 |
| CII2711 | FR | PRT | WO2017062672; SEQ ID NO: 717 | 4878 |
| CII2712 | FR | PRT | WO2017062672; SEQ ID NO: 718 | 4879 |
| CII2713 | FR | PRT | WO2017062672; SEQ ID NO: 133 | 4880 |
| CII2714 | FR | PRT | WO2017062672; SEQ ID NO: 595 | 4881 |
| CII2715 | FR | PRT | WO2017062672; SEQ ID NO: 139 | 4882 |
| CII2716 | FR | PRT | WO2017062672; SEQ ID NO: 131 | 4883 |
| CII2717 | FR | PRT | WO2017062672; SEQ ID NO: 147 | 4884 |
| CII2718 | FR | PRT | WO2017062672; SEQ ID NO: 716 | 4885 |
| CII2719 | FR | PRT | WO2017062672; SEQ ID NO: 145 | 4886 |
| CII2720 | FR | PRT | WO2017062672; SEQ ID NO: 182 | 4887 |
| CII2721 | FR | PRT | WO2017062672; SEQ ID NO: 142 | 4888 |
| CII2722 | FR | PRT | WO2017062672; SEQ ID NO: 141 | 4889 |
| CII2723 | FR | PRT | WO2017062672; SEQ ID NO: 130 | 4890 |
| CII2724 | FR | PRT | WO2017062672; SEQ ID NO: 783 | 4891 |
| CII2725 | FR | PRT | WO2017062672; SEQ ID NO: 596 | 4892 |
| CII2726 | FR | PRT | WO2017062672; SEQ ID NO: 146 | 4893 |
| CII2727 | FR | PRT | WO2017062672; SEQ ID NO: 799 | 4894 |
| CII2728 | FR | PRT | WO2017062672; SEQ ID NO: 776 | 4895 |
| CII2729 | FR | PRT | WO2017062672; SEQ ID NO: 112 | 4896 |
| CII2730 | FR | PRT | WO2017062672; SEQ ID NO: 166 | 4897 |
| CII2731 | FR | PRT | WO2017062672; SEQ ID NO: 772 | 4898 |
| CII2732 | FR | PRT | WO2017062672; SEQ ID NO: 117 | 4899 |
| CII2733 | FR | PRT | WO2017062672; SEQ ID NO: 109 | 4900 |
| CII2734 | FR | PRT | WO2017062672; SEQ ID NO: 800 | 4901 |
| CII2735 | FR | PRT | WO2017062672; SEQ ID NO: 207 | 4902 |
| CII2736 | FR | PRT | WO2017062672; SEQ ID NO: 802 | 4903 |
| CII2737 | FR | PRT | WO2017062672; SEQ ID NO: 190 | 4904 |
| CII2738 | FR | PRT | WO2017062672; SEQ ID NO: 601 | 4905 |
| CII2739 | FR | PRT | WO2017062672; SEQ ID NO: 189 | 4906 |
| CII2740 | FR | PRT | WO2017062672; SEQ ID NO: 798 | 4907 |
| CII2741 | FR | PRT | WO2017062672; SEQ ID NO: 801 | 4908 |
| CII2742 | FR | PRT | WO2017062672; SEQ ID NO: 600 | 4909 |
| CII2743 | FR | PRT | WO2017062672; SEQ ID NO: 805 | 4910 |
| CII2744 | FR | PRT | WO2017062672; SEQ ID NO: 803 | 4911 |
| CII2745 | FR | PRT | WO2017062672; SEQ ID NO: 113 | 4912 |
| CII2746 | FR | PRT | WO2017062672; SEQ ID NO: 590 | 4913 |
| CII2747 | FR | PRT | WO2017062672; SEQ ID NO: 591 | 4914 |
| CII2748 | FR | PRT | WO2017062672; SEQ ID NO: 791 | 4915 |
| CII2749 | FR | PRT | WO2017062672; SEQ ID NO: 720 | 4916 |
| CII2750 | FR | PRT | WO2017062672; SEQ ID NO: 786 | 4917 |
| CII2751 | FR | PRT | WO2017062672; SEQ ID NO: 161 | 4918 |
| CII2752 | FR | PRT | WO2017062672; SEQ ID NO: 163 | 4919 |
| CII2753 | FR | PRT | WO2017062672; SEQ ID NO: 788 | 4920 |
| CII2754 | FR | PRT | WO2017062672; SEQ ID NO: 158 | 4921 |
| CII2755 | FR | PRT | WO2017062672; SEQ ID NO: 171 | 4922 |
| CII2756 | FR | PRT | WO2017062672; SEQ ID NO: 167 | 4923 |
| CII2757 | FR | PRT | WO2017062672; SEQ ID NO: 598 | 4924 |
| CII2758 | FR | PRT | WO2017062672; SEQ ID NO: 169 | 4925 |
| CII2759 | FR | PRT | WO2017062672; SEQ ID NO: 597 | 4926 |
| CII2760 | FR | PRT | WO2017062672; SEQ ID NO: 792 | 4927 |
| CII2761 | FR | PRT | WO2017062672; SEQ ID NO: 790 | 4928 |
| CII2762 | FR | PRT | WO2017062672; SEQ ID NO: 787 | 4929 |
| CII2763 | FR | PRT | WO2017062672; SEQ ID NO: 173 | 4930 |
| CII2764 | FR | PRT | WO2017062672; SEQ ID NO: 806 | 4931 |
| CII2765 | FR | PRT | WO2017062672; SEQ ID NO: 187 | 4932 |
| CII2766 | FR | PRT | WO2017062672; SEQ ID NO: 104 | 4933 |
| CII2767 | FR | PRT | WO2017062672; SEQ ID NO: 119 | 4934 |
| CII2768 | FR | PRT | WO2017062672; SEQ ID NO: 108 | 4935 |
| CII2769 | FR | PRT | WO2017062672; SEQ ID NO: 106 | 4936 |
| CII2770 | FR | PRT | WO2017062672; SEQ ID NO: 777 | 4937 |
| CII2771 | FR | PRT | WO2017062672; SEQ ID NO: 807 | 4938 |
| CII2772 | FR | PRT | WO2017062672; SEQ ID NO: 216 | 4939 |
| CII2773 | FR | PRT | WO2017062672; SEQ ID NO: 218 | 4940 |
| CII2774 | FR | PRT | WO2017062672; SEQ ID NO: 215 | 4941 |
| CII2775 | FR | PRT | WO2017062672; SEQ ID NO: 209 | 4942 |
| CII2776 | FR | PRT | WO2017062672; SEQ ID NO: 214 | 4943 |
| CII2777 | FR | PRT | WO2017062672; SEQ ID NO: 210 | 4944 |
| CII2778 | FR | PRT | WO2017062672; SEQ ID NO: 211 | 4945 |
| CII2779 | FR | PRT | WO2017062672; SEQ ID NO: 217 | 4946 |
| CII2780 | FR | PRT | WO2017062672; SEQ ID NO: 213 | 4947 |
| CII2781 | FR | PRT | WO2017062672; SEQ ID NO: 212 | 4948 |
| CII2782 | FR | PRT | WO2017062672; SEQ ID NO: 721 | 4949 |
| CII2783 | FR | PRT | WO2017062672; SEQ ID NO: 122 | 4950 |
| CII2784 | FR | PRT | WO2017062672; SEQ ID NO: 186 | 4951 |
| CII2785 | FR | PRT | WO2017062672; SEQ ID NO: 174 | 4952 |
| CII2786 | FR | PRT | WO2017062672; SEQ ID NO: 808 | 4953 |
| CII2787 | FR | PRT | WO2017062672; SEQ ID NO: 797 | 4954 |
| CII2788 | FR | PRT | WO2017062672; SEQ ID NO: 794 | 4955 |
| CII2789 | FR | PRT | WO2017062672; SEQ ID NO: 795 | 4956 |
| CII2790 | FR | PRT | WO2017062672; SEQ ID NO: 184 | 4957 |
| CII2791 | FR | PRT | WO2017062672; SEQ ID NO: 796 | 4958 |
| CII2792 | FR | PRT | WO2017062672; SEQ ID NO: 181 | 4959 |
| CII2793 | FR | PRT | WO2017062672; SEQ ID NO: 180 | 4960 |
| CII2794 | FR | PRT | WO2017062672; SEQ ID NO: 183 | 4961 |
| CII2795 | FR | PRT | WO2017062672; SEQ ID NO: 176 | 4962 |
| CII2796 | FR | PRT | WO2017062672; SEQ ID NO: 793 | 4963 |
| CII2797 | FR | PRT | WO2017062672; SEQ ID NO: 177 | 4964 |
| CII2798 | FR | PRT | WO2017062672; SEQ ID NO: 179 | 4965 |
| CII2799 | FR | PRT | WO2017062672; SEQ ID NO: 178 | 4966 |
| CII2800 | FR | PRT | WO2017062672; SEQ ID NO: 175 | 4967 |
| CII2801 | FR | PRT | WO2017062672; SEQ ID NO: 185 | 4968 |
| CII2802 | FR | PRT | WO2017062672; SEQ ID NO: 128 | 4969 |
| CII2803 | FR | PRT | WO2017062672; SEQ ID NO: 124 | 4970 |
| CII2804 | FR | PRT | WO2017062672; SEQ ID NO: 125 | 4971 |
| CII2805 | FR | PRT | WO2017062672; SEQ ID NO: 120 | 4972 |
| CII2806 | FR | PRT | WO2017062672; SEQ ID NO: 778 | 4973 |
| CII2807 | FR | PRT | WO2017062672; SEQ ID NO: 129 | 4974 |
| CII2808 | FR | PRT | WO2017062672; SEQ ID NO: 593 | 4975 |
| CII2809 | FR | PRT | WO2017062672; SEQ ID NO: 121 | 4976 |
| CII2810 | FR | PRT | WO2017062672; SEQ ID NO: 123 | 4977 |
| CII2811 | FR | PRT | WO2017062672; SEQ ID NO: 126 | 4978 |
| CII2812 | FR | PRT | WO2017062672; SEQ ID NO: 779 | 4979 |
| CII2813 | FR | PRT | WO2017062672; SEQ ID NO: 127 | 4980 |
| CII2814 | FR | PRT | WO2017062672; SEQ ID NO: 780 | 4981 |
| CII2815 | FR | PRT | WO2017062672; SEQ ID NO: 162 | 4982 |
| CII2816 | FR | PRT | WO2017062672; SEQ ID NO: 771 | 4983 |
| CII2817 | FR | PRT | WO2017062672; SEQ ID NO: 789 | 4984 |
| CII2818 | Full antibody | PRT | US20190092843; SEQ ID NO: 1 | 4985 |
| CII2819 | Full antibody | PRT | WO2017075432; SEQ ID NO: 234 | 4986 |
| CII2820 | Full antibody | PRT | WO2017075432; SEQ ID NO: 233 | 4987 |
| CII2821 | Full antibody | PRT | WO2017075432; SEQ ID NO: 232 | 4988 |
| CII2822 | Full antibody | PRT | WO2017075432; SEQ ID NO: 228 | 4989 |
| CII2823 | Full antibody | PRT | WO2017075432; SEQ ID NO: 231 | 4990 |
| CII2824 | Full antibody | PRT | WO2017075432; SEQ ID NO: 230 | 4991 |
| CII2825 | Full antibody | PRT | WO2017075432; SEQ ID NO: 213 | 4992 |
| CII2826 | Full antibody | PRT | WO2017075432; SEQ ID NO: 216 | 4993 |
| CII2827 | Full antibody | PRT | WO2017075432; SEQ ID NO: 217 | 4994 |
| CII2828 | Full antibody | PRT | WO2017075432; SEQ ID NO: 219 | 4995 |
| CII2829 | Full antibody | PRT | WO2017075432; SEQ ID NO: 218 | 4996 |
| CII2830 | Full antibody | PRT | WO2017075432; SEQ ID NO: 215 | 4997 |
| CII2831 | Full antibody | PRT | WO2017075432; SEQ ID NO: 222 | 4998 |
| CII2832 | Full antibody | PRT | WO2017075432; SEQ ID NO: 237 | 4999 |
| CII2833 | Full antibody | PRT | WO2017075432; SEQ ID NO: 240 | 5000 |
| CII2834 | Full antibody | PRT | WO2017075432; SEQ ID NO: 239 | 5001 |
| CII2835 | Full antibody | PRT | WO2017075432; SEQ ID NO: 235 | 5002 |
| CII2836 | Full antibody | PRT | WO2017075432; SEQ ID NO: 238 | 5003 |
| CII2837 | Full antibody | PRT | WO2017075432; SEQ ID NO: 227 | 5004 |
| CII2838 | Full antibody | PRT | WO2017075432; SEQ ID NO: 226 | 5005 |
| CII2839 | Full antibody | PRT | WO2017075432; SEQ ID NO: 224 | 5006 |
| CII2840 | Full antibody | PRT | WO2017075432; SEQ ID NO: 225 | 5007 |
| CII2841 | Full antibody | PRT | WO2017075432; SEQ ID NO: 220 | 5008 |
| CII2842 | Full antibody | PRT | WO2017075432; SEQ ID NO: 223 | 5009 |
| CII2843 | Full antibody | PRT | WO2018107058; SEQ ID NO: 34 | 5010 |
| CII2844 | Full antibody | PRT | WO2017062672; SEQ ID NO: 870 | 5011 |
| CII2845 | Full antibody | PRT | WO2017062672; SEQ ID NO: 873 | 5012 |
| CII2846 | Full antibody | PRT | WO2017062672; SEQ ID NO: 874 | 5013 |
| CII2847 | Full antibody | PRT | WO2017062672; SEQ ID NO: 872 | 5014 |
| CII2848 | Full antibody | PRT | WO2017062672; SEQ ID NO: 875 | 5015 |
| CII2849 | Full antibody | PRT | WO2017062672; SEQ ID NO: 878 | 5016 |
| CII2850 | Full antibody | PRT | WO2017062672; SEQ ID NO: 882 | 5017 |
| CII2851 | Full antibody | PRT | WO2017062672; SEQ ID NO: 881 | 5018 |
| CII2852 | Full antibody | PRT | WO2017062672; SEQ ID NO: 880 | 5019 |
| CII2853 | Full antibody | PRT | WO2017062672; SEQ ID NO: 876 | 5020 |
| CII2854 | Full antibody | PRT | WO2017062672; SEQ ID NO: 879 | 5021 |
| CII2855 | Full antibody | PRT | WO2016201388; SEQ ID NO: 248 | 5022 |
| CII2856 | HC | DNA | US20170253653; SEQ ID NO: 30 | 5023 |
| CII2857 | HC | DNA | US20180051086; SEQ ID NO: 1 | 5024 |
| CII2858 | HC | PRT | US20130243775; SEQ ID NO: 5 | 5025 |
| CII2859 | HC | PRT | WO2019028283; SEQ ID NO: 166 | 5026 |
| CII2860 | HC | PRT | WO2019028283; SEQ ID NO: 23 | 5027 |
| CII2861 | HC | PRT | WO2019028283; SEQ ID NO: 22 | 5028 |
| CII2862 | HC | PRT | WO2019028283; SEQ ID NO: 26 | 5029 |
| CII2863 | HC | PRT | WO2019028283; SEQ ID NO: 25 | 5030 |
| CII2864 | HC | PRT | WO2019028283; SEQ ID NO: 167 | 5031 |
| CII2865 | HC | PRT | WO2019028283; SEQ ID NO: 24 | 5032 |
| CII2866 | HC | PRT | WO2019028283; SEQ ID NO: 4 | 5033 |
| CII2867 | HC | PRT | WO2019028283; SEQ ID NO: 179 | 5034 |
| CII2868 | HC | PRT | WO2019028283; SEQ ID NO: 200 | 5035 |
| CII2869 | HC | PRT | WO2019028283; SEQ ID NO: 182 | 5036 |
| CII2870 | HC | PRT | WO2019028283; SEQ ID NO: 203 | 5037 |
| CII2871 | HC | PRT | WO2019028283; SEQ ID NO: 176 | 5038 |
| CII2872 | HC | PRT | WO2019028283; SEQ ID NO: 197 | 5039 |
| CII2873 | HC | PRT | WO2019028283; SEQ ID NO: 181 | 5040 |
| CII2874 | HC | PRT | WO2019028283; SEQ ID NO: 202 | 5041 |
| CII2875 | HC | PRT | WO2019028283; SEQ ID NO: 184 | 5042 |
| CII2876 | HC | PRT | WO2019028283; SEQ ID NO: 205 | 5043 |
| CII2877 | HC | PRT | WO2019028283; SEQ ID NO: 178 | 5044 |
| CII2878 | HC | PRT | WO2019028283; SEQ ID NO: 199 | 5045 |
| CII2879 | HC | PRT | WO2019028283; SEQ ID NO: 180 | 5046 |
| CII2880 | HC | PRT | WO2019028283; SEQ ID NO: 201 | 5047 |
| CII2881 | HC | PRT | WO2019028283; SEQ ID NO: 183 | 5048 |
| CII2882 | HC | PRT | WO2019028283; SEQ ID NO: 204 | 5049 |
| CII2883 | HC | PRT | WO2019028283; SEQ ID NO: 177 | 5050 |
| CII2884 | HC | PRT | WO2019028283; SEQ ID NO: 198 | 5051 |
| CII2885 | HC | PRT | WO2019028283; SEQ ID NO: 2 | 5052 |
| CII2886 | HC | PRT | WO2019028283; SEQ ID NO: 3 | 5053 |
| CII2887 | HC | PRT | WO2019028283; SEQ ID NO: 158 | 5054 |
| CII2888 | HC | PRT | WO2019028283; SEQ ID NO: 9 | 5055 |
| CII2889 | HC | PRT | WO2019028283; SEQ ID NO: 21 | 5056 |
| CII2890 | HC | PRT | WO2019028283; SEQ ID NO: 20 | 5057 |
| CII2891 | HC | PRT | WO2019028283; SEQ ID NO: 160 | 5058 |
| CII2892 | HC | PRT | WO2019028283; SEQ ID NO: 5 | 5059 |
| CII2893 | HC | PRT | WO2019028283; SEQ ID NO: 159 | 5060 |
| CII2894 | HC | PRT | WO2019028283; SEQ ID NO: 161 | 5061 |
| CII2895 | HC | PRT | WO2019028283; SEQ ID NO: 13 | 5062 |
| CII2896 | HC | PRT | WO2019028283; SEQ ID NO: 7 | 5063 |
| CII2897 | HC | PRT | WO2019028283; SEQ ID NO: 10 | 5064 |
| CII2898 | HC | PRT | WO2019028283; SEQ ID NO: 14 | 5065 |
| CII2899 | HC | PRT | WO2019028283; SEQ ID NO: 8 | 5066 |
| CII2900 | HC | PRT | WO2019028283; SEQ ID NO: 19 | 5067 |
| CII2901 | HC | PRT | WO2019028283; SEQ ID NO: 18 | 5068 |
| CII2902 | HC | PRT | WO2019028283; SEQ ID NO: 12 | 5069 |
| CII2903 | HC | PRT | WO2019028283; SEQ ID NO: 17 | 5070 |
| CII2904 | HC | PRT | WO2019028283; SEQ ID NO: 16 | 5071 |
| CII2905 | HC | PRT | WO2019028283; SEQ ID NO: 6 | 5072 |
| CII2906 | HC | PRT | WO2019028283; SEQ ID NO: 15 | 5073 |
| CII2907 | HC | PRT | WO2019028283; SEQ ID NO: 11 | 5074 |
| CII2908 | HC | PRT | WO2019079549; SEQ ID NO: 1 | 5075 |
| CII2909 | HC | PRT | US20180333503; SEQ ID NO: 13 | 5076 |
| CII2910 | HC | PRT | US20180333503; SEQ ID NO: 3 | 5077 |
| CII2911 | HC | PRT | US20190117769; SEQ ID NO: 14 | 5078 |
| CII2912 | HC | PRT | US20190117769; SEQ ID NO: 12 | 5079 |
| CII2913 | HC | PRT | US20190117769; SEQ ID NO: 16 | 5080 |
| CII2914 | HC | PRT | US20180333503; SEQ ID NO: 28 | 5081 |
| CII2915 | HC | PRT | US20170253653; SEQ ID NO: 26 | 5082 |
| CII2916 | HC | PRT | US20170253653; SEQ ID NO: 34 | 5083 |
| CII2917 | HC | PRT | US20170253653; SEQ ID NO: 24 | 5084 |
| CII2918 | HC | PRT | US20170253653; SEQ ID NO: 32 | 5085 |
| CII2919 | HC | PRT | WO2019079549; SEQ ID NO: 3 | 5086 |
| CII2920 | HC | PRT | US20190016807; SEQ ID NO: 23 | 5087 |
| CII2921 | HC | PRT | US20199016807; SEQ ID NO: 24 | 5088 |
| CII2922 | HC | PRT | US20190016807; SEQ ID NO: 22 | 5089 |
| CII2923 | HC | PRT | WO2018213316; SEQ ID NO: 130 | 5090 |
| CII2924 | HC | PRT | WO2018140121: WO2018147927; SEQ | 5091 |
| | | | ID NO: 36 | |
| CII2925 | HC | PRT | WO2016023019; SEQ ID NO: 397 | 5092 |
| CII2926 | HC | PRT | WO2019028292; SEQ ID NO: 20 | 5093 |
| CII2927 | HC | PRT | WO2019028292; SEQ ID NO: 17 | 5094 |
| CII2928 | HC | PRT | WO2019028292; SEQ ID NO: 10 | 5095 |
| CII2929 | HC | PRT | WO2019028292; SEQ ID NO: 19 | 5096 |
| CII2930 | HC | PRT | WO2019028292; SEQ ID NO: 18 | 5097 |
| CII2931 | HC | PRT | WO2019028292; SEQ ID NO: 11 | 5098 |
| CII2932 | HC | PRT | WO2019028292; SEQ ID NO: 198 | 5099 |
| CII2933 | HC | PRT | WO2019028292; SEQ ID NO: 199 | 5100 |
| CII2934 | HC | PRT | WO2019028292; SEQ ID NO: 200 | 5101 |
| CII2935 | HC | PRT | WO2019028292; SEQ ID NO: 201 | 5102 |
| CII2936 | HC | PRT | WO2019028292; SEQ ID NO: 9 | 5103 |
| CII2937 | HC | PRT | WO2019028292; SEQ ID NO: 202 | 5104 |
| CII2938 | HC | PRT | WO2019028292; SEQ ID NO: 203 | 5105 |
| CII2939 | HC | PRT | WO2019028292; SEQ ID NO: 204 | 5106 |
| CII2940 | HC | PRT | WO2019028292; SEQ ID NO: 205 | 5107 |
| CII2941 | HC | PRT | WO2019028292; SEQ ID NO: 212 | 5108 |
| CII2942 | HC | PRT | WO2019028292; SEQ ID NO: 213 | 5109 |
| CII2943 | HC | PRT | WO2019028292; SEQ ID NO: 208 | 5110 |
| CII2944 | HC | PRT | WO2019028292; SEQ ID NO: 209 | 5111 |
| CII2945 | HC | PRT | WO2019028292; SEQ ID NO: 210 | 5112 |
| CII2946 | HC | PRT | WO2019028292; SEQ ID NO: 211 | 5113 |
| CII2947 | HC | PRT | WO2019028292; SEQ ID NO: 206 | 5114 |
| CII2948 | HC | PRT | WO2019028292; SEQ ID NO: 207 | 5115 |
| CII2949 | HC | PRT | WO2019028292; SEQ ID NO: 14 | 5116 |
| CII2950 | HC | PRT | WO2019028292; SEQ ID NO: 15 | 5117 |
| CII2951 | HC | PRT | WO2019028292; SEQ ID NO: 16 | 5118 |
| CII2952 | HC | PRT | WO2019028292; SEQ ID NO: 12 | 5119 |
| CII2953 | HC | PRT | WO2019028292; SEQ ID NO: 13 | 5120 |
| CII2954 | HC | PRT | US20190137523; SEQ ID NO: 5 | 5121 |
| CII2955 | HC | PRT | US20190137523; SEQ ID NO: 3 | 5122 |
| CII2956 | HC | PRT | US20180221480; SEQ ID NO: 1 | 5123 |
| CII2957 | HC | PRT | WO2018140510; SEQ ID NO: 6 | 5124 |
| CII2958 | LC | DNA | US20170253653; SEQ ID NO: 31 | 5125 |
| CII2959 | LC | DNA | US20180051086; SEQ ID NO: 3 | 5126 |
| CII2960 | LC | PRT | WO2019028283; SEQ ID NO: 185 | 5127 |
| CII2961 | LC | PRT | WO2019028283; SEQ ID NO: 33 | 5128 |
| CII2962 | LC | PRT | WO2019028283; SEQ ID NO: 32 | 5129 |
| CII2963 | LC | PRT | WO2019028283; SEQ ID NO: 31 | 5130 |
| CII2964 | LC | PRT | WO2019028283; SEQ ID NO: 29 | 5131 |
| CII2965 | LC | PRT | WO2019028283; SEQ ID NO: 30 | 5132 |
| CII2966 | LC | PRT | WO2019028283; SEQ ID NO: 163 | 5133 |
| CII2967 | LC | PRT | WO2019028283; SEQ ID NO: 27 | 5134 |
| CII2968 | LC | PRT | WO2019028283; SEQ ID NO: 28 | 5135 |
| CII2969 | LC | PRT | WO2019028283; SEQ ID NO: 162 | 5136 |
| CII2970 | LC | PRT | WO2019028283; SEQ ID NO: 168 | 5137 |
| CII2971 | LC | PRT | WO2019028283; SEQ ID NO: 169 | 5138 |
| CII2972 | LC | PRT | WO2019079549; SEQ ID NO: 2 | 5139 |
| CII2973 | LC | PRT | US20180333503; SEQ ID NO: 15 | 5140 |
| CII2974 | LC | PRT | US20190117769; SEQ ID NO: 11 | 5141 |
| CII2975 | LC | PRT | US20190117769; SEQ ID NO: 13 | 5142 |
| CII2976 | LC | PRT | US20190117769; SEQ ID NO: 15 | 5143 |
| CII2977 | LC | PRT | US20180333503; SEQ ID NO: 29 | 5144 |
| CII2978 | LC | PRT | US20190016807; SEQ ID NO: 34 | 5145 |
| CII2979 | LC | PRT | US20190016807; SEQ ID NO: 30 | 5146 |
| CII2980 | LC | PRT | US20190016807; SEQ ID NO: 35 | 5147 |
| CII2981 | LC | PRT | US20190016807; SEQ ID NO: 36 | 5148 |
| CII2982 | LC | PRT | US20190016807; SEQ ID NO: 37 | 5149 |
| CII2983 | LC | PRT | US20190016807; SEQ ID NO: 40 | 5150 |
| CII2984 | LC | PRT | US29190016807; SEQ ID NO: 32 | 5151 |
| CII2985 | LC | PRT | US20190016807; SEQ ID NO: 38 | 5152 |
| CII2986 | LC | PRT | US20190016807; SEQ ID NO: 31 | 5153 |
| CII2987 | LC | PRT | US20190016807; SEQ ID NO: 21 | 5154 |
| CII2988 | LC | PRT | US20190016807; SEQ ID NO: 39 | 5155 |
| CII2989 | LC | PRT | US20190016807; SEQ ID NO: 27 | 5156 |
| CII2990 | LC | PRT | US20190016807; SEQ ID NO: 26 | 5157 |
| CII2991 | LC | PRT | US20190016807; SEQ ID NO: 28 | 5158 |
| CII2992 | LC | PRT | US20190016807; SEQ ID NO: 33 | 5159 |
| CII2993 | LC | PRT | US20190016807; SEQ ID NO: 25 | 5160 |
| CII2994 | LC | PRT | US20190016807; SEQ ID NO: 29 | 5161 |
| CII2995 | LC | PRT | US20170253653; SEQ ID NO: 27 | 5162 |
| CII2996 | LC | PRT | US20170253653; SEQ ID NO: 35 | 5163 |
| CII2997 | LC | PRT | US20170253653; SEQ ID NO: 25 | 5164 |
| CII2998 | LC | PRT | US20170253653; SEQ ID NO: 33 | 5165 |
| CII2999 | LC | PRT | WO2019079549; SEQ ID NO: 4 | 5166 |
| CII3000 | LC | PRT | WO2018140121; WO2018147928; SEQ | 5167 |
| | | | ID NO: 37 | |
| CII3001 | LC | PRT | WO2019028292; SEQ ID NO: 214 | 5168 |
| CII3002 | LC | PRT | WO2019028292; SEQ ID NO: 215 | 5169 |
| CII3003 | LC | PRT | WO2019028292; SEQ ID NO: 26 | 5170 |
| CII3004 | LC | PRT | WO2019028292; SEQ ID NO: 25 | 5171 |
| CII3005 | LC | PRT | WO2019028292; SEQ ID NO: 23 | 5172 |
| CII3006 | LC | PRT | WO2019028292; SEQ ID NO: 24 | 5173 |
| CII3007 | LC | PRT | WO2019028292; SEQ ID NO: 216 | 5174 |
| CII3008 | LC | PRT | WO2019028292; SEQ ID NO: 217 | 5175 |
| CII3009 | LC | PRT | WO2019028292; SEQ ID NO: 218 | 5176 |
| CII3010 | LC | PRT | WO2019028292; SEQ ID NO: 21 | 5177 |
| CII3011 | LC | PRT | WO2019028292; SEQ ID NO: 22 | 5178 |
| CII3012 | LC | PRT | US20190137523; SEQ ID NO: 2 | 5179 |
| CII3013 | LC | PRT | US20190137523; SEQ ID NO: 4 | 5180 |
| CII3014 | LC | PRT | US20180221480; SEQ ID NO: 8 | 5181 |
| CII3015 | LC | PRT | US20180221480; SEQ ID NO: 9 | 5182 |
| CII3016 | LC | PRT | US20180221480; SEQ ID NO: 11 | 5183 |
| CII3017 | LC | PRT | US20180221480; SEQ ID NO: 10 | 5184 |
| CII3018 | LC | PRT | US20180221480; SEQ ID NO: 6 | 5185 |
| CII3019 | LC | PRT | WO2018140510; SEQ ID NO: 1 | 5186 |
| CII3020 | VH | DNA | WO2018140121; WO2018147925; SEQ | 5187 |
| | | | ID NO: 34 | |
| CII3021 | VH | DNA | US20140212413; SEQ ID NO: 4 | 5188 |
| CII3022 | VH | DNA | WO2010129469; SEQ ID NO: 37 | 5189 |
| CII3023 | VH | PRT | US20190092843; SEQ ID NO: 2 | 5190 |
| CII3024 | VH | PRT | WO2014028776; SEQ ID NO: 62 | 5191 |
| CII3025 | VH | PRT | US20180134806; SEQ ID NO: 73 | 5192 |
| CII3026 | VH | PRT | US20180134806; SEQ ID NO: 76 | 5193 |
| CII3027 | VH | PRT | US20180134806; SEQ ID NO: 77 | 5194 |
| CII3028 | VH | PRT | US20180134806; SEQ ID NO: 74 | 5195 |
| CII3029 | VH | PRT | US20180134806; SEQ ID NO: 4 | 5196 |
| CII3030 | VH | PRT | US20130243775; SEQ ID NO: 3 | 5197 |
| CII3031 | VH | PRT | WO2019020606; SEQ ID NO: 14 | 5198 |
| CII3032 | VH | PRT | WO2019020606; SEQ ID NO: 16 | 5199 |
| CII3033 | VH | PRT | WO2019020606; SEQ ID NO: 12 | 5200 |
| CII3034 | VH | PRT | WO2019020606; SEQ ID NO: 19 | 5201 |
| CII3035 | VH | PRT | WO2019020606; SEQ ID NO: 11 | 5202 |
| CII3036 | VH | PRT | WO2019020606; SEQ ID NO: 18 | 5203 |
| CII3037 | VH | PRT | WO2019020606; SEQ ID NO: 17 | 5204 |
| CII3038 | VH | PRT | WO2019020606; SEQ ID NO: 15 | 5205 |
| CII3039 | VH | PRT | WO2019020606; SEQ ID NO: 13 | 5206 |
| CII3040 | VH | PRT | WO2019020606; SEQ ID NO: 10 | 5207 |
| CII3041 | VH | PRT | WO2019020606; SEQ ID NO: 9 | 5208 |
| CII3042 | VH | PRT | WO2019020606; SEQ ID NO: 5 | 5209 |
| CII3043 | VH | PRT | WO2019020606; SEQ ID NO: 7 | 5210 |
| CII3044 | VH | PRT | WO2019020606; SEQ ID NO: 8 | 5211 |
| CII3045 | VH | PRT | WO2019020606; SEQ ID NO: 4 | 5212 |
| CII3046 | VH | PRT | WO2019020606; SEQ ID NO: 3 | 5213 |
| CII3047 | VH | PRT | WO2019020606; SEQ ID NO: 6 | 5214 |
| CII3048 | VH | PRT | WO2016201388; SEQ ID NO: 245 | 5215 |
| CII3049 | VH | PRT | US20190085076; SEQ ID NO: 372 | 5216 |
| CII3050 | VH | PRT | W02016201389; SEQ ID NO: 372 | 5217 |
| CII3051 | VH | PRT | WO2016201388; SEQ ID NO: 161 | 5218 |
| CII3052 | VH | PRT | US20190085076; SEQ ID NO: 370 | 5219 |
| CII3053 | VH | PRT | W02016201389; SEQ ID NO: 370 | 5220 |
| CII3054 | VH | PRT | US20190085076; SEQ ID NO: 417 | 5221 |
| CII3055 | VH | PRT | W02016201389; SEQ ID NO: 417 | 5222 |
| CII3056 | VH | PRT | US20190085076; SEQ ID NO: 419 | 5223 |
| CII3057 | VH | PRT | W02016201389; SEQ ID NO: 419 | 5224 |
| CII3058 | VH | PRT | US20190085076; SEQ ID NO: 431 | 5225 |
| CII3059 | VH | PRT | W02016201389; SEQ ID NO: 431 | 5226 |
| CII3060 | VH | PRT | US20190085076; SEQ ID NO: 363 | 5227 |
| CII3061 | VH | PRT | W02016201389; SEQ ID NO: 363 | 5228 |
| CII3062 | VH | PRT | US20190085076; SEQ ID NO: 380 | 5229 |
| CII3063 | VH | PRT | W02016201389; SEQ ID NO: 380 | 5230 |
| CII3064 | VH | PRT | US20190085076; SEQ ID NO: 430 | 5231 |
| CII3065 | VH | PRT | W02016201389; SEQ ID NO: 430 | 5232 |
| CII3066 | VH | PRT | US20190085076; SEQ ID NO: 432 | 5233 |
| CII3067 | VH | PRT | W02016201389; SEQ ID NO: 432 | 5234 |
| CII3068 | VH | PRT | US20190085076; SEQ ID NO: 367 | 5235 |
| CII3069 | VH | PRT | W02016201389; SEQ ID NO: 367 | 5236 |
| CII3070 | VH | PRT | US20190085076; SEQ ID NO: 418 | 5237 |
| CII3071 | VH | PRT | W02016201389; SEQ ID NO: 418 | 5238 |
| CII3072 | VH | PRT | US20190085076; SEQ ID NO: 364 | 5239 |
| CII3073 | VH | PRT | W02016201389; SEQ ID NO: 364 | 5240 |
| CII3074 | VH | PRT | US20190085076; SEQ ID NO: 366 | 5241 |
| CII3075 | VH | PRT | W02016201389; SEQ ID NO: 366 | 5242 |
| CII3076 | VH | PRT | US20190085076; SEQ ID NO: 403 | 5243 |
| CII3077 | VH | PRT | W02016201389; SEQ ID NO: 403 | 5244 |
| CII3078 | VH | PRT | US20190085076; SEQ ID NO: 420 | 5245 |
| CII3079 | VH | PRT | W02016201389; SEQ ID NO: 420 | 5246 |
| CII3080 | VH | PRT | WO2016201388; SEQ ID NO: 63 | 5247 |
| CII3081 | VH | PRT | WO2016201388; SEQ ID NO: 57 | 5248 |
| CII3082 | VH | PRT | WO2016201388; SEQ ID NO: 52 | 5249 |
| CII3083 | VH | PRT | WO2016201388; SEQ ID NO: 206 | 5250 |
| CII3084 | VH | PRT | WO2016201388; SEQ ID NO: 173 | 5251 |
| CII3085 | VH | PRT | WO2016201388; SEQ ID NO: 154 | 5252 |
| CII3086 | VH | PRT | WO2016201388; SEQ ID NO: 244 | 5253 |
| CII3087 | VH | PRT | WO2019028283; SEQ ID NO: 103 | 5254 |
| CII3088 | VH | PRT | WO2016201388; SEQ ID NO: 246 | 5255 |
| CII3089 | VH | PRT | WO2016201388; SEQ ID NO: 66 | 5256 |
| CII3090 | VH | PRT | US20190085076; SEQ ID NO: 429 | 5257 |
| CII3091 | VH | PRT | W02016201389; SEQ ID NO: 429 | 5258 |
| CII3092 | VH | PRT | WO2016201388; SEQ ID NO: 158 | 5259 |
| CII3093 | VH | PRT | WO2016201388; SEQ ID NO: 181 | 5260 |
| CII3094 | VH | PRT | WO2016201388; SEQ ID NO: 212 | 5261 |
| CII3095 | VH | PRT | WO2016201388; SEQ ID NO: 176 | 5262 |
| CII3096 | VH | PRT | WO2016201388; SEQ ID NO: 160 | 5263 |
| CII3097 | VH | PRT | US20190085076; SEQ ID NO: 406 | 5264 |
| CII3098 | VH | PRT | W02016201389; SEQ ID NO: 406 | 5265 |
| CII3099 | VH | PRT | US20190085076; SEQ ID NO: 393 | 5266 |
| CII3100 | VH | PRT | W02016201389; SEQ ID NO: 393 | 5267 |
| CII3101 | VH | PRT | US20190085076; SEQ ID NO: 405 | 5268 |
| CII3102 | VH | PRT | W02016201389; SEQ ID NO: 405 | 5269 |
| CII3103 | VH | PRT | US20190085076; SEQ ID NO: 397 | 5270 |
| CII3104 | VH | PRT | W02016201389; SEQ ID NO: 397 | 5271 |
| CII3105 | VH | PRT | US20190085076; SEQ ID NO: 413 | 5272 |
| CII3106 | VH | PRT | W02016201389; SEQ ID NO: 413 | 5273 |
| CII3107 | VH | PRT | US20190085076; SEQ ID NO: 428 | 5274 |
| CII3108 | VH | PRT | W02016201389; SEQ ID NO: 428 | 5275 |
| CII3109 | VH | PRT | US20190085076; SEQ ID NO: 384 | 5276 |
| CII3110 | VH | PRT | W02016201389; SEQ ID NO: 384 | 5277 |
| CII3111 | VH | PRT | US20190085076; SEQ ID NO: 390 | 5278 |
| CII3112 | VH | PRT | W02016201389; SEQ ID NO: 399 | 5279 |
| CII3113 | VH | PRT | US20190085076; SEQ ID NO: 389 | 5280 |
| CII3114 | VH | PRT | W02016201389; SEQ ID NO: 389 | 5281 |
| CII3115 | VH | PRT | US20190085076; SEQ ID NO: 373 | 5282 |
| CII3116 | VH | PRT | W02016201389; SEQ ID NO: 373 | 5283 |
| CII3117 | VH | PRT | US20190085076; SEQ ID NO: 391 | 5284 |
| CII3118 | VH | PRT | W02016201389; SEQ ID NO: 391 | 5285 |
| CII3119 | VH | PRT | US20190085076; SEQ ID NO: 427 | 5286 |
| CII3120 | VH | PRT | W02016201389; SEQ ID NO: 427 | 5287 |
| CII3121 | VH | PRT | US20190085076; SEQ ID NO: 386 | 5288 |
| CII3122 | VH | PRT | W02016201389; SEQ ID NO: 386 | 5289 |
| CII3123 | VH | PRT | US20190085076; SEQ ID NO: 376 | 5290 |
| CII3124 | VH | PRT | W02016201389; SEQ ID NO: 376 | 5291 |
| CII3125 | VH | PRT | WO2016201388; SEQ ID NO: 155 | 5292 |
| CII3126 | VH | PRT | WO2016201388; SEQ ID NO: 178 | 5293 |
| CII3127 | VH | PRT | WO2016201388; SEQ ID NO: 207 | 5294 |
| CII3128 | VH | PRT | WO2016201388; SEQ ID NO: 209 | 5295 |
| CII3129 | VH | PRT | WO2016201388; SEQ ID NO: 171 | 5296 |
| CII3130 | VH | PRT | WO2016201388; SEQ ID NO: 165 | 5297 |
| CII3131 | VH | PRT | WO2016201388; SEQ ID NO: 64 | 5298 |
| CII3132 | VH | PRT | WO2016201388; SEQ ID NO: 58 | 5299 |
| CII3133 | VH | PRT | WO2016201388; SEQ ID NO: 53 | 5300 |
| CII3134 | VH | PRT | WO2016201388; SEQ ID NO: 205 | 5301 |
| CII3135 | VH | PRT | WO2016201388; SEQ ID NO: 170 | 5302 |
| CII3136 | VH | PRT | WO2016201388; SEQ ID NO: 167 | 5303 |
| CII3137 | VH | PRT | US20190085076; SEQ ID NO: 385 | 5304 |
| CII3138 | VH | PRT | W02016201389; SEQ ID NO: 385 | 5305 |
| CII3139 | VH | PRT | US20190085076; SEQ ID NO: 392 | 5306 |
| CII3140 | VH | PRT | W02016201389; SEQ ID NO: 392 | 5307 |
| CII3141 | VH | PRT | US20190085076; SEQ ID NO: 424 | 5308 |
| CII3142 | VH | PRT | W02016201389; SEQ ID NO: 424 | 5309 |
| CII3143 | VH | PRT | US20190085076; SEQ ID NO: 400 | 5310 |
| CII3144 | VH | PRT | W02016201389; SEQ ID NO: 400 | 5311 |
| CII3145 | VH | PRT | US29190085076; SEQ ID NO: 379 | 5312 |
| CII3146 | VH | PRT | W02016201389; SEQ ID NO: 379 | 5313 |
| CII3147 | VH | PRT | US20190085076; SEQ ID NO: 398 | 5314 |
| CII3148 | VH | PRT | W02016201389; SEQ ID NO: 398 | 5315 |
| CII3149 | VH | PRT | US20190085076; SEQ ID NO: 394 | 5316 |
| CII3150 | VH | PRT | W02016201389; SEQ ID NO: 394 | 5317 |
| CII3151 | VH | PRT | US20190085076; SEQ ID NO: 395 | 5318 |
| CII3152 | VH | PRT | W02016201389; SEQ ID NO: 395 | 5319 |
| CII3153 | VH | PRT | US20199085076; SEQ ID NO: 426 | 5320 |
| CII3154 | VH | PRT | W02016201389; SEQ ID NO: 426 | 5321 |
| CII3155 | VH | PRT | US20190085076; SEQ ID NO: 396 | 5322 |
| CII3156 | VH | PRT | W02016201389; SEQ ID NO: 396 | 5323 |
| CII3157 | VH | PRT | US20190085076; SEQ ID NO: 399 | 5324 |
| CII3158 | VH | PRT | W02016201389; SEQ ID NO: 399 | 5325 |
| CII3159 | VH | PRT | US20199085076; SEQ ID NO: 371 | 5326 |
| CII3160 | VH | PRT | W02016201389; SEQ ID NO: 371 | 5327 |
| CII3161 | VH | PRT | US20190085076; SEQ ID NO: 410 | 5328 |
| CII3162 | VH | PRT | W02016201389; SEQ ID NO: 410 | 5329 |
| CII3163 | VH | PRT | US20190085076; SEQ ID NO: 411 | 5330 |
| CII3164 | VH | PRT | W02016201389; SEQ ID NO: 411 | 5331 |
| CII3165 | VH | PRT | US20190085076; SEQ ID NO: 404 | 5332 |
| CII3166 | VH | PRT | W02016201389; SEQ ID NO: 404 | 5333 |
| CII3167 | VH | PRT | US29190085076; SEQ ID NO: 425 | 5334 |
| CII3168 | VH | PRT | W02016201389; SEQ ID NO: 425 | 5335 |
| CII3169 | VH | PRT | WO2016201388; SEQ ID NO: 183 | 5336 |
| CII3170 | VH | PRT | WO2016291388; SEQ ID NO: 182 | 5337 |
| CII3171 | VH | PRT | US20190085076; SEQ ID NO: 381 | 5338 |
| CII3172 | VH | PRT | W02016201389; SEQ ID NO: 381 | 5339 |
| CII3173 | VH | PRT | US20190085076; SEQ ID NO: 382 | 5340 |
| CII3174 | VH | PRT | W02016201389; SEQ ID NO: 382 | 5341 |
| CII3175 | VH | PRT | WO2016201388; SEQ ID NO: 166 | 5342 |
| CII3176 | VH | PRT | WO2016201388; SEQ ID NO: 157 | 5343 |
| CII3177 | VH | PRT | WO2016201388; SEQ ID NO: 180 | 5344 |
| CII3178 | VH | PRT | WO2016201388; SEQ ID NO: 211 | 5345 |
| CII3179 | VH | PRT | WO2016201388; SEQ ID NO: 175 | 5346 |
| CII3180 | VH | PRT | US20190085076; SEQ ID NO: 412 | 5347 |
| CII3181 | VH | PRT | W02016201389; SEQ ID NO: 412 | 5348 |
| CII3182 | VH | PRT | US20190085076; SEQ ID NO: 377 | 5349 |
| CII3183 | VH | PRT | W02016201389; SEQ ID NO: 377 | 5350 |
| CII3184 | VH | PRT | US20190085076; SEQ ID NO: 388 | 5351 |
| CII3185 | VH | PRT | W02016201389; SEQ ID NO: 388 | 5352 |
| CII3186 | VH | PRT | WO2016201388; SEQ ID NO: 159 | 5353 |
| CII3187 | VH | PRT | WO2016201388; SEQ ID NO: 213 | 5354 |
| CII3188 | VH | PRT | WO2016201388; SEQ ID NO: 177 | 5355 |
| CII3189 | VH | PRT | WO2016201388; SEQ ID NO: 203 | 5356 |
| CII3190 | VH | PRT | WO2016201388; SEQ ID NO: 168 | 5357 |
| CII3191 | VH | PRT | WO2016201388; SEQ ID NO: 162 | 5358 |
| CII3192 | VH | PRT | US20190085076; SEQ ID NO: 402 | 5359 |
| CII3193 | VH | PRT | W02016201389; SEQ ID NO: 402 | 5360 |
| CII3194 | VH | PRT | US20190085076; SEQ ID NO: 415 | 5361 |
| CII3195 | VH | PRT | W02016201389; SEQ ID NO: 415 | 5362 |
| CII3196 | VH | PRT | US20190085076; SEQ ID NO: 375 | 5363 |
| CII3197 | VH | PRT | W02016201389; SEQ ID NO: 375 | 5364 |
| CII3198 | VH | PRT | US20190085076; SEQ ID NO: 416 | 5365 |
| CII3199 | VH | PRT | W02016201389; SEQ ID NO: 416 | 5366 |
| CII3200 | VH | PRT | US20190085076; SEQ ID NO: 414 | 5367 |
| CII3201 | VH | PRT | W02016201389; SEQ ID NO: 414 | 5368 |
| CII3202 | VH | PRT | WO2016201388; SEQ ID NO: 156 | 5369 |
| CII3203 | VH | PRT | WO2016201388; SEQ ID NO: 179 | 5370 |
| CII3204 | VH | PRT | WO2016201388; SEQ ID NO: 208 | 5371 |
| CII3205 | VH | PRT | WO2016201388; SEQ ID NO: 174 | 5372 |
| CII3206 | VH | PRT | WO2019028283; SEQ ID NO: 73 | 5373 |
| CII3207 | VH | PRT | WO2019028283; SEQ ID NO: 54 | 5374 |
| CII3208 | VH | PRT | WO2019028283; SEQ ID NO: 64 | 5375 |
| CII3209 | VH | PRT | WO2019028283; SEQ ID NO: 63 | 5376 |
| CII3210 | VH | PRT | WO2019028283; SEQ ID NO: 52 | 5377 |
| CII3211 | VH | PRT | WO2019028283; SEQ ID NO: 53 | 5378 |
| CII3212 | VH | PRT | WO2019028283; SEQ ID NO: 62 | 5379 |
| CII3213 | VH | PRT | WO2019028283; SEQ ID NO: 61 | 5380 |
| CII3214 | VH | PRT | WO2019028283; SEQ ID NO: 74 | 5381 |
| CII3215 | VH | PRT | WO2019028283; SEQ ID NO: 76 | 5382 |
| CII3216 | VH | PRT | WO2019028283; SEQ ID NO: 66 | 5383 |
| CII3217 | VH | PRT | WO2019028283; SEQ ID NO: 65 | 5384 |
| CII3218 | VH | PRT | WO2019028283; SEQ ID NO: 58 | 5385 |
| CII3219 | VH | PRT | WO2019028283; SEQ ID NO: 69 | 5386 |
| CII3220 | VH | PRT | WO2019028283; SEQ ID NO: 59 | 5387 |
| CII3221 | VH | PRT | WO2019028283; SEQ ID NO: 68 | 5388 |
| CII3222 | VH | PRT | WO2019028283; SEQ ID NO: 67 | 5389 |
| CII3223 | VH | PRT | WO2019028283; SEQ ID NO: 72 | 5390 |
| CII3224 | VH | PRT | WO2019028283; SEQ ID NO: 69 | 5391 |
| CII3225 | VH | PRT | WO2019028283; SEQ ID NO: 71 | 5392 |
| CII3226 | VH | PRT | WO2019028283; SEQ ID NO: 70 | 5393 |
| CII3227 | VH | PRT | WO2019028283; SEQ ID NO: 173 | 5394 |
| CII3228 | VH | PRT | WO2019028283; SEQ ID NO: 174 | 5395 |
| CII3229 | VH | PRT | WO2019028283; SEQ ID NO: 55 | 5396 |
| CII3230 | VH | PRT | WO2019028283; SEQ ID NO: 56 | 5397 |
| CII3231 | VH | PRT | WO2019028283; SEQ ID NO: 57 | 5398 |
| CII3232 | VH | PRT | WO2019028283; SEQ ID NO: 34 | 5399 |
| CII3233 | VH | PRT | WO2019028283; SEQ ID NO: 35 | 5400 |
| CII3234 | VH | PRT | WO2016201388; SEQ ID NO: 164 | 5401 |
| CII3235 | VH | PRT | WO2019028283; SEQ ID NO: 44 | 5402 |
| CII3236 | VH | PRT | WO2016201388; SEQ ID NO: 61 | 5403 |
| CII3237 | VH | PRT | WO2019028283; SEQ ID NO: 45 | 5404 |
| CII3238 | VH | PRT | WO2019028283; SEQ ID NO: 46 | 5405 |
| CII3239 | VH | PRT | WO2019028283; SEQ ID NO: 47 | 5406 |
| CII3240 | VH | PRT | WO2019028283; SEQ ID NO: 48 | 5407 |
| CII3241 | VH | PRT | WO2019028283; SEQ ID NO: 42 | 5408 |
| CII3242 | VH | PRT | WO2016201388; SEQ ID NO: 55 | 5409 |
| CII3243 | VH | PRT | WO2019028283; SEQ ID NO: 170 | 5410 |
| CII3244 | VH | PRT | WO2019028283; SEQ ID NO: 75 | 5411 |
| CII3245 | VH | PRT | WO2019028283; SEQ ID NO: 171 | 5412 |
| CII3246 | VH | PRT | WO2019028283; SEQ ID NO: 175 | 5413 |
| CII3247 | VH | PRT | WO2019028283; SEQ ID NO: 172 | 5414 |
| CII3248 | VH | PRT | WO2019028283; SEQ ID NO: 41 | 5415 |
| CII3249 | VH | PRT | WO2019028283; SEQ ID NO: 36 | 5416 |
| CII3250 | VH | PRT | WO2019028283; SEQ ID NO: 37 | 5417 |
| CII3251 | VH | PRT | WO2019028283; SEQ ID NO: 50 | 5418 |
| CII3252 | VH | PRT | WO2019028283; SEQ ID NO: 38 | 5419 |
| CII3253 | VH | PRT | WO2019028283; SEQ ID NO: 39 | 5420 |
| CII3254 | VH | PRT | WO2019028283; SEQ ID NO: 40 | 5421 |
| CII3255 | VH | PRT | US20190085076; SEQ ID NO: 423 | 5422 |
| CII3256 | VH | PRT | W02016201389; SEQ ID NO: 423 | 5423 |
| CII3257 | VH | PRT | US20190085076; SEQ ID NO: 401 | 5424 |
| CII3258 | VH | PRT | W02016201389; SEQ ID NO: 401 | 5425 |
| CII3259 | VH | PRT | US20190085076; SEQ ID NO: 369 | 5426 |
| CII3260 | VH | PRT | W02016201389; SEQ ID NO: 369 | 5427 |
| CII3261 | VH | PRT | US20190085076; SEQ ID NO: 422 | 5428 |
| CII3262 | VH | PRT | W02016201389; SEQ ID NO: 422 | 5429 |
| CII3263 | VH | PRT | US20190085076; SEQ ID NO: 368 | 5430 |
| CII3264 | VH | PRT | W02016201389; SEQ ID NO: 368 | 5431 |
| CII3265 | VH | PRT | US20190085076; SEQ ID NO: 378 | 5432 |
| CII3266 | VH | PRT | W02016201389; SEQ ID NO: 378 | 5433 |
| CII3267 | VH | PRT | US20190085076; SEQ ID NO: 374 | 5434 |
| CII3268 | VH | PRT | W02016201389; SEQ ID NO: 374 | 5435 |
| CII3269 | VH | PRT | WO2016201388; SEQ ID NO: 50 | 5436 |
| CII3270 | VH | PRT | WO2016201388; SEQ ID NO: 204 | 5437 |
| CII3271 | VH | PRT | WO2016201388; SEQ ID NO: 169 | 5438 |
| CII3272 | VH | PRT | US20190085076; SEQ ID NO: 421 | 5439 |
| CII3273 | VH | PRT | W02016201389; SEQ ID NO: 421 | 5440 |
| CII3274 | VH | PRT | US20190085076; SEQ ID NO: 387 | 5441 |
| CII3275 | VH | PRT | W02016201389; SEQ ID NO: 387 | 5442 |
| CII3276 | VH | PRT | US20190085076; SEQ ID NO: 407 | 5443 |
| CII3277 | VH | PRT | W02016201389; SEQ ID NO: 407 | 5444 |
| CII3278 | VH | PRT | US20190085076; SEQ ID NO: 383 | 5445 |
| CII3279 | VH | PRT | W02016201389; SEQ ID NO: 383 | 5446 |
| CII3280 | VH | PRT | WO2016201388; SEQ ID NO: 163 | 5447 |
| CII3281 | VH | PRT | US20190085076; SEQ ID NO: 365 | 5448 |
| CII3282 | VH | PRT | W02016201389; SEQ ID NO: 365 | 5449 |
| CII3283 | VH | PRT | US20190085076; SEQ ID NO: 409 | 5450 |
| CII3284 | VH | PRT | W02016201389; SEQ ID NO: 409 | 5451 |
| CII3285 | VH | PRT | US20190085076; SEQ ID NO: 408 | 5452 |
| CII3286 | VH | PRT | W02016201389; SEQ ID NO: 408 | 5453 |
| CII3287 | VH | PRT | WO2019028283; SEQ ID NO: 43 | 5454 |
| CII3288 | VH | PRT | WO2016201388; SEQ ID NO: 62 | 5455 |
| CII3289 | VH | PRT | WO2019028283; SEQ ID NO: 49 | 5456 |
| CII3290 | VH | PRT | WO2016201388; SEQ ID NO: 56 | 5457 |
| CII3291 | VH | PRT | WO2016201388; SEQ ID NO: 250 | 5458 |
| CII3292 | VH | PRT | WO2016201388; SEQ ID NO: 51 | 5459 |
| CII3293 | VH | PRT | WO2016201388; SEQ ID NO: 210 | 5460 |
| CII3294 | VH | PRT | WO2016201388; SEQ ID NO: 172 | 5461 |
| CII3295 | VH | PRT | WO2019028283; SEQ ID NO: 51 | 5462 |
| CII3296 | VH | PRT | WO2018089789; SEQ ID NO: 10 | 5463 |
| CII3297 | VH | PRT | US20180201692; SEQ ID NO: 2 | 5464 |
| CII3298 | VH | PRT | US20180201692; SEQ ID NO: 22 | 5465 |
| CII3299 | VH | PRT | US20180201692; SEQ ID NO: 23 | 5466 |
| CII3300 | VH | PRT | US20180201692; SEQ ID NO: 24 | 5467 |
| CII3301 | VH | PRT | US20190117769; SEQ ID NO: 6 | 5468 |
| CII3302 | VH | PRT | US20190117769; SEQ ID NO: 10 | 5469 |
| CII3303 | VH | PRT | US20190117769; SEQ ID NO: 8 | 5470 |
| CII3304 | VH | PRT | US20190135920; SEQ ID NO: 24 | 5471 |
| CII3305 | VH | PRT | US20190135920; SEQ ID NO: 19 | 5472 |
| CII3306 | VH | PRT | US20190135920; SEQ ID NO: 35 | 5473 |
| CII3307 | VH | PRT | US20190135920; SEQ ID NO: 7 | 5474 |
| CII3308 | VH | PRT | US20190135920; SEQ ID NO: 5 | 5475 |
| CII3309 | VH | PRT | US20190135920; SEQ ID NO: 1 | 5476 |
| CII3310 | VH | PRT | US20190135920; SEQ ID NO: 2 | 5477 |
| CII3311 | VH | PRT | US20190135920; SEQ ID NO: 4 | 5478 |
| CII3312 | VH | PRT | US20190135920; SEQ ID NO: 6 | 5479 |
| CII3313 | VH | PRT | US20190135920; SEQ ID NO: 23 | 5480 |
| CII3314 | VH | PRT | US20190135920; SEQ ID NO: 15 | 5481 |
| CII3315 | VH | PRT | US20190135920; SEQ ID NO: 17 | 5482 |
| CII3316 | VH | PRT | US20190135920; SEQ ID NO: 22 | 5483 |
| CII3317 | VH | PRT | US20190135920; SEQ ID NO: 20 | 5484 |
| CII3318 | VH | PRT | US20190135920; SEQ ID NO: 16 | 5485 |
| CII3319 | VH | PRT | US20190135920; SEQ ID NO: 21 | 5486 |
| CII3320 | VH | PRT | US20190135920; SEQ ID NO: 18 | 5487 |
| CII3321 | VH | PRT | US20180333503; SEQ ID NO: 26 | 5488 |
| CII3322 | VH | PRT | US20190135920; SEQ ID NO: 3 | 5489 |
| CII3323 | VH | PRT | US20190016807; SEQ ID NO: 16 | 5490 |
| CII3324 | VH | PRT | US29190016807; SEQ ID NO: 2 | 5491 |
| CII3325 | VH | PRT | US20170253653; SEQ ID NO: 4 | 5492 |
| CII3326 | VH | PRT | US20190016807; SEQ ID NO: 4 | 5493 |
| CII3327 | VH | PRT | US29190016807; SEQ ID NO: 20 | 5494 |
| CII3328 | VH | PRT | WO2018089781; SEQ ID NO: 2 | 5495 |
| CII3329 | VH | PRT | US20199016807; SEQ ID NO: 15 | 5496 |
| CII3330 | VH | PRT | US29190016807; SEQ ID NO: 1 | 5497 |
| CII3331 | VH | PRT | US20170253653; SEQ ID NO: 17 | 5498 |
| CII3332 | VH | PRT | US20170253653; SEQ ID NO: 3 | 5499 |
| CII3333 | VH | PRT | US20170253653; SEQ ID NO: 21 | 5500 |
| CII3334 | VH | PRT | US20190016807; SEQ ID NO: 10 | 5501 |
| CII3335 | VH | PRT | US20199016807; SEQ ID NO: 8 | 5502 |
| CII3336 | VH | PRT | US29190016807; SEQ ID NO: 6 | 5503 |
| CII3337 | VH | PRT | US20170253653; SEQ ID NO: 6 | 5504 |
| CII3338 | VH | PRT | US20199016807; SEQ ID NO: 3 | 5505 |
| CII3339 | VH | PRT | US20190016807; SEQ ID NO: 9 | 5506 |
| CII3340 | VH | PRT | US20170253653; SEQ ID NO: 22 | 5507 |
| CII3341 | VH | PRT | US20170253653; SEQ ID NO: 16 | 5508 |
| CII3342 | VH | PRT | US20170253653; SEQ ID NO: 2 | 5509 |
| CII3343 | VH | PRT | US20170253653; SEQ ID NO: 15 | 5510 |
| CII3344 | VH | PRT | US20199016807; SEQ ID NO: 7 | 5511 |
| CII3345 | VH | PRT | US20190016807; SEQ ID NO: 5 | 5512 |
| CII3346 | VH | PRT | US20170253653; SEQ ID NO: 5 | 5513 |
| CII3347 | VH | PRT | US20170253653; SEQ ID NO: 1 | 5514 |
| CII3348 | VH | PRT | WO2018213316; SEQ ID NO: 119 | 5515 |
| CII3349 | VH | PRT | WO2018213316; SEQ ID NO: 120 | 5516 |
| CII3350 | VH | PRT | WO2018213316; SEQ ID NO: 118 | 5517 |
| CII3351 | VH | PRT | WO2018213316; SEQ ID NO: 117 | 5518 |
| CII3352 | VH | PRT | WO2018213316; SEQ ID NO: 121 | 5519 |
| CII3353 | VH | PRT | WO2018213316; SEQ ID NO: 128 | 5520 |
| CII3354 | VH | PRT | WO2018213316; SEQ ID NO: 122 | 5521 |
| CII3355 | VH | PRT | WO2018213316; SEQ ID NO: 129 | 5522 |
| CII3356 | VH | PRT | WO2018213316; SEQ ID NO: 125 | 5523 |
| CII3357 | VH | PRT | WO2018213316; SEQ ID NO: 124 | 5524 |
| CII3358 | VH | PRT | WO2018213316; SEQ ID NO: 123 | 5525 |
| CII3359 | VH | PRT | WO2018213316; SEQ ID NO: 127 | 5526 |
| CII3360 | VH | PRT | WO2018213316; SEQ ID NO: 126 | 5527 |
| CII3361 | VH | PRT | WO2017040301; SEQ ID NO: 469 | 5528 |
| CII3362 | VH | PRT | WO2017040301; SEQ ID NO: 474 | 5529 |
| CII3363 | VH | PRT | WO2017040301; SEQ ID NO: 464 | 5530 |
| CII3364 | VH | PRT | WO2017040301; SEQ ID NO: 389 | 5531 |
| CII3365 | VH | PRT | WO2017040301; SEQ ID NO: 331 | 5532 |
| CII3366 | VH | PRT | WO2017040301; SEQ ID NO: 413 | 5533 |
| CII3367 | VH | PRT | WO2017040301; SEQ ID NO: 400 | 5534 |
| CII3368 | VH | PRT | WO2017040301; SEQ ID NO: 339 | 5535 |
| CII3369 | VH | PRT | WO2017040301; SEQ ID NO: 439 | 5536 |
| CII3370 | VH | PRT | WO2017040301; SEQ ID NO: 320 | 5537 |
| CII3371 | VH | PRT | WO2017040301; SEQ ID NO: 350 | 5538 |
| CII3372 | VH | PRT | WO2017040301; SEQ ID NO: 370 | 5539 |
| CII3373 | VH | PRT | WO2017040301; SEQ ID NO: 420 | 5540 |
| CII3374 | VH | PRT | WO2017040301; SEQ ID NO: 432 | 5541 |
| CII3375 | VH | PRT | WO2017040301; SEQ ID NO: 361 | 5542 |
| CII3376 | VH | PRT | WO2017040301; SEQ ID NO: 385 | 5543 |
| CII3377 | VH | PRT | WO2017040301; SEQ ID NO: 506 | 5544 |
| CII3378 | VH | PRT | WO2017040301; SEQ ID NO: 492 | 5545 |
| CII3379 | VH | PRT | WO2017040301; SEQ ID NO: 510 | 5546 |
| CII3380 | VH | PRT | WO2017040301; SEQ ID NO: 397 | 5547 |
| CII3381 | VH | PRT | WO2017040301; SEQ ID NO: 490 | 5548 |
| CII3382 | VH | PRT | WO2017040301; SEQ ID NO: 508 | 5549 |
| CII3383 | VH | PRT | WO2017040301; SEQ ID NO: 337 | 5550 |
| CII3384 | VH | PRT | WO2017040301; SEQ ID NO: 407 | 5551 |
| CII3385 | VH | PRT | WO2017040301; SEQ ID NO: 347 | 5552 |
| CII3386 | VH | PRT | WO2017040301; SEQ ID NO: 504 | 5553 |
| CII3387 | VH | PRT | WO2017040301; SEQ ID NO: 507 | 5554 |
| CII3388 | VH | PRT | WO2017040301; SEQ ID NO: 447 | 5555 |
| CII3389 | VH | PRT | WO2017040301; SEQ ID NO: 437 | 5556 |
| CII3390 | VH | PRT | WO2017040301; SEQ ID NO: 367 | 5557 |
| CII3391 | VH | PRT | WO2017040301; SEQ ID NO: 387 | 5558 |
| CII3392 | VH | PRT | WO2017040301; SEQ ID NO: 491 | 5559 |
| CII3393 | VH | PRT | WO2017040301; SEQ ID NO: 509 | 5560 |
| CII3394 | VH | PRT | WO2017040301; SEQ ID NO: 390 | 5561 |
| CII3395 | VH | PRT | WO2017040301; SEQ ID NO: 392 | 5562 |
| CII3396 | VH | PRT | WO2017040301; SEQ ID NO: 334 | 5563 |
| CII3397 | VH | PRT | WO2017040301; SEQ ID NO: 335 | 5564 |
| CII3398 | VH | PRT | WO2017040301; SEQ ID NO: 411 | 5565 |
| CII3399 | VH | PRT | WO2017040301; SEQ ID NO: 412 | 5566 |
| CII3400 | VH | PRT | WO2017040301; SEQ ID NO: 399 | 5567 |
| CII3401 | VH | PRT | WO2017040301; SEQ ID NO: 402 | 5568 |
| CII3402 | VH | PRT | WO2017040301; SEQ ID NO: 340 | 5569 |
| CII3403 | VH | PRT | WO2017040301; SEQ ID NO: 342 | 5570 |
| CII3404 | VH | PRT | WO2017040301; SEQ ID NO: 440 | 5571 |
| CII3405 | VH | PRT | WO2017040301; SEQ ID NO: 441 | 5572 |
| CII3406 | VH | PRT | WO2017040301; SEQ ID NO: 323 | 5573 |
| CII3407 | VH | PRT | WO2017040301; SEQ ID NO: 324 | 5574 |
| CII3408 | VH | PRT | WO2017040301; SEQ ID NO: 353 | 5575 |
| CII3409 | VH | PRT | WO2017040301; SEQ ID NO: 354 | 5576 |
| CII3410 | VH | PRT | WO2017040301; SEQ ID NO: 373 | 5577 |
| CII3411 | VH | PRT | WO2017040301; SEQ ID NO: 374 | 5578 |
| CII3412 | VH | PRT | WO2017040301; SEQ ID NO: 423 | 5579 |
| CII3413 | VH | PRT | WO2017040301; SEQ ID NO: 424 | 5580 |
| CII3414 | VH | PRT | WO2017040301; SEQ ID NO: 433 | 5581 |
| CII3415 | VH | PRT | WO2017040301; SEQ ID NO: 434 | 5582 |
| CII3416 | VH | PRT | WO2017040301; SEQ ID NO: 363 | 5583 |
| CII3417 | VH | PRT | WO2017040301; SEQ ID NO: 364 | 5584 |
| CII3418 | VH | PRT | WO2017040301; SEQ ID NO: 380 | 5585 |
| CII3419 | VH | PRT | WO2017040301; SEQ ID NO: 382 | 5586 |
| CII3420 | VH | PRT | WO2017040301; SEQ ID NO: 395 | 5587 |
| CII3421 | VH | PRT | WO2017040301; SEQ ID NO: 330 | 5588 |
| CII3422 | VH | PRT | WO2017040301; SEQ ID NO: 414 | 5589 |
| CII3423 | VH | PRT | WO2017040301; SEQ ID NO: 405 | 5590 |
| CII3424 | VH | PRT | WO2017040301; SEQ ID NO: 345 | 5591 |
| CII3425 | VH | PRT | WO2017040301; SEQ ID NO: 445 | 5592 |
| CII3426 | VH | PRT | WO2017040301; SEQ ID NO: 322 | 5593 |
| CII3427 | VH | PRT | WO2017040301; SEQ ID NO: 352 | 5594 |
| CII3428 | VH | PRT | WO2017040301; SEQ ID NO: 372 | 5595 |
| CII3429 | VH | PRT | WO2017040301; SEQ ID NO: 422 | 5596 |
| CII3430 | VH | PRT | WO2017040301; SEQ ID NO: 429 | 5597 |
| CII3431 | VH | PRT | WO2017040301; SEQ ID NO: 359 | 5598 |
| CII3432 | VH | PRT | WO2017040301; SEQ ID NO: 379 | 5599 |
| CII3433 | VH | PRT | WO2017040301; SEQ ID NO: 470 | 5600 |
| CII3434 | VH | PRT | WO2017040301; SEQ ID NO: 398 | 5601 |
| CII3435 | VH | PRT | WO2017040301; SEQ ID NO: 418 | 5602 |
| CII3436 | VH | PRT | WO2017040301; SEQ ID NO: 348 | 5603 |
| CII3437 | VH | PRT | WO2017040301; SEQ ID NO: 448 | 5604 |
| CII3438 | VH | PRT | WO2017040301; SEQ ID NO: 327 | 5605 |
| CII3439 | VH | PRT | WO2017040301; SEQ ID NO: 357 | 5606 |
| CII3440 | VH | PRT | WO2017040301; SEQ ID NO: 377 | 5607 |
| CII3441 | VH | PRT | WO2017040301; SEQ ID NO: 427 | 5608 |
| CII3442 | VH | PRT | WO2017040301; SEQ ID NO: 438 | 5609 |
| CII3443 | VH | PRT | WO2017040301; SEQ ID NO: 520 | 5610 |
| CII3444 | VH | PRT | WO2017040301; SEQ ID NO: 471 | 5611 |
| CII3445 | VH | PRT | WO2017040301; SEQ ID NO: 396 | 5612 |
| CII3446 | VH | PRT | WO2017040301; SEQ ID NO: 336 | 5613 |
| CII3447 | VH | PRT | WO2017040301; SEQ ID NO: 409 | 5614 |
| CII3448 | VH | PRT | WO2017040301; SEQ ID NO: 406 | 5615 |
| CII3449 | VH | PRT | WO2017040301; SEQ ID NO: 346 | 5616 |
| CII3450 | VH | PRT | WO2017040301; SEQ ID NO: 446 | 5617 |
| CII3451 | VH | PRT | WO2017040301; SEQ ID NO: 326 | 5618 |
| CII3452 | VH | PRT | WO2017040301; SEQ ID NO: 356 | 5619 |
| CII3453 | VH | PRT | WO2017040301; SEQ ID NO: 376 | 5620 |
| CII3454 | VH | PRT | WO2017040301; SEQ ID NO: 426 | 5621 |
| CII3455 | VH | PRT | WO2017040301; SEQ ID NO: 436 | 5622 |
| CII3456 | VH | PRT | WO2017040301; SEQ ID NO: 366 | 5623 |
| CII3457 | VH | PRT | WO2017040301; SEQ ID NO: 386 | 5624 |
| CII3458 | VH | PRT | WO2017040301; SEQ ID NO: 338 | 5625 |
| CII3459 | VH | PRT | WO2017040301; SEQ ID NO: 417 | 5626 |
| CII3460 | VH | PRT | WO2017040301; SEQ ID NO: 408 | 5627 |
| CII3461 | VH | PRT | WO2017040301; SEQ ID NO: 328 | 5628 |
| CII3462 | VH | PRT | WO2017040301; SEQ ID NO: 358 | 5629 |
| CII3463 | VH | PRT | WO2017040301; SEQ ID NO: 378 | 5630 |
| CII3464 | VH | PRT | WO2017040301; SEQ ID NO: 428 | 5631 |
| CII3465 | VH | PRT | WO2017040301; SEQ ID NO: 368 | 5632 |
| CII3466 | VH | PRT | WO2017040301; SEQ ID NO: 388 | 5633 |
| CII3467 | VH | PRT | WO2017040301; SEQ ID NO: 466 | 5634 |
| CII3468 | VH | PRT | WO2017040301; SEQ ID NO: 468 | 5635 |
| CII3469 | VH | PRT | WO2017040301; SEQ ID NO: 463 | 5636 |
| CII3470 | VH | PRT | WO2017040301; SEQ ID NO: 473 | 5637 |
| CII3471 | VH | PRT | WO2017040301; SEQ ID NO: 462 | 5638 |
| CII3472 | VH | PRT | WO2017040301; SEQ ID NO: 465 | 5639 |
| CII3473 | VH | PRT | WO2017040301; SEQ ID NO: 467 | 5640 |
| CII3474 | VH | PRT | WO2017040301; SEQ ID NO: 472 | 5641 |
| CII3475 | VH | PRT | WO2017040301; SEQ ID NO: 391 | 5642 |
| CII3476 | VH | PRT | WO2017040301; SEQ ID NO: 333 | 5643 |
| CII3477 | VH | PRT | WO2017040301; SEQ ID NO: 410 | 5644 |
| CII3478 | VH | PRT | WO2017040301; SEQ ID NO: 401 | 5645 |
| CII3479 | VH | PRT | WO2017040301; SEQ ID NO: 341 | 5646 |
| CII3480 | VH | PRT | WO2017040301; SEQ ID NO: 442 | 5647 |
| CII3481 | VH | PRT | WO2017040301; SEQ ID NO: 325 | 5648 |
| CII3482 | VH | PRT | WO2017040301; SEQ ID NO: 355 | 5649 |
| CII3483 | VH | PRT | WO2017040301; SEQ ID NO: 375 | 5650 |
| CII3484 | VH | PRT | WO2017040301; SEQ ID NO: 425 | 5651 |
| CII3485 | VH | PRT | WO2017040301; SEQ ID NO: 435 | 5652 |
| CII3486 | VH | PRT | WO2017040301; SEQ ID NO: 365 | 5653 |
| CII3487 | VH | PRT | WO2017040301; SEQ ID NO: 384 | 5654 |
| CII3488 | VH | PRT | WO2017040301; SEQ ID NO: 496 | 5655 |
| CII3489 | VH | PRT | WO2017040301; SEQ ID NO: 525 | 5656 |
| CII3490 | VH | PRT | WO2017040301; SEQ ID NO: 495 | 5657 |
| CII3491 | VH | PRT | WO2017040301; SEQ ID NO: 524 | 5658 |
| CII3492 | VH | PRT | WO2017040301; SEQ ID NO: 393 | 5659 |
| CII3493 | VH | PRT | WO2017040301; SEQ ID NO: 329 | 5660 |
| CII3494 | VH | PRT | WO2017040301; SEQ ID NO: 416 | 5661 |
| CII3495 | VH | PRT | WO2017040301; SEQ ID NO: 404 | 5662 |
| CII3496 | VH | PRT | WO2017040301; SEQ ID NO: 343 | 5663 |
| CII3497 | VH | PRT | WO2017040301; SEQ ID NO: 443 | 5664 |
| CII3498 | VH | PRT | WO2017040301; SEQ ID NO: 319 | 5665 |
| CII3499 | VH | PRT | WO2017040301; SEQ ID NO: 349 | 5666 |
| CII3500 | VH | PRT | WO2017040301; SEQ ID NO: 369 | 5667 |
| CII3501 | VH | PRT | WO2017040301; SEQ ID NO: 419 | 5668 |
| CII3502 | VH | PRT | WO2017040301; SEQ ID NO: 494 | 5669 |
| CII3503 | VH | PRT | WO2017040301; SEQ ID NO: 523 | 5670 |
| CII3504 | VH | PRT | WO2017040301; SEQ ID NO: 430 | 5671 |
| CII3505 | VH | PRT | WO2017040301; SEQ ID NO: 493 | 5672 |
| CII3506 | VH | PRT | WO2017040301; SEQ ID NO: 522 | 5673 |
| CII3507 | VH | PRT | WO2017040301; SEQ ID NO: 360 | 5674 |
| CII3508 | VH | PRT | WO2017040301; SEQ ID NO: 381 | 5675 |
| CII3509 | VH | PRT | WO2017040301; SEQ ID NO: 518 | 5676 |
| CII3510 | VH | PRT | WO2017040301; SEQ ID NO: 521 | 5677 |
| CII3511 | VH | PRT | WO2017040301; SEQ ID NO: 394 | 5678 |
| CII3512 | VH | PRT | WO2017040301; SEQ ID NO: 332 | 5679 |
| CII3513 | VH | PRT | WO2017040301; SEQ ID NO: 415 | 5680 |
| CII3514 | VH | PRT | WO2017040301; SEQ ID NO: 403 | 5681 |
| CII3515 | VH | PRT | WO2017040301; SEQ ID NO: 344 | 5682 |
| CII3516 | VH | PRT | WO2017040301; SEQ ID NO: 444 | 5683 |
| CII3517 | VH | PRT | WO2017040301; SEQ ID NO: 321 | 5684 |
| CII3518 | VH | PRT | WO2017040301; SEQ ID NO: 351 | 5685 |
| CII3519 | VH | PRT | WO2017040301; SEQ ID NO: 371 | 5686 |
| CII3520 | VH | PRT | WO2017040301; SEQ ID NO: 421 | 5687 |
| CII3521 | VH | PRT | WO2017040301; SEQ ID NO: 431 | 5688 |
| CII3522 | VH | PRT | WO2017040301; SEQ ID NO: 362 | 5689 |
| CII3523 | VH | PRT | WO2017040301; SEQ ID NO: 383 | 5690 |
| CII3524 | VH | PRT | WO2017040301; SEQ ID NO: 505 | 5691 |
| CII3525 | VH | PRT | WO2017040301; SEQ ID NO: 519 | 5692 |
| CII3526 | VH | PRT | WO2017075432; SEQ ID NO: 116 | 5693 |
| CII3527 | VH | PRT | WO2017075432; SEQ ID NO: 117 | 5694 |
| CII3528 | VH | PRT | WO2017075432; SEQ ID NO: 131 | 5695 |
| CII3529 | VH | PRT | WO2017075432; SEQ ID NO: 153 | 5696 |
| CII3530 | VH | PRT | WO2017075432; SEQ ID NO: 144 | 5697 |
| CII3531 | VH | PRT | WO2017075432; SEQ ID NO: 166 | 5698 |
| CII3532 | VH | PRT | WO2017075432; SEQ ID NO: 205 | 5699 |
| CII3533 | VH | PRT | WO2017075432; SEQ ID NO: 125 | 5700 |
| CII3534 | VH | PRT | WO2017075432; SEQ ID NO: 136 | 5701 |
| CII3535 | VH | PRT | WO2017075432; SEQ ID NO: 158 | 5702 |
| CII3536 | VH | PRT | WO2017075432; SEQ ID NO: 147 | 5703 |
| CII3537 | VH | PRT | WO2017075432; SEQ ID NO: 169 | 5704 |
| CII3538 | VH | PRT | WO2017075432; SEQ ID NO: 210 | 5705 |
| CII3539 | VH | PRT | WO2017075432; SEQ ID NO: 118 | 5706 |
| CII3540 | VH | PRT | WO2017075432; SEQ ID NO: 120 | 5707 |
| CII3541 | VH | PRT | WO2017075432; SEQ ID NO: 212 | 5708 |
| CII3542 | VH | PRT | WO2017075432; SEQ ID NO: 211 | 5709 |
| CII3543 | VH | PRT | WO2017075432; SEQ ID NO: 132 | 5710 |
| CII3544 | VH | PRT | WO2017075432; SEQ ID NO: 133 | 5711 |
| CII3545 | VH | PRT | WO2017075432; SEQ ID NO: 152 | 5712 |
| CII3546 | VH | PRT | WO2017075432; SEQ ID NO: 155 | 5713 |
| CII3547 | VH | PRT | WO2017075432; SEQ ID NO: 142 | 5714 |
| CII3548 | VH | PRT | WO2017075432; SEQ ID NO: 145 | 5715 |
| CII3549 | VH | PRT | WO2017075432; SEQ ID NO: 164 | 5716 |
| CII3550 | VH | PRT | WO2017075432; SEQ ID NO: 167 | 5717 |
| CII3551 | VH | PRT | WO2017075432; SEQ ID NO: 123 | 5718 |
| CII3552 | VH | PRT | WO2017075432; SEQ ID NO: 128 | 5719 |
| CII3553 | VH | PRT | WO2017075432; SEQ ID NO: 151 | 5720 |
| CII3554 | VH | PRT | WO2017075432; SEQ ID NO: 140 | 5721 |
| CII3555 | VH | PRT | WO2017075432; SEQ ID NO: 162 | 5722 |
| CII3556 | VH | PRT | WO2017075432; SEQ ID NO: 126 | 5723 |
| CII3557 | VH | PRT | WO2017075432; SEQ ID NO: 148 | 5724 |
| CII3558 | VH | PRT | WO2017075432; SEQ ID NO: 170 | 5725 |
| CII3559 | VH | PRT | WO2017075432; SEQ ID NO: 124 | 5726 |
| CII3560 | VH | PRT | WO2017075432; SEQ ID NO: 135 | 5727 |
| CII3561 | VH | PRT | WO2017075432; SEQ ID NO: 157 | 5728 |
| CII3562 | VH | PRT | WO2017075432; SEQ ID NO: 146 | 5729 |
| CII3563 | VH | PRT | WO2017075432; SEQ ID NO: 168 | 5730 |
| CII3564 | VH | PRT | WO2017075432; SEQ ID NO: 137 | 5731 |
| CII3565 | VH | PRT | WO2017075432; SEQ ID NO: 159 | 5732 |
| CII3566 | VH | PRT | WO2017075432; SEQ ID NO: 138 | 5733 |
| CII3567 | VH | PRT | WO2017075432; SEQ ID NO: 160 | 5734 |
| CII3568 | VH | PRT | WO2017075432; SEQ ID NO: 127 | 5735 |
| CII3569 | VH | PRT | WO2017075432; SEQ ID NO: 119 | 5736 |
| CII3570 | VH | PRT | WO2017075432; SEQ ID NO: 134 | 5737 |
| CII3571 | VH | PRT | WO2017075432; SEQ ID NO: 154 | 5738 |
| CII3572 | VH | PRT | WO2017075432; SEQ ID NO: 143 | 5739 |
| CII3573 | VH | PRT | WO2017075432; SEQ ID NO: 165 | 5740 |
| CII3574 | VH | PRT | WO2017075432; SEQ ID NO: 209 | 5741 |
| CII3575 | VH | PRT | WO2017075432; SEQ ID NO: 208 | 5742 |
| CII3576 | VH | PRT | WO2017075432; SEQ ID NO: 121 | 5743 |
| CII3577 | VH | PRT | WO2017075432; SEQ ID NO: 129 | 5744 |
| CII3578 | VH | PRT | WO2017075432; SEQ ID NO: 206 | 5745 |
| CII3579 | VH | PRT | WO2017075432; SEQ ID NO: 207 | 5746 |
| CII3580 | VH | PRT | WO2017075432; SEQ ID NO: 150 | 5747 |
| CII3581 | VH | PRT | WO2017075432; SEQ ID NO: 139 | 5748 |
| CII3582 | VH | PRT | WO2017075432; SEQ ID NO: 161 | 5749 |
| CII3583 | VH | PRT | WO2017075432; SEQ ID NO: 122 | 5750 |
| CII3584 | VH | PRT | WO2017075432; SEQ ID NO: 130 | 5751 |
| CII3585 | VH | PRT | WO2017075432; SEQ ID NO: 156 | 5752 |
| CII3586 | VH | PRT | WO2017075432; SEQ ID NO: 141 | 5753 |
| CII3587 | VH | PRT | WO2017075432; SEQ ID NO: 163 | 5754 |
| CII3588 | VH | PRT | WO2017075432; SEQ ID NO: 149 | 5755 |
| CII3589 | VH | PRT | WO2018107058; SEQ ID NO: 41 | 5756 |
| CII3590 | VH | PRT | WO2018107058; SEQ ID NO: 4 | 5757 |
| CII3591 | VH | PRT | WO2018107058; SEQ ID NO: 43 | 5758 |
| CII3592 | VH | PRT | WO2018107058; SEQ ID NO: 2 | 5759 |
| CII3593 | VH | PRT | WO2018107058; SEQ ID NO: 39 | 5760 |
| CII3594 | VH | PRT | WO2018107058; SEQ ID NO: 37 | 5761 |
| CII3595 | VH | PRT | WO2018107058; SEQ ID NO: 35 | 5762 |
| CII3596 | VH | PRT | US20190085084; SEQ ID NO: 317 | 5763 |
| CII3597 | VH | PRT | US20190085084; SEQ ID NO: 289 | 5764 |
| CII3598 | VH | PRT | US20190085084; SEQ ID NO: 372 | 5765 |
| CII3599 | VH | PRT | US20190085084; SEQ ID NO: 402 | 5766 |
| CII3600 | VH | PRT | US20190085084; SEQ ID NO: 288 | 5767 |
| CII3601 | VH | PRT | US20190085084; SEQ ID NO: 369 | 5768 |
| CII3602 | VH | PRT | US20190085084; SEQ ID NO: 287 | 5769 |
| CII3603 | VH | PRT | US20190085084; SEQ ID NO: 295 | 5770 |
| CII3604 | VH | PRT | US20190085084; SEQ ID NO: 294 | 5771 |
| CII3605 | VH | PRT | US20190085084; SEQ ID NO: 473 | 5772 |
| CII3606 | VH | PRT | US20190085084; SEQ ID NO: 475 | 5773 |
| CII3607 | VH | PRT | US20190085084; SEQ ID NO: 291 | 5774 |
| CII3608 | VH | PRT | US20190085084; SEQ ID NO: 437 | 5775 |
| CII3609 | VH | PRT | US20190085084; SEQ ID NO: 440 | 5776 |
| CII3610 | VH | PRT | US20190085084; SEQ ID NO: 426 | 5777 |
| CII3611 | VH | PRT | US20190085084; SEQ ID NO: 431 | 5778 |
| CII3612 | VH | PRT | US20190085084; SEQ ID NO: 431 | 5779 |
| CII3613 | VH | PRT | US20190085084; SEQ ID NO: 292 | 5780 |
| CII3614 | VH | PRT | US20190085084; SEQ ID NO: 454 | 5781 |
| CII3615 | VH | PRT | US20190085084; SEQ ID NO: 290 | 5782 |
| CII3616 | VH | PRT | US20190085084; SEQ ID NO: 414 | 5783 |
| CII3617 | VH | PRT | US20190085084; SEQ ID NO: 410 | 5784 |
| CII3618 | VH | PRT | US20190085084; SEQ ID NO: 284 | 5785 |
| CII3619 | VH | PRT | US20190085084; SEQ ID NO: 606 | 5786 |
| CII3620 | VH | PRT | US20190085084; SEQ ID NO: 327 | 5787 |
| CII3621 | VH | PRT | US20190085084; SEQ ID NO: 325 | 5788 |
| CII3622 | VH | PRT | US20190085084; SEQ ID NO: 320 | 5789 |
| CII3623 | VH | PRT | US20190085084; SEQ ID NO: 648 | 5790 |
| CII3624 | VH | PRT | US20190085084; SEQ ID NO: 648 | 5791 |
| CII3625 | VH | PRT | US20190085084; SEQ ID NO: 331 | 5792 |
| CII3626 | VH | PRT | US20190085084; SEQ ID NO: 342 | 5793 |
| CII3627 | VH | PRT | US20190085084; SEQ ID NO: 342 | 5794 |
| CII3628 | VH | PRT | US20190085084; SEQ ID NO: 285 | 5795 |
| CII3629 | VH | PRT | US20190085084; SEQ ID NO: 353 | 5796 |
| CII3630 | VH | PRT | US20190085084; SEQ ID NO: 351 | 5797 |
| CII3631 | VH | PRT | US20190085084; SEQ ID NO: 357 | 5798 |
| CII3632 | VH | PRT | US20190085084; SEQ ID NO: 349 | 5799 |
| CII3633 | VH | PRT | US20190085084; SEQ ID NO: 355 | 5800 |
| CII3634 | VH | PRT | US20190085084; SEQ ID NO: 310 | 5801 |
| CII3635 | VH | PRT | US20190085084; SEQ ID NO: 307 | 5802 |
| CII3636 | VH | PRT | US20190085084; SEQ ID NO: 306 | 5803 |
| CII3637 | VH | PRT | US20190085084; SEQ ID NO: 308 | 5804 |
| CII3638 | VH | PRT | US20190085084; SEQ ID NO: 309 | 5805 |
| CII3639 | VH | PRT | US20190085084; SEQ ID NO: 305 | 5806 |
| CII3640 | VH | PRT | US20190085084; SEQ ID NO: 302 | 5807 |
| CII3641 | VH | PRT | US20190085084; SEQ ID NO: 304 | 5808 |
| CII3642 | VH | PRT | US20190085084; SEQ ID NO: 303 | 5809 |
| CII3643 | VH | PRT | US20190085084; SEQ ID NO: 315 | 5810 |
| CII3644 | VH | PRT | US20190085084; SEQ ID NO: 312 | 5811 |
| CII3645 | VH | PRT | US20190085084; SEQ ID NO: 313 | 5812 |
| CII3646 | VH | PRT | US20190085084; SEQ ID NO: 311 | 5813 |
| CII3647 | VH | PRT | US20190085084; SEQ ID NO: 314 | 5814 |
| CII3648 | VH | PRT | US20190085084; SEQ ID NO: 300 | 5815 |
| CII3649 | VH | PRT | US20190085084; SEQ ID NO: 299 | 5816 |
| CII3650 | VH | PRT | US20190085084; SEQ ID NO: 297 | 5817 |
| CII3651 | VH | PRT | US20190085084; SEQ ID NO: 298 | 5818 |
| CII3652 | VH | PRT | US20190085084; SEQ ID NO: 296 | 5819 |
| CII3653 | VH | PRT | US20190085084; SEQ ID NO: 301 | 5820 |
| CII3654 | VH | PRT | WO2014028776; SEQ ID NO: 83 | 5821 |
| CII3655 | VH | PRT | US20140212413; SEQ ID NO: 5 | 5822 |
| CII3656 | VH | PRT | WO2010129469; SEQ ID NO: 2 | 5823 |
| CII3657 | VH | PRT | WO2018140121; WO2018147923; SEQ | 5824 |
| | | | ID NO: 32 | |
| CII3658 | VH | PRT | WO2010129469; SEQ ID NO: 10 | 5825 |
| CII3659 | VH | PRT | WO2018140121: WO2018147921; SEQ | 5826 |
| | | | ID NO: 7 | |
| CII3660 | VH | PRT | WO2019028292; SEQ ID NO: 120 | 5827 |
| CII3661 | VH | PRT | WO2017062672; SEQ ID NO: 429 | 5828 |
| CII3662 | VH | PRT | WO2017062672; SEQ ID NO: 481 | 5829 |
| CII3663 | VH | PRT | WO2017062672; SEQ ID NO: 399 | 5830 |
| CII3664 | VH | PRT | WO2017062672; SEQ ID NO: 637 | 5831 |
| CII3665 | VH | PRT | WO2017062672; SEQ ID NO: 554 | 5832 |
| CII3666 | VH | PRT | WO2017062672; SEQ ID NO: 573 | 5833 |
| CII3667 | VH | PRT | WO2017062672; SEQ ID NO: 442 | 5834 |
| CII3668 | VH | PRT | WO2017062672; SEQ ID NO: 494 | 5835 |
| CII3669 | VH | PRT | WO2017062672; SEQ ID NO: 649 | 5836 |
| CII3670 | VH | PRT | WO2017062672; SEQ ID NO: 484 | 5837 |
| CII3671 | VH | PRT | WO2017062672; SEQ ID NO: 432 | 5838 |
| CII3672 | VH | PRT | WO2016023019; SEQ ID NO: 319 | 5839 |
| CII3673 | VH | PRT | WO2016023019; SEQ ID NO: 244 | 5840 |
| CII3674 | VH | PRT | WO2016023019; SEQ ID NO: 317 | 5841 |
| CII3675 | VH | PRT | WO2016023019; SEQ ID NO: 312 | 5842 |
| CII3676 | VH | PRT | WO2016023019; SEQ ID NO: 288 | 5843 |
| CII3677 | VH | PRT | WO2016023019; SEQ ID NO: 280 | 5844 |
| CII3678 | VH | PRT | WO2016023019; SEQ ID NO: 282 | 5845 |
| CII3679 | VH | PRT | WO2016023019; SEQ ID NO: 290 | 5846 |
| CII3680 | VH | PRT | WO2016023019; SEQ ID NO: 294 | 5847 |
| CII3681 | VH | PRT | WO2016023019; SEQ ID NO: 304 | 5848 |
| CII3682 | VH | PRT | WO2016023019; SEQ ID NO: 308 | 5849 |
| CII3683 | VH | PRT | WO2016023019; SEQ ID NO: 298 | 5850 |
| CII3684 | VH | PRT | WO2016023019; SEQ ID NO: 286 | 5851 |
| CII3685 | VH | PRT | WO2016023019; SEQ ID NO: 284 | 5852 |
| CII3686 | VH | PRT | WO2016023019; SEQ ID NO: 242 | 5853 |
| CII3687 | VH | PRT | WO2016023019; SEQ ID NO: 315 | 5854 |
| CII3688 | VH | PRT | WO2017062672; SEQ ID NO: 401 | 5855 |
| CII3689 | VH | PRT | WO2017062672; SEQ ID NO: 474 | 5856 |
| CII3690 | VH | PRT | WO2017062672; SEQ ID NO: 514 | 5857 |
| CII3691 | VH | PRT | WO2019028292; SEQ ID NO: 85 | 5858 |
| CII3692 | VH | PRT | WO2017062672; SEQ ID NO: 525 | 5859 |
| CII3693 | VH | PRT | WO2017062672; SEQ ID NO: 535 | 5860 |
| CII3694 | VH | PRT | WO2017062672; SEQ ID NO: 547 | 5861 |
| CII3695 | VH | PRT | WO2017062672; SEQ ID NO: 467 | 5862 |
| CII3696 | VH | PRT | WO2017062672; SEQ ID NO: 671 | 5863 |
| CII3697 | VH | PRT | WO2017062672; SEQ ID NO: 567 | 5864 |
| CII3698 | VH | PRT | WO2017062672; SEQ ID NO: 423 | 5865 |
| CII3699 | VH | PRT | WO2017062672; SEQ ID NO: 661 | 5866 |
| CII3700 | VH | PRT | WO2017062672; SEQ ID NO: 413 | 5867 |
| CII3701 | VH | PRT | WO2017062672; SEQ ID NO: 505 | 5868 |
| CII3702 | VH | PRT | WO2017062672; SEQ ID NO: 451 | 5869 |
| CII3703 | VH | PRT | WO2017062672; SEQ ID NO: 511 | 5870 |
| CII3704 | VH | PRT | WO2017062672; SEQ ID NO: 409 | 5871 |
| CII3705 | VH | PRT | WO2017062672; SEQ ID NO: 731 | 5872 |
| CII3706 | VH | PRT | WO2017062672; SEQ ID NO: 733 | 5873 |
| CII3707 | VH | PRT | WO2017062672; SEQ ID NO: 636 | 5874 |
| CII3708 | VH | PRT | WO2017062672; SEQ ID NO: 552 | 5875 |
| CII3709 | VH | PRT | WO2017062672; SEQ ID NO: 572 | 5876 |
| CII3710 | VH | PRT | WO2017062672; SEQ ID NO: 440 | 5877 |
| CII3711 | VH | PRT | WO2017062672; SEQ ID NO: 492 | 5878 |
| CII3712 | VH | PRT | WO2017062672; SEQ ID NO: 647 | 5879 |
| CII3713 | VH | PRT | WO2017062672; SEQ ID NO: 482 | 5880 |
| CII3714 | VH | PRT | WO2017062672; SEQ ID NO: 430 | 5881 |
| CII3715 | VH | PRT | WO2016023019; SEQ ID NO: 374 | 5882 |
| CII3716 | VH | PRT | WO2017062672; SEQ ID NO: 472 | 5883 |
| CII3717 | VH | PRT | WO2017062672; SEQ ID NO: 519 | 5884 |
| CII3718 | VH | PRT | WO2017062672; SEQ ID NO: 529 | 5885 |
| CII3719 | VH | PRT | WO2017062672; SEQ ID NO: 539 | 5886 |
| CII3720 | VH | PRT | WO2017062672; SEQ ID NO: 549 | 5887 |
| CII3721 | VH | PRT | WO2017062672; SEQ ID NO: 469 | 5888 |
| CII3722 | VH | PRT | WO2017062672; SEQ ID NO: 677 | 5889 |
| CII3723 | VH | PRT | WO2017062672; SEQ ID NO: 569 | 5890 |
| CII3724 | VH | PRT | WO2017062672; SEQ ID NO: 427 | 5891 |
| CII3725 | VH | PRT | WO2017062672; SEQ ID NO: 666 | 5892 |
| CII3726 | VH | PRT | WO2017062672; SEQ ID NO: 417 | 5893 |
| CII3727 | VH | PRT | WO2017062672; SEQ ID NO: 509 | 5894 |
| CII3728 | VH | PRT | WO2017062672; SEQ ID NO: 457 | 5895 |
| CII3729 | VH | PRT | WO2017062672; SEQ ID NO: 639 | 5896 |
| CII3730 | VH | PRT | WO2017062672; SEQ ID NO: 640 | 5897 |
| CII3731 | VH | PRT | WO2017062672; SEQ ID NO: 553 | 5898 |
| CII3732 | VH | PRT | WO2017062672; SEQ ID NO: 574 | 5899 |
| CII3733 | VH | PRT | WO2017062672; SEQ ID NO: 441 | 5900 |
| CII3734 | VH | PRT | WO2017062672; SEQ ID NO: 493 | 5901 |
| CII3735 | VH | PRT | WO2017062672; SEQ ID NO: 648 | 5902 |
| CII3736 | VH | PRT | WO2017062672; SEQ ID NO: 651 | 5903 |
| CII3737 | VH | PRT | WO2017062672; SEQ ID NO: 483 | 5904 |
| CII3738 | VH | PRT | WO2017062672; SEQ ID NO: 431 | 5905 |
| CII3739 | VH | PRT | WO2016023019; SEQ ID NO: 380 | 5906 |
| CII3740 | VH | PRT | WO2017062672; SEQ ID NO: 402 | 5907 |
| CII3741 | VH | PRT | WO2017062672; SEQ ID NO: 476 | 5908 |
| CII3742 | VH | PRT | WO2017062672; SEQ ID NO: 516 | 5909 |
| CII3743 | VH | PRT | WO2017062672; SEQ ID NO: 526 | 5910 |
| CII3744 | VH | PRT | WO2017062672; SEQ ID NO: 537 | 5911 |
| CII3745 | VH | PRT | WO2017062672; SEQ ID NO: 545 | 5912 |
| CII3746 | VH | PRT | WO2017062672; SEQ ID NO: 465 | 5913 |
| CII3747 | VH | PRT | WO2017062672; SEQ ID NO: 674 | 5914 |
| CII3748 | VH | PRT | WO2017062672; SEQ ID NO: 675 | 5915 |
| CII3749 | VH | PRT | WO2017062672; SEQ ID NO: 565 | 5916 |
| CII3750 | VH | PRT | WO2017062672; SEQ ID NO: 425 | 5917 |
| CII3751 | VH | PRT | WO2017062672; SEQ ID NO: 663 | 5918 |
| CII3752 | VH | PRT | WO2017062672; SEQ ID NO: 664 | 5919 |
| CII3753 | VH | PRT | WO2017062672; SEQ ID NO: 415 | 5920 |
| CII3754 | VH | PRT | WO2017062672; SEQ ID NO: 506 | 5921 |
| CII3755 | VH | PRT | WO2017062672; SEQ ID NO: 454 | 5922 |
| CII3756 | VH | PRT | WO2017062672; SEQ ID NO: 635 | 5923 |
| CII3757 | VH | PRT | WO2017062672; SEQ ID NO: 460 | 5924 |
| CII3758 | VH | PRT | WO2017062672; SEQ ID NO: 439 | 5925 |
| CII3759 | VH | PRT | WO2017062672; SEQ ID NO: 551 | 5926 |
| CII3760 | VH | PRT | WO2017062672; SEQ ID NO: 643 | 5927 |
| CII3761 | VH | PRT | WO2017062672; SEQ ID NO: 558 | 5928 |
| CII3762 | VH | PRT | WO2017062672; SEQ ID NO: 578 | 5929 |
| CII3763 | VH | PRT | WO2017062672; SEQ ID NO: 445 | 5930 |
| CII3764 | VH | PRT | WO2017062672; SEQ ID NO: 498 | 5931 |
| CII3765 | VH | PRT | WO2017062672; SEQ ID NO: 654 | 5932 |
| CII3766 | VH | PRT | WO2017062672; SEQ ID NO: 488 | 5933 |
| CII3767 | VH | PRT | WO2017062672; SEQ ID NO: 436 | 5934 |
| CII3768 | VH | PRT | WO2017062672; SEQ ID NO: 406 | 5935 |
| CII3769 | VH | PRT | WO2017062672; SEQ ID NO: 478 | 5936 |
| CII3770 | VH | PRT | WO2017062672; SEQ ID NO: 512 | 5937 |
| CII3771 | VH | PRT | WO2017062672; SEQ ID NO: 522 | 5938 |
| CII3772 | VH | PRT | WO2017062672; SEQ ID NO: 532 | 5939 |
| CII3773 | VH | PRT | WO2017062672; SEQ ID NO: 542 | 5940 |
| CII3774 | VH | PRT | WO2017062672; SEQ ID NO: 462 | 5941 |
| CII3775 | VH | PRT | WO2017062672; SEQ ID NO: 670 | 5942 |
| CII3776 | VH | PRT | WO2016023019; SEQ ID NO: 260 | 5943 |
| CII3777 | VH | PRT | WO2016023019; SEQ ID NO: 349 | 5944 |
| CII3778 | VH | PRT | WO2016023019; SEQ ID NO: 264 | 5945 |
| CII3779 | VH | PRT | WO2016023019; SEQ ID NO: 341 | 5946 |
| CII3780 | VH | PRT | WO2016023019; SEQ ID NO: 355 | 5947 |
| CII3781 | VH | PRT | WO2016023019; SEQ ID NO: 353 | 5948 |
| CII3782 | VH | PRT | WO2016023019; SEQ ID NO: 369 | 5949 |
| CII3783 | VH | PRT | WO2016023019; SEQ ID NO: 258 | 5950 |
| CII3784 | VH | PRT | WO2016023019; SEQ ID NO: 262 | 5951 |
| CII3785 | VH | PRT | WO2016023019; SEQ ID NO: 410 | 5952 |
| CII3786 | VH | PRT | WO2017062672; SEQ ID NO: 563 | 5953 |
| CII3787 | VH | PRT | WO2017062672; SEQ ID NO: 421 | 5954 |
| CII3788 | VH | PRT | WO2017062672; SEQ ID NO: 660 | 5955 |
| CII3789 | VH | PRT | WO2017062672; SEQ ID NO: 411 | 5956 |
| CII3790 | VH | PRT | WO2017062672; SEQ ID NO: 503 | 5957 |
| CII3791 | VH | PRT | WO2017062672; SEQ ID NO: 453 | 5958 |
| CII3792 | VH | PRT | WO2019028292; SEQ ID NO: 65 | 5959 |
| CII3793 | VH | PRT | WO2019028292; SEQ ID NO: 69 | 5960 |
| CII3794 | VH | PRT | WO2019028292; SEQ ID NO: 67 | 5961 |
| CII3795 | VH | PRT | WO2019028292; SEQ ID NO: 55 | 5962 |
| CII3796 | VH | PRT | WO2017062672; SEQ ID NO: 471 | 5983 |
| CII3797 | VH | PRT | WO2017062672; SEQ ID NO: 817 | 5964 |
| CII3798 | VH | PRT | WO2017062672; SEQ ID NO: 646 | 5965 |
| CII3799 | VH | PRT | WO2017062672; SEQ ID NO: 491 | 5968 |
| CII3800 | VH | PRT | WO2017062672; SEQ ID NO: 560 | 5967 |
| CII3801 | VH | PRT | WO2017062672; SEQ ID NO: 580 | 5968 |
| CII3802 | VH | PRT | WO2017062672; SEQ ID NO: 490 | 5969 |
| CII3803 | VH | PRT | WO2017062672; SEQ ID NO: 438 | 5970 |
| CII3804 | VH | PRT | WO2017062672; SEQ ID NO: 407 | 5971 |
| CII3805 | VH | PRT | WO2016023019; SEQ ID NO: 271 | 5972 |
| CII3806 | VH | PRT | WO2016023019; SEQ ID NO: 256 | 5973 |
| CII3807 | VH | PRT | WO2017062672; SEQ ID NO: 480 | 5974 |
| CII3808 | VH | PRT | WO2017062672; SEQ ID NO: 550 | 5975 |
| CII3809 | VH | PRT | WO2017062672; SEQ ID NO: 470 | 5976 |
| CII3810 | VH | PRT | WO2017062672; SEQ ID NO: 678 | 5977 |
| CII3811 | VH | PRT | WO2017062672; SEQ ID NO: 428 | 5978 |
| CII3812 | VH | PRT | WO2017062672; SEQ ID NO: 667 | 5979 |
| CII3813 | VH | PRT | WO2017062672; SEQ ID NO: 418 | 5980 |
| CII3814 | VH | PRT | WO2017062672; SEQ ID NO: 824 | 5981 |
| CII3815 | VH | PRT | WO2017062672; SEQ ID NO: 644 | 5982 |
| CII3816 | VH | PRT | WO2017062672; SEQ ID NO: 559 | 5983 |
| CII3817 | VH | PRT | WO2017062672; SEQ ID NO: 579 | 5984 |
| CII3818 | VH | PRT | WO2017062672; SEQ ID NO: 447 | 5985 |
| CII3819 | VH | PRT | WO2017062672; SEQ ID NO: 499 | 5986 |
| CII3820 | VH | PRT | WO2017062672; SEQ ID NO: 655 | 5987 |
| CII3821 | VH | PRT | WO2017062672; SEQ ID NO: 489 | 5988 |
| CII3822 | VH | PRT | WO2017062672; SEQ ID NO: 437 | 5989 |
| CII3823 | VH | PRT | WO2017062672; SEQ ID NO: 400 | 5990 |
| CII3824 | VH | PRT | WO2016023019; SEQ ID NO: 274 | 5991 |
| CII3825 | VH | PRT | WO2016023019; SEQ ID NO: 395 | 5992 |
| CII3826 | VH | PRT | WO2016023019; SEQ ID NO: 277 | 5993 |
| CII3827 | VH | PRT | WO2016023019; SEQ ID NO: 367 | 5994 |
| CII3828 | VH | PRT | WO2017062672; SEQ ID NO: 479 | 5995 |
| CII3829 | VH | PRT | WO2017062672; SEQ ID NO: 518 | 5996 |
| CII3830 | VH | PRT | WO2017062672; SEQ ID NO: 528 | 5997 |
| CII3831 | VH | PRT | WO2017062672; SEQ ID NO: 538 | 5998 |
| CII3832 | VH | PRT | WO2017062672; SEQ ID NO: 548 | 5999 |
| CII3833 | VH | PRT | WO2017062672; SEQ ID NO: 468 | 6000 |
| CII3834 | VH | PRT | WO2017062672; SEQ ID NO: 676 | 6001 |
| CII3835 | VH | PRT | WO2017062672; SEQ ID NO: 568 | 6002 |
| CII3836 | VH | PRT | WO2017062672; SEQ ID NO: 426 | 6003 |
| CII3837 | VH | PRT | WO2017062672; SEQ ID NO: 665 | 6004 |
| CII3838 | VH | PRT | WO2017062672; SEQ ID NO: 416 | 6005 |
| CII3839 | VH | PRT | WO2017062672; SEQ ID NO: 508 | 6006 |
| CII3840 | VH | PRT | WO2017062672; SEQ ID NO: 456 | 6007 |
| CII3841 | VH | PRT | WO2017062672; SEQ ID NO: 645 | 6008 |
| CII3842 | VH | PRT | WO2017062672; SEQ ID NO: 448 | 6009 |
| CII3843 | VH | PRT | WO2017062672; SEQ ID NO: 500 | 6010 |
| CII3844 | VH | PRT | WO2017062672; SEQ ID NO: 656 | 6011 |
| CII3845 | VH | PRT | WO2017062672; SEQ ID NO: 408 | 6012 |
| CII3846 | VH | PRT | WO2016023019; SEQ ID NO: 268 | 6013 |
| CII3847 | VH | PRT | WO2016023019; SEQ ID NO: 386 | 6014 |
| CII3848 | VH | PRT | WO2017062672; SEQ ID NO: 520 | 6015 |
| CII3849 | VH | PRT | WO2017062672; SEQ ID NO: 530 | 6016 |
| CII3850 | VH | PRT | WO2017062672; SEQ ID NO: 540 | 6017 |
| CII3851 | VH | PRT | WO2017062672; SEQ ID NO: 570 | 6018 |
| CII3852 | VH | PRT | WO2017062672; SEQ ID NO: 510 | 6019 |
| CII3853 | VH | PRT | WO2017062672; SEQ ID NO: 458 | 6020 |
| CII3854 | VH | PRT | WO2017062672; SEQ ID NO: 732 | 6021 |
| CII3855 | VH | PRT | WO2017062672; SEQ ID NO: 818 | 6022 |
| CII3856 | VH | PRT | WO2017062672; SEQ ID NO: 531 | 6023 |
| CII3857 | VH | PRT | WO2017062672; SEQ ID NO: 449 | 6024 |
| CII3858 | VH | PRT | WO2017062672; SEQ ID NO: 461 | 6025 |
| CII3859 | VH | PRT | WO2017062672; SEQ ID NO: 820 | 6026 |
| CII3860 | VH | PRT | WO2017062672; SEQ ID NO: 419 | 6027 |
| CII3861 | VH | PRT | WO2017062672; SEQ ID NO: 541 | 6028 |
| CII3862 | VH | PRT | WO2017062672; SEQ ID NO: 501 | 6029 |
| CII3863 | VH | PRT | WO2017062672; SEQ ID NO: 668 | 6030 |
| CII3864 | VH | PRT | WO2017062672; SEQ ID NO: 521 | 6031 |
| CII3865 | VH | PRT | WO2019028292; SEQ ID NO: 119 | 6032 |
| CII3866 | VH | PRT | WO2017062672; SEQ ID NO: 657 | 6033 |
| CII3867 | VH | PRT | WO2017062672; SEQ ID NO: 825 | 6034 |
| CII3868 | VH | PRT | WO2017062672; SEQ ID NO: 823 | 6035 |
| CII3869 | VH | PRT | WO2017062672; SEQ ID NO: 819 | 6036 |
| CII3870 | VH | PRT | WO2016023019; SEQ ID NO: 388 | 6037 |
| CII3871 | VH | PRT | WO2017062672; SEQ ID NO: 561 | 6038 |
| CII3872 | VH | PRT | WO2017062672; SEQ ID NO: 638 | 6039 |
| CII3873 | VH | PRT | WO2017062672; SEQ ID NO: 555 | 6040 |
| CII3874 | VH | PRT | WO2017062672; SEQ ID NO: 575 | 6041 |
| CII3875 | VH | PRT | WO2017062672; SEQ ID NO: 443 | 6042 |
| CII3876 | VH | PRT | WO2017062672; SEQ ID NO: 495 | 6043 |
| CII3877 | VH | PRT | WO2017062672; SEQ ID NO: 650 | 6044 |
| CII3878 | VH | PRT | WO2017062672; SEQ ID NO: 485 | 6045 |
| CII3879 | VH | PRT | WO2017062672; SEQ ID NO: 433 | 6046 |
| CII3880 | VH | PRT | WO2016023019; SEQ ID NO: 360 | 6047 |
| CII3881 | VH | PRT | WO2016023019; SEQ ID NO: 296 | 6048 |
| CII3882 | VH | PRT | WO2016023019; SEQ ID NO: 393 | 6049 |
| CII3883 | VH | PRT | WO2016023019; SEQ ID NO: 300 | 6050 |
| CII3884 | VH | PRT | WO2016023019; SEQ ID NO: 302 | 6051 |
| CII3885 | VH | PRT | WO2016023019; SEQ ID NO: 376 | 6052 |
| CII3886 | VH | PRT | WO2016023019; SEQ ID NO: 292 | 6053 |
| CII3887 | VH | PRT | WO2016023019; SEQ ID NO: 391 | 6054 |
| CII3888 | VH | PRT | WO2016023019; SEQ ID NO: 378 | 6055 |
| CII3889 | VH | PRT | WO2016023019; SEQ ID NO: 310 | 6056 |
| CII3890 | VH | PRT | WO2016023019; SEQ ID NO: 306 | 6057 |
| CII3891 | VH | PRT | WO2017062672; SEQ ID NO: 403 | 6058 |
| CII3892 | VH | PRT | WO2017062672; SEQ ID NO: 473 | 6059 |
| CII3893 | VH | PRT | WO2017062672; SEQ ID NO: 517 | 6060 |
| CII3894 | VH | PRT | WO2017062672; SEQ ID NO: 527 | 6061 |
| CII3895 | VH | PRT | WO2017062672; SEQ ID NO: 536 | 6062 |
| CII3896 | VH | PRT | WO2017062672; SEQ ID NO: 546 | 6063 |
| CII3897 | VH | PRT | WO2017062672; SEQ ID NO: 466 | 6064 |
| CII3898 | VH | PRT | WO2017062672; SEQ ID NO: 673 | 6065 |
| CII3899 | VH | PRT | WO2017062672; SEQ ID NO: 566 | 6066 |
| CII3900 | VH | PRT | WO2017062672; SEQ ID NO: 422 | 6067 |
| CII3901 | VH | PRT | WO2017062672; SEQ ID NO: 662 | 6068 |
| CII3902 | VH | PRT | WO2017062672; SEQ ID NO: 414 | 6069 |
| CII3903 | VH | PRT | WO2017062672; SEQ ID NO: 507 | 6070 |
| CII3904 | VH | PRT | WO2017062672; SEQ ID NO: 455 | 6071 |
| CII3905 | VH | PRT | WO2017062672; SEQ ID NO: 847 | 6072 |
| CII3906 | VH | PRT | WO2019028292; SEQ ID NO: 75 | 6073 |
| CII3907 | VH | PRT | WO2019028292; SEQ ID NO: 77 | 6074 |
| CII3908 | VH | PRT | WO2019028292; SEQ ID NO: 88 | 6075 |
| CII3909 | VH | PRT | WO2019028292; SEQ ID NO: 87 | 6076 |
| CII3910 | VH | PRT | WO2017062672; SEQ ID NO: 642 | 6077 |
| CII3911 | VH | PRT | WO2017062672; SEQ ID NO: 557 | 6078 |
| CII3912 | VH | PRT | WO2017062672; SEQ ID NO: 577 | 6079 |
| CII3913 | VH | PRT | WO2017062672; SEQ ID NO: 446 | 6080 |
| CII3914 | VH | PRT | WO2017062672; SEQ ID NO: 496 | 6081 |
| CII3915 | VH | PRT | WO2017062672; SEQ ID NO: 653 | 6082 |
| CII3916 | VH | PRT | WO2017062672; SEQ ID NO: 486 | 6083 |
| CII3917 | VH | PRT | WO2017062672; SEQ ID NO: 435 | 6084 |
| CII3918 | VH | PRT | WO2017062672; SEQ ID NO: 405 | 6085 |
| CII3919 | VH | PRT | WO2017062672; SEQ ID NO: 475 | 6086 |
| CII3920 | VH | PRT | WO2017062672; SEQ ID NO: 513 | 6087 |
| CII3921 | VH | PRT | WO2019028292; SEQ ID NO: 71 | 6088 |
| CII3922 | VH | PRT | WO2019028292; SEQ ID NO: 59 | 6089 |
| CII3923 | VH | PRT | WO2019028292; SEQ ID NO: 79 | 6090 |
| CII3924 | VH | PRT | WO2019028292; SEQ ID NO: 80 | 6091 |
| CII3925 | VH | PRT | WO2017062672; SEQ ID NO: 846 | 6092 |
| CII3926 | VH | PRT | WO2019028292; SEQ ID NO: 74 | 6093 |
| CII3927 | VH | PRT | WO2019028292; SEQ ID NO: 78 | 6094 |
| CII3928 | VH | PRT | WO2017062672; SEQ ID NO: 523 | 6095 |
| CII3929 | VH | PRT | WO2019028292; SEQ ID NO: 81 | 6096 |
| CII3930 | VH | PRT | WO2017062672; SEQ ID NO: 845 | 6097 |
| CII3931 | VH | PRT | WO2019028292; SEQ ID NO: 73 | 6098 |
| CII3932 | VH | PRT | WO2019028292; SEQ ID NO: 89 | 6099 |
| CII3933 | VH | PRT | WO2019028292; SEQ ID NO: 90 | 6100 |
| CII3934 | VH | PRT | WO2019028292; SEQ ID NO: 56 | 6101 |
| CII3935 | VH | PRT | WO2019028292; SEQ ID NO: 58 | 6102 |
| CII3936 | VH | PRT | WO2019028292; SEQ ID NO: 86 | 6103 |
| CII3937 | VH | PRT | WO2019028292; SEQ ID NO: 57 | 6104 |
| CII3938 | VH | PRT | WO2017062672; SEQ ID NO: 533 | 6105 |
| CII3939 | VH | PRT | WO2017062672; SEQ ID NO: 544 | 6106 |
| CII3940 | VH | PRT | WO2017062672; SEQ ID NO: 464 | 6107 |
| CII3941 | VH | PRT | WO2017062672; SEQ ID NO: 669 | 6108 |
| CII3942 | VH | PRT | WO2017062672; SEQ ID NO: 562 | 6109 |
| CII3943 | VH | PRT | WO2017062672; SEQ ID NO: 420 | 6110 |
| CII3944 | VH | PRT | WO2017062672; SEQ ID NO: 658 | 6111 |
| CII3945 | VH | PRT | WO2017062672; SEQ ID NO: 410 | 6112 |
| CII3946 | VH | PRT | WO2016023019; SEQ ID NO: 357 | 6113 |
| CII3947 | VH | PRT | WO2016023019; SEQ ID NO: 362 | 6114 |
| CII3948 | VH | PRT | WO2016023019; SEQ ID NO: 343 | 6115 |
| CII3949 | VH | PRT | WO2016023019; SEQ ID NO: 335 | 6116 |
| CII3950 | VH | PRT | WO2016023019; SEQ ID NO: 337 | 6117 |
| CII3951 | VH | PRT | WO2016023019; SEQ ID NO: 372 | 6118 |
| CII3952 | VH | PRT | WO2016023019; SEQ ID NO: 345 | 6119 |
| CII3953 | VH | PRT | WO2016023019; SEQ ID NO: 339 | 6120 |
| CII3954 | VH | PRT | WO2016023019; SEQ ID NO: 347 | 6121 |
| CII3955 | VH | PRT | WO2016023019; SEQ ID NO: 266 | 6122 |
| CII3956 | VH | PRT | WO2016023019; SEQ ID NO: 351 | 6123 |
| CII3957 | VH | PRT | WO2016023019; SEQ ID NO: 250 | 6124 |
| CII3958 | VH | PRT | WO2016023019; SEQ ID NO: 412 | 6125 |
| CII3959 | VH | PRT | WO2016023019; SEQ ID NO: 252 | 6126 |
| CII3960 | VH | PRT | WO2016023019; SEQ ID NO: 365 | 6127 |
| CII3961 | VH | PRT | WO2016023019; SEQ ID NO: 322 | 6128 |
| CII3962 | VH | PRT | WO2016023019; SEQ ID NO: 331 | 6129 |
| CII3963 | VH | PRT | WO2016023019; SEQ ID NO: 324 | 6130 |
| CII3964 | VH | PRT | WO2016023019; SEQ ID NO: 326 | 6131 |
| CII3965 | VH | PRT | WO2016023019; SEQ ID NO: 254 | 6132 |
| CII3966 | VH | PRT | WO2017062672; SEQ ID NO: 502 | 6133 |
| CII3967 | VH | PRT | WO2017062672; SEQ ID NO: 450 | 6134 |
| CII3968 | VH | PRT | WO2017062672; SEQ ID NO: 641 | 6135 |
| CII3969 | VH | PRT | WO2017062672; SEQ ID NO: 556 | 6136 |
| CII3970 | VH | PRT | WO2017062672; SEQ ID NO: 576 | 6137 |
| CII3971 | VH | PRT | WO2017062672; SEQ ID NO: 444 | 6138 |
| CII3972 | VH | PRT | WO2017062672; SEQ ID NO: 497 | 6139 |
| CII3973 | VH | PRT | WO2017062672; SEQ ID NO: 652 | 6140 |
| CII3974 | VH | PRT | WO2017062672; SEQ ID NO: 487 | 6141 |
| CII3975 | VH | PRT | WO2017062672; SEQ ID NO: 434 | 6142 |
| CII3976 | VH | PRT | WO2017062672; SEQ ID NO: 404 | 6143 |
| CII3977 | VH | PRT | WO2016023019; SEQ ID NO: 384 | 6144 |
| CII3978 | VH | PRT | WO2016023019; SEQ ID NO: 246 | 6145 |
| CII3979 | VH | PRT | WO2016023019; SEQ ID NO: 382 | 6146 |
| CII3980 | VH | PRT | WO2016023019; SEQ ID NO: 248 | 6147 |
| CII3981 | VH | PRT | WO2017062672; SEQ ID NO: 477 | 6148 |
| CII3982 | VH | PRT | WO2019028292; SEQ ID NO: 31 | 6149 |
| CII3983 | VH | PRT | WO2019028292; SEQ ID NO: 32 | 6150 |
| CII3984 | VH | PRT | WO2017062672; SEQ ID NO: 515 | 6151 |
| CII3985 | VH | PRT | WO2019028292; SEQ ID NO: 33 | 6152 |
| CII3986 | VH | PRT | WO2019028292; SEQ ID NO: 34 | 6153 |
| CII3987 | VH | PRT | WO2019028292; SEQ ID NO: 35 | 6154 |
| CII3988 | VH | PRT | WO2019028292; SEQ ID NO: 64 | 6155 |
| CII3989 | VH | PRT | WO2019028292; SEQ ID NO: 63 | 6156 |
| CII3990 | VH | PRT | WO2019028292; SEQ ID NO: 54 | 6157 |
| CII3991 | VH | PRT | WO2019028292; SEQ ID NO: 36 | 6158 |
| CII3992 | VH | PRT | WO2019028292; SEQ ID NO: 37 | 6159 |
| CII3993 | VH | PRT | WO2019028292; SEQ ID NO: 38 | 6160 |
| CII3994 | VH | PRT | WO2019028292; SEQ ID NO: 39 | 6161 |
| CII3995 | VH | PRT | WO2019028292; SEQ ID NO: 40 | 6162 |
| CII3996 | VH | PRT | WO2019028292; SEQ ID NO: 41 | 6163 |
| CII3997 | VH | PRT | WO2019028292; SEQ ID NO: 42 | 6164 |
| CII3998 | VH | PRT | WO2019028292; SEQ ID NO: 43 | 6165 |
| CII3999 | VH | PRT | WO2019028292; SEQ ID NO: 44 | 6166 |
| CII4000 | VH | PRT | WO2019028292; SEQ ID NO: 45 | 6167 |
| CII4001 | VH | PRT | WO2019028292; SEQ ID NO: 68 | 6168 |
| CII4002 | VH | PRT | WO2019028292; SEQ ID NO: 66 | 6169 |
| CII4003 | VH | PRT | WO2019028292; SEQ ID NO: 61 | 6170 |
| CII4004 | VH | PRT | WO2019028292; SEQ ID NO: 91 | 6171 |
| CII4005 | VH | PRT | WO2019028292; SEQ ID NO: 46 | 6172 |
| CII4006 | VH | PRT | WO2019028292; SEQ ID NO: 60 | 6173 |
| CII4007 | VH | PRT | WO2019028292; SEQ ID NO: 47 | 6174 |
| CII4008 | VH | PRT | WO2019028292; SEQ ID NO: 48 | 6175 |
| CII4009 | VH | PRT | WO2019028292; SEQ ID NO: 62 | 6176 |
| CII4010 | VH | PRT | WO2019028292; SEQ ID NO: 49 | 6177 |
| CII4011 | VH | PRT | WO2019028292; SEQ ID NO: 50 | 6178 |
| CII4012 | VH | PRT | WO2019028292; SEQ ID NO: 51 | 6179 |
| CII4013 | VH | PRT | WO2019028292; SEQ ID NO: 52 | 6180 |
| CII4014 | VH | PRT | WO2019028292; SEQ ID NO: 70 | 6181 |
| CII4015 | VH | PRT | WO2019028292; SEQ ID NO: 53 | 6182 |
| CII4016 | VH | PRT | WO2019028292; SEQ ID NO: 84 | 6183 |
| CII4017 | VH | PRT | WO2019028292; SEQ ID NO: 83 | 6184 |
| CII4018 | VH | PRT | WO2019028292; SEQ ID NO: 82 | 6185 |
| CII4019 | VH | PRT | WO2017062672; SEQ ID NO: 524 | 6186 |
| CII4020 | VH | PRT | WO2019028292; SEQ ID NO: 72 | 6187 |
| CII4021 | VH | PRT | WO2019028292; SEQ ID NO: 27 | 6188 |
| CII4022 | VH | PRT | WO2019028292; SEQ ID NO: 29 | 6189 |
| CII4023 | VH | PRT | WO2019028292; SEQ ID NO: 28 | 6190 |
| CII4024 | VH | PRT | WO2019028292; SEQ ID NO: 30 | 6191 |
| CII4025 | VH | PRT | WO2017062672; SEQ ID NO: 534 | 6192 |
| CII4026 | VH | PRT | WO2017062672; SEQ ID NO: 543 | 6193 |
| CII4027 | VH | PRT | WO2017062672; SEQ ID NO: 463 | 6194 |
| CII4028 | VH | PRT | WO2017062672; SEQ ID NO: 672 | 6195 |
| CII4029 | VH | PRT | WO2017062672; SEQ ID NO: 564 | 6196 |
| CII4030 | VH | PRT | WO2017062672; SEQ ID NO: 424 | 6197 |
| CII4031 | VH | PRT | WO2017062672; SEQ ID NO: 659 | 6198 |
| CII4032 | VH | PRT | WO2017062672; SEQ ID NO: 412 | 6199 |
| CII4033 | VH | PRT | WO2017062672; SEQ ID NO: 504 | 6200 |
| CII4034 | VH | PRT | WO2017062672; SEQ ID NO: 452 | 6201 |
| CII4035 | VH | PRT | WO2019028292; SEQ ID NO: 76 | 6202 |
| CII4036 | VH | PRT | WO2017062672; SEQ ID NO: 571 | 6203 |
| CII4037 | VH | PRT | WO2017062672; SEQ ID NO: 459 | 6204 |
| CII4038 | VH | PRT | WO2017062672; SEQ ID NO: 822 | 6205 |
| CII4039 | VH | PRT | WO2014028776; SEQ ID NO: 75 | 6206 |
| CII4040 | VH | PRT | US20180221480; SEQ ID NO: 5 | 6207 |
| CII4041 | VH | PRT | US20180221480; SEQ ID NO: 4 | 6208 |
| CII4042 | VH | PRT | US20180221480; SEQ ID NO: 3 | 6209 |
| CII4043 | VH | PRT | US20180221480; SEQ ID NO: 2 | 6210 |
| CII4044 | VH | PRT | US20180051086; SEQ ID NO: 2 | 6211 |
| CII4045 | VH | PRT | WO2018140510; SEQ ID NO: 7 | 6212 |
| CII4046 | VL | DNA | WO2018140121; WO2018147926; SEQ | 6213 |
| | | | ID NO: 35 | |
| CII4047 | VL | DNA | WO2010129469; SEQ ID NO: 36 | 6214 |
| CII4048 | VL | DNA | US20140212413; SEQ ID NO: 2 | 6215 |
| CII4049 | VL | PRT | US20190092843; SEQ ID NO: 3 | 6216 |
| CII4050 | VL | PRT | WO2014028776; SEQ ID NO: 61 | 6217 |
| CII4051 | VL | PRT | US20180134806; SEQ ID NO: 5 | 6218 |
| CII4052 | VL | PRT | US20130243775; SEQ ID NO: 4 | 6219 |
| CII4053 | VL | PRT | WO2019020606; SEQ ID NO: 20 | 6220 |
| CII4054 | VL | PRT | WO2019020606; SEQ ID NO: 1 | 6221 |
| CII4055 | VL | PRT | WO2019020606; SEQ ID NO: 2 | 6222 |
| CII4056 | VL | PRT | WO2016201388; SEQ ID NO: 134 | 6223 |
| CII4057 | VL | PRT | WO2016201388; SEQ ID NO: 145 | 6224 |
| CII4058 | VL | PRT | WO2016201388; SEQ ID NO: 140 | 6225 |
| CII4059 | VL | PRT | WO2016201388; SEQ ID NO: 130 | 6226 |
| CII4060 | VL | PRT | WO2016201388; SEQ ID NO: 120 | 6227 |
| CII4061 | VL | PRT | WO2016201388; SEQ ID NO: 37 | 6228 |
| CII4062 | VL | PRT | WO2016201388; SEQ ID NO: 199 | 6229 |
| CII4063 | VL | PRT | US20190085076; SEQ ID NO: 341 | 6230 |
| CII4064 | VL | PRT | W02016201389; SEQ ID NO: 341 | 6231 |
| CII4065 | VL | PRT | US20190085076; SEQ ID NO: 335 | 6232 |
| CII4066 | VL | PRT | W02016201389; SEQ ID NO: 335 | 6233 |
| CII4067 | VL | PRT | US20190085076; SEQ ID NO: 353 | 6234 |
| CII4068 | VL | PRT | W02016201389; SEQ ID NO: 353 | 6235 |
| CII4069 | VL | PRT | WO2016201388; SEQ ID NO: 249 | 6236 |
| CII4070 | VL | PRT | WO2019028283; SEQ ID NO: 83 | 6237 |
| CII4071 | VL | PRT | WO2016201388; SEQ ID NO: 32 | 6238 |
| CII4072 | VL | PRT | WO2016201388; SEQ ID NO: 33 | 6239 |
| CII4073 | VL | PRT | US20190085076; SEQ ID NO: 299 | 6240 |
| CII4074 | VL | PRT | W02016201389; SEQ ID NO: 299 | 6241 |
| CII4075 | VL | PRT | US20190085076; SEQ ID NO: 314 | 6242 |
| CII4076 | VL | PRT | W02016201389; SEQ ID NO: 314 | 6243 |
| CII4077 | VL | PRT | US20190085076; SEQ ID NO: 305 | 6244 |
| CII4078 | VL | PRT | W02016201389; SEQ ID NO: 305 | 6245 |
| CII4079 | VL | PRT | US20190085076; SEQ ID NO: 345 | 6246 |
| CII4080 | VL | PRT | W02016201389; SEQ ID NO: 345 | 6247 |
| CII4081 | VL | PRT | US20190085076; SEQ ID NO: 320 | 6248 |
| CII4082 | VL | PRT | W02016201389; SEQ ID NO: 320 | 6249 |
| CII4083 | VL | PRT | US20190085076; SEQ ID NO: 342 | 6250 |
| CII4084 | VL | PRT | W02016201389; SEQ ID NO: 342 | 6251 |
| CII4085 | VL | PRT | US20190085076; SEQ ID NO: 333 | 6252 |
| CII4086 | VL | PRT | W02016201389; SEQ ID NO: 333 | 6253 |
| CII4087 | VL | PRT | US20190085076; SEQ ID NO: 321 | 6254 |
| CII4088 | VL | PRT | W02016201389; SEQ ID NO: 321 | 6255 |
| CII4089 | VL | PRT | WO2016201388; SEQ ID NO: 251 | 6256 |
| CII4090 | VL | PRT | WO2016201388; SEQ ID NO: 141 | 6257 |
| CII4091 | VL | PRT | WO2016201388; SEQ ID NO: 139 | 6258 |
| CII4092 | VL | PRT | WO2016201388; SEQ ID NO: 45 | 6259 |
| CII4093 | VL | PRT | WO2016201388; SEQ ID NO: 127 | 6260 |
| CII4094 | VL | PRT | WO2016201388; SEQ ID NO: 129 | 6261 |
| CII4095 | VL | PRT | WO2019028283; SEQ ID NO: 78 | 6262 |
| CII4096 | VL | PRT | WO2019028283; SEQ ID NO: 79 | 6263 |
| CII4097 | VL | PRT | WO2019028283; SEQ ID NO: 80 | 6264 |
| CII4098 | VL | PRT | US20190085076; SEQ ID NO: 308 | 6265 |
| CII4099 | VL | PRT | W02016201389; SEQ ID NO: 308 | 6266 |
| CII4100 | VL | PRT | US20190085076; SEQ ID NO: 300 | 6267 |
| CII4101 | VL | PRT | W02016201389; SEQ ID NO: 300 | 6268 |
| CII4102 | VL | PRT | US20190085076; SEQ ID NO: 323 | 6269 |
| CII4103 | VL | PRT | W02016201389; SEQ ID NO: 323 | 6270 |
| CII4104 | VL | PRT | US20190085076; SEQ ID NO: 327 | 6271 |
| CII4105 | VL | PRT | W02016201389; SEQ ID NO: 327 | 6272 |
| CII4106 | VL | PRT | US20190085076; SEQ ID NO: 358 | 6273 |
| CII4107 | VL | PRT | W02016201389; SEQ ID NO: 358 | 6274 |
| CII4108 | VL | PRT | US20190085076; SEQ ID NO: 362 | 6275 |
| CII4109 | VL | PRT | W02016201389; SEQ ID NO: 362 | 6276 |
| CII4110 | VL | PRT | US20190085076; SEQ ID NO: 310 | 6277 |
| CII4111 | VL | PRT | W02016201389; SEQ ID NO: 310 | 6278 |
| CII4112 | VL | PRT | US20190085076; SEQ ID NO: 347 | 6279 |
| CII4113 | VL | PRT | W02016201389; SEQ ID NO: 347 | 6280 |
| CII4114 | VL | PRT | US20190085076; SEQ ID NO: 316 | 6281 |
| CII4115 | VL | PRT | W02016201389; SEQ ID NO: 316 | 6282 |
| CII4116 | VL | PRT | US20190085076; SEQ ID NO: 340 | 6283 |
| CII4117 | VL | PRT | W02016201389; SEQ ID NO: 349 | 6284 |
| CII4118 | VL | PRT | US20190085076; SEQ ID NO: 307 | 6285 |
| CII4119 | VL | PRT | W02016201389; SEQ ID NO: 307 | 6286 |
| CII4120 | VL | PRT | US20190085076; SEQ ID NO: 344 | 6287 |
| CII4121 | VL | PRT | W02016201389; SEQ ID NO: 344 | 6288 |
| CII4122 | VL | PRT | US20190085076; SEQ ID NO: 332 | 6289 |
| CII4123 | VL | PRT | W02016201389; SEQ ID NO: 332 | 6290 |
| CII4124 | VL | PRT | US20190085076; SEQ ID NO: 315 | 6291 |
| CII4125 | VL | PRT | W02016201389; SEQ ID NO: 315 | 6292 |
| CII4126 | VL | PRT | US20190085076; SEQ ID NO: 306 | 6293 |
| CII4127 | VL | PRT | W02016201389; SEQ ID NO: 306 | 6294 |
| CII4128 | VL | PRT | US20190085076; SEQ ID NO: 311 | 6295 |
| CII4129 | VL | PRT | W02016201389; SEQ ID NO: 311 | 6296 |
| CII4130 | VL | PRT | US20190085076; SEQ ID NO: 317 | 6297 |
| CII4131 | VL | PRT | W02016201389; SEQ ID NO: 317 | 6298 |
| CII4132 | VL | PRT | US20190085076; SEQ ID NO: 312 | 6299 |
| CII4133 | VL | PRT | W02016201389; SEQ ID NO: 312 | 6300 |
| CII4134 | VL | PRT | WO2019028283; SEQ ID NO: 81 | 6301 |
| CII4135 | VL | PRT | WO2019028283; SEQ ID NO: 82 | 6302 |
| CII4136 | VL | PRT | WO2019028283; SEQ ID NO: 85 | 6303 |
| CII4137 | VL | PRT | WO2019028283; SEQ ID NO: 77 | 6304 |
| CII4138 | VL | PRT | WO2019028283; SEQ ID NO: 102 | 6305 |
| CII4139 | VL | PRT | WO2016201388; SEQ ID NO: 116 | 6306 |
| CII4140 | VL | PRT | WO2016201388; SEQ ID NO: 119 | 6307 |
| CII4141 | VL | PRT | WO2016201388; SEQ ID NO: 38 | 6308 |
| CII4142 | VL | PRT | WO2016201388; SEQ ID NO: 39 | 6309 |
| CII4143 | VL | PRT | WO2016201388; SEQ ID NO: 196 | 6310 |
| CII4144 | VL | PRT | WO2016201388; SEQ ID NO: 200 | 6311 |
| CII4145 | VL | PRT | US20190085076; SEQ ID NO: 290 | 6312 |
| CII4146 | VL | PRT | W02016201389; SEQ ID NO: 290 | 6313 |
| CII4147 | VL | PRT | US20190085076; SEQ ID NO: 318 | 6314 |
| CII4148 | VL | PRT | W02016201389; SEQ ID NO: 318 | 6315 |
| CII4149 | VL | PRT | US20190085076; SEQ ID NO: 331 | 6316 |
| CII4150 | VL | PRT | W02016201389; SEQ ID NO: 331 | 6317 |
| CII4151 | VL | PRT | US20190085076; SEQ ID NO: 330 | 6318 |
| CII4152 | VL | PRT | W02016201389; SEQ ID NO: 330 | 6319 |
| CII4153 | VL | PRT | US20190085076; SEQ ID NO: 298 | 6320 |
| CII4154 | VL | PRT | W02016201389; SEQ ID NO: 298 | 6321 |
| CII4155 | VL | PRT | US20190085076; SEQ ID NO: 302 | 6322 |
| CII4156 | VL | PRT | W02016201389; SEQ ID NO: 302 | 6323 |
| CII4157 | VL | PRT | US20190085076; SEQ ID NO: 346 | 6324 |
| CII4158 | VL | PRT | W02016201389; SEQ ID NO: 346 | 6325 |
| CII4159 | VL | PRT | US20190085076; SEQ ID NO: 328 | 6326 |
| CII4160 | VL | PRT | W02016201389; SEQ ID NO: 328 | 6327 |
| CII4161 | VL | PRT | US20190085076; SEQ ID NO: 339 | 6328 |
| CII4162 | VL | PRT | W02016201389; SEQ ID NO: 339 | 6329 |
| CII4163 | VL | PRT | US20190085076; SEQ ID NO: 303 | 6330 |
| CII4164 | VL | PRT | W02016201389; SEQ ID NO: 303 | 6331 |
| CII4165 | VL | PRT | WO2016201388; SEQ ID NO: 31 | 6332 |
| CII4166 | VL | PRT | WO2016201388; SEQ ID NO: 138 | 6333 |
| CII4167 | VL | PRT | WO2016201388; SEQ ID NO: 44 | 6334 |
| CII4168 | VL | PRT | WO2016201388; SEQ ID NO: 128 | 6335 |
| CII4169 | VL | PRT | US20190085076; SEQ ID NO: 291 | 6336 |
| CII4170 | VL | PRT | W02016201389; SEQ ID NO: 291 | 6337 |
| CII4171 | VL | PRT | US20190085076; SEQ ID NO: 354 | 6338 |
| CII4172 | VL | PRT | W02016201389; SEQ ID NO: 354 | 6339 |
| CII4173 | VL | PRT | WO2016201388; SEQ ID NO: 117 | 6340 |
| CII4174 | VL | PRT | WO2016201388; SEQ ID NO: 36 | 6341 |
| CII4175 | VL | PRT | WO2016201388; SEQ ID NO: 197 | 6342 |
| CII4176 | VL | PRT | WO2016201388; SEQ ID NO: 123 | 6343 |
| CII4177 | VL | PRT | WO2019028283; SEQ ID NO: 104 | 6344 |
| CII4178 | VL | PRT | WO2016201388; SEQ ID NO: 241 | 6345 |
| CII4179 | VL | PRT | WO2016201388; SEQ ID NO: 243 | 6346 |
| CII4180 | VL | PRT | WO2019028283; SEQ ID NO: 93 | 6347 |
| CII4181 | VL | PRT | US20190085076; SEQ ID NO: 350 | 6348 |
| CII4182 | VL | PRT | W02016201389; SEQ ID NO: 350 | 6349 |
| CII4183 | VL | PRT | WO2019028283; SEQ ID NO: 88 | 6350 |
| CII4184 | VL | PRT | WO2019028283; SEQ ID NO: 100 | 6351 |
| CII4185 | VL | PRT | WO2019028283; SEQ ID NO: 87 | 6352 |
| CII4186 | VL | PRT | WO2019028283; SEQ ID NO: 90 | 6353 |
| CII4187 | VL | PRT | WO2019028283; SEQ ID NO: 91 | 6354 |
| CII4188 | VL | PRT | WO2019028283; SEQ ID NO: 94 | 6355 |
| CII4189 | VL | PRT | WO2019028283; SEQ ID NO: 89 | 6356 |
| CII4190 | VL | PRT | WO2019028283; SEQ ID NO: 99 | 6357 |
| CII4191 | VL | PRT | WO2019028283; SEQ ID NO: 101 | 6358 |
| CII4192 | VL | PRT | WO2019028283; SEQ ID NO: 95 | 6359 |
| CII4193 | VL | PRT | WO2019028283; SEQ ID NO: 92 | 6360 |
| CII4194 | VL | PRT | WO2019028283; SEQ ID NO: 86 | 6361 |
| CII4195 | VL | PRT | WO2019028283; SEQ ID NO: 97 | 6362 |
| CII4196 | VL | PRT | WO2019028283; SEQ ID NO: 96 | 6363 |
| CII4197 | VL | PRT | WO2019028283; SEQ ID NO: 98 | 6364 |
| CII4198 | VL | PRT | WO2016201388; SEQ ID NO: 149 | 6365 |
| CII4199 | VL | PRT | US20190085076; SEQ ID NO: 349 | 6366 |
| CII4200 | VL | PRT | W02016201389; SEQ ID NO: 349 | 6367 |
| CII4201 | VL | PRT | US20190085076; SEQ ID NO: 348 | 6368 |
| CII4202 | VL | PRT | W02016201389; SEQ ID NO: 348 | 6369 |
| CII4203 | VL | PRT | US20190085076; SEQ ID NO: 351 | 6370 |
| CII4204 | VL | PRT | W02016201389; SEQ ID NO: 351 | 6371 |
| CII4205 | VL | PRT | US20190085076; SEQ ID NO: 288 | 6372 |
| CII4206 | VL | PRT | W02016201389; SEQ ID NO: 288 | 6373 |
| CII4207 | VL | PRT | US20190085076; SEQ ID NO: 352 | 6374 |
| CII4208 | VL | PRT | W02016201389; SEQ ID NO: 352 | 6375 |
| CII4209 | VL | PRT | US20190085076; SEQ ID NO: 286 | 6376 |
| CII4210 | VL | PRT | W02016201389; SEQ ID NO: 286 | 6377 |
| CII4211 | VL | PRT | US20190085076; SEQ ID NO: 360 | 6378 |
| CII4212 | VL | PRT | W02016201389; SEQ ID NO: 360 | 6379 |
| CII4213 | VL | PRT | US20190085076; SEQ ID NO: 361 | 6380 |
| CII4214 | VL | PRT | W02016201389; SEQ ID NO: 361 | 6381 |
| CII4215 | VL | PRT | US20190085076; SEQ ID NO: 359 | 6382 |
| CII4216 | VL | PRT | W02016201389; SEQ ID NO: 359 | 6383 |
| CII4217 | VL | PRT | WO2016201388; SEQ ID NO: 137 | 6384 |
| CII4218 | VL | PRT | WO2016201388; SEQ ID NO: 48 | 6385 |
| CII4219 | VL | PRT | WO2016201388; SEQ ID NO: 126 | 6386 |
| CII4220 | VL | PRT | WO2016201388; SEQ ID NO: 115 | 6387 |
| CII4221 | VL | PRT | WO2016201388; SEQ ID NO: 42 | 6388 |
| CII4222 | VL | PRT | WO2016201388; SEQ ID NO: 195 | 6389 |
| CII4223 | VL | PRT | WO2016201388; SEQ ID NO: 148 | 6390 |
| CII4224 | VL | PRT | WO2016201388; SEQ ID NO: 135 | 6391 |
| CII4225 | VL | PRT | WO2016201388; SEQ ID NO: 46 | 6392 |
| CII4226 | VL | PRT | WO2016201388; SEQ ID NO: 124 | 6393 |
| CII4227 | VL | PRT | WO2016201388; SEQ ID NO: 114 | 6394 |
| CII4228 | VL | PRT | WO2016201388; SEQ ID NO: 40 | 6395 |
| CII4229 | VL | PRT | WO2016201388; SEQ ID NO: 193 | 6396 |
| CII4230 | VL | PRT | US20190085076; SEQ ID NO: 334 | 6397 |
| CII4231 | VL | PRT | W02016201389; SEQ ID NO: 334 | 6398 |
| CII4232 | VL | PRT | US20190085076; SEQ ID NO: 326 | 6399 |
| CII4233 | VL | PRT | W02016201389; SEQ ID NO: 326 | 6400 |
| CII4234 | VL | PRT | US20190085076; SEQ ID NO: 313 | 6401 |
| CII4235 | VL | PRT | W02016201389; SEQ ID NO: 313 | 6402 |
| CII4236 | VL | PRT | WO2016201388; SEQ ID NO: 192 | 6403 |
| CII4237 | VL | PRT | WO2016201388; SEQ ID NO: 150 | 6404 |
| CII4238 | VL | PRT | WO2016201388; SEQ ID NO: 136 | 6405 |
| CII4239 | VL | PRT | WO2016201388; SEQ ID NO: 47 | 6406 |
| CII4240 | VL | PRT | WO2016201388; SEQ ID NO: 125 | 6407 |
| CII4241 | VL | PRT | WO2016201388; SEQ ID NO: 113 | 6408 |
| CII4242 | VL | PRT | WO2016201388; SEQ ID NO: 41 | 6409 |
| CII4243 | VL | PRT | WO2016201388; SEQ ID NO: 194 | 6410 |
| CII4244 | VL | PRT | WO2016201388; SEQ ID NO: 34 | 6411 |
| CII4245 | VL | PRT | WO2016201388; SEQ ID NO: 142 | 6412 |
| CII4246 | VL | PRT | WO2016201388; SEQ ID NO: 131 | 6413 |
| CII4247 | VL | PRT | US20190085076; SEQ ID NO: 309 | 6414 |
| CII4248 | VL | PRT | W02016201389; SEQ ID NO: 309 | 6415 |
| CII4249 | VL | PRT | US20190085076; SEQ ID NO: 297 | 6416 |
| CII4250 | VL | PRT | W02016201389; SEQ ID NO: 297 | 6417 |
| CII4251 | VL | PRT | US20190085076; SEQ ID NO: 325 | 6418 |
| CII4252 | VL | PRT | W02016201389; SEQ ID NO: 325 | 6419 |
| CII4253 | VL | PRT | US20190085076; SEQ ID NO: 356 | 6420 |
| CII4254 | VL | PRT | W02016201389; SEQ ID NO: 356 | 6421 |
| CII4255 | VL | PRT | US20190085076; SEQ ID NO: 357 | 6422 |
| CII4256 | VL | PRT | W02016201389; SEQ ID NO: 357 | 6423 |
| CII4257 | VL | PRT | US20190085076; SEQ ID NO: 285 | 6424 |
| CII4258 | VL | PRT | W02016201389; SEQ ID NO: 285 | 6425 |
| CII4259 | VL | PRT | US20190085076; SEQ ID NO: 301 | 6426 |
| CII4260 | VL | PRT | W02016201389; SEQ ID NO: 301 | 6427 |
| CII4261 | VL | PRT | WO2016201388; SEQ ID NO: 118 | 6428 |
| CII4262 | VL | PRT | WO2016201388; SEQ ID NO: 151 | 6429 |
| CII4263 | VL | PRT | WO2016201388; SEQ ID NO: 198 | 6430 |
| CII4264 | VL | PRT | US20190085076; SEQ ID NO: 338 | 6431 |
| CII4265 | VL | PRT | W02016201389; SEQ ID NO: 338 | 6432 |
| CII4266 | VL | PRT | WO2016201388; SEQ ID NO: 147 | 6433 |
| CII4267 | VL | PRT | WO2016201388; SEQ ID NO: 143 | 6434 |
| CII4268 | VL | PRT | WO2016201388; SEQ ID NO: 133 | 6435 |
| CII4269 | VL | PRT | US20190085076; SEQ ID NO: 324 | 6436 |
| CII4270 | VL | PRT | W02016201389; SEQ ID NO: 324 | 6437 |
| CII4271 | VL | PRT | US20190085076; SEQ ID NO: 293 | 6438 |
| CII4272 | VL | PRT | W02016201389; SEQ ID NO: 293 | 6439 |
| CII4273 | VL | PRT | US20190085076; SEQ ID NO: 296 | 6440 |
| CII4274 | VL | PRT | W02016201389; SEQ ID NO: 296 | 6441 |
| CII4275 | VL | PRT | US20190085076; SEQ ID NO: 292 | 6442 |
| CII4276 | VL | PRT | W02016201389; SEQ ID NO: 292 | 6443 |
| CII4277 | VL | PRT | US20190085076; SEQ ID NO: 304 | 6444 |
| CII4278 | VL | PRT | W02016201389; SEQ ID NO: 304 | 6445 |
| CII4279 | VL | PRT | US20190085076; SEQ ID NO: 289 | 6446 |
| CII4280 | VL | PRT | W02016201389; SEQ ID NO: 289 | 6447 |
| CII4281 | VL | PRT | US20190085076; SEQ ID NO: 329 | 6448 |
| CII4282 | VL | PRT | W02016201389; SEQ ID NO: 329 | 6449 |
| CII4283 | VL | PRT | US20190085076; SEQ ID NO: 322 | 6450 |
| CII4284 | VL | PRT | W02016201389; SEQ ID NO: 322 | 6451 |
| CII4285 | VL | PRT | US20190085076; SEQ ID NO: 343 | 6452 |
| CII4286 | VL | PRT | W02016201389; SEQ ID NO: 343 | 6453 |
| CII4287 | VL | PRT | US20190085076; SEQ ID NO: 336 | 6454 |
| CII4288 | VL | PRT | W02016201389; SEQ ID NO: 336 | 6455 |
| CII4289 | VL | PRT | WO2016201388; SEQ ID NO: 122 | 6456 |
| CII4290 | VL | PRT | WO2016201388; SEQ ID NO: 153 | 6457 |
| CII4291 | VL | PRT | WO2016201388; SEQ ID NO: 202 | 6458 |
| CII4292 | VL | PRT | US20190085076; SEQ ID NO: 355 | 6459 |
| CII4293 | VL | PRT | W02016201389; SEQ ID NO: 355 | 6460 |
| CII4294 | VL | PRT | WO2016201388; SEQ ID NO: 146 | 6461 |
| CII4295 | VL | PRT | WO2016201388; SEQ ID NO: 144 | 6462 |
| CII4296 | VL | PRT | WO2016201388; SEQ ID NO: 132 | 6463 |
| CII4297 | VL | PRT | US20190085076; SEQ ID NO: 337 | 6464 |
| CII4298 | VL | PRT | W02016201389; SEQ ID NO: 337 | 6465 |
| CII4299 | VL | PRT | US20190085076; SEQ ID NO: 287 | 6466 |
| CII4300 | VL | PRT | W02016201389; SEQ ID NO: 287 | 6467 |
| CII4301 | VL | PRT | US20190085076; SEQ ID NO: 319 | 6468 |
| CII4302 | VL | PRT | W02016201389; SEQ ID NO: 319 | 6469 |
| CII4303 | VL | PRT | US20190085076; SEQ ID NO: 294 | 6470 |
| CII4304 | VL | PRT | W02016201389; SEQ ID NO: 294 | 6471 |
| CII4305 | VL | PRT | US20190085076; SEQ ID NO: 295 | 6472 |
| CII4306 | VL | PRT | W02016201389; SEQ ID NO: 295 | 6473 |
| CII4307 | VL | PRT | WO2016201388; SEQ ID NO: 121 | 6474 |
| CII4308 | VL | PRT | WO2016201388; SEQ ID NO: 152 | 6475 |
| CII4309 | VL | PRT | WO2016201388; SEQ ID NO: 201 | 6476 |
| CII4310 | VL | PRT | WO2019028283; SEQ ID NO: 84 | 6477 |
| CII4311 | VL | PRT | WO2016201388; SEQ ID NO: 242 | 6478 |
| CII4312 | VL | PRT | WO2016201388; SEQ ID NO: 112 | 6479 |
| CII4313 | VL | PRT | WO2018089788; SEQ ID NO: 9 | 6480 |
| CII4314 | VL | PRT | US20180333503; SEQ ID NO: 5 | 6481 |
| CII4315 | VL | PRT | US20180201692; SEQ ID NO: 1 | 6482 |
| CII4316 | VL | PRT | US20180201692; SEQ ID NO: 21 | 6483 |
| CII4317 | VL | PRT | US20180201692; SEQ ID NO: 19 | 6484 |
| CII4318 | VL | PRT | US20180201692; SEQ ID NO: 20 | 6485 |
| CII4319 | VL | PRT | US20190117769; SEQ ID NO: 7 | 6486 |
| CII4320 | VL | PRT | US20190117769; SEQ ID NO: 9 | 6487 |
| CII4321 | VL | PRT | US20190117769; SEQ ID NO: 5 | 6488 |
| CII4322 | VL | PRT | US20190135920; SEQ ID NO: 34 | 6489 |
| CII4323 | VL | PRT | US20190135920; SEQ ID NO: 12 | 6490 |
| CII4324 | VL | PRT | US20190135920; SEQ ID NO: 27 | 6491 |
| CII4325 | VL | PRT | US20190135920; SEQ ID NO: 29 | 6492 |
| CII4326 | VL | PRT | US20190135920; SEQ ID NO: 14 | 6493 |
| CII4327 | VL | PRT | US20180333503; SEQ ID NO: 27 | 6494 |
| CII4328 | VL | PRT | US20190135920; SEQ ID NO: 8 | 6495 |
| CII4329 | VL | PRT | US20190135920; SEQ ID NO: 13 | 6496 |
| CII4330 | VL | PRT | US20190135920; SEQ ID NO: 26 | 6497 |
| CII4331 | VL | PRT | US20190135920; SEQ ID NO: 30 | 6498 |
| CII4332 | VL | PRT | US20190135920; SEQ ID NO: 31 | 6499 |
| CII4333 | VL | PRT | US20190135920; SEQ ID NO: 33 | 6500 |
| CII4334 | VL | PRT | US20190135920; SEQ ID NO: 10 | 6501 |
| CII4335 | VL | PRT | US20190135920; SEQ ID NO: 11 | 6502 |
| CII4336 | VL | PRT | US20190135920; SEQ ID NO: 9 | 6503 |
| CII4337 | VL | PRT | US20190135920; SEQ ID NO: 25 | 6504 |
| CII4338 | VL | PRT | US20190135920; SEQ ID NO: 32 | 6505 |
| CII4339 | VL | PRT | US20190135920; SEQ ID NO: 28 | 6506 |
| CII4340 | VL | PRT | US20190135920; SEQ ID NO: 36 | 6507 |
| CII4341 | VL | PRT | US20199016807; SEQ ID NO: 11 | 6508 |
| CII4342 | VL | PRT | US20170253653; SEQ ID NO: 19 | 6509 |
| CII4343 | VL | PRT | WO2018089780; SEQ ID NO: 1 | 6510 |
| CII4344 | VL | PRT | US20190016807; SEQ ID NO: 14 | 6511 |
| CII4345 | VL | PRT | US20170253653; SEQ ID NO: 14 | 6512 |
| CII4346 | VL | PRT | US20190016807; SEQ ID NO: 13 | 6513 |
| CII4347 | VL | PRT | US20170253653; SEQ ID NO: 13 | 6514 |
| CII4348 | VL | PRT | US20190016807; SEQ ID NO: 19 | 6515 |
| CII4349 | VL | PRT | US20170253653; SEQ ID NO: 11 | 6516 |
| CII4350 | VL | PRT | US20190016807; SEQ ID NO: 17 | 6517 |
| CII4351 | VL | PRT | US20190016807; SEQ ID NO: 18 | 6518 |
| CII4352 | VL | PRT | US20170253653; SEQ ID NO: 10 | 6519 |
| CII4353 | VL | PRT | US20170253653; SEQ ID NO: 20 | 6520 |
| CII4354 | VL | PRT | US20170253653; SEQ ID NO: 23 | 6521 |
| CII4355 | VL | PRT | US20170253653; SEQ ID NO: 18 | 6522 |
| CII4356 | VL | PRT | US20170253653; SEQ ID NO: 8 | 6523 |
| CII4357 | VL | PRT | US20170253653; SEQ ID NO: 7 | 6524 |
| CII4358 | VL | PRT | US20170253653; SEQ ID NO: 12 | 6525 |
| CII4359 | VL | PRT | US20190016807; SEQ ID NO: 12 | 6526 |
| CII4360 | VL | PRT | US20170253653; SEQ ID NO: 9 | 6527 |
| CII4361 | VL | PRT | WO2018213316; SEQ ID NO: 113 | 6528 |
| CII4362 | VL | PRT | WO2018213316; SEQ ID NO: 114 | 6529 |
| CII4363 | VL | PRT | WO2018213316; SEQ ID NO: 105 | 6530 |
| CII4364 | VL | PRT | WO2018213316; SEQ ID NO: 107 | 6531 |
| CII4365 | VL | PRT | WO2018213316; SEQ ID NO: 108 | 6532 |
| CII4366 | VL | PRT | WO2018213316; SEQ ID NO: 115 | 6533 |
| CII4367 | VL | PRT | WO2018213316; SEQ ID NO: 106 | 6534 |
| CII4368 | VL | PRT | WO2018213316; SEQ ID NO: 116 | 6535 |
| CII4369 | VL | PRT | WO2018213316; SEQ ID NO: 109 | 6536 |
| CII4370 | VL | PRT | WO2018213316; SEQ ID NO: 110 | 6537 |
| CII4371 | VL | PRT | WO2018213316; SEQ ID NO: 111 | 6538 |
| CII4372 | VL | PRT | WO2018213316; SEQ ID NO: 112 | 6539 |
| CII4373 | VL | PRT | WO2018213316; SEQ ID NO: 104 | 6540 |
| CII4374 | VL | PRT | WO2017040301; SEQ ID NO: 222 | 6541 |
| CII4375 | VL | PRT | WO2017040301; SEQ ID NO: 251 | 6542 |
| CII4376 | VL | PRT | WO2017040301; SEQ ID NO: 281 | 6543 |
| CII4377 | VL | PRT | WO2017040301; SEQ ID NO: 381 | 6544 |
| CII4378 | VL | PRT | WO2017040301; SEQ ID NO: 310 | 6545 |
| CII4379 | VL | PRT | WO2017040301; SEQ ID NO: 201 | 6546 |
| CII4380 | VL | PRT | WO2017040301; SEQ ID NO: 270 | 6547 |
| CII4381 | VL | PRT | WO2017040301; SEQ ID NO: 247 | 6548 |
| CII4382 | VL | PRT | WO2017040301; SEQ ID NO: 236 | 6549 |
| CII4383 | VL | PRT | WO2017040301; SEQ ID NO: 196 | 6550 |
| CII4384 | VL | PRT | WO2017040301; SEQ ID NO: 296 | 6551 |
| CII4385 | VL | PRT | WO2017040301; SEQ ID NO: 213 | 6552 |
| CII4386 | VL | PRT | WO2017040301; SEQ ID NO: 263 | 6553 |
| CII4387 | VL | PRT | WO2017040301; SEQ ID NO: 461 | 6554 |
| CII4388 | VL | PRT | WO2017040301; SEQ ID NO: 450 | 6555 |
| CII4389 | VL | PRT | WO2017040301; SEQ ID NO: 452 | 6556 |
| CII4390 | VL | PRT | WO2017040301; SEQ ID NO: 458 | 6557 |
| CII4391 | VL | PRT | WO2017040301; SEQ ID NO: 220 | 6558 |
| CII4392 | VL | PRT | WO2017040301; SEQ ID NO: 221 | 6559 |
| CII4393 | VL | PRT | WO2017040301; SEQ ID NO: 254 | 6560 |
| CII4394 | VL | PRT | WO2017040301; SEQ ID NO: 253 | 6561 |
| CII4395 | VL | PRT | WO2017040301; SEQ ID NO: 284 | 6562 |
| CII4396 | VL | PRT | WO2017040301; SEQ ID NO: 280 | 6563 |
| CII4397 | VL | PRT | WO2017040301; SEQ ID NO: 487 | 6564 |
| CII4398 | VL | PRT | WO2017040301; SEQ ID NO: 515 | 6565 |
| CII4399 | VL | PRT | WO2017040301; SEQ ID NO: 488 | 6566 |
| CII4400 | VL | PRT | WO2017040301; SEQ ID NO: 516 | 6567 |
| CII4401 | VL | PRT | WO2017040301; SEQ ID NO: 300 | 6568 |
| CII4402 | VL | PRT | WO2017040301; SEQ ID NO: 299 | 6569 |
| CII4403 | VL | PRT | WO2017040301; SEQ ID NO: 314 | 6570 |
| CII4404 | VL | PRT | WO2017040301; SEQ ID NO: 309 | 6571 |
| CII4405 | VL | PRT | WO2017040301; SEQ ID NO: 203 | 6572 |
| CII4406 | VL | PRT | WO2017040301; SEQ ID NO: 199 | 6573 |
| CII4407 | VL | PRT | WO2017040301; SEQ ID NO: 273 | 6574 |
| CII4408 | VL | PRT | WO2017040301; SEQ ID NO: 269 | 6575 |
| CII4409 | VL | PRT | WO2017040301; SEQ ID NO: 511 | 6576 |
| CII4410 | VL | PRT | WO2017040301; SEQ ID NO: 514 | 6577 |
| CII4411 | VL | PRT | WO2017040301; SEQ ID NO: 243 | 6578 |
| CII4412 | VL | PRT | WO2017040301; SEQ ID NO: 248 | 6579 |
| CII4413 | VL | PRT | WO2017040301; SEQ ID NO: 233 | 6580 |
| CII4414 | VL | PRT | WO2017040301; SEQ ID NO: 237 | 6581 |
| CII4415 | VL | PRT | WO2017040301; SEQ ID NO: 193 | 6582 |
| CII4416 | VL | PRT | WO2017040301; SEQ ID NO: 293 | 6583 |
| CII4417 | VL | PRT | WO2017040301; SEQ ID NO: 197 | 6584 |
| CII4418 | VL | PRT | WO2017040301; SEQ ID NO: 297 | 6585 |
| CII4419 | VL | PRT | WO2017040301; SEQ ID NO: 212 | 6586 |
| CII4420 | VL | PRT | WO2017040301; SEQ ID NO: 210 | 6587 |
| CII4421 | VL | PRT | WO2017040301; SEQ ID NO: 260 | 6588 |
| CII4422 | VL | PRT | WO2017040301; SEQ ID NO: 261 | 6589 |
| CII4423 | VL | PRT | WO2017040301; SEQ ID NO: 219 | 6590 |
| CII4424 | VL | PRT | WO2017040301; SEQ ID NO: 252 | 6591 |
| CII4425 | VL | PRT | WO2017040301; SEQ ID NO: 279 | 6592 |
| CII4426 | VL | PRT | WO2017040301; SEQ ID NO: 302 | 6593 |
| CII4427 | VL | PRT | WO2017040301; SEQ ID NO: 312 | 6594 |
| CII4428 | VL | PRT | WO2017040301; SEQ ID NO: 200 | 6595 |
| CII4429 | VL | PRT | WO2017040301; SEQ ID NO: 271 | 6596 |
| CII4430 | VL | PRT | WO2017040301; SEQ ID NO: 246 | 6597 |
| CII4431 | VL | PRT | WO2017040301; SEQ ID NO: 238 | 6598 |
| CII4432 | VL | PRT | WO2017040301; SEQ ID NO: 195 | 6599 |
| CII4433 | VL | PRT | WO2017040301; SEQ ID NO: 295 | 6600 |
| CII4434 | VL | PRT | WO2017040301; SEQ ID NO: 211 | 6601 |
| CII4435 | VL | PRT | WO2017040301; SEQ ID NO: 262 | 6602 |
| CII4436 | VL | PRT | WO2017040301; SEQ ID NO: 457 | 6603 |
| CII4437 | VL | PRT | WO2017040301; SEQ ID NO: 226 | 6604 |
| CII4438 | VL | PRT | WO2017040301; SEQ ID NO: 256 | 6605 |
| CII4439 | VL | PRT | WO2017040301; SEQ ID NO: 287 | 6606 |
| CII4440 | VL | PRT | WO2017040301; SEQ ID NO: 308 | 6607 |
| CII4441 | VL | PRT | WO2017040301; SEQ ID NO: 316 | 6608 |
| CII4442 | VL | PRT | WO2017040301; SEQ ID NO: 208 | 6609 |
| CII4443 | VL | PRT | WO2017040301; SEQ ID NO: 278 | 6610 |
| CII4444 | VL | PRT | WO2017040301; SEQ ID NO: 241 | 6611 |
| CII4445 | VL | PRT | WO2017040301; SEQ ID NO: 231 | 6612 |
| CII4446 | VL | PRT | WO2017040301; SEQ ID NO: 191 | 6613 |
| CII4447 | VL | PRT | WO2017040301; SEQ ID NO: 291 | 6614 |
| CII4448 | VL | PRT | WO2017040301; SEQ ID NO: 218 | 6615 |
| CII4449 | VL | PRT | WO2017040301; SEQ ID NO: 268 | 6616 |
| CII4450 | VL | PRT | WO2017040301; SEQ ID NO: 228 | 6617 |
| CII4451 | VL | PRT | WO2017040301; SEQ ID NO: 257 | 6618 |
| CII4452 | VL | PRT | WO2017040301; SEQ ID NO: 286 | 6619 |
| CII4453 | VL | PRT | WO2017040301; SEQ ID NO: 306 | 6620 |
| CII4454 | VL | PRT | WO2017040301; SEQ ID NO: 318 | 6621 |
| CII4455 | VL | PRT | WO2017040301; SEQ ID NO: 206 | 6622 |
| CII4456 | VL | PRT | WO2017040301; SEQ ID NO: 277 | 6623 |
| CII4457 | VL | PRT | WO2017040301; SEQ ID NO: 240 | 6624 |
| CII4458 | VL | PRT | WO2017040301; SEQ ID NO: 230 | 6625 |
| CII4459 | VL | PRT | WO2017040301; SEQ ID NO: 190 | 6626 |
| CII4460 | VL | PRT | WO2017040301; SEQ ID NO: 290 | 6627 |
| CII4461 | VL | PRT | WO2017040301; SEQ ID NO: 216 | 6628 |
| CII4462 | VL | PRT | WO2017040301; SEQ ID NO: 266 | 6629 |
| CII4463 | VL | PRT | WO2017040301; SEQ ID NO: 459 | 6630 |
| CII4464 | VL | PRT | WO2017040301; SEQ ID NO: 489 | 6631 |
| CII4465 | VL | PRT | WO2017040301; SEQ ID NO: 517 | 6632 |
| CII4466 | VL | PRT | WO2017040301; SEQ ID NO: 513 | 6633 |
| CII4467 | VL | PRT | WO2017040301; SEQ ID NO: 227 | 6634 |
| CII4468 | VL | PRT | WO2017040301; SEQ ID NO: 258 | 6635 |
| CII4469 | VL | PRT | WO2017040301; SEQ ID NO: 288 | 6636 |
| CII4470 | VL | PRT | WO2017040301; SEQ ID NO: 307 | 6637 |
| CII4471 | VL | PRT | WO2017040301; SEQ ID NO: 317 | 6638 |
| CII4472 | VL | PRT | WO2017040301; SEQ ID NO: 207 | 6639 |
| CII4473 | VL | PRT | WO2017040301; SEQ ID NO: 276 | 6640 |
| CII4474 | VL | PRT | WO2017040301; SEQ ID NO: 239 | 6641 |
| CII4475 | VL | PRT | WO2017040301; SEQ ID NO: 229 | 6642 |
| CII4476 | VL | PRT | WO2017040301; SEQ ID NO: 189 | 6643 |
| CII4477 | VL | PRT | WO2017040301; SEQ ID NO: 289 | 6644 |
| CII4478 | VL | PRT | WO2017040301; SEQ ID NO: 217 | 6645 |
| CII4479 | VL | PRT | WO2017040301; SEQ ID NO: 267 | 6646 |
| CII4480 | VL | PRT | WO2017040301; SEQ ID NO: 454 | 6647 |
| CII4481 | VL | PRT | WO2017040301; SEQ ID NO: 453 | 6648 |
| CII4482 | VL | PRT | WO2017040301; SEQ ID NO: 449 | 6649 |
| CII4483 | VL | PRT | WO2017040301; SEQ ID NO: 224 | 6650 |
| CII4484 | VL | PRT | WO2017040301; SEQ ID NO: 250 | 6651 |
| CII4485 | VL | PRT | WO2017040301; SEQ ID NO: 283 | 6652 |
| CII4486 | VL | PRT | WO2017040301; SEQ ID NO: 303 | 6653 |
| CII4487 | VL | PRT | WO2017040301; SEQ ID NO: 311 | 6654 |
| CII4488 | VL | PRT | WO2017040301; SEQ ID NO: 202 | 6655 |
| CII4489 | VL | PRT | WO2017040301; SEQ ID NO: 272 | 6656 |
| CII4490 | VL | PRT | WO2017040301; SEQ ID NO: 497 | 6657 |
| CII4491 | VL | PRT | WO2017040301; SEQ ID NO: 500 | 6658 |
| CII4492 | VL | PRT | WO2017040301; SEQ ID NO: 242 | 6659 |
| CII4493 | VL | PRT | WO2017040301; SEQ ID NO: 232 | 6660 |
| CII4494 | VL | PRT | WO2017040301; SEQ ID NO: 192 | 6661 |
| CII4495 | VL | PRT | WO2017040301; SEQ ID NO: 292 | 6662 |
| CII4496 | VL | PRT | WO2017040301; SEQ ID NO: 209 | 6663 |
| CII4497 | VL | PRT | WO2017040301; SEQ ID NO: 484 | 6664 |
| CII4498 | VL | PRT | WO2017040301; SEQ ID NO: 501 | 6665 |
| CII4499 | VL | PRT | WO2017040301; SEQ ID NO: 259 | 6666 |
| CII4500 | VL | PRT | WO2017040301; SEQ ID NO: 486 | 6667 |
| CII4501 | VL | PRT | WO2017040301; SEQ ID NO: 503 | 6668 |
| CII4502 | VL | PRT | WO2017040301; SEQ ID NO: 485 | 6669 |
| CII4503 | VL | PRT | WO2017040301; SEQ ID NO: 502 | 6670 |
| CII4504 | VL | PRT | WO2017040301; SEQ ID NO: 225 | 6671 |
| CII4505 | VL | PRT | WO2017040301; SEQ ID NO: 255 | 6672 |
| CII4506 | VL | PRT | WO2017040301; SEQ ID NO: 285 | 6673 |
| CII4507 | VL | PRT | WO2017040301; SEQ ID NO: 305 | 6674 |
| CII4508 | VL | PRT | WO2017040301; SEQ ID NO: 315 | 6675 |
| CII4509 | VL | PRT | WO2017040301; SEQ ID NO: 205 | 6676 |
| CII4510 | VL | PRT | WO2017040301; SEQ ID NO: 275 | 6677 |
| CII4511 | VL | PRT | WO2017040301; SEQ ID NO: 245 | 6678 |
| CII4512 | VL | PRT | WO2017040301; SEQ ID NO: 235 | 6679 |
| CII4513 | VL | PRT | WO2017040301; SEQ ID NO: 198 | 6680 |
| CII4514 | VL | PRT | WO2017040301; SEQ ID NO: 298 | 6681 |
| CII4515 | VL | PRT | WO2017040301; SEQ ID NO: 215 | 6682 |
| CII4516 | VL | PRT | WO2017040301; SEQ ID NO: 265 | 6683 |
| CII4517 | VL | PRT | WO2017040301; SEQ ID NO: 223 | 6684 |
| CII4518 | VL | PRT | WO2017040301; SEQ ID NO: 249 | 6685 |
| CII4519 | VL | PRT | WO2017040301; SEQ ID NO: 282 | 6686 |
| CII4520 | VL | PRT | WO2017040301; SEQ ID NO: 304 | 6687 |
| CII4521 | VL | PRT | WO2017040301; SEQ ID NO: 313 | 6688 |
| CII4522 | VL | PRT | WO2017040301; SEQ ID NO: 204 | 6689 |
| CII4523 | VL | PRT | WO2017040301; SEQ ID NO: 274 | 6690 |
| CII4524 | VL | PRT | WO2017040301; SEQ ID NO: 244 | 6691 |
| CII4525 | VL | PRT | WO2017040301; SEQ ID NO: 234 | 6692 |
| CII4526 | VL | PRT | WO2017040301; SEQ ID NO: 194 | 6693 |
| CII4527 | VL | PRT | WO2017040301; SEQ ID NO: 294 | 6694 |
| CII4528 | VL | PRT | WO2017040301; SEQ ID NO: 214 | 6695 |
| CII4529 | VL | PRT | WO2017040301; SEQ ID NO: 264 | 6696 |
| CII4530 | VL | PRT | WO2017040301; SEQ ID NO: 456 | 6697 |
| CII4531 | VL | PRT | WO2017040301; SEQ ID NO: 455 | 6698 |
| CII4532 | VL | PRT | WO2017040301; SEQ ID NO: 499 | 6699 |
| CII4533 | VL | PRT | WO2017040301; SEQ ID NO: 451 | 6700 |
| CII4534 | VL | PRT | WO2017040301; SEQ ID NO: 460 | 6701 |
| CII4535 | VL | PRT | WO2017040301; SEQ ID NO: 498 | 6702 |
| CII4536 | VL | PRT | WO2017040301; SEQ ID NO: 512 | 6703 |
| CII4537 | VL | PRT | WO2017075432; SEQ ID NO: 94 | 6704 |
| CII4538 | VL | PRT | WO2017075432; SEQ ID NO: 96 | 6705 |
| CII4539 | VL | PRT | WO2017075432; SEQ ID NO: 78 | 6706 |
| CII4540 | VL | PRT | WO2017075432; SEQ ID NO: 110 | 6707 |
| CII4541 | VL | PRT | WO2017075432; SEQ ID NO: 89 | 6708 |
| CII4542 | VL | PRT | WO2017075432; SEQ ID NO: 62 | 6709 |
| CII4543 | VL | PRT | WO2017075432; SEQ ID NO: 204 | 6710 |
| CII4544 | VL | PRT | WO2017075432; SEQ ID NO: 203 | 6711 |
| CII4545 | VL | PRT | WO2017075432; SEQ ID NO: 61 | 6712 |
| CII4546 | VL | PRT | WO2017075432; SEQ ID NO: 95 | 6713 |
| CII4547 | VL | PRT | WO2017075432; SEQ ID NO: 97 | 6714 |
| CII4548 | VL | PRT | WO2017075432; SEQ ID NO: 79 | 6715 |
| CII4549 | VL | PRT | WO2017075432; SEQ ID NO: 77 | 6716 |
| CII4550 | VL | PRT | WO2017075432; SEQ ID NO: 111 | 6717 |
| CII4551 | VL | PRT | WO2017075432; SEQ ID NO: 90 | 6718 |
| CII4552 | VL | PRT | WO2017075432; SEQ ID NO: 112 | 6719 |
| CII4553 | VL | PRT | WO2017075432; SEQ ID NO: 88 | 6720 |
| CII4554 | VL | PRT | WO2017075432; SEQ ID NO: 202 | 6721 |
| CII4555 | VL | PRT | WO2017075432; SEQ ID NO: 65 | 6722 |
| CII4556 | VL | PRT | WO2017075432; SEQ ID NO: 63 | 6723 |
| CII4557 | VL | PRT | WO2017075432; SEQ ID NO: 99 | 6724 |
| CII4558 | VL | PRT | WO2017075432; SEQ ID NO: 76 | 6725 |
| CII4559 | VL | PRT | WO2017075432; SEQ ID NO: 109 | 6726 |
| CII4560 | VL | PRT | WO2017075432; SEQ ID NO: 87 | 6727 |
| CII4561 | VL | PRT | WO2017075432; SEQ ID NO: 64 | 6728 |
| CII4562 | VL | PRT | WO2017075432; SEQ ID NO: 201 | 6729 |
| CII4563 | VL | PRT | WO2017075432; SEQ ID NO: 103 | 6730 |
| CII4564 | VL | PRT | WO2017075432; SEQ ID NO: 75 | 6731 |
| CII4565 | VL | PRT | WO2017075432; SEQ ID NO: 108 | 6732 |
| CII4566 | VL | PRT | WO2017075432; SEQ ID NO: 86 | 6733 |
| CII4567 | VL | PRT | WO2017075432; SEQ ID NO: 70 | 6734 |
| CII4568 | VL | PRT | WO2017075432; SEQ ID NO: 102 | 6735 |
| CII4569 | VL | PRT | WO2017075432; SEQ ID NO: 74 | 6736 |
| CII4570 | VL | PRT | WO2017075432; SEQ ID NO: 107 | 6737 |
| CII4571 | VL | PRT | WO2017075432; SEQ ID NO: 85 | 6738 |
| CII4572 | VL | PRT | WO2017075432; SEQ ID NO: 71 | 6739 |
| CII4573 | VL | PRT | WO2017075432; SEQ ID NO: 104 | 6740 |
| CII4574 | VL | PRT | WO2017075432; SEQ ID NO: 73 | 6741 |
| CII4575 | VL | PRT | WO2017075432; SEQ ID NO: 106 | 6742 |
| CII4576 | VL | PRT | WO2017075432; SEQ ID NO: 84 | 6743 |
| CII4577 | VL | PRT | WO2017075432; SEQ ID NO: 69 | 6744 |
| CII4578 | VL | PRT | WO2017075432; SEQ ID NO: 198 | 6745 |
| CII4579 | VL | PRT | WO2017075432; SEQ ID NO: 200 | 6746 |
| CII4580 | VL | PRT | WO2017075432; SEQ ID NO: 199 | 6747 |
| CII4581 | VL | PRT | WO2017075432; SEQ ID NO: 197 | 6748 |
| CII4582 | VL | PRT | WO2017075432; SEQ ID NO: 72 | 6749 |
| CII4583 | VL | PRT | WO2017075432; SEQ ID NO: 98 | 6750 |
| CII4584 | VL | PRT | WO2017075432; SEQ ID NO: 80 | 6751 |
| CII4585 | VL | PRT | WO2017075432; SEQ ID NO: 113 | 6752 |
| CII4586 | VL | PRT | WO2017075432; SEQ ID NO: 91 | 6753 |
| CII4587 | VL | PRT | WO2017075432; SEQ ID NO: 67 | 6754 |
| CII4588 | VL | PRT | WO2017075432; SEQ ID NO: 101 | 6755 |
| CII4589 | VL | PRT | WO2017075432; SEQ ID NO: 82 | 6756 |
| CII4590 | VL | PRT | WO2017075432; SEQ ID NO: 115 | 6757 |
| CII4591 | VL | PRT | WO2017075432; SEQ ID NO: 93 | 6758 |
| CII4592 | VL | PRT | WO2017075432; SEQ ID NO: 68 | 6759 |
| CII4593 | VL | PRT | WO2017075432; SEQ ID NO: 100 | 6760 |
| CII4594 | VL | PRT | WO2017075432; SEQ ID NO: 81 | 6761 |
| CII4595 | VL | PRT | WO2017075432; SEQ ID NO: 114 | 6762 |
| CII4596 | VL | PRT | WO2017075432; SEQ ID NO: 92 | 6763 |
| CII4597 | VL | PRT | WO2017075432; SEQ ID NO: 66 | 6764 |
| CII4598 | VL | PRT | WO2017075432; SEQ ID NO: 83 | 6765 |
| CII4599 | VL | PRT | WO2017075432; SEQ ID NO: 105 | 6766 |
| CII4600 | VL | PRT | WO2018107058; SEQ ID NO: 44 | 6767 |
| CII4601 | VL | PRT | WO2018107058; SEQ ID NO: 3 | 6768 |
| CII4602 | VL | PRT | WO2018107058; SEQ ID NO: 36 | 6769 |
| CII4603 | VL | PRT | WO2018107058; SEQ ID NO: 42 | 6770 |
| CII4604 | VL | PRT | WO2018107058; SEQ ID NO: 38 | 6771 |
| CII4605 | VL | PRT | WO2018107058; SEQ ID NO: 40 | 6772 |
| CII4606 | VL | PRT | WO2018107058; SEQ ID NO: 5 | 6773 |
| CII4607 | VL | PRT | US20190085084; SEQ ID NO: 268 | 6774 |
| CII4608 | VL | PRT | US20190085084; SEQ ID NO: 258 | 6775 |
| CII4609 | VL | PRT | US20190085084; SEQ ID NO: 354 | 6776 |
| CII4610 | VL | PRT | US20190085084; SEQ ID NO: 319 | 6777 |
| CII4611 | VL | PRT | US20190085084; SEQ ID NO: 319 | 6778 |
| CII4612 | VL | PRT | US20190085084; SEQ ID NO: 341 | 6779 |
| CII4613 | VL | PRT | US20190085084; SEQ ID NO: 350 | 6780 |
| CII4614 | VL | PRT | US20190085084; SEQ ID NO: 263 | 6781 |
| CII4615 | VL | PRT | US20190085084; SEQ ID NO: 259 | 6782 |
| CII4616 | VL | PRT | US20190085084; SEQ ID NO: 356 | 6783 |
| CII4617 | VL | PRT | US20190085084; SEQ ID NO: 356 | 6784 |
| CII4618 | VL | PRT | US20190085084; SEQ ID NO: 267 | 6785 |
| CII4619 | VL | PRT | US20190085084; SEQ ID NO: 261 | 6786 |
| CII4620 | VL | PRT | US20190085084; SEQ ID NO: 371 | 6787 |
| CII4621 | VL | PRT | US20190085084; SEQ ID NO: 430 | 6788 |
| CII4622 | VL | PRT | US20190085084; SEQ ID NO: 430 | 6789 |
| CII4623 | VL | PRT | US20190085084; SEQ ID NO: 370 | 6790 |
| CII4624 | VL | PRT | US20190085084; SEQ ID NO: 324 | 6791 |
| CII4625 | VL | PRT | US20190085084; SEQ ID NO: 264 | 6792 |
| CII4626 | VL | PRT | US20190085084; SEQ ID NO: 413 | 6793 |
| CII4627 | VL | PRT | US20190085084; SEQ ID NO: 348 | 6794 |
| CII4628 | VL | PRT | US20190085084; SEQ ID NO: 262 | 6795 |
| CII4629 | VL | PRT | US20190085084; SEQ ID NO: 257 | 6796 |
| CII4630 | VL | PRT | US20190085084; SEQ ID NO: 425 | 6797 |
| CII4631 | VL | PRT | US20190085084; SEQ ID NO: 472 | 6798 |
| CII4632 | VL | PRT | US20190085084; SEQ ID NO: 472 | 6799 |
| CII4633 | VL | PRT | US20190085084; SEQ ID NO: 266 | 6800 |
| CII4634 | VL | PRT | US20190085084; SEQ ID NO: 260 | 6801 |
| CII4635 | VL | PRT | US20190085084; SEQ ID NO: 343 | 6802 |
| CII4636 | VL | PRT | US20190085084; SEQ ID NO: 343 | 6803 |
| CII4637 | VL | PRT | US20190085084; SEQ ID NO: 265 | 6804 |
| CII4638 | VL | PRT | US20190085084; SEQ ID NO: 352 | 6805 |
| CII4639 | VL | PRT | US20190085084; SEQ ID NO: 283 | 6806 |
| CII4640 | VL | PRT | US20190085084; SEQ ID NO: 281 | 6807 |
| CII4641 | VL | PRT | US20190085084; SEQ ID NO: 279 | 6808 |
| CII4642 | VL | PRT | US20190085084; SEQ ID NO: 276 | 6809 |
| CII4643 | VL | PRT | US20190085084; SEQ ID NO: 280 | 6810 |
| CII4644 | VL | PRT | US20190085084; SEQ ID NO: 282 | 6811 |
| CII4645 | VL | PRT | US20190085084; SEQ ID NO: 277 | 6812 |
| CII4646 | VL | PRT | US20190085084; SEQ ID NO: 278 | 6813 |
| CII4647 | VL | PRT | US20190085084; SEQ ID NO: 272 | 6814 |
| CII4648 | VL | PRT | US20190085084; SEQ ID NO: 271 | 6815 |
| CII4649 | VL | PRT | US20190085084; SEQ ID NO: 275 | 6816 |
| CII4650 | VL | PRT | US20190085084; SEQ ID NO: 274 | 6817 |
| CII4651 | VL | PRT | US20190085084; SEQ ID NO: 270 | 6818 |
| CII4652 | VL | PRT | US20190085084; SEQ ID NO: 269 | 6819 |
| CII4653 | VL | PRT | US20190085084; SEQ ID NO: 273 | 6820 |
| CII4654 | VL | PRT | WO2014028776; SEQ ID NO: 82 | 6821 |
| CII4655 | VL | PRT | US20140212413; SEQ ID NO: 3 | 6822 |
| CII4656 | VL | PRT | WO2010129469; SEQ ID NO: 9 | 6823 |
| CII4657 | VL | PRT | WO2010129469; SEQ ID NO: 1 | 6824 |
| CII4658 | VL | PRT | WO2018140121; WO2018147922; SEQ | 6825 |
| | | | ID NO: 8 | |
| CII4659 | VL | PRT | WO2018140121; WO2018147924; SEQ | 6826 |
| | | | ID NO: 33 | |
| CII4660 | VL | PRT | WO2017062672; SEQ ID NO: 357 | 6827 |
| CII4661 | VL | PRT | WO2017062672; SEQ ID NO: 256 | 6828 |
| CII4662 | VL | PRT | WO2017062672; SEQ ID NO: 385 | 6829 |
| CII4663 | VL | PRT | WO2017062672; SEQ ID NO: 391 | 6830 |
| CII4664 | VL | PRT | WO2017062672; SEQ ID NO: 246 | 6831 |
| CII4665 | VL | PRT | WO2017062672; SEQ ID NO: 304 | 6832 |
| CII4666 | VL | PRT | WO2017062672; SEQ ID NO: 234 | 6833 |
| CII4667 | VL | PRT | WO2017062672; SEQ ID NO: 617 | 6834 |
| CII4668 | VL | PRT | WO2017062672; SEQ ID NO: 608 | 6835 |
| CII4669 | VL | PRT | WO2017062672; SEQ ID NO: 684 | 6836 |
| CII4670 | VL | PRT | WO2017062672; SEQ ID NO: 221 | 6837 |
| CII4671 | VL | PRT | WO2017062672; SEQ ID NO: 312 | 6838 |
| CII4672 | VL | PRT | WO2017062672; SEQ ID NO: 350 | 6839 |
| CII4673 | VL | PRT | WO2017062672; SEQ ID NO: 283 | 6840 |
| CII4674 | VL | PRT | WO2017062672; SEQ ID NO: 632 | 6841 |
| CII4675 | VL | PRT | WO2017062672; SEQ ID NO: 342 | 6842 |
| CII4676 | VL | PRT | WO2017062672; SEQ ID NO: 373 | 6843 |
| CII4677 | VL | PRT | WO2017062672; SEQ ID NO: 292 | 6844 |
| CII4678 | VL | PRT | WO2017062672; SEQ ID NO: 325 | 6845 |
| CII4679 | VL | PRT | WO2017062672; SEQ ID NO: 268 | 6846 |
| CII4680 | VL | PRT | WO2016023019; SEQ ID NO: 297 | 6847 |
| CII4681 | VL | PRT | WO2016023019; SEQ ID NO: 392 | 6848 |
| CII4682 | VL | PRT | WO2017062672; SEQ ID NO: 814 | 6849 |
| CII4683 | VL | PRT | WO2017062672; SEQ ID NO: 322 | 6850 |
| CII4684 | VL | PRT | WO2017062672; SEQ ID NO: 356 | 6851 |
| CII4685 | VL | PRT | WO2017062672; SEQ ID NO: 358 | 6852 |
| CII4686 | VL | PRT | WO2017062672; SEQ ID NO: 259 | 6853 |
| CII4687 | VL | PRT | WO2017062672; SEQ ID NO: 258 | 6854 |
| CII4688 | VL | PRT | WO2017062672; SEQ ID NO: 380 | 6855 |
| CII4689 | VL | PRT | WO2017062672; SEQ ID NO: 386 | 6856 |
| CII4690 | VL | PRT | WO2017062672; SEQ ID NO: 394 | 6857 |
| CII4691 | VL | PRT | WO2017062672; SEQ ID NO: 396 | 6858 |
| CII4692 | VL | PRT | WO2017062672; SEQ ID NO: 248 | 6859 |
| CII4693 | VL | PRT | WO2017062672; SEQ ID NO: 247 | 6860 |
| CII4694 | VL | PRT | WO2017062672; SEQ ID NO: 308 | 6861 |
| CII4695 | VL | PRT | WO2017062672; SEQ ID NO: 306 | 6862 |
| CII4696 | VL | PRT | WO2017062672; SEQ ID NO: 237 | 6863 |
| CII4697 | VL | PRT | WO2017062672; SEQ ID NO: 238 | 6864 |
| CII4698 | VL | PRT | WO2017062672; SEQ ID NO: 620 | 6865 |
| CII4699 | VL | PRT | WO2017062672; SEQ ID NO: 621 | 6866 |
| CII4700 | VL | PRT | WO2017062672; SEQ ID NO: 611 | 6867 |
| CII4701 | VL | PRT | WO2017062672; SEQ ID NO: 686 | 6868 |
| CII4702 | VL | PRT | WO2017062672; SEQ ID NO: 610 | 6869 |
| CII4703 | VL | PRT | WO2017062672; SEQ ID NO: 688 | 6870 |
| CII4704 | VL | PRT | WO2016023019; SEQ ID NO: 247 | 6871 |
| CII4705 | VL | PRT | WO2016023019; SEQ ID NO: 270 | 6872 |
| CII4706 | VL | PRT | WO2016023019; SEQ ID NO: 273 | 6873 |
| CII4707 | VL | PRT | WO2016023019; SEQ ID NO: 275 | 6874 |
| CII4708 | VL | PRT | WO2016023019; SEQ ID NO: 272 | 6875 |
| CII4709 | VL | PRT | WO2016023019; SEQ ID NO: 344 | 6876 |
| CII4710 | VL | PRT | WO2016023019; SEQ ID NO: 269 | 6877 |
| CII4711 | VL | PRT | WO2016023019; SEQ ID NO: 276 | 6878 |
| CII4712 | VL | PRT | WO2016023019; SEQ ID NO: 368 | 6879 |
| CII4713 | VL | PRT | WO2017062672; SEQ ID NO: 225 | 6880 |
| CII4714 | VL | PRT | WO2017062672; SEQ ID NO: 224 | 6881 |
| CII4715 | VL | PRT | WO2017062672; SEQ ID NO: 317 | 6882 |
| CII4716 | VL | PRT | WO2017062672; SEQ ID NO: 316 | 6883 |
| CII4717 | VL | PRT | WO2016023019; SEQ ID NO: 334 | 6884 |
| CII4718 | VL | PRT | WO2016023019; SEQ ID NO: 320 | 6885 |
| CII4719 | VL | PRT | WO2016023019; SEQ ID NO: 283 | 6886 |
| CII4720 | VL | PRT | WO2016023019; SEQ ID NO: 265 | 6887 |
| CII4721 | VL | PRT | WO2016023019; SEQ ID NO: 332 | 6888 |
| CII4722 | VL | PRT | WO2016023019; SEQ ID NO: 314 | 6889 |
| CII4723 | VL | PRT | WO2016023019; SEQ ID NO: 305 | 6890 |
| CII4724 | VL | PRT | WO2016023019; SEQ ID NO: 303 | 6891 |
| CII4725 | VL | PRT | WO2016023019; SEQ ID NO: 390 | 6892 |
| CII4726 | VL | PRT | WO2016023019; SEQ ID NO: 313 | 6893 |
| CII4727 | VL | PRT | WO2016023019; SEQ ID NO: 257 | 6894 |
| CII4728 | VL | PRT | WO2016023019; SEQ ID NO: 295 | 6895 |
| CII4729 | VL | PRT | WO2017062672; SEQ ID NO: 353 | 6896 |
| CII4730 | VL | PRT | WO2017062672; SEQ ID NO: 352 | 6897 |
| CII4731 | VL | PRT | WO2017062672; SEQ ID NO: 280 | 6898 |
| CII4732 | VL | PRT | WO2017062672; SEQ ID NO: 629 | 6899 |
| CII4733 | VL | PRT | WO2017062672; SEQ ID NO: 279 | 6900 |
| CII4734 | VL | PRT | WO2017062672; SEQ ID NO: 631 | 6901 |
| CII4735 | VL | PRT | WO2017062672; SEQ ID NO: 338 | 6902 |
| CII4736 | VL | PRT | WO2017062672; SEQ ID NO: 341 | 6903 |
| CII4737 | VL | PRT | WO2017062672; SEQ ID NO: 371 | 6904 |
| CII4738 | VL | PRT | WO2017062672; SEQ ID NO: 375 | 6905 |
| CII4739 | VL | PRT | WO2017062672; SEQ ID NO: 293 | 6906 |
| CII4740 | VL | PRT | WO2017062672; SEQ ID NO: 294 | 6907 |
| CII4741 | VL | PRT | WO2017062672; SEQ ID NO: 328 | 6908 |
| CII4742 | VL | PRT | WO2017062672; SEQ ID NO: 327 | 6909 |
| CII4743 | VL | PRT | WO2017062672; SEQ ID NO: 269 | 6910 |
| CII4744 | VL | PRT | WO2017062672; SEQ ID NO: 265 | 6911 |
| CII4745 | VL | PRT | WO2016023019; SEQ ID NO: 352 | 6912 |
| CII4746 | VL | PRT | WO2016023019; SEQ ID NO: 387 | 6913 |
| CII4747 | VL | PRT | WO2016023019; SEQ ID NO: 389 | 6914 |
| CII4748 | VL | PRT | WO2017062672; SEQ ID NO: 359 | 6915 |
| CII4749 | VL | PRT | WO2017062672; SEQ ID NO: 257 | 6916 |
| CII4750 | VL | PRT | WO2017062672; SEQ ID NO: 383 | 6917 |
| CII4751 | VL | PRT | WO2017062672; SEQ ID NO: 392 | 6918 |
| CII4752 | VL | PRT | WO2017062672; SEQ ID NO: 245 | 6919 |
| CII4753 | VL | PRT | WO2017062672; SEQ ID NO: 303 | 6920 |
| CII4754 | VL | PRT | WO2017062672; SEQ ID NO: 235 | 6921 |
| CII4755 | VL | PRT | WO2017062672; SEQ ID NO: 619 | 6922 |
| CII4756 | VL | PRT | WO2017062672; SEQ ID NO: 606 | 6923 |
| CII4757 | VL | PRT | WO2017062672; SEQ ID NO: 683 | 6924 |
| CII4758 | VL | PRT | WO2017062672; SEQ ID NO: 223 | 6925 |
| CII4759 | VL | PRT | WO2017062672; SEQ ID NO: 314 | 6926 |
| CII4760 | VL | PRT | WO2016023019; SEQ ID NO: 342 | 6927 |
| CII4761 | VL | PRT | WO2016023019; SEQ ID NO: 394 | 6928 |
| CII4762 | VL | PRT | WO2017062672; SEQ ID NO: 351 | 6929 |
| CII4763 | VL | PRT | WO2017062672; SEQ ID NO: 282 | 6930 |
| CII4764 | VL | PRT | WO2017062672; SEQ ID NO: 630 | 6931 |
| CII4765 | VL | PRT | WO2017062672; SEQ ID NO: 340 | 6932 |
| CII4766 | VL | PRT | WO2017062672; SEQ ID NO: 374 | 6933 |
| CII4767 | VL | PRT | WO2017062672; SEQ ID NO: 296 | 6934 |
| CII4768 | VL | PRT | WO2017062672; SEQ ID NO: 326 | 6935 |
| CII4769 | VL | PRT | WO2017062672; SEQ ID NO: 266 | 6936 |
| CII4770 | VL | PRT | WO2017062672; SEQ ID NO: 813 | 6937 |
| CII4771 | VL | PRT | WO2017062672; SEQ ID NO: 613 | 6938 |
| CII4772 | VL | PRT | WO2017062672; SEQ ID NO: 727 | 6939 |
| CII4773 | VL | PRT | WO2017062672; SEQ ID NO: 729 | 6940 |
| CII4774 | VL | PRT | WO2017062672; SEQ ID NO: 724 | 6941 |
| CII4775 | VL | PRT | WO2017062672; SEQ ID NO: 730 | 6942 |
| CII4776 | VL | PRT | WO2017062672; SEQ ID NO: 726 | 6943 |
| CII4777 | VL | PRT | WO2017062672; SEQ ID NO: 364 | 6944 |
| CII4778 | VL | PRT | WO2017062672; SEQ ID NO: 255 | 6945 |
| CII4779 | VL | PRT | WO2017062672; SEQ ID NO: 377 | 6946 |
| CII4780 | VL | PRT | WO2017062672; SEQ ID NO: 388 | 6947 |
| CII4781 | VL | PRT | WO2017062672; SEQ ID NO: 244 | 6948 |
| CII4782 | VL | PRT | WO2017062672; SEQ ID NO: 300 | 6949 |
| CII4783 | VL | PRT | WO2017062672; SEQ ID NO: 231 | 6950 |
| CII4784 | VL | PRT | WO2017062672; SEQ ID NO: 614 | 6951 |
| CII4785 | VL | PRT | WO2017062672; SEQ ID NO: 603 | 6952 |
| CII4786 | VL | PRT | WO2017062672; SEQ ID NO: 680 | 6953 |
| CII4787 | VL | PRT | WO2016023019; SEQ ID NO: 281 | 6954 |
| CII4788 | VL | PRT | WO2016023019; SEQ ID NO: 377 | 6955 |
| CII4789 | VL | PRT | WO2016023019; SEQ ID NO: 375 | 6956 |
| CII4790 | VL | PRT | WO2017062672; SEQ ID NO: 229 | 6957 |
| CII4791 | VL | PRT | WO2017062672; SEQ ID NO: 320 | 6958 |
| CII4792 | VL | PRT | WO2017062672; SEQ ID NO: 347 | 6959 |
| CII4793 | VL | PRT | WO2017062672; SEQ ID NO: 277 | 6960 |
| CII4794 | VL | PRT | WO2017062672; SEQ ID NO: 627 | 6961 |
| CII4795 | VL | PRT | WO2017062672; SEQ ID NO: 336 | 6962 |
| CII4796 | VL | PRT | WO2017062672; SEQ ID NO: 368 | 6963 |
| CII4797 | VL | PRT | WO2017062672; SEQ ID NO: 290 | 6964 |
| CII4798 | VL | PRT | WO2017062672; SEQ ID NO: 332 | 6965 |
| CII4799 | VL | PRT | WO2017062672; SEQ ID NO: 273 | 6966 |
| CII4800 | VL | PRT | WO2017062672; SEQ ID NO: 728 | 6967 |
| CII4801 | VL | PRT | WO2017062672; SEQ ID NO: 362 | 6968 |
| CII4802 | VL | PRT | WO2017062672; SEQ ID NO: 254 | 6969 |
| CII4803 | VL | PRT | WO2017062672; SEQ ID NO: 379 | 6970 |
| CII4804 | VL | PRT | WO2017062672; SEQ ID NO: 389 | 6971 |
| CII4805 | VL | PRT | WO2017062672; SEQ ID NO: 243 | 6972 |
| CII4806 | VL | PRT | WO2017062672; SEQ ID NO: 301 | 6973 |
| CII4807 | VL | PRT | WO2017062672; SEQ ID NO: 233 | 6974 |
| CII4808 | VL | PRT | WO2017062672; SEQ ID NO: 615 | 6975 |
| CII4809 | VL | PRT | WO2017062672; SEQ ID NO: 605 | 6976 |
| CII4810 | VL | PRT | WO2017062672; SEQ ID NO: 681 | 6977 |
| CII4811 | VL | PRT | WO2017062672; SEQ ID NO: 227 | 6978 |
| CII4812 | VL | PRT | WO2017062672; SEQ ID NO: 319 | 6979 |
| CII4813 | VL | PRT | WO2017062672; SEQ ID NO: 346 | 6980 |
| CII4814 | VL | PRT | WO2016023019; SEQ ID NO: 381 | 6981 |
| CII4815 | VL | PRT | WO2017062672; SEQ ID NO: 276 | 6982 |
| CII4816 | VL | PRT | WO2017062672; SEQ ID NO: 626 | 6983 |
| CII4817 | VL | PRT | WO2019028292; SEQ ID NO: 116 | 6984 |
| CII4818 | VL | PRT | WO2017062672; SEQ ID NO: 335 | 6985 |
| CII4819 | VL | PRT | WO2017062672; SEQ ID NO: 367 | 6986 |
| CII4820 | VL | PRT | WO2017062672; SEQ ID NO: 289 | 6987 |
| CII4821 | VL | PRT | WO2017062672; SEQ ID NO: 330 | 6988 |
| CII4822 | VL | PRT | WO2017062672; SEQ ID NO: 271 | 6989 |
| CII4823 | VL | PRT | WO2017062672; SEQ ID NO: 843 | 6990 |
| CII4824 | VL | PRT | WO2019028292; SEQ ID NO: 114 | 6991 |
| CII4825 | VL | PRT | WO2017062672; SEQ ID NO: 376 | 6992 |
| CII4826 | VL | PRT | WO2017062672; SEQ ID NO: 219 | 6993 |
| CII4827 | VL | PRT | WO2017062672; SEQ ID NO: 344 | 6994 |
| CII4828 | VL | PRT | WO2017062672; SEQ ID NO: 725 | 6995 |
| CII4829 | VL | PRT | WO2019028292; SEQ ID NO: 117 | 6996 |
| CII4830 | VL | PRT | WO2019028292; SEQ ID NO: 104 | 6997 |
| CII4831 | VL | PRT | WO2019028292; SEQ ID NO: 111 | 6998 |
| CII4832 | VL | PRT | WO2019028292; SEQ ID NO: 112 | 6999 |
| CII4833 | VL | PRT | WO2017062672; SEQ ID NO: 363 | 7000 |
| CII4834 | VL | PRT | WO2017062672; SEQ ID NO: 253 | 7001 |
| CII4835 | VL | PRT | WO2017062672; SEQ ID NO: 378 | 7002 |
| CII4836 | VL | PRT | WO2017062672; SEQ ID NO: 390 | 7003 |
| CII4837 | VL | PRT | WO2017062672; SEQ ID NO: 242 | 7004 |
| CII4838 | VL | PRT | WO2017062672; SEQ ID NO: 302 | 7005 |
| CII4839 | VL | PRT | WO2017062672; SEQ ID NO: 232 | 7006 |
| CII4840 | VL | PRT | WO2017062672; SEQ ID NO: 616 | 7007 |
| CII4841 | VL | PRT | WO2017062672; SEQ ID NO: 604 | 7008 |
| CII4842 | VL | PRT | WO2017062672; SEQ ID NO: 682 | 7009 |
| CII4843 | VL | PRT | WO2017062672; SEQ ID NO: 228 | 7010 |
| CII4844 | VL | PRT | WO2017062672; SEQ ID NO: 321 | 7011 |
| CII4845 | VL | PRT | WO2017062672; SEQ ID NO: 345 | 7012 |
| CII4846 | VL | PRT | WO2017062672; SEQ ID NO: 275 | 7013 |
| CII4847 | VL | PRT | WO2017062672; SEQ ID NO: 625 | 7014 |
| CII4848 | VL | PRT | WO2017062672; SEQ ID NO: 334 | 7015 |
| CII4849 | VL | PRT | WO2017062672; SEQ ID NO: 366 | 7016 |
| CII4850 | VL | PRT | WO2017062672; SEQ ID NO: 288 | 7017 |
| CII4851 | VL | PRT | WO2017062672; SEQ ID NO: 331 | 7018 |
| CII4852 | VL | PRT | WO2017062672; SEQ ID NO: 272 | 7019 |
| CII4853 | VL | PRT | WO2017062672; SEQ ID NO: 812 | 7020 |
| CII4854 | VL | PRT | WO2017062672; SEQ ID NO: 811 | 7021 |
| CII4855 | VL | PRT | WO2017062672; SEQ ID NO: 816 | 7022 |
| CII4856 | VL | PRT | WO2017062672; SEQ ID NO: 624 | 7023 |
| CII4857 | VL | PRT | WO2017062672; SEQ ID NO: 850 | 7024 |
| CII4858 | VL | PRT | WO2017062672; SEQ ID NO: 365 | 7025 |
| CII4859 | VL | PRT | WO2017062672; SEQ ID NO: 287 | 7026 |
| CII4860 | VL | PRT | WO2019028292; SEQ ID NO: 115 | 7027 |
| CII4861 | VL | PRT | WO2017062672; SEQ ID NO: 844 | 7028 |
| CII4862 | VL | PRT | WO2019028292; SEQ ID NO: 92 | 7029 |
| CII4863 | VL | PRT | WO2019028292; SEQ ID NO: 93 | 7030 |
| CII4864 | VL | PRT | WO2019028292; SEQ ID NO: 94 | 7031 |
| CII4865 | VL | PRT | WO2019028292; SEQ ID NO: 98 | 7032 |
| CII4886 | VL | PRT | WO2019028292; SEQ ID NO: 108 | 7033 |
| CII4867 | VL | PRT | WO2019028292; SEQ ID NO: 109 | 7034 |
| CII4868 | VL | PRT | WO2017062672; SEQ ID NO: 849 | 7035 |
| CII4889 | VL | PRT | WO2017062672; SEQ ID NO: 298 | 7036 |
| CII4870 | VL | PRT | WO2017062672; SEQ ID NO: 333 | 7037 |
| CII4871 | VL | PRT | WO2017062672; SEQ ID NO: 274 | 7038 |
| CII4872 | VL | PRT | WO2017062672; SEQ ID NO: 310 | 7039 |
| CII4873 | VL | PRT | WO2017062672; SEQ ID NO: 252 | 7040 |
| CII4874 | VL | PRT | WO2017062672; SEQ ID NO: 241 | 7041 |
| CII4875 | VL | PRT | WO2017062672; SEQ ID NO: 821 | 7042 |
| CII4876 | VL | PRT | WO2017062672; SEQ ID NO: 260 | 7043 |
| CII4877 | VL | PRT | WO2017062672; SEQ ID NO: 381 | 7044 |
| CII4878 | VL | PRT | WO2017062672; SEQ ID NO: 395 | 7045 |
| CII4879 | VL | PRT | WO2017062672; SEQ ID NO: 250 | 7046 |
| CII4880 | VL | PRT | WO2017062672; SEQ ID NO: 307 | 7047 |
| CII4881 | VL | PRT | WO2017062672; SEQ ID NO: 239 | 7048 |
| CII4882 | VL | PRT | WO2017062672; SEQ ID NO: 622 | 7049 |
| CII4883 | VL | PRT | WO2017062672; SEQ ID NO: 609 | 7050 |
| CII4884 | VL | PRT | WO2017062672; SEQ ID NO: 687 | 7051 |
| CII4885 | VL | PRT | WO2017062672; SEQ ID NO: 222 | 7052 |
| CII4886 | VL | PRT | WO2017062672; SEQ ID NO: 313 | 7053 |
| CII4887 | VL | PRT | WO2016023019; SEQ ID NO: 396 | 7054 |
| CII4888 | VL | PRT | WO2016023019; SEQ ID NO: 346 | 7055 |
| CII4889 | VL | PRT | WO2016023019; SEQ ID NO: 255 | 7056 |
| CII4890 | VL | PRT | WO2016023019; SEQ ID NO: 329 | 7057 |
| CII4891 | VL | PRT | WO2016023019; SEQ ID NO: 253 | 7058 |
| CII4892 | VL | PRT | WO2016023019; SEQ ID NO: 291 | 7059 |
| CII4893 | VL | PRT | WO2016023019; SEQ ID NO: 350 | 7060 |
| CII4894 | VL | PRT | WO2016023019; SEQ ID NO: 340 | 7061 |
| CII4895 | VL | PRT | WO2016023019; SEQ ID NO: 379 | 7062 |
| CII4896 | VL | PRT | WO2016023019; SEQ ID NO: 301 | 7063 |
| CII4897 | VL | PRT | WO2016023019; SEQ ID NO: 356 | 7064 |
| CII4898 | VL | PRT | WO2016023019; SEQ ID NO: 287 | 7065 |
| CII4899 | VL | PRT | WO2016023019; SEQ ID NO: 259 | 7066 |
| CII4900 | VL | PRT | WO2016023019; SEQ ID NO: 311 | 7067 |
| CII4901 | VL | PRT | WO2016023019; SEQ ID NO: 307 | 7068 |
| CII4902 | VL | PRT | WO2016023019; SEQ ID NO: 336 | 7069 |
| CII4903 | VL | PRT | WO2016023019; SEQ ID NO: 328 | 7070 |
| CII4904 | VL | PRT | WO2016023019; SEQ ID NO: 363 | 7071 |
| CII4905 | VL | PRT | WO2016023019; SEQ ID NO: 309 | 7072 |
| CII4906 | VL | PRT | WO2016023019; SEQ ID NO: 361 | 7073 |
| CII4907 | VL | PRT | WO2016023019; SEQ ID NO: 359 | 7074 |
| CII4908 | VL | PRT | WO2016023019; SEQ ID NO: 371 | 7075 |
| CII4909 | VL | PRT | WO2016023019; SEQ ID NO: 364 | 7076 |
| CII4910 | VL | PRT | WO2016023019; SEQ ID NO: 385 | 7077 |
| CII4911 | VL | PRT | WO2016023019; SEQ ID NO: 373 | 7078 |
| CII4912 | VL | PRT | WO2016023019; SEQ ID NO: 267 | 7079 |
| CII4913 | VL | PRT | WO2016023019; SEQ ID NO: 289 | 7080 |
| CII4914 | VL | PRT | WO2016023019; SEQ ID NO: 299 | 7081 |
| CII4915 | VL | PRT | WO2016023019; SEQ ID NO: 383 | 7082 |
| CII4916 | VL | PRT | WO2016023019; SEQ ID NO: 316 | 7083 |
| CII4917 | VL | PRT | WO2016023019; SEQ ID NO: 348 | 7084 |
| CII4918 | VL | PRT | WO2016023019; SEQ ID NO: 325 | 7085 |
| CII4919 | VL | PRT | WO2017062672; SEQ ID NO: 348 | 7086 |
| CII4920 | VL | PRT | WO2017062672; SEQ ID NO: 278 | 7087 |
| CII4921 | VL | PRT | WO2017062672; SEQ ID NO: 628 | 7088 |
| CII4922 | VL | PRT | WO2017062672; SEQ ID NO: 337 | 7089 |
| CII4923 | VL | PRT | WO2017062672; SEQ ID NO: 369 | 7090 |
| CII4924 | VL | PRT | WO2017062672; SEQ ID NO: 291 | 7091 |
| CII4925 | VL | PRT | WO2017062672; SEQ ID NO: 324 | 7092 |
| CII4926 | VL | PRT | WO2017062672; SEQ ID NO: 264 | 7093 |
| CII4927 | VL | PRT | WO2016023019; SEQ ID NO: 245 | 7094 |
| CII4928 | VL | PRT | WO2017062672; SEQ ID NO: 361 | 7095 |
| CII4929 | VL | PRT | WO2017062672; SEQ ID NO: 262 | 7096 |
| CII4930 | VL | PRT | WO2017062672; SEQ ID NO: 384 | 7097 |
| CII4931 | VL | PRT | WO2017062672; SEQ ID NO: 397 | 7098 |
| CII4932 | VL | PRT | WO2017062672; SEQ ID NO: 251 | 7099 |
| CII4933 | VL | PRT | WO2017062672; SEQ ID NO: 309 | 7100 |
| CII4934 | VL | PRT | WO2017062672; SEQ ID NO: 240 | 7101 |
| CII4935 | VL | PRT | WO2017062672; SEQ ID NO: 623 | 7102 |
| CII4936 | VL | PRT | WO2017062672; SEQ ID NO: 612 | 7103 |
| CII4937 | VL | PRT | WO2017062672; SEQ ID NO: 689 | 7104 |
| CII4938 | VL | PRT | WO2017062672; SEQ ID NO: 226 | 7105 |
| CII4939 | VL | PRT | WO2017062672; SEQ ID NO: 318 | 7106 |
| CII4940 | VL | PRT | WO2016023019; SEQ ID NO: 263 | 7107 |
| CII4941 | VL | PRT | WO2016023019; SEQ ID NO: 278 | 7108 |
| CII4942 | VL | PRT | WO2016023019; SEQ ID NO: 285 | 7109 |
| CII4943 | VL | PRT | WO2016023019; SEQ ID NO: 261 | 7110 |
| CII4944 | VL | PRT | WO2016023019; SEQ ID NO: 293 | 7111 |
| CII4945 | VL | PRT | WO2016023019; SEQ ID NO: 330 | 7112 |
| CII4946 | VL | PRT | WO2016023019; SEQ ID NO: 318 | 7113 |
| CII4947 | VL | PRT | WO2016023019; SEQ ID NO: 333 | 7114 |
| CII4948 | VL | PRT | WO2016023019; SEQ ID NO: 327 | 7115 |
| CII4949 | VL | PRT | WO2016023019; SEQ ID NO: 358 | 7116 |
| CII4950 | VL | PRT | WO2017062672; SEQ ID NO: 354 | 7117 |
| CII4951 | VL | PRT | WO2017062672; SEQ ID NO: 284 | 7118 |
| CII4952 | VL | PRT | WO2017062672; SEQ ID NO: 634 | 7119 |
| CII4953 | VL | PRT | WO2017062672; SEQ ID NO: 343 | 7120 |
| CII4954 | VL | PRT | WO2017062672; SEQ ID NO: 372 | 7121 |
| CII4955 | VL | PRT | WO2017062672; SEQ ID NO: 297 | 7122 |
| CII4956 | VL | PRT | WO2017062672; SEQ ID NO: 329 | 7123 |
| CII4957 | VL | PRT | WO2017062672; SEQ ID NO: 270 | 7124 |
| CII4958 | VL | PRT | WO2016023019; SEQ ID NO: 338 | 7125 |
| CII4959 | VL | PRT | WO2016023019; SEQ ID NO: 321 | 7126 |
| CII4960 | VL | PRT | WO2017062672; SEQ ID NO: 360 | 7127 |
| CII4961 | VL | PRT | WO2017062672; SEQ ID NO: 261 | 7128 |
| CII4962 | VL | PRT | WO2017062672; SEQ ID NO: 382 | 7129 |
| CII4963 | VL | PRT | WO2017062672; SEQ ID NO: 393 | 7130 |
| CII4964 | VL | PRT | WO2017062672; SEQ ID NO: 249 | 7131 |
| CII4965 | VL | PRT | WO2017062672; SEQ ID NO: 305 | 7132 |
| CII4966 | VL | PRT | WO2017062672; SEQ ID NO: 236 | 7133 |
| CII4967 | VL | PRT | WO2017062672; SEQ ID NO: 618 | 7134 |
| CII4968 | VL | PRT | WO2017062672; SEQ ID NO: 607 | 7135 |
| CII4969 | VL | PRT | WO2017062672; SEQ ID NO: 685 | 7136 |
| CII4970 | VL | PRT | WO2017062672; SEQ ID NO: 220 | 7137 |
| CII4971 | VL | PRT | WO2017062672; SEQ ID NO: 315 | 7138 |
| CII4972 | VL | PRT | WO2016023019; SEQ ID NO: 354 | 7139 |
| CII4973 | VL | PRT | WO2016023019; SEQ ID NO: 370 | 7140 |
| CII4974 | VL | PRT | WO2016023019; SEQ ID NO: 323 | 7141 |
| CII4975 | VL | PRT | WO2016023019; SEQ ID NO: 243 | 7142 |
| CII4976 | VL | PRT | WO2016023019; SEQ ID NO: 413 | 7143 |
| CII4977 | VL | PRT | WO2016023019; SEQ ID NO: 249 | 7144 |
| CII4978 | VL | PRT | WO2017062672; SEQ ID NO: 349 | 7145 |
| CII4979 | VL | PRT | WO2017062672; SEQ ID NO: 281 | 7146 |
| CII4980 | VL | PRT | WO2017062672; SEQ ID NO: 633 | 7147 |
| CII4981 | VL | PRT | WO2017062672; SEQ ID NO: 339 | 7148 |
| CII4982 | VL | PRT | WO2017062672; SEQ ID NO: 370 | 7149 |
| CII4983 | VL | PRT | WO2017062672; SEQ ID NO: 295 | 7150 |
| CII4984 | VL | PRT | WO2017062672; SEQ ID NO: 323 | 7151 |
| CII4985 | VL | PRT | WO2017062672; SEQ ID NO: 267 | 7152 |
| CII4986 | VL | PRT | WO2016023019; SEQ ID NO: 366 | 7153 |
| CII4987 | VL | PRT | WO2016023019; SEQ ID NO: 411 | 7154 |
| CII4988 | VL | PRT | WO2016023019; SEQ ID NO: 279 | 7155 |
| CII4989 | VL | PRT | WO2016023019; SEQ ID NO: 251 | 7156 |
| CII4990 | VL | PRT | WO2017062672; SEQ ID NO: 355 | 7157 |
| CII4991 | VL | PRT | WO2019028292; SEQ ID NO: 103 | 7158 |
| CII4992 | VL | PRT | WO2019028292; SEQ ID NO: 95 | 7159 |
| CII4993 | VL | PRT | WO2019028292; SEQ ID NO: 97 | 7160 |
| CII4994 | VL | PRT | WO2019028292; SEQ ID NO: 110 | 7161 |
| CII4995 | VL | PRT | WO2019028292; SEQ ID NO: 113 | 7162 |
| CII4996 | VL | PRT | WO2019028292; SEQ ID NO: 99 | 7163 |
| CII4997 | VL | PRT | WO2019028292; SEQ ID NO: 101 | 7164 |
| CII4998 | VL | PRT | WO2019028292; SEQ ID NO: 102 | 7165 |
| CII4999 | VL | PRT | WO2019028292; SEQ ID NO: 106 | 7166 |
| CII5000 | VL | PRT | WO2019028292; SEQ ID NO: 105 | 7167 |
| CII5001 | VL | PRT | WO2019028292; SEQ ID NO: 100 | 7168 |
| CII5002 | VL | PRT | WO2019028292; SEQ ID NO: 96 | 7169 |
| CII5003 | VL | PRT | WO2019028292; SEQ ID NO: 118 | 7170 |
| CII5004 | VL | PRT | WO2019028292; SEQ ID NO: 107 | 7171 |
| CII5005 | VL | PRT | WO2017062672; SEQ ID NO: 815 | 7172 |
| CII5006 | VL | PRT | WO2017062672; SEQ ID NO: 299 | 7173 |
| CII5007 | VL | PRT | WO2017062672; SEQ ID NO: 810 | 7174 |
| CII5008 | VL | PRT | WO2017062672; SEQ ID NO: 286 | 7175 |
| CII5009 | VL | PRT | WO2017062672; SEQ ID NO: 311 | 7176 |
| CII5010 | VL | PRT | WO2017062672; SEQ ID NO: 679 | 7177 |
| CII5011 | VL | PRT | WO2017062672; SEQ ID NO: 602 | 7178 |
| CII5012 | VL | PRT | WO2017062672; SEQ ID NO: 398 | 7179 |
| CII5013 | VL | PRT | WO2017062672; SEQ ID NO: 230 | 7180 |
| CII5014 | VL | PRT | WO2017062672; SEQ ID NO: 387 | 7181 |
| CII5015 | VL | PRT | WO2017062672; SEQ ID NO: 285 | 7182 |
| CII5016 | VL | PRT | WO2017062672; SEQ ID NO: 263 | 7183 |
| CII5017 | VL | PRT | WO2017062672; SEQ ID NO: 809 | 7184 |
| CII5018 | VL | PRT | WO2014028776; SEQ ID NO: 74 | 7185 |
| CII5019 | VL | PRT | US20180221480; SEQ ID NO: 12 | 7186 |
| CII5020 | VL | PRT | US20180221480; SEQ ID NO: 7 | 7187 |
| CII5021 | VL | PRT | US20180221480; SEQ ID NO: 13 | 7188 |
| CII5022 | VL | PRT | WO2018140510; SEQ ID NO: 2 | 7189 |
| CII5023 | VL | PRT | US20180051086; SEQ ID NO: 5 | 7190 |
| CII5024 | VL | PRT | US20180051086; SEQ ID NO: 4 | 7191 |
| CII5025 | VR | DNA | US20180201692; SEQ ID NO: 10 | 7192 |
| CII5026 | VR | DNA | US20180201692; SEQ ID NO: 13 | 7193 |
| CII5027 | VR | DNA | US20180201692; SEQ ID NO: 15 | 7194 |
| CII5028 | VR | DNA | US20180201692; SEQ ID NO: 7 | 7195 |
| CII5029 | VR | DNA | US20180201692; SEQ ID NO: 5 | 7196 |
| CII5030 | VR | DNA | US20180201692; SEQ ID NO: 8 | 7197 |
| CII5031 | VR | DNA | US20180201692; SEQ ID NO: 12 | 7198 |
| CII5032 | VR | DNA | US20180201692; SEQ ID NO: 6 | 7199 |
| CII5033 | VR | DNA | US20180201692; SEQ ID NO: 4 | 7200 |
| CII5034 | VR | DNA | US20180201692; SEQ ID NO: 3 | 7201 |
| CII5035 | VR | DNA | US20180201692; SEQ ID NO: 14 | 7202 |
| CII5036 | VR | DNA | US20180201692; SEQ ID NO: 11 | 7203 |
| CII5037 | VR | DNA | US20180201692; SEQ ID NO: 16 | 7204 |
| CII5038 | VR | DNA | US20180201692; SEQ ID NO: 9 | 7205 |
| CII5039 | VR | PRT | US20190085084; SEQ ID NO: 441 | 7206 |
| CII5040 | VR | PRT | US20190085084; SEQ ID NO: 441 | 7207 |
| CII5041 | VR | PRT | WO2016164637; SEQ ID NO: 441 | 7208 |
| CII5042 | VR | PRT | US20190085084; SEQ ID NO: 438 | 7209 |
| CII5043 | VR | PRT | US20190085084; SEQ ID NO: 438 | 7210 |
| CII5044 | VR | PRT | WO2016164637; SEQ ID NO: 438 | 7211 |
| CII5045 | VR | PRT | US20190085084; SEQ ID NO: 460 | 7212 |
| CII5046 | VR | PRT | US20190085084; SEQ ID NO: 460 | 7213 |
| CII5047 | VR | PRT | WO2016164637; SEQ ID NO: 460 | 7214 |
| CII5048 | VR | PRT | US20190085084; SEQ ID NO: 354 | 7215 |
| CII5049 | VR | PRT | WO2016164637; SEQ ID NO: 354 | 7216 |
| CII5050 | VR | PRT | WO2016164637; SEQ ID NO: 319 | 7217 |
| CII5051 | VR | PRT | US20190085084; SEQ ID NO: 341 | 7218 |
| CII5052 | VR | PRT | WO2016164637; SEQ ID NO: 341 | 7219 |
| CII5053 | VR | PRT | US20190085084; SEQ ID NO: 350 | 7220 |
| CII5054 | VR | PRT | WO2016164637; SEQ ID NO: 350 | 7221 |
| CII5055 | VR | PRT | US20190085084; SEQ ID NO: 364 | 7222 |
| CII5056 | VR | PRT | US20190085084; SEQ ID NO: 364 | 7223 |
| CII5057 | VR | PRT | WO2016164637; SEQ ID NO: 364 | 7224 |
| CII5058 | VR | PRT | US20190085084; SEQ ID NO: 421 | 7225 |
| CII5059 | VR | PRT | US20190085084; SEQ ID NO: 421 | 7226 |
| CII5060 | VR | PRT | WO2016164637; SEQ ID NO: 421 | 7227 |
| CII5061 | VR | PRT | US20190085084; SEQ ID NO: 453 | 7228 |
| CII5062 | VR | PRT | US20190085084; SEQ ID NO: 453 | 7229 |
| CII5063 | VR | PRT | WO2016164637; SEQ ID NO: 453 | 7230 |
| CII5064 | VR | PRT | US20190085084; SEQ ID NO: 344 | 7231 |
| CII5065 | VR | PRT | US20190085084; SEQ ID NO: 344 | 7232 |
| CII5066 | VR | PRT | WO2016164637; SEQ ID NO: 344 | 7233 |
| CII5067 | VR | PRT | WO2016164637; SEQ ID NO: 356 | 7234 |
| CII5068 | VR | PRT | US20190085084; SEQ ID NO: 321 | 7235 |
| CII5069 | VR | PRT | US20190085084; SEQ ID NO: 321 | 7236 |
| CII5070 | VR | PRT | WO2016164637; SEQ ID NO: 321 | 7237 |
| CII5071 | VR | PRT | US20190085084; SEQ ID NO: 464 | 7238 |
| CII5072 | VR | PRT | US20190085084; SEQ ID NO: 464 | 7239 |
| CII5073 | VR | PRT | WO2016164637; SEQ ID NO: 464 | 7240 |
| CII5074 | VR | PRT | US20190085084; SEQ ID NO: 389 | 7241 |
| CII5075 | VR | PRT | US20190085084; SEQ ID NO: 389 | 7242 |
| CII5076 | VR | PRT | WO2016164637; SEQ ID NO: 389 | 7243 |
| CII5077 | VR | PRT | US20190085084; SEQ ID NO: 375 | 7244 |
| CII5078 | VR | PRT | US20190085084; SEQ ID NO: 375 | 7245 |
| CII5079 | VR | PRT | WO2016164637; SEQ ID NO: 375 | 7246 |
| CII5080 | VR | PRT | US20190085084; SEQ ID NO: 476 | 7247 |
| CII5081 | VR | PRT | US20190085084; SEQ ID NO: 476 | 7248 |
| CII5082 | VR | PRT | WO2016164637; SEQ ID NO: 476 | 7249 |
| CII5083 | VR | PRT | US20190085084; SEQ ID NO: 443 | 7250 |
| CII5084 | VR | PRT | US20190085084; SEQ ID NO: 443 | 7251 |
| CII5085 | VR | PRT | WO2016164637; SEQ ID NO: 443 | 7252 |
| CII5086 | VR | PRT | US20190085084; SEQ ID NO: 411 | 7253 |
| CII5087 | VR | PRT | US20190085084; SEQ ID NO: 411 | 7254 |
| CII5088 | VR | PRT | WO2016164637; SEQ ID NO: 411 | 7255 |
| CII5089 | VR | PRT | US20190085084; SEQ ID NO: 371 | 7256 |
| CII5090 | VR | PRT | WO2016164637; SEQ ID NO: 371 | 7257 |
| CII5091 | VR | PRT | US20190085084; SEQ ID NO: 439 | 7258 |
| CII5092 | VR | PRT | US20190085084; SEQ ID NO: 439 | 7259 |
| CII5093 | VR | PRT | WO2016164637; SEQ ID NO: 439 | 7260 |
| CII5094 | VR | PRT | WO2016164637; SEQ ID NO: 430 | 7261 |
| CII5095 | VR | PRT | US20190085084; SEQ ID NO: 370 | 7262 |
| CII5096 | VR | PRT | WO2016164637; SEQ ID NO: 370 | 7263 |
| CII5097 | VR | PRT | US20190085084; SEQ ID NO: 368 | 7264 |
| CII5098 | VR | PRT | US20190085084; SEQ ID NO: 368 | 7265 |
| CII5099 | VR | PRT | WO2016164637; SEQ ID NO: 368 | 7266 |
| CII5100 | VR | PRT | US20190085084; SEQ ID NO: 324 | 7267 |
| CII5101 | VR | PRT | WO2016164637; SEQ ID NO: 324 | 7268 |
| CII5102 | VR | PRT | US20190085084; SEQ ID NO: 470 | 7269 |
| CII5103 | VR | PRT | US20190085084; SEQ ID NO: 470 | 7270 |
| CII5104 | VR | PRT | WO2016164637; SEQ ID NO: 470 | 7271 |
| CII5105 | VR | PRT | US20190085084; SEQ ID NO: 681 | 7272 |
| CII5106 | VR | PRT | WO2016164637; SEQ ID NO: 681 | 7273 |
| CII5107 | VR | PRT | US20190085084; SEQ ID NO: 683 | 7274 |
| CII5108 | VR | PRT | WO2016164637; SEQ ID NO: 683 | 7275 |
| CII5109 | VR | PRT | US20190085084; SEQ ID NO: 682 | 7276 |
| CII5110 | VR | PRT | WO2016164637; SEQ ID NO: 682 | 7277 |
| CII5111 | VR | PRT | US20190085084; SEQ ID NO: 684 | 7278 |
| CII5112 | VR | PRT | WO2016164637; SEQ ID NO: 684 | 7279 |
| CII5113 | VR | PRT | US20190085084; SEQ ID NO: 413 | 7280 |
| CII5114 | VR | PRT | WO2016164637; SEQ ID NO: 413 | 7281 |
| CII5115 | VR | PRT | US20190085084; SEQ ID NO: 455 | 7282 |
| CII5116 | VR | PRT | US20190085084; SEQ ID NO: 455 | 7283 |
| CII5117 | VR | PRT | WO2016164637; SEQ ID NO: 455 | 7284 |
| CII5118 | VR | PRT | US20190085084; SEQ ID NO: 348 | 7285 |
| CII5119 | VR | PRT | WO2016164637; SEQ ID NO: 348 | 7286 |
| CII5120 | VR | PRT | US20190085084; SEQ ID NO: 427 | 7287 |
| CII5121 | VR | PRT | US20190085084; SEQ ID NO: 427 | 7288 |
| CII5122 | VR | PRT | WO2016164637; SEQ ID NO: 427 | 7289 |
| CII5123 | VR | PRT | US20190085084; SEQ ID NO: 474 | 7290 |
| CII5124 | VR | PRT | US20190085084; SEQ ID NO: 474 | 7291 |
| CII5125 | VR | PRT | WO2016164637; SEQ ID NO: 474 | 7292 |
| CII5126 | VR | PRT | US20190085084; SEQ ID NO: 337 | 7293 |
| CII5127 | VR | PRT | US20190085084; SEQ ID NO: 337 | 7294 |
| CII5128 | VR | PRT | WO2016164637; SEQ ID NO: 337 | 7295 |
| CII5129 | VR | PRT | US20190085084; SEQ ID NO: 328 | 7296 |
| CII5130 | VR | PRT | US20190085084; SEQ ID NO: 328 | 7297 |
| CII5131 | VR | PRT | WO2016164637; SEQ ID NO: 328 | 7298 |
| CII5132 | VR | PRT | US20190085084; SEQ ID NO: 409 | 7299 |
| CII5133 | VR | PRT | US20190085084; SEQ ID NO: 409 | 7300 |
| CII5134 | VR | PRT | WO2016164637; SEQ ID NO: 409 | 7301 |
| CII5135 | VR | PRT | US20190085084; SEQ ID NO: 399 | 7302 |
| CII5136 | VR | PRT | US20190085084; SEQ ID NO: 399 | 7303 |
| CII5137 | VR | PRT | WO2016164637; SEQ ID NO: 399 | 7304 |
| CII5138 | VR | PRT | US20190085084; SEQ ID NO: 317 | 7305 |
| CII5139 | VR | PRT | WO2016164637; SEQ ID NO: 317 | 7306 |
| CII5140 | VR | PRT | US20190085084; SEQ ID NO: 478 | 7307 |
| CII5141 | VR | PRT | US20190085084; SEQ ID NO: 478 | 7308 |
| CII5142 | VR | PRT | WO2016164637; SEQ ID NO: 478 | 7309 |
| CII5143 | VR | PRT | US20190085084; SEQ ID NO: 330 | 7310 |
| CII5144 | VR | PRT | US20190085084; SEQ ID NO: 330 | 7311 |
| CII5145 | VR | PRT | WO2016164637; SEQ ID NO: 330 | 7312 |
| CII5146 | VR | PRT | US20190085084; SEQ ID NO: 436 | 7313 |
| CII5147 | VR | PRT | US20190085084; SEQ ID NO: 436 | 7314 |
| CII5148 | VR | PRT | WO2016164637; SEQ ID NO: 436 | 7315 |
| CII5149 | VR | PRT | US20190085084; SEQ ID NO: 379 | 7316 |
| CII5150 | VR | PRT | US20190085084; SEQ ID NO: 379 | 7317 |
| CII5151 | VR | PRT | WO2016164637; SEQ ID NO: 379 | 7318 |
| CII5152 | VR | PRT | US20190085084; SEQ ID NO: 425 | 7319 |
| CII5153 | VR | PRT | WO2016164637; SEQ ID NO: 425 | 7320 |
| CII5154 | VR | PRT | US20190085084; SEQ ID NO: 451 | 7321 |
| CII5155 | VR | PRT | US20190085084; SEQ ID NO: 451 | 7322 |
| CII5156 | VR | PRT | WO2016164637; SEQ ID NO: 451 | 7323 |
| CII5157 | VR | PRT | US20190085084; SEQ ID NO: 395 | 7324 |
| CII5158 | VR | PRT | US20190085084; SEQ ID NO: 395 | 7325 |
| CII5159 | VR | PRT | WO2016164637; SEQ ID NO: 395 | 7326 |
| CII5160 | VR | PRT | US20190085084; SEQ ID NO: 429 | 7327 |
| CII5161 | VR | PRT | US20190085084; SEQ ID NO: 429 | 7328 |
| CII5162 | VR | PRT | WO2016164637; SEQ ID NO: 429 | 7329 |
| CII5163 | VR | PRT | US20190085084; SEQ ID NO: 397 | 7330 |
| CII5164 | VR | PRT | US20190085084; SEQ ID NO: 397 | 7331 |
| CII5165 | VR | PRT | WO2016164637; SEQ ID NO: 397 | 7332 |
| CII5166 | VR | PRT | US20190085084; SEQ ID NO: 401 | 7333 |
| CII5167 | VR | PRT | US20190085084; SEQ ID NO: 401 | 7334 |
| CII5168 | VR | PRT | WO2016164637; SEQ ID NO: 401 | 7335 |
| CII5169 | VR | PRT | WO2016164637; SEQ ID NO: 472 | 7336 |
| CII5170 | VR | PRT | US20190085084; SEQ ID NO: 360 | 7337 |
| CII5171 | VR | PRT | US20190085084; SEQ ID NO: 360 | 7338 |
| CII5172 | VR | PRT | WO2016164637; SEQ ID NO: 360 | 7339 |
| CII5173 | VR | PRT | US20190085084; SEQ ID NO: 362 | 7340 |
| CII5174 | VR | PRT | US20190085084; SEQ ID NO: 362 | 7341 |
| CII5175 | VR | PRT | WO2016164637; SEQ ID NO: 362 | 7342 |
| CII5176 | VR | PRT | US20190085084; SEQ ID NO: 391 | 7343 |
| CII5177 | VR | PRT | US20190085084; SEQ ID NO: 391 | 7344 |
| CII5178 | VR | PRT | WO2016164637; SEQ ID NO: 391 | 7345 |
| CII5179 | VR | PRT | US20190085084; SEQ ID NO: 457 | 7346 |
| CII5180 | VR | PRT | US20190085084; SEQ ID NO: 457 | 7347 |
| CII5181 | VR | PRT | WO2016164637; SEQ ID NO: 457 | 7348 |
| CII5182 | VR | PRT | US20190085084; SEQ ID NO: 667 | 7349 |
| CII5183 | VR | PRT | WO2016164637; SEQ ID NO: 667 | 7350 |
| CII5184 | VR | PRT | US20190085084; SEQ ID NO: 432 | 7351 |
| CII5185 | VR | PRT | US20190085084; SEQ ID NO: 432 | 7352 |
| CII5186 | VR | PRT | WO2016164637; SEQ ID NO: 432 | 7353 |
| CII5187 | VR | PRT | WO2016164637; SEQ ID NO: 343 | 7354 |
| CII5188 | VR | PRT | US20190085084; SEQ ID NO: 323 | 7355 |
| CII5189 | VR | PRT | US20190085084; SEQ ID NO: 323 | 7356 |
| CII5190 | VR | PRT | WO2016164637; SEQ ID NO: 323 | 7357 |
| CII5191 | VR | PRT | US20190085084; SEQ ID NO: 326 | 7358 |
| CII5192 | VR | PRT | US20190085084; SEQ ID NO: 326 | 7359 |
| CII5193 | VR | PRT | WO2016164637; SEQ ID NO: 326 | 7360 |
| CII5194 | VR | PRT | US20190085084; SEQ ID NO: 334 | 7361 |
| CII5195 | VR | PRT | US20190085084; SEQ ID NO: 334 | 7362 |
| CII5196 | VR | PRT | WO2016164637; SEQ ID NO: 334 | 7363 |
| CII5197 | VR | PRT | US20190085084; SEQ ID NO: 332 | 7364 |
| CII5198 | VR | PRT | US20190085084; SEQ ID NO: 332 | 7365 |
| CII5199 | VR | PRT | WO2016164637; SEQ ID NO: 332 | 7366 |
| CII5200 | VR | PRT | US20190085084; SEQ ID NO: 458 | 7367 |
| CII5201 | VR | PRT | US20190085084; SEQ ID NO: 458 | 7368 |
| CII5202 | VR | PRT | WO2016164637; SEQ ID NO: 458 | 7369 |
| CII5203 | VR | PRT | US20190085084; SEQ ID NO: 407 | 7370 |
| CII5204 | VR | PRT | US20190085084; SEQ ID NO: 407 | 7371 |
| CII5205 | VR | PRT | WO2016164637; SEQ ID NO: 407 | 7372 |
| CII5206 | VR | PRT | US20190085084; SEQ ID NO: 447 | 7373 |
| CII5207 | VR | PRT | US20190085084; SEQ ID NO: 447 | 7374 |
| CII5208 | VR | PRT | WO2016164637; SEQ ID NO: 447 | 7375 |
| CII5209 | VR | PRT | US20190085084; SEQ ID NO: 352 | 7376 |
| CII5210 | VR | PRT | WO2016164637; SEQ ID NO: 352 | 7377 |
| CII5211 | VR | PRT | US20190085084; SEQ ID NO: 396 | 7378 |
| CII5212 | VR | PRT | US20190085084; SEQ ID NO: 396 | 7379 |
| CII5213 | VR | PRT | WO2016164637; SEQ ID NO: 396 | 7380 |
| CII5214 | VR | PRT | US20190085084; SEQ ID NO: 390 | 7381 |
| CII5215 | VR | PRT | US20190085084; SEQ ID NO: 390 | 7382 |
| CII5216 | VR | PRT | WO2016164637; SEQ ID NO: 390 | 7383 |
| CII5217 | VR | PRT | US20190085084; SEQ ID NO: 376 | 7384 |
| CII5218 | VR | PRT | US20190085084; SEQ ID NO: 376 | 7385 |
| CII5219 | VR | PRT | WO2016164637; SEQ ID NO: 376 | 7386 |
| CII5220 | VR | PRT | US20190085084; SEQ ID NO: 398 | 7387 |
| CII5221 | VR | PRT | US20190085084; SEQ ID NO: 398 | 7388 |
| CII5222 | VR | PRT | WO2016164637; SEQ ID NO: 398 | 7389 |
| CII5223 | VR | PRT | US20190085084; SEQ ID NO: 392 | 7390 |
| CII5224 | VR | PRT | US20190085084; SEQ ID NO: 392 | 7391 |
| CII5225 | VR | PRT | WO2016164637; SEQ ID NO: 392 | 7392 |
| CII5226 | VR | PRT | US20190085084; SEQ ID NO: 372 | 7393 |
| CII5227 | VR | PRT | WO2016164637; SEQ ID NO: 372 | 7394 |
| CII5228 | VR | PRT | US20190085084; SEQ ID NO: 402 | 7395 |
| CII5229 | VR | PRT | WO2016164637; SEQ ID NO: 402 | 7396 |
| CII5230 | VR | PRT | US20190085084; SEQ ID NO: 380 | 7397 |
| CII5231 | VR | PRT | US20190085084; SEQ ID NO: 380 | 7398 |
| CII5232 | VR | PRT | WO2016164637; SEQ ID NO: 380 | 7399 |
| CII5233 | VR | PRT | US20190085084; SEQ ID NO: 400 | 7400 |
| CII5234 | VR | PRT | US20190085084; SEQ ID NO: 400 | 7401 |
| CII5235 | VR | PRT | WO2016164637; SEQ ID NO: 400 | 7402 |
| CII5236 | VR | PRT | US20190085084; SEQ ID NO: 369 | 7403 |
| CII5237 | VR | PRT | WO2016164637; SEQ ID NO: 369 | 7404 |
| CII5238 | VR | PRT | US20190085084; SEQ ID NO: 365 | 7405 |
| CII5239 | VR | PRT | US20190085084; SEQ ID NO: 365 | 7406 |
| CII5240 | VR | PRT | WO2016164637; SEQ ID NO: 365 | 7407 |
| CII5241 | VR | PRT | US20190085084; SEQ ID NO: 363 | 7408 |
| CII5242 | VR | PRT | US20190085084; SEQ ID NO: 363 | 7409 |
| CII5243 | VR | PRT | WO2016164637; SEQ ID NO: 363 | 7410 |
| CII5244 | VR | PRT | US20190085084; SEQ ID NO: 361 | 7411 |
| CII5245 | VR | PRT | US20190085084; SEQ ID NO: 361 | 7412 |
| CII5246 | VR | PRT | WO2016164637; SEQ ID NO: 361 | 7413 |
| CII5247 | VR | PRT | US20190085084; SEQ ID NO: 479 | 7414 |
| CII5248 | VR | PRT | US20190085084; SEQ ID NO: 479 | 7415 |
| CII5249 | VR | PRT | WO2016164637; SEQ ID NO: 479 | 7416 |
| CII5250 | VR | PRT | US20190085084; SEQ ID NO: 630 | 7417 |
| CII5251 | VR | PRT | WO2016164637; SEQ ID NO: 630 | 7418 |
| CII5252 | VR | PRT | US20190085084; SEQ ID NO: 689 | 7419 |
| CII5253 | VR | PRT | WO2016164637; SEQ ID NO: 689 | 7420 |
| CII5254 | VR | PRT | US20190085084; SEQ ID NO: 692 | 7421 |
| CII5255 | VR | PRT | WO2016164637; SEQ ID NO: 692 | 7422 |
| CII5256 | VR | PRT | US20190085084; SEQ ID NO: 686 | 7423 |
| CII5257 | VR | PRT | WO2016164637; SEQ ID NO: 686 | 7424 |
| CII5258 | VR | PRT | US20190085084; SEQ ID NO: 687 | 7425 |
| CII5259 | VR | PRT | WO2016164637; SEQ ID NO: 687 | 7426 |
| CII5260 | VR | PRT | US20190085084; SEQ ID NO: 473 | 7427 |
| CII5261 | VR | PRT | WO2016164637; SEQ ID NO: 473 | 7428 |
| CII5262 | VR | PRT | US20190085084; SEQ ID NO: 465 | 7429 |
| CII5263 | VR | PRT | US20190085084; SEQ ID NO: 465 | 7430 |
| CII5264 | VR | PRT | WO2016164637; SEQ ID NO: 465 | 7431 |
| CII5265 | VR | PRT | US20190085084; SEQ ID NO: 691 | 7432 |
| CII5266 | VR | PRT | WO2016164637; SEQ ID NO: 691 | 7433 |
| CII5267 | VR | PRT | US20190085084; SEQ ID NO: 477 | 7434 |
| CII5268 | VR | PRT | US20190085084; SEQ ID NO: 477 | 7435 |
| CII5269 | VR | PRT | WO2016164637; SEQ ID NO: 477 | 7436 |
| CII5270 | VR | PRT | US20190085084; SEQ ID NO: 471 | 7437 |
| CII5271 | VR | PRT | US20190085084; SEQ ID NO: 471 | 7438 |
| CII5272 | VR | PRT | WO2016164637; SEQ ID NO: 471 | 7439 |
| CII5273 | VR | PRT | US20190085084; SEQ ID NO: 475 | 7440 |
| CII5274 | VR | PRT | WO2016164637; SEQ ID NO: 475 | 7441 |
| CII5275 | VR | PRT | US20190085084; SEQ ID NO: 685 | 7442 |
| CII5276 | VR | PRT | WO2016164637; SEQ ID NO: 685 | 7443 |
| CII5277 | VR | PRT | US20190085084; SEQ ID NO: 688 | 7444 |
| CII5278 | VR | PRT | WO2016164637; SEQ ID NO: 688 | 7445 |
| CII5279 | VR | PRT | US20190085084; SEQ ID NO: 690 | 7446 |
| CII5280 | VR | PRT | WO2016164637; SEQ ID NO: 690 | 7447 |
| CII5281 | VR | PRT | US20190085084; SEQ ID NO: 428 | 7448 |
| CII5282 | VR | PRT | US20190085084; SEQ ID NO: 428 | 7449 |
| CII5283 | VR | PRT | WO2016164637; SEQ ID NO: 428 | 7450 |
| CII5284 | VR | PRT | US20190085084; SEQ ID NO: 437 | 7451 |
| CII5285 | VR | PRT | WO2016164637; SEQ ID NO: 437 | 7452 |
| CII5286 | VR | PRT | US20190085084; SEQ ID NO: 440 | 7453 |
| CII5287 | VR | PRT | WO2016164637; SEQ ID NO: 440 | 7454 |
| CII5288 | VR | PRT | US20190085084; SEQ ID NO: 426 | 7455 |
| CII5289 | VR | PRT | WO2016164637; SEQ ID NO: 426 | 7456 |
| CII5290 | VR | PRT | US20190085084; SEQ ID NO: 422 | 7457 |
| CII5291 | VR | PRT | US20190085084; SEQ ID NO: 422 | 7458 |
| CII5292 | VR | PRT | WO2016164637; SEQ ID NO: 422 | 7459 |
| CII5293 | VR | PRT | US20190085084; SEQ ID NO: 433 | 7460 |
| CII5294 | VR | PRT | US20190085084; SEQ ID NO: 433 | 7461 |
| CII5295 | VR | PRT | WO2016164637; SEQ ID NO: 433 | 7462 |
| CII5296 | VR | PRT | WO2016164637; SEQ ID NO: 431 | 7463 |
| CII5297 | VR | PRT | US20190085084; SEQ ID NO: 680 | 7464 |
| CII5298 | VR | PRT | WO2016164637; SEQ ID NO: 680 | 7465 |
| CII5299 | VR | PRT | US20190085084; SEQ ID NO: 679 | 7466 |
| CII5300 | VR | PRT | WO2016164637; SEQ ID NO: 679 | 7467 |
| CII5301 | VR | PRT | US20190085084; SEQ ID NO: 459 | 7468 |
| CII5302 | VR | PRT | US20190085084; SEQ ID NO: 459 | 7469 |
| CII5303 | VR | PRT | WO2016164637; SEQ ID NO: 459 | 7470 |
| CII5304 | VR | PRT | US20190085084; SEQ ID NO: 461 | 7471 |
| CII5305 | VR | PRT | US20190085084; SEQ ID NO: 461 | 7472 |
| CII5306 | VR | PRT | WO2016164637; SEQ ID NO: 461 | 7473 |
| CII5307 | VR | PRT | US20190085084; SEQ ID NO: 444 | 7474 |
| CII5308 | VR | PRT | US20190085084; SEQ ID NO: 444 | 7475 |
| CII5309 | VR | PRT | WO2016164637; SEQ ID NO: 444 | 7476 |
| CII5310 | VR | PRT | US20190085084; SEQ ID NO: 442 | 7477 |
| CII5311 | VR | PRT | US20190085084; SEQ ID NO: 442 | 7478 |
| CII5312 | VR | PRT | WO2016164637; SEQ ID NO: 442 | 7479 |
| CII5313 | VR | PRT | US20190085084; SEQ ID NO: 452 | 7480 |
| CII5314 | VR | PRT | US20190085084; SEQ ID NO: 452 | 7481 |
| CII5315 | VR | PRT | WO2016164637; SEQ ID NO: 452 | 7482 |
| CII5316 | VR | PRT | US20190085084; SEQ ID NO: 448 | 7483 |
| CII5317 | VR | PRT | US20190085084; SEQ ID NO: 448 | 7484 |
| CII5318 | VR | PRT | WO2016164637; SEQ ID NO: 448 | 7485 |
| CII5319 | VR | PRT | US20190085084; SEQ ID NO: 454 | 7486 |
| CII5320 | VR | PRT | WO2016164637; SEQ ID NO: 454 | 7487 |
| CII5321 | VR | PRT | US20190085084; SEQ ID NO: 456 | 7488 |
| CII5322 | VR | PRT | US20190085084; SEQ ID NO: 456 | 7489 |
| CII5323 | VR | PRT | WO2016164637; SEQ ID NO: 456 | 7490 |
| CII5324 | VR | PRT | US20190085084; SEQ ID NO: 414 | 7491 |
| CII5325 | VR | PRT | WO2016164637; SEQ ID NO: 414 | 7492 |
| CII5326 | VR | PRT | US20190085084; SEQ ID NO: 412 | 7493 |
| CII5327 | VR | PRT | US20190085084; SEQ ID NO: 412 | 7494 |
| CII5328 | VR | PRT | WO2016164637; SEQ ID NO: 412 | 7495 |
| CII5329 | VR | PRT | US20190085084; SEQ ID NO: 410 | 7496 |
| CII5330 | VR | PRT | WO2016164637; SEQ ID NO: 410 | 7497 |
| CII5331 | VR | PRT | US20190085084; SEQ ID NO: 408 | 7498 |
| CII5332 | VR | PRT | US20190085084; SEQ ID NO: 408 | 7499 |
| CII5333 | VR | PRT | WO2016164637; SEQ ID NO: 408 | 7500 |
| CII5334 | VR | PRT | US20190085084; SEQ ID NO: 651 | 7501 |
| CII5335 | VR | PRT | WO2016164637; SEQ ID NO: 651 | 7502 |
| CII5336 | VR | PRT | US20190085084; SEQ ID NO: 673 | 7503 |
| CII5337 | VR | PRT | WO2016164637; SEQ ID NO: 673 | 7504 |
| CII5338 | VR | PRT | US20190085084; SEQ ID NO: 625 | 7505 |
| CII5339 | VR | PRT | WO2016164637; SEQ ID NO: 625 | 7506 |
| CII5340 | VR | PRT | US20190085084; SEQ ID NO: 613 | 7507 |
| CII5341 | VR | PRT | WO2016164637; SEQ ID NO: 613 | 7508 |
| CII5342 | VR | PRT | US20190085084; SEQ ID NO: 611 | 7509 |
| CII5343 | VR | PRT | WO2016164637; SEQ ID NO: 611 | 7510 |
| CII5344 | VR | PRT | US20190085084; SEQ ID NO: 604 | 7511 |
| CII5345 | VR | PRT | WO2016164637; SEQ ID NO: 604 | 7512 |
| CII5346 | VR | PRT | US20190085084; SEQ ID NO: 609 | 7513 |
| CII5347 | VR | PRT | WO2016164637; SEQ ID NO: 609 | 7514 |
| CII5348 | VR | PRT | WO2016164637; SEQ ID NO: 606 | 7515 |
| CII5349 | VR | PRT | US20190085084; SEQ ID NO: 617 | 7516 |
| CII5350 | VR | PRT | WO2016164637; SEQ ID NO: 617 | 7517 |
| CII5351 | VR | PRT | US20190085084; SEQ ID NO: 610 | 7518 |
| CII5352 | VR | PRT | WO2016164637; SEQ ID NO: 610 | 7519 |
| CII5353 | VR | PRT | US20190085084; SEQ ID NO: 614 | 7520 |
| CII5354 | VR | PRT | WO2016164637; SEQ ID NO: 614 | 7521 |
| CII5355 | VR | PRT | US20190085084; SEQ ID NO: 608 | 7522 |
| CII5356 | VR | PRT | WO2016164637; SEQ ID NO: 608 | 7523 |
| CII5357 | VR | PRT | US20190085084; SEQ ID NO: 618 | 7524 |
| CII5358 | VR | PRT | WO2016164637; SEQ ID NO: 618 | 7525 |
| CII5359 | VR | PRT | US20190085084; SEQ ID NO: 612 | 7526 |
| CII5360 | VR | PRT | WO2016164637; SEQ ID NO: 612 | 7527 |
| CII5361 | VR | PRT | US20190085084; SEQ ID NO: 615 | 7528 |
| CII5362 | VR | PRT | WO2016164637; SEQ ID NO: 615 | 7529 |
| CII5363 | VR | PRT | US20190085084; SEQ ID NO: 675 | 7530 |
| CII5364 | VR | PRT | WO2016164637; SEQ ID NO: 675 | 7531 |
| CII5365 | VR | PRT | US20190085084; SEQ ID NO: 327 | 7532 |
| CII5366 | VR | PRT | WO2016164637; SEQ ID NO: 327 | 7533 |
| CII5367 | VR | PRT | US20190085084; SEQ ID NO: 325 | 7534 |
| CII5368 | VR | PRT | WO2016164637; SEQ ID NO: 325 | 7535 |
| CII5369 | VR | PRT | US20190085084; SEQ ID NO: 322 | 7536 |
| CII5370 | VR | PRT | US20190085084; SEQ ID NO: 322 | 7537 |
| CII5371 | VR | PRT | WO2016164637; SEQ ID NO: 322 | 7538 |
| CII5372 | VR | PRT | US20190085084; SEQ ID NO: 320 | 7539 |
| CII5373 | VR | PRT | WO2016164637; SEQ ID NO: 320 | 7540 |
| CII5374 | VR | PRT | US20190085084; SEQ ID NO: 318 | 7541 |
| CII5375 | VR | PRT | US20190085084; SEQ ID NO: 318 | 7542 |
| CII5376 | VR | PRT | WO2016164637; SEQ ID NO: 318 | 7543 |
| CII5377 | VR | PRT | US20190085084; SEQ ID NO: 616 | 7544 |
| CII5378 | VR | PRT | WO2016164637; SEQ ID NO: 616 | 7545 |
| CII5379 | VR | PRT | US20190085084; SEQ ID NO: 644 | 7546 |
| CII5380 | VR | PRT | WO2016164637; SEQ ID NO: 644 | 7547 |
| CII5381 | VR | PRT | US20190085084; SEQ ID NO: 655 | 7548 |
| CII5382 | VR | PRT | WO2016164637; SEQ ID NO: 655 | 7549 |
| CII5383 | VR | PRT | US20190085084; SEQ ID NO: 646 | 7550 |
| CII5384 | VR | PRT | WO2016164637; SEQ ID NO: 646 | 7551 |
| CII5385 | VR | PRT | US20190085084; SEQ ID NO: 662 | 7552 |
| CII5386 | VR | PRT | WO2016164637; SEQ ID NO: 662 | 7553 |
| CII5387 | VR | PRT | US20190085084; SEQ ID NO: 652 | 7554 |
| CII5388 | VR | PRT | WO2016164637; SEQ ID NO: 652 | 7555 |
| CII5389 | VR | PRT | US20190085084; SEQ ID NO: 656 | 7556 |
| CII5390 | VR | PRT | WO2016164637; SEQ ID NO: 656 | 7557 |
| CII5391 | VR | PRT | US20190085084; SEQ ID NO: 641 | 7558 |
| CII5392 | VR | PRT | WO2016164637; SEQ ID NO: 641 | 7559 |
| CII5393 | VR | PRT | US20190085084; SEQ ID NO: 657 | 7560 |
| CII5394 | VR | PRT | WO2016164637; SEQ ID NO: 657 | 7561 |
| CII5395 | VR | PRT | US20190085084; SEQ ID NO: 649 | 7562 |
| CII5396 | VR | PRT | WO2016164637; SEQ ID NO: 649 | 7563 |
| CII5397 | VR | PRT | WO2016164637; SEQ ID NO: 648 | 7564 |
| CII5398 | VR | PRT | US20190085084; SEQ ID NO: 650 | 7565 |
| CII5399 | VR | PRT | WO2016164637; SEQ ID NO: 650 | 7566 |
| CII5400 | VR | PRT | US20190085084; SEQ ID NO: 659 | 7567 |
| CII5401 | VR | PRT | WO2016164637; SEQ ID NO: 659 | 7568 |
| CII5402 | VR | PRT | US20190085084; SEQ ID NO: 647 | 7569 |
| CII5403 | VR | PRT | WO2016164637; SEQ ID NO: 647 | 7570 |
| CII5404 | VR | PRT | US20190085084; SEQ ID NO: 661 | 7571 |
| CII5405 | VR | PRT | WO2016164637; SEQ ID NO: 661 | 7572 |
| CII5406 | VR | PRT | US20190085084; SEQ ID NO: 643 | 7573 |
| CII5407 | VR | PRT | WO2016164637; SEQ ID NO: 643 | 7574 |
| CII5408 | VR | PRT | US20190085084; SEQ ID NO: 645 | 7575 |
| CII5409 | VR | PRT | WO2016164637; SEQ ID NO: 645 | 7576 |
| CII5410 | VR | PRT | US20190085084; SEQ ID NO: 654 | 7577 |
| CII5411 | VR | PRT | WO2016164637; SEQ ID NO: 654 | 7578 |
| CII5412 | VR | PRT | US20190085084; SEQ ID NO: 658 | 7579 |
| CII5413 | VR | PRT | WO2016164637; SEQ ID NO: 658 | 7580 |
| CII5414 | VR | PRT | US20190085084; SEQ ID NO: 665 | 7581 |
| CII5415 | VR | PRT | WO2016164637; SEQ ID NO: 665 | 7582 |
| CII5416 | VR | PRT | US20190085084; SEQ ID NO: 669 | 7583 |
| CII5417 | VR | PRT | WO2016164637; SEQ ID NO: 669 | 7584 |
| CII5418 | VR | PRT | US20190085084; SEQ ID NO: 639 | 7585 |
| CII5419 | VR | PRT | WO2016164637; SEQ ID NO: 639 | 7586 |
| CII5420 | VR | PRT | US20190085084; SEQ ID NO: 664 | 7587 |
| CII5421 | VR | PRT | WO2016164637; SEQ ID NO: 664 | 7588 |
| CII5422 | VR | PRT | US20190085084; SEQ ID NO: 668 | 7589 |
| CII5423 | VR | PRT | WO2016164637; SEQ ID NO: 668 | 7590 |
| CII5424 | VR | PRT | US20190085084; SEQ ID NO: 666 | 7591 |
| CII5425 | VR | PRT | WO2016164637; SEQ ID NO: 666 | 7592 |
| CII5426 | VR | PRT | US20190085084; SEQ ID NO: 640 | 7593 |
| CII5427 | VR | PRT | WO2016164637; SEQ ID NO: 640 | 7594 |
| CII5428 | VR | PRT | US20190085084; SEQ ID NO: 629 | 7595 |
| CII5429 | VR | PRT | WO2016164637; SEQ ID NO: 629 | 7596 |
| CII5430 | VR | PRT | US20190085084; SEQ ID NO: 626 | 7597 |
| CII5431 | VR | PRT | WO2016164637; SEQ ID NO: 626 | 7598 |
| CII5432 | VR | PRT | US20190085084; SEQ ID NO: 627 | 7599 |
| CII5433 | VR | PRT | WO2016164637; SEQ ID NO: 627 | 7600 |
| CII5434 | VR | PRT | US20190085084; SEQ ID NO: 624 | 7601 |
| CII5435 | VR | PRT | WO2016164637; SEQ ID NO: 624 | 7602 |
| CII5436 | VR | PRT | US20190085084; SEQ ID NO: 631 | 7603 |
| CII5437 | VR | PRT | WO2016164637; SEQ ID NO: 631 | 7604 |
| CII5438 | VR | PRT | US20190085084; SEQ ID NO: 632 | 7605 |
| CII5439 | VR | PRT | WO2016164637; SEQ ID NO: 632 | 7606 |
| CII5440 | VR | PRT | US20190085084; SEQ ID NO: 633 | 7607 |
| CII5441 | VR | PRT | WO2016164637; SEQ ID NO: 633 | 7608 |
| CII5442 | VR | PRT | US20190085084; SEQ ID NO: 634 | 7609 |
| CII5443 | VR | PRT | WO2016164637; SEQ ID NO: 634 | 7610 |
| CII5444 | VR | PRT | US20190085084; SEQ ID NO: 635 | 7611 |
| CII5445 | VR | PRT | WO2016164637; SEQ ID NO: 635 | 7612 |
| CII5446 | VR | PRT | US20190085084; SEQ ID NO: 636 | 7613 |
| CII5447 | VR | PRT | WO2016164637; SEQ ID NO: 636 | 7614 |
| CII5448 | VR | PRT | US20190085084; SEQ ID NO: 637 | 7615 |
| CII5449 | VR | PRT | WO2016164637; SEQ ID NO: 637 | 7616 |
| CII5450 | VR | PRT | US20190085084; SEQ ID NO: 663 | 7617 |
| CII5451 | VR | PRT | WO2016164637; SEQ ID NO: 663 | 7618 |
| CII5452 | VR | PRT | US20190085084; SEQ ID NO: 619 | 7619 |
| CII5453 | VR | PRT | WO2016164637; SEQ ID NO: 619 | 7620 |
| CII5454 | VR | PRT | US20190085084; SEQ ID NO: 621 | 7621 |
| CII5455 | VR | PRT | WO2016164637; SEQ ID NO: 621 | 7622 |
| CII5456 | VR | PRT | US20190085084; SEQ ID NO: 329 | 7623 |
| CII5457 | VR | PRT | US20190085084; SEQ ID NO: 329 | 7624 |
| CII5458 | VR | PRT | WO2016164637; SEQ ID NO: 329 | 7625 |
| CII5459 | VR | PRT | US20190085084; SEQ ID NO: 331 | 7626 |
| CII5460 | VR | PRT | WO2016164637; SEQ ID NO: 331 | 7627 |
| CII5461 | VR | PRT | US20190085084; SEQ ID NO: 338 | 7628 |
| CII5462 | VR | PRT | US20190085084; SEQ ID NO: 338 | 7629 |
| CII5463 | VR | PRT | WO2016164637; SEQ ID NO: 338 | 7630 |
| CII5464 | VR | PRT | US20190085084; SEQ ID NO: 333 | 7631 |
| CII5465 | VR | PRT | US20190085084; SEQ ID NO: 333 | 7632 |
| CII5466 | VR | PRT | WO2016164637; SEQ ID NO: 333 | 7633 |
| CII5467 | VR | PRT | US20190085084; SEQ ID NO: 638 | 7634 |
| CII5468 | VR | PRT | WO2016164637; SEQ ID NO: 638 | 7635 |
| CII5469 | VR | PRT | US20190085084; SEQ ID NO: 622 | 7636 |
| CII5470 | VR | PRT | WO2016164637; SEQ ID NO: 622 | 7637 |
| CII5471 | VR | PRT | US20190085084; SEQ ID NO: 623 | 7638 |
| CII5472 | VR | PRT | WO2016164637; SEQ ID NO: 623 | 7639 |
| CII5473 | VR | PRT | US20190085084; SEQ ID NO: 607 | 7640 |
| CII5474 | VR | PRT | WO2016164637; SEQ ID NO: 607 | 7641 |
| CII5475 | VR | PRT | US20190085084; SEQ ID NO: 620 | 7642 |
| CII5476 | VR | PRT | WO2016164637; SEQ ID NO: 620 | 7643 |
| CII5477 | VR | PRT | WO2016164637; SEQ ID NO: 342 | 7644 |
| CII5478 | VR | PRT | US20190085084; SEQ ID NO: 605 | 7645 |
| CII5479 | VR | PRT | WO2016164637; SEQ ID NO: 605 | 7646 |
| CII5480 | VR | PRT | US20190085084; SEQ ID NO: 628 | 7647 |
| CII5481 | VR | PRT | WO2016164637; SEQ ID NO: 628 | 7648 |
| CII5482 | VR | PRT | US20190085084; SEQ ID NO: 642 | 7649 |
| CII5483 | VR | PRT | WO2016164637; SEQ ID NO: 642 | 7650 |
| CII5484 | VR | PRT | US20190085084; SEQ ID NO: 677 | 7651 |
| CII5485 | VR | PRT | WO2016164637; SEQ ID NO: 677 | 7652 |
| CII5486 | VR | PRT | US20190085084; SEQ ID NO: 678 | 7653 |
| CII5487 | VR | PRT | WO2016164637; SEQ ID NO: 678 | 7654 |
| CII5488 | VR | PRT | US20190085084; SEQ ID NO: 672 | 7655 |
| CII5489 | VR | PRT | WO2016164637; SEQ ID NO: 672 | 7656 |
| CII5490 | VR | PRT | US20190085084; SEQ ID NO: 676 | 7657 |
| CII5491 | VR | PRT | WO2016164637; SEQ ID NO: 676 | 7658 |
| CII5492 | VR | PRT | US20190085084; SEQ ID NO: 671 | 7659 |
| CII5493 | VR | PRT | WO2016164637; SEQ ID NO: 671 | 7660 |
| CII5494 | VR | PRT | US20190085084; SEQ ID NO: 353 | 7661 |
| CII5495 | VR | PRT | WO2016164637; SEQ ID NO: 353 | 7662 |
| CII5496 | VR | PRT | US20190085084; SEQ ID NO: 345 | 7663 |
| CII5497 | VR | PRT | US20190085084; SEQ ID NO: 345 | 7664 |
| CII5498 | VR | PRT | WO2016164637; SEQ ID NO: 345 | 7665 |
| CII5499 | VR | PRT | US20190085084; SEQ ID NO: 351 | 7666 |
| CII5500 | VR | PRT | WO2016164637; SEQ ID NO: 351 | 7667 |
| CII5501 | VR | PRT | US20190085084; SEQ ID NO: 357 | 7668 |
| CII5502 | VR | PRT | WO2016164637; SEQ ID NO: 357 | 7669 |
| CII5503 | VR | PRT | US20190085084; SEQ ID NO: 674 | 7670 |
| CII5504 | VR | PRT | WO2016164637; SEQ ID NO: 674 | 7671 |
| CII5505 | VR | PRT | US20190085084; SEQ ID NO: 670 | 7672 |
| CII5506 | VR | PRT | WO2016164637; SEQ ID NO: 670 | 7673 |
| CII5507 | VR | PRT | US20190085084; SEQ ID NO: 349 | 7674 |
| CII5508 | VR | PRT | WO2016164637; SEQ ID NO: 349 | 7675 |
| CII5509 | VR | PRT | US20190085084; SEQ ID NO: 355 | 7676 |
| CII5510 | VR | PRT | WO2016164637; SEQ ID NO: 355 | 7677 |
| CII5511 | VR | PRT | US20190085084; SEQ ID NO: 653 | 7678 |
| CII5512 | VR | PRT | WO2016164637; SEQ ID NO: 653 | 7679 |
| CII5513 | VR | PRT | US20190085084; SEQ ID NO: 660 | 7680 |
| CII5514 | VR | PRT | WO2016164637; SEQ ID NO: 660 | 7681 |

[0470] In some embodiments, the payload region of the AAV particle comprises a nucleic acid sequence with at least 50% identity to one or more nucleic acid sequences listed in Table 4, or variants or fragments thereof. The payload nucleic acid sequence may have 50%, 51%, 52%, 53%, 54%, 55%, 56%, 57%, 58%, 59%, 60%, 61%, 62%, 63%, 64%, 65%, 66%, 67%, 68%, 69%, 70%, 71%, 72%, 73%, 74%, 75%, 76%, 77%, 78%, 79%, 80%, 81%, 82%, 83%, 84%, 85%, 86%, 87%, 88%, 89%, 90%, 91%, 92%, 93%, 94%, 95%, 96%, 97%, 98%, 99%, or 100% identity to one or more nucleic acid sequences listed in Table 4, or variants or fragments thereof.

[0471] In some embodiments, the payload nucleic acid sequence has 90% identity to one or more of the nucleic acid sequences listed in Table 4, or variants or fragments thereof.

[0472] In some embodiments, the payload nucleic acid sequence has 91% identity to one or more of the nucleic acid sequences listed in Table 4, or variants or fragments thereof.

[0473] In some embodiments, the payload nucleic acid sequence has 92% identity to one or more of the nucleic acid sequences listed in Table 4, or variants or fragments thereof.

[0474] In some embodiments, the payload nucleic acid sequence has 93% identity to one or more of the nucleic acid sequences listed in Table 4, or variants or fragments thereof.

[0475] In some embodiments, the payload nucleic acid sequence has 94% identity to one or more of the nucleic acid sequences listed in Table 4, or variants or fragments thereof.

[0476] In some embodiments, the payload nucleic acid sequence has 95% identity to one or more of the nucleic acid sequences listed in Table 4, or variants or fragments thereof.

[0477] In some embodiments, the payload nucleic acid sequence has 96% identity to one or more of the nucleic acid sequences listed in Table 4, or variants or fragments thereof.

[0478] In some embodiments, the payload nucleic acid sequence has 97% identity to one or more of the nucleic acid sequences listed in Table 4, or variants or fragments thereof.

[0479] In some embodiments, the payload nucleic acid sequence has 98% identity to one or more of the nucleic acid sequences listed in Table 4, or variants or fragments thereof.

[0480] In some embodiments, the payload nucleic acid sequence has 99% identity to one or more of the nucleic acid sequences listed in Table 4, or variants or fragments thereof.

[0481] In some embodiments, the payload nucleic acid sequence has 100% identity to one or more of the nucleic acid sequences listed in Table 4, or variants or fragments thereof.

[0482] In some embodiments, the payload region of the AAV particle comprises a nucleic acid sequence encoding a polypeptide which is an antibody, an antibody-based composition, or a fragment thereof. As a non-limiting example, the antibody may be one or more of the polypeptides listed in Table 4, or variants or fragments thereof. As another non-limiting example, the antibody may be one or more of the heavy chain sequences listed in Table 4. As a non-limiting example, the antibody may be one or more of the light chain sequences listed in Table 4, or variants or fragments thereof.

[0483] In some embodiments, the payload region of the AAV particle comprises a nucleic acid sequence encoding a polypeptide comprising a heavy chain and alight chain sequence listed in Table 4, or variants or fragments thereof. The payload region may also comprise a linker between the heavy and light chain sequences. The linker may be a sequence known in the art or described in Table 2.

[0484] In some embodiments, the payload region of the AAV particle comprises a nucleic acid sequence encoding a polypeptide comprising a heavy chain and alight chain sequence listed in Table 4, or variants or fragments thereof, where the heavy chain sequence is from a different antibody than the light chain sequence. The payload region may also comprise a linker between the heavy and light chain sequences. The linker may be a sequence known in the art or described in Table 2.

[0485] In some embodiments, the payload region comprises, in the 5′ to 3′ direction, an antibody light chain sequence, a linker and a heavy chain sequence. In another embodiment, the linker is not used.

[0486] In some embodiments, the payload region comprises a nucleic acid sequence encoding, in the 5′ to 3′ direction, an antibody light chain sequence from Table 4, one or more linkers from Table 2 and a heavy chain sequence from Table 4.

[0487] In some embodiments, the payload region comprises, in the 5′ to 3′ direction, an antibody heavy chain sequence, a linker region (may comprise one or more linkers) and alight chain sequence. In another embodiment, the linker is not used.

[0488] In some embodiments, the payload region comprises a nucleic acid sequence encoding, in the 5′ to 3′ direction, an antibody heavy chain sequence from Table 4, one or more linkers from Table 2, and alight chain sequence from Table 4.

[0489] In some embodiments, the payload region comprises a nucleic acid sequence encoding a single heavy chain. As a non-limiting example, the heavy chain is an amino acid sequence or fragment thereof described in Table 4.

[0490] Shown in Table 4 are a listing of antibodies and their polynucleotides and/or polypeptides sequences. These sequences may be encoded by or included in the AAV particles of the present disclosure. Variants or fragments of the antibody sequences described in Table 4 may be utilized in the AAV particles of the present disclosure.

[0491] In some embodiments, the AAV particles may comprise a viral genome, wherein one or more components may be codon-optimized. Codon-optimization may be achieved by any method known to one with skill in the art such as, but not limited to, by a method according to Genescript, EMBOSS, Bioinformatics, NUS, NUS2, Geneinfinity, IDT, NUS3, GregThatcher, Insilico, Molbio, N2P, Snapgene, and/or VectorNTI. Antibody heavy and/or light chain sequences within the same viral genome may be codon-optimized according to the same or according to different methods.

[0492] In some cases, the payload region of the AAV particles may encode one or more isoforms or variants of heavy and light chain antibody domains. Such variants may be humanized or optimized antibody domains comprising one or more complementarity determining regions (CDRs) from the heavy and light chains listed in Table 4. CDRs of the antibodies encoded by the viral genomes of the present disclosure may be 50%, 60%, 70%, 80%, 90%, 95% identical to CDRs listed in or incorporated in the sequences of Table 4. Methods of determining CDRs are well known in the art and are described herein. Payload regions may encode antibody variants with one or more heavy chain variable domain (V_{H}) or light chain variable domain (V_{L}) derived from the antibody sequences in Table 4. In some cases, such variants may include bispecific antibodies. Bispecific antibodies encoded by payload regions may comprise variable domain pairs from two different antibodies.

[0493] In some embodiments, the AAV particles may comprise a heavy and a light chain of an antibody described herein and two promoters. As a non-limiting example, the AAV particles may comprise a nucleic acid sequence of a genome as described in FIG. 1 or FIG. 2 of US Patent Publication No. US20030219733, the contents of which are herein incorporated by reference in their entirety. As another non-limiting example, the AAV particles may be a dual-promoter AAV for antibody expression as described by Lewis et al. (J. of. Virology, September 2002, Vol. 76(17), p 8769-8775; the contents of which are herein incorporated by reference in their entirety).

[0494] Payload regions of the viral genomes may encode any cancer and immunoinflammatory disease-associated antibodies, not limited to those described in Table 4, including antibodies that are known in the art and/or antibodies that are commercially available. This may include fragments of such antibodies or antibodies that have been developed to comprise one or more of such fragments [e.g., variable domains or complementarity determining regions (CDRs)].

[0495] In some embodiments, the AAV particles may have a payload region comprising any of the cancer and immunoinflammatory disease-associated antibodies as described in International Publication Number WO2016059622, WO2017046053, WO2017046658, WO2017046676, WO2017046774, WO2017046776, WO2017048593, WO2017048614, WO2017048629, WO2017049024, WO2017049035, WO2017049038, WO2017049139, WO2017049149, WO2017049251, WO2017049266, WO2017049296, WO2017049452, WO2017050729, WO2017050889, WO2017051002, WO2017051888, WO2017052241, WO2017052679, WO2017053170, WO2017053250, WO2017053423, WO2017053469, WO2017053556, WO2017053703, WO2017053705, WO2017053748, WO2017053807, WO2017053856, WO2017053889, WO2017053905, WO2017053932, WO2017054089, WO2017054141, WO2017054646, WO2017055273, WO2017055291, WO2017055314, WO2017055318, WO2017055328, WO2017055385, WO2017055388, WO2017055389, WO2017055391, WO2017055392, WO2017055393, WO2017055395, WO2017055398, WO2017055404, WO2017055443, WO2017055521, WO2017055547, WO2017055612, WO2017055613, WO2017055614, WO2017055617, WO2017058115, WO2017058771, WO2017058780, WO2017058866, WO2017059095, WO2017059196, WO2017059243, WO2017059252, WO2017059289, WO2017059380, WO2017059551, WO2017059557, WO2017059878, WO2017059900, WO2017060144, WO2017060201, WO2017060247, WO2017060300, WO2017060322, WO2017060504, WO2017060857, WO2017061602, WO2017062016, WO2017062271, WO2017062456, WO2017062496, WO2017062615, WO2017062619, WO2017062649, WO2017062672, WO2017062682, WO2017062748, WO2017062792, WO2017062820, WO2017062830, WO2017062888, WO2017062952, WO2017062966, WO2017063593, WO2017064043, WO2017064221, WO2017064564, WO2017064716, WO2017065203, WO2017065484, WO2017065493, WO2017065837, WO2017066122, WO2017066136, WO2017066714, WO2017066760, WO2017067042, WO2017067043, WO2017067480, WO2017068186, WO2017068360, WO2017068472, WO2017069628, WO2017070170, WO2017070364, WO2017070395, WO2017070423, WO2017070456, WO2017070460, WO2017070475, WO2017070476, WO2017070527, WO2017070554, WO2017070561, WO2017070567, WO2017070613, WO2017070616, WO2017070622, WO2017070623, WO2017070624, WO2017070626, WO2017070649, WO2017070654, WO2017070943, WO2017071625, WO2017072150, WO2017072196, WO2017072207, WO2017072208, WO2017072361, WO2017072366, WO2017072662, WO2017072757, WO2017073619, WO2017073981, WO2017074013, WO2017074074, WO2017074428, WO2017074878, WO2017075052, WO2017075119, WO2017075124, WO2017075325, WO2017075432, WO2017075484, WO2017075533, WO2017075615, WO2017076308, WO2017076878, WO2017076916, WO2017077047, WO2017077085, WO2017077382, WO2017077391, WO2017078839, WO2017079112, WO2017079115, WO2017079116, WO2017079117, WO2017079121, WO2017079150, WO2017079165, WO2017079369, WO2017079443, WO2017079448, WO2017079479, WO2017079520, WO2017079591, WO2017079705, WO2017079831, WO2017079832, WO2017079833, WO2017079834, WO2017079835, WO2017080850, WO2017081066, WO2017081211, WO2017081265, WO2017081320, WO2017082214, WO2017083296, WO2017083306, WO2017083314, WO2017083441, WO2017083451, WO2017083488, WO2017083511, WO2017083515, WO2017083582, WO2017083627, WO2017083750, WO2017084078, WO2017084495, WO2017085166, WO2017085172, WO2017085212, WO2017085471, WO2017085693, WO2017086627, WO2017087280, WO2017087547, WO2017087587, WO2017087588, WO2017087589, WO2017087599, WO2017087678, WO2017087800, WO2017087843, WO2017087921 WO2017088028, WO2017088734, WO2017088782, WO2017088821, WO2017088974, WO2017089334, WO2017089447, WO2017089618, WO2017089895, WO2017091429, WO2017091487, WO2017091577, WO2017091580, WO2017091615, WO2017091683, WO217091719, WO2017091850, WO2017092645, WO2017093402, WO2017093404, WO2017093406, WO2017093408, WO2017093410, WO2017093448, WO2017093478, WO2017093844, WO2017093845, WO2017093942, WO2017093947, WO2017095088, WO2017095267, WO2017095486, WO2017095487, WO2017095805, WO2017095808, WO2017095823, WO2017095875, WO2017095918, WO2017095939, WO2017096017, WO2017096026, WO2017096051, WO2017096120, WO2017096163, WO2017096179, WO2017096182, WO2017096189, WO2017096221, WO2017096276, WO2017096281, WO2017096327, WO2017096329, WO2017096361, WO2017096397, WO2017096486, WO2017097723, WO2017097990, WO2017099362, WO2017099712, WO2017100289, WO2017100305, WO2017100372, WO2017100467, WO2017100540, WO2017100597, WO2017100670, WO2017101863, WO2017102010, WO2017102789, WO2017102833, WO2017103088, WO2017103895, WO2017104779, WO2017106061, WO2017106129, WO2017106196, WO2017106236, WO2017106346, WO2017106352, WO2017106372, WO2017106383, WO2017106453, WO2017106462, WO2017106501, WO2017106508, WO2017106566, WO2017106609, WO2017106643, WO2017106656, WO2017106684, WO201710610, WO2017106859, WO2017107885, WO2017107973, WO2017109290, WO2017109496, WO2017109721, WO2017112536, WO2017112741, WO2017112762, WO2017112775, WO2017112803, WO2017112811, WO2017112829, WO2017112877, WO2017112944, WO217112954, WO2017112955, WO2017112956, WO2017114204, WO2017114401, WO2017114694, WO2017114972, WO2017114973, WO2017114975, WO2017114976, WO2017116064, WO2017116196, WO2017117179, WO2017117202, WO2017117384, WO2017117430, WO2017117464, WO2017118321, WO2017118613, WO2017118675, WO2017118745, WO2017118761, WO2017118841, WO2017119434, WO2017119435, WO2017119811, WO2017120222, WO2017120280, WO2017120344, WO2017120525, WO2017120534, WO2017120557, WO2017120599, WO2017120612, WO2017120613, WO2017120996, WO2017120997, WO2017120998, WO2017121330, WO2017121758, WO2017121771, WO2017121877, WO2017121880, WO2017121905, WO2017122017, WO2017122018, WO2017122019, WO2017122130, WO2017122666, WO2017123556, WO2017123557, WO2017123636, WO2017123644, WO2017123646, WO2017123650, WO2017123673, WO2017123804, WO2017123978, WO2017124001, WO2017124002, WO2017124050, WO2017124110, WO2017125532, WO2017125578, WO2017125601, WO2017125830, WO2017125831, WO2017125871, WO2017125897, WO2017126587, WO217126944, WO2017127468, WO2017127499, WO2017127664, WO2017127702, WO2017127764, WO2017127833, WO2017127933, WO2017128534, WO2017128880, WO2017130076, WO2017130223, WO2017132062, WO2017132457, WO2017132459, WO2017132486, WO2017132555, WO2017132562, WO2017132772, WO2017132827, WO2017133174, WO2017133175, WO2017133540, WO2017133633, WO2017133639, WO2017133640, WO2017133745, WO2017134140, WO2017134158, WO2017134197, WO2017134234, WO2017134292, WO2017134301, WO2017134302, WO2017134305, WO2017134306, WO2017134440, WO2017134592, WO2017135791, WO2017136313, WO2017136350, WO2017136355, WO2017136549, WO2017136562, WO2017136607, WO2017136659, WO2017136693, WO2017136820, WO2017137503, WO2017137542, WO2017137556, WO2017137579, WO2017137613, WO2017137954, WO2017139212, WO2017139587, WO2017139623, WO2017139975, WO2017140256, WO2017142294, WO2017142800, WO2017142928, WO2017143062, WO2017143069, WO2017143073, WO2017143076, WO2017143270, WO2017143451, WO2017143838, WO2017143840, WO2017144621, WO2017144668, WO2017144681, WO2017144896, WO2017144900, WO2017144903, WO2017147247, WO2017147248, WO2017147278, WO2017147293, WO2017147368, WO2017147383, WO2017147538, WO2017147653, WO217147719, WO2017147742, WO2017148424, WO2017148879, WO2017148880, WO2017148889, WO2017149106, WO2017149122, WO2017149143, WO2017149394, WO2017149513, WO2017149515, WO2017149538, WO2017150762, WO2017151000, WO2017151176, WO2017151502, WO2017151818, WO2017151940, WO2017151979, WO2017152076, WO2017152085, WO2017152088, WO2017152102, WO2017153345, WO2017153402, WO2017153433, WO2017153438, WO2017153541, WO2017153567, WO2017154868, WO2017155355, WO2017155996, WO2017156032, WO2017156058, WO2017156298, WO2017156355, WO2017156479, WO2017156488, WO2017156500, WO2017157305, WO2017157895, WO2017157948, WO2017158079, WO2017158084, WO2017158092, WO2017158097, WO2017158101, WO2017158103, WO2017158116, WO2017158337, WO2017158339, WO2017158436, WO2017159287, WO2017159699, WO2017159996, WO2017160587, WO2017160699, WO2017160700, WO2017160725, WO2017160754, WO2017160775, WO2017161169, WO2017161206, WO2017161414, WO2017161976, WO2017162555, WO2017162587, WO2017162663, WO2017162678, WO217162791, WO2017162890, WO2017163049, WO2017163064, WO2017165398, WO2017165460, WO2017165464, WO2017165614, WO2017165683, WO2017165734, WO2017165736, WO2017165742, WO2017165778, WO2017166804, WO2017167967, WO2017167997, WO2017168726, WO2017170597, WO2017170847, WO2017171373, WO2017171535, WO217172260, WO2017172509, WO2017172517, WO2017172518, WO2017172733, WO2017172771, WO2017172990, WO2017173256, WO2017173328, WO2017173349, WO2017173359, WO2017173384, WO2017173410, WO2017173494, WO2017174017, WO2017174568, WO2017174586, WO2017174822, WO2017174823, WO2017174824, WO2017175006, WO2017175018, WO2017175058, WO2017175176, WO2017176007, WO2017176760, WO2017176864, WO2017177013, WO2017177137, WO2017177175, WO2017177179, WO2017177199, WO2017177217, WO2017177333, WO2017177955, WO2017178493, WO2017178562, WO2017178569, WO2017178653, WO2017179862, WO2017180462, WO2017180530, WO2017180555, WO2017180713, WO2017180738, WO2017180813, WO2017180842, WO2017180864, WO2017180904, WO2017180913, WO2017180936, WO2017180993, WO2017181001, WO2017181031, WO2017181034, WO2017181039, WO2017181049, WO2017181098, WO2017181109, WO2017181111, WO2017181119, WO2017181139, WO2017181243, WO2017181420, WO2017182603, WO2017182672, WO2017182705, WO2017183665, WO2017183711, WO2017184201, WO217184562, WO2017184619, WO2017184942, WO2017184973, WO2017185037, WO2017185177, WO2017185492, WO2017186121, WO2017186182, WO2017186853, WO2017186908, WO2017186928, WO2017186950, WO2017187307, WO2017188472, WO2017188570, WO2017189279, WO2017189432, WO2017189588, WO2017189724, WO2017189805, WO2017189827, WO2017189959, WO2017190025, WO2017190100, WO2017191062, WO2017191101, WO2017191108, WO2017191325, WO2017191439, WO2017191476, WO2017191559, WO2017191579, WO2017191627, WO2017191748, WO2017192387, WO2017192470, WO2017192536, WO2017192567, WO2017192589, WO2017192668, WO2017192743, WO2017192867, WO2017192933, WO2017193032, WO2017193059, WO2017193094, WO2017193096, WO2017193097, WO2017193101, WO2017193107, WO2017193956, WO2017194265, WO2017194390, WO2017194438, WO2017194441, WO2017194442, WO2017194555, WO2017194568, WO2017194641, WO2017194646, WO2017194782, WO2017194783, WO2017195749, WO2017196263, WO2017196426, WO2017196663, WO2017196764, WO2017196819, WO2017196847, WO2017196867, WO2017196902, WO2017197098, WO2017197199, WO2017197231, WO2017197234, WO2017197259, WO2017197263, WO2017197265, WO2017197331, WO2017197347, WO2017197376, WO2017197667, WO2017198212, WO217198741, WO2017199250, WO2017200173, WO2017200493, WO2017201131, WO2017201204, WO2017201210, WO2017201325, WO2017201340, WO2017201440, WO2017201442, WO2017201476, WO2017201488, WO2017201493, WO2017201731, WO2017201766, WO2017202387, WO2017202744, WO2017202879, WO2017203426, WO2017203468, WO2017204277, WO2017204606, WO2017205014, WO2017205101, WO2017205216, WO2017205465, WO2017205536, WO2017205538, WO2017205651, WO2017205721, WO2017205726, WO2017205738, WO2017205742, WO2017205745, WO2017205747, WO2017205875, WO2017206621, WO2017206773, WO2017206840, WO2017207477, WO2017207480, WO2017207694, WO2017207739, WO2017207775, WO2017208211, WO2017209351, WO2017210058, WO2017210443, WO2017210485, WO2017210586, WO2017210588, WO2017210621, WO2017210844, WO2017211278, WO2017211313, WO2017211319, WO2017211321, WO2017211900, WO2017211928, WO2017212250, WO2017212442, WO2017212462, WO2017213267, WO2017214089, WO2017214151, WO2017214167, WO2017214170, WO2017214182, WO2017214186, WO217214207, WO2017214282, WO2017214298, WO2017214301, WO2017214335, WO2017214338, WO2017214376, WO2017214456, WO2017214458, WO2017214462, WO2017214547, WO2017214548, WO2017214625, WO2017214706, WO2017215524, WO2017215585, WO2017215590, WO2017216028, WO2017216227, WO2017216324, WO2017216561, WO217216562, WO2017216724, WO2017217128, WO2017217524, WO2017217934, WO2017217985, WO2017218355, WO2017218435, WO2017218515, WO2017218533, WO2017218698, WO2017218824, WO2017218825, WO2017218977, WO2017219025, WO2017219029, WO2017219093, WO2017219687, WO2017219690, WO2017219974, WO2017219995, WO2017220369, WO2017220569, WO2017220645, WO2017220695, WO2017220739, WO2017220988, WO2017220989, WO2017220990, WO2017221128, WO2017221174, WO2017222556, WO2017222593, WO2017223111, WO2017223284, WO2017223286, WO2017223405, WO2018000047, WO2018000324, WO2018001858, WO2018001909, WO2018002031, WO2018002181, WO2018002339, WO2018002952, WO2018004283, WO2018005054, WO2018005226, WO2018005276, WO2018005519, WO2018005556, WO2018005558, WO2018005559, WO2018005682, WO2018005697. WO2018005706, WO2018005904, WO2018006005, WO2018006034, WO2018006092, WO2018006785, WO2018006824, WO2018006882, WO2018007258, WO2018007442, WO2018007592, WO2018007885, WO2018008740, WO2018009499, WO2018009507, WO2018009624, WO2018009811, WO2018009894, WO2018009903, WO2018009921, WO2018010140, WO2018010846, WO2018011421, WO2018011573, WO2018011584, WO2018012952, WO2018013483, WO2018013563, WO2018013585, WO2018013714, WO2018013818, WO2018013917, WO2018013918, WO2018013939, WO2018014001, WO2018014122, WO2018014126, WO2018014260, WO2018014855, WO2018014864, WO2018015340, WO2018015448, WO2018015573, WO2018015880, WO2018016881, WO2018017497, WO2018017604, WO2018017673, WO2018017708, WO2018017714, WO2018017761, WO2018017763, WO2018017786, WO2018017864, WO2018017888, WO2018017889, WO2018017964, WO2018017996, WO2018018031, WO2018018039, WO2018019772, WO2018019897, WO2018019961, WO2018020000, WO2018020273, WO2018020476, WO2018021301, WO2018021972, WO2018022479, WO2018022762, WO2018022786, WO2018023025, WO2018023093, WO2018023100, WO2018023121, WO2018023136, WO2018024237, WO2018024770, WO2018025178, WO2018025982, WO2018026018, WO2018026248, WO2018026249, WO2018026533 WO2018026600, WO2018026722, WO2018026742, WO2018026748, WO2018026819, WO2018026953, WO2018026969, WO2018027025, WO2018027039, WO2018027042, WO2018027084, WO2018027124, WO2018027155, WO2018027203, WO2018027204, WO2018027252, WO2018027329, WO2018029124, WO2018029182, WO2018029284, WO2018029474, WO2018030806, WO2018031258, WO2018031408, WO2018031424, WO2018031454, WO2018031490, WO2018031865, WO2018031887, WO2018032638, WO2018033135, WO2018033749, WO2018033798, WO2018034225, WO2018034226, WO2018034227, WO2018034259, WO2018034301, WO2018034434, WO2018035061, WO2018035084, WO2018035107, WO2018035119, WO2018035210, WO2018035407, WO2018035710, WO2018036243, WO2018036438, WO2018036472, WO2018036473, WO2018036561, WO2018036852, WO2018038583, WO2018038684, WO2018038945, WO2018039020, WO2018039097, WO2018039107, WO2018039180, WO2018039274, WO2018039626, WO2018041067, WO2018041823, WO2018042385, WO2018043311, WO2018044105, WO2018044619, WO2018044948, WO2018045054, WO2018045090, WO2018045110, WO2018045130, WO2018045325, WO2018045379, WO2018046997, WO2018047154, WO2018047894, WO2018048234, WO2018048318, WO2018048975, WO2018049053, WO2018049083, WO2018049118, WO2018049120, WO2018049124, WO2018049130, WO2018049188, WO2018049248, WO2018049474, WO2018050027, WO2018050028, WO2018050039, WO2018050066, WO2018050111, WO2018050733, WO2018050783, WO2018050833, WO2018050852, WO2018050902, WO2018052153, WO2018052503, WO2018052556, WO2018052789, WO2018052818, WO2018053029, WO2018053032, WO2018053106, WO2018053119, WO2018053180, WO2018053270, WO2018053328, WO2018053365, WO2018053401, WO2018053405, WO2018053434, WO2018053468, WO2018053506, WO2018053709, WO2018054240, WO2018054241, WO2018054353, WO2018054484, WO2018054940, WO2018054973, WO2018055503, WO2018056821, WO2018056897, WO2018057303, WO2018057585, WO2018057669, WO2018057735, WO2018057776, WO2018057802, WO2018057823, WO2018057904, WO2018057916, WO2018057955, WO2018057967, WO2018058001, WO2018058002. WO2018058022, WO2018058177, WO2018059117, WO2018059437, WO2018059465, WO2018059502, WO2018060239, WO2018060301, WO2018060351, WO2018060453, WO2018060462, WO2018060480, WO2018062361, WO2018062402, WO2018064190, WO2018064205, WO2018064255, WO2018064299, WO2018064436, WO2018064478, WO2018064594 WO2018064602, WO2018064603, WO2018064611, WO2018065501, WO2018065552, WO2018066585, WO2018066626, WO2018067198, WO2018067331, WO2018067331, WO2018067580, WO2018067582, WO2018067602, WO2018067618, WO2018067991, WO2018067992, WO2018067993, WO2018068028, WO2018068182, WO2018068201, WO2018068282, WO2018068283, WO2018068336, WO2018068354, WO2018068652, WO2018068691, WO2018068695, WO2018068758, WO2018069279, WO2018069467, WO2018069480, WO2018069500, WO2018069871, WO2018069927, WO2018070390, WO2018070479, WO2018070936, WO2018071500, WO2018071583, WO2018071624, WO2018071676, WO2018071701, WO2018071777, WO2018071792, WO2018071796, WO2018071871, WO2018071873, WO2018071910, WO2018071913, WO2018071919, WO2018071959, WO2018072025, WO2018072743, WO2018073363, WO2018073593, WO2018073648, WO2018073680, WO2018073721, WO2018074978, WO2018075304, WO2018075375, WO2018075564, WO2018075586, WO2018075591, WO2018075600, WO2018075693, WO2018075740, WO2018075794, WO2018075807, WO2018075813, WO2018075820, WO2018075960, WO2018075980, WO2018075989, WO2018076024, WO2018076828, WO2018077775, WO2018077893, WO2018077926, WO2018078442, WO2018078643, WO2018079314, WO2018079393, WO2018079740. WO2018080015, WO2018080812, WO2018080914, WO2018081074, WO2018081287, WO2018081329, WO2018081370, WO2018081375, WO2018081437, WO2018081448, WO2018081512, WO2018081648, WO2018081649, WO2018081754, WO2018081755, WO2018081832, WO2018081897, WO2018081898, WO2018082590, WO2018083071, WO2018083087, WO2018083248, WO2018083282, WO2018083538, WO2018083633, WO2018084236, WO2018084836, WO2018085252, WO2018085358, WO2018085359, WO2018085431, WO2018085441, WO2018085444, WO2018085468, WO2018085469, WO2018085533, WO2018085555, WO2018085599, WO2018085731, WO2018085815, WO2018086139, WO2018086585, WO2018086605, WO2018087143, WO2018087172, WO2018087276, WO2018087644, WO2018088850, WO2018088877, WO2018088878, WO2018089293, WO2018089305, WO2018089335, WO2018089393, WO2018089508, WO2018089532, WO2018089628, WO2018089807, WO2018089829, WO2018089890, WO2018090057, WO2018090950, WO2018091444, WO2018091606, WO2018091661, WO2018091720, WO2018091739, WO2018091740, WO2018092885, WO2018092907, WO2018093668, WO2018093821, WO2018093841, WO2018093866, WO2018094021, WO2018094143, WO2018094144, WO2018094282, WO2018094300, WO2018094414, WO2018094460, WO2018095428, WO2018095932, WO2018096467, WO2018097951, WO2018098035, WO2018098168, WO2018098258, WO2018098277, WO2018098306, WO2018098312, WO2018098348, WO2018098354, WO2018098356, WO2018098362, WO2018098363, WO2018098365, WO2018098370, WO2018099539, WO2018099614, WO2018099968, WO2018099972, WO2018099978, WO2018100534, WO2018100535, WO2018100558, WO2018100628, WO2018101448, WO2018101470, WO2018102294, WO2018102304, WO2018102536, WO2018102589, WO2018102594, WO2018102597, WO2018102612, WO2018102668, WO2018102682, WO2018102746, WO2018102752, WO2018102785, WO2018102786, WO2018102787, WO2018102795, WO2018103093, WO2018103501, WO2018103503, WO2018103884, WO2018104407, WO2018104444, WO2018104478, WO2018104483, WO2018104554, WO2018104556, WO2018104562, WO2018106529, WO2018106588, WO2018106644, WO2018106645, WO2018106732, WO2018106776, WO2018106781, WO2018106862, WO2018106864, WO2018107058, WO2018107069, WO2018107109, WO2018107116, WO2018107125, WO2018107134, WO2018108106, WO2018109170, WO2018109174, WO2018109213, WO2018109222, WO2018109770, WO2018110515, WO2018110555, WO2018111852, WO2018111890, WO2018112266, WO2018112334, WO2018112346, WO2018112407, WO2018112426, WO2018112549, WO2018113136, WO2018113258, WO2018113595, WO2018114578, WO2018114728, WO2018114748, WO2018114754, WO2018114798, WO2018114804, WO2018115017, WO2018115051, WO2018115231, WO2018115262, WO2018115319, WO2018115377, WO2018115466, WO2018115485, WO2018115885, WO2018115887, WO2018115960, WO2018116178, WO2018117044, WO2018117237, WO2018118713, WO2018118780, WO2018119001, WO2018119016, WO2018119114, WO2018119118, WO2018119166, WO2018119171, WO2018119196, WO2018119215, WO2018119246, WO2018119279, WO2018119314, WO2018119351, WO2018119380, WO2018119425, WO2018119474, WO2018119475, WO2018120842, WO2018120843, WO2018121473, WO2018121474, WO2018121475, WO2018121476, WO2018121578, WO2018121580, WO2018121679, WO2018122053, WO2018122204, WO2018123949, WO2018124851, WO2018126232, WO2018126233, WO2018126259, WO2018126317, WO2018126595, WO2018127175, WO2018127473, WO2018127519, WO2018127586, WO2018127608, WO2018127610, WO2018127709, WO2018127710, WO2018127711, WO2018127713, WO2018127787, WO2018127791, WO2018128485, WO2018128486, WO2018128691, WO2018128779, WO2018128939, WO2018128973, WO2018129007, WO2018129029, WO2018129090, WO2018129261, WO2018129329, WO2018129331, WO2018129400, WO2018129404, WO2018129425, WO2018129451, WO2018129474, WO2018129522, WO2018129524, WO2018129533, WO2018129553, WO2018129559, WO2018129714, WO2018130513, WO2018130657, WO2018131586, WO2018132597, WO2018132739, WO2018132768, WO2018132976, WO2018133634, WO2018133649, WO2018133837, WO2018133842, WO2018133873, WO2018133877, WO2018134234, WO2018134235, WO2018134279, WO2018134681, WO2018134691, WO2018134782, WO2018134784, WO2018134787, WO2018134817, WO2018135653, WO2018136152, WO2018136163, WO2018136412, WO2018136455, WO2018136553, WO2018136562, WO2018136570, WO2018136698, WO2018136823, WO2018136825, WO2018136891, WO2018136910, WO2018137293, WO2018137294, WO2018137295, WO2018137576, WO2018137598, WO2018137705, WO2018138032, WO2018138113, WO2018138297, WO2018138496, WO2018138521, WO2018138681, WO2018139404, WO2018139623, WO2018140026, WO2018140510, WO2018140525, WO2018140586, WO2018140660, WO2018140725, WO2018140733, WO2018140831, WO2018140845, WO2018140970, WO2018140973, WO2018141910, WO2018141959, WO2018141964, WO2018142322, WO2018142323, WO2018143454, WO2018143938, WO2018144097, WO2018144410, WO2018144425, WO2018144535, WO2018144637, WO2018144999, WO2018145075, WO2018145120, WO2018145206, WO2018145533, WO2018146074, WO2018146189, WO2018146199, WO2018146230, WO2018146253, WO201814317, WO2018146321, WO2018146549, WO2018146612, WO2018147245, WO2018148180, WO2018148223, WO201814224, WO2018148383, WO2018148445, WO2018148447, WO2018148454, WO2018148476, WO2018148486, WO2018148494, WO2018148566, WO2018148585, WO2018148595, WO2018148610, WO2018148660, WO2018149358, WO2018149938, WO2018149956, WO2018150029, WO2018150187, WO2018150224, WO2018150326, WO2018151816, WO2018151817, WO2018151820, WO2018151821, WO2018151836, WO2018151841, WO2018151868, WO2018152181, WO2018152516, WO2018152518, WO2018152530, WO2018152547, WO2018152634, WO2018152687, WO2018153320, WO2018153340, WO2018153366, WO2018153372, WO2018153865, WO2018154386, WO2018154391, WO2018154520, WO2018154580, WO2018156180, WO2018156250, WO2018156367, WO2018156494, WO2018156509, WO2018156634, WO2018156735, WO2018156740, WO2018156791, WO2018157147, WO2018157169, WO2018158335, WO2018158398, WO2018158632, WO2018158658, WO2018158727, WO2018158741, WO2018159582, WO2018159845, WO2018160536, WO2018160538, WO2018160539, WO2018160704, WO2018160731, WO2018160841, WO2018160909, WO2018160917, WO2018161017, WO2018161092, WO2018161340, WO2018161798, WO2018161872, WO2018162376, WO2018162430, WO2018162446, WO2018162724, WO2018162727, WO2018162749, WO2018162944, WO2018163185, WO2018164385, WO2018164441, WO2018164637, WO2018165062, WO2018165186, WO2018165228, WO2018165362, WO2018165475, WO2018165619, WO2018165895, WO2018166468, WO2018166589, WO2018167104, WO2018167151, WO2018167267, WO2018167322, WO2018168768, WO2018169785, WO2018169948, WO2018169953, WO2018169993, WO2018169999, WO2018170134, WO2018170145, WO2018170168, WO2018170188, WO2018170256, WO2018170338, WO2018170351, WO2018170359, WO2018170458, WO2018172078, WO2018172465, WO2018174408, WO2018174544, WO2018174629, WO2018174984, WO2018175179, WO2018175403, WO2018175476, WO2018175740, WO2018175752, WO2018175788, WO2018175790, WO2018175833, WO2018175917, WO2018175988, WO2018176089, WO2018176132, WO2018176505, WO2018176992, WO2018177220, WO2018177324, WO2018177393, WO2018177966, WO2018177967, WO2018178040, WO2018178046, WO2018178047, WO2018178055, WO2018178076, WO2018178077, WO2018178101, WO2018178122, WO2018178123, WO2018178307, WO2018178352, WO2018178354, WO2018178363, WO2018178364, WO2018178378, WO2018178950, WO2018179302, WO2018181064, WO2018181207, WO2018181656, WO2018182266, WO2018182284, WO2018182422, WO2018182529, WO2018183041, WO2018183182, WO2018183293, WO2018183294, WO2018183366, WO2018183485, WO2018183494, WO2018183608, WO2018184558, WO2018184593, WO2018184964, WO2018184965, WO2018184966, WO2018185043, WO2018185045, WO2018185050, WO2018185110, WO2018185232, WO2018185247, WO2018185284, WO2018185526, WO2018185618, WO2018185709, WO2018187158, WO2018187190, WO2018187191, WO2018187332, WO2018187453, WO2018187512, WO2018187518, WO2018187613, WO2018187682, WO2018187702, WO2018187706, WO2018187791, WO2018187799, WO2018188047, WO2018188612, WO2018189220, WO2018189379, WO2018189381, WO2018189382, WO2018189520, WO2018189611, WO2018190719, WO2018191074, WO2018191188, WO2018191313, WO2018191414, WO2018191422, WO2018191438, WO2018191502, WO2018191545, WO2018191548, WO2018191660, WO2018191707, WO2018191718, WO2018191723, WO2018192089, WO2018193063, WO2018193427, WO2018193457, WO2018194380, WO2018194381, WO2018194944, WO2018195034, WO2018195226, WO2018195283, WO2018195302, WO2018195388, WO2018195418, WO2018197492, WO2018197675, WO2018198091, WO2018199176, WO2018199318, WO2018199593, WO2018200422, WO2018200430, WO2018200496, WO2018200562, WO2018200585, WO2018200586, WO2018200812, WO2018200818, WO2018200884, WO2018200918, WO2018201014, WO2018201047, WO2018201051, WO2018201056, WO2018201087, WO2018201096, WO2018201099, WO2018202649, WO2018202794, WO2018203289, WO2018203517, WO2018203567, WO2018204156, WO2018204278, WO2018204303, WO2018204343, WO2018204363, WO2018204368, WO2018204374, WO2018204405, WO2018204427, WO2018204489, WO2018204520, WO2018204546, WO2018204677, WO2018204679, WO2018204757, WO2018204868, WO2018204871, WO2018204872, WO2018204876. WO2018204895, WO2018205343, WO2018205344, WO2018205917, WO2018205926, WO2018205985, WO2018206496, WO2018206565, WO2018206734, WO2018206790, WO2018208091, WO2018208121, WO2018208122, WO2018208231, WO2018208625, WO2018208670, WO2018208709, WO2018208856, WO2018208868, WO2018209175, WO2018209194. WO2018209223, WO2018209344, WO2018209346, WO2018209701, WO2018210230, WO2018210793, WO2018210795, WO2018210898, WO2018212136, WO2018212656, WO2018213064, WO2018213113, WO2018213204, WO2018213260, WO2018213297, WO2018213304, WO2018213316, WO2018213331, WO2018213335, WO2018213337, WO2018213430, WO2018213592, WO2018213612, WO2018213665, WO2018213679, WO2018213680, WO2018213848, WO2018215535, WO2018215571, WO2018215614, WO2018215768, WO2018215831, WO2018215835, WO2018215935, WO2018215936, WO2018215937, WO2018215938, WO2018215995, WO2018217058, WO2018217116, WO2018217227, WO2018217459, WO2018217638, WO2018217688, WO2018217799, WO2018217918, WO2018217940, WO2018217945, WO2018217947, WO2018217976, WO2018217988, WO2018217988, WO2018217989, WO2018218049, WO2018218056, WO2018218068, WO2018218083, WO2018218185, WO2018218215, WO2018218219, WO2018218222, WO2018218240, WO2018218352, WO2018218875, WO2018218876, WO2018218877, WO2018218878, WO2018218879, WO2018219299, WO2018219327, WO2018219901, WO2018219956, WO2018220080, WO2018220099, WO2018220100, WO2018220169, WO2018220216, WO2018220225, WO2018220234, WO2018220235, WO2018220236, WO2018220467, WO2018220546, WO2018220584. WO2018221521, WO2018221969, WO2018222019, WO2018222139, WO2018222433, WO2018222675, WO2018222685, WO2018222689, WO2018222711, WO2018222718, WO2018222722, WO2018222854, WO2018222901, WO2018222935, WO2018222949, WO2018222962, WO2018223002, WO2018223004, WO2018223051, WO2018223098, WO2018223101, WO2018223182, WO2018223243, WO2018223600, WO2018223601, WO2018223923, WO2018223958, WO2018224443, WO2018224550, WO2018224609, WO2018224682, WO2018224683, WO2018224685, WO2018224983, WO2018225041, WO2018225732, WO2018226081, WO2018226578, WO2018226580, WO2018226776, WO2018226795, WO2018226833, WO2018226958, WO2018226985, WO2018226992, WO2018227018, WO2018228406, WO2018228442, WO2018229193, WO2018229194, WO2018229195, WO2018229197, WO2018229222, WO2018229249, WO2018229530, WO2018229612, WO2018229706, WO2018229715, WO2018231254, WO2018231339, WO2018231827, WO2018232088, WO2018232144, WO2018232164, WO2018232188, WO2018232349, WO2018232355, WO2018232366, WO2018232372, WO2018232467, WO2018233333, WO2018233511, WO2018234319, WO2018234383, WO2018234575, WO2018234576, WO2018234793, WO2018235855, WO2018236728, WO2018236904, WO2018237006, WO2018237010, WO2018237037, WO2018237064, WO2018237148, WO2018237157, WO2018237173, WO2018237192, WO2018237287, WO2018237326, WO2018237335, WO2018237341, WO2018237357, WO2018237364, WO2019000105, WO2019001417, WO2019001559, WO2019002444, WO2019003074, WO2019003114, WO2019003162, WO2019003164, WO2019003165, WO2019004550, WO2019004831, WO2019004943, WO2019005208, WO2019005503, WO2019005634, WO2019005635, WO2019005636, WO2019005638, WO2019005756, WO2019005817, WO2019005847, WO2019005897, WO2019006007, WO2019006043, WO2019006072, WO2019006159, WO2019006162, WO2019006280, WO2019006472, WO2019006529, WO2019008377, WO2019008378, WO2019008379, WO2019009231, WO2019009346, WO2019009388, WO2019009684, WO2019009726, WO2019009727, WO2019009728, WO2019009879, WO2019010219, WO2019010224, WO2019010314, WO2019010486, WO2019010566, WO2019011167, WO2019011306, WO2019011852, WO2019011855, WO2019011918, WO2019012014, WO2019012015, WO2019012138, WO2019012141, WO2019012260, WO2019013392, WO2019013394, WO2019014091, WO2019014328, WO2019014360, WO2019014405, WO2019014456, WO2019014572, WO2019014586, WO2019014623, WO2019014768, WO2019015282, WO2019015677, WO2019015696, WO2019015936, WO2019016213, WO2019016237, WO2019016371, WO2019016381, WO2019016392, WO2019016402, WO2019016411, WO2019016784, WO2019017401, WO2019018310, WO2019018382, WO219018402, WO2019018426, WO2019018428, WO2019018538, WO2019018629, WO2019018640, WO2019018647, WO2019018730, WO2019018757, WO2019018770, WO2019018828, WO2019020745, WO2019020774, WO2019022187, WO2019022274, WO2019022281, WO2019023056, WO2019023097, WO2019023148, WO2019023247, WO2019023347, WO2019023396, WO2019023410, WO2019023460, WO2019023482, WO2019023504, WO2019023564, WO2019023661, WO2019023811, WO2019023812, WO2019024911, WO2019024933, WO2019025299, WO2019025484, WO2019025545, WO2019027754, WO2019027780, WO2019027903, WO2019027935, WO2019028027, WO2019028051, WO2019028125, WO2019028182, WO2019028190, WO2019028283, WO2019028292, WO2019028316, WO2019028367. WO2019028417, WO2019028427, WO2019028456, WO2019028530, WO2019028555, WO2019028980, WO2019029351, WO2019030202, WO2019030223, WO2019030240, WO2019030377, WO2019030757, WO2019031938, WO2019031939, WO2019031965, WO2019032661, WO2019032662, WO2019032663, WO2019032699, WO2019032898, WO2019032916. WO2019032927, WO2019032929, WO2019032945, WO2019033043, WO2019033050, WO2019033057, WO2019033087, WO2019033114, WO2019034177, WO2019034427, WO2019034752, WO2019034753, WO2019034764, WO2019034779, WO2019034895, WO2019035005, WO2019035630, WO2019035649, WO2019035938, WO2019035939, WO2019036605, WO2019036688, WO2019036724, WO2019036725, WO2019036855, WO2019037099, WO2019037711, WO2019038368, WO2019039483, WO2019040348, WO2019040390, WO2019040608, WO2019040612, WO2019040685, WO2019040727, WO2019040780, WO2019040791, WO2019040808, WO2019041024, WO2019042153, WO2019042226, WO2019042282, WO2019042285, WO2019043059, WO2019043065, WO2019045086, WO2019045452, WO2019045856, WO2019046225, WO2019046321, WO2019046338, WO2019046600, WO2019046652, WO2019046817, WO2019046856, WO2019046858, WO2019046859, WO2019047921, WO2019047932, WO2019048040, WO2019048489, WO2019050273, WO2019050275, WO2019050326, WO2019050362, WO2019050780, WO2019050935, WO2019051091, WO2019051102, WO2019051122, WO2019051127, WO2019051128, WO2019051132, WO2019051164, WO2019051308, WO2019051335, WO2019051397, WO2019051501, WO2019051586, WO2019052562, WO2019053420, WO2019053611, WO2019053612, WO2019053613, WO2019054460, WO219054819, WO2019055399, WO2019055537, WO2019055631, WO2019055677, WO2019055706, WO2019055776, WO2019055842, WO2019056023, WO2019056099, WO2019056106, WO2019056281, WO2019057099, WO2019057100, WO2019057102, WO2019057124, WO2019057180, WO2019057560, WO2019057567, WO2019057772, WO2019057780, WO2019057787, WO2019057792, WO2019057816, WO2019057933, WO2019057992, WO2019058345, WO2019059411, WO2019059771, WO2019060418, WO2019060542, WO2019060695, WO2019060707, WO2019060718, WO2019060750, WO2019061962, WO2019062518, WO2019062642, WO2019062755, WO2019062817, WO2019062831, WO2019062832, WO2019062871, WO2019062877, WO2019063018, WO2019063802, WO2019064073, WO2019065964, WO2019066435, WO2019066535, WO2019066536, WO2019066617, WO2019066620, WO2019067015, WO2019067249, WO2019067332, WO2019067491, WO2019067499, WO2019067805, WO2019067815, WO2019067951, WO2019067978, WO2019068633, WO2019068733, WO2019068842, WO2019068904, WO2019068907, WO2019069125, WO2019069229, WO2019070013, WO2019070161, WO2019070435, WO2019070541, WO2019070577, WO2019070680, WO2019070714, WO2019070726, WO2019070740, WO2019070834, WO2019071164, WO2019071205, WO2019072220, WO2019072274, WO2019072566, WO2019072869, WO2019072870, WO2019072977, WO2019073069, WO2019073080, WO2019074124, WO2019074333, WO2019074498, WO2019074973, WO2019075097, WO2019075136, WO2019075168, WO2019075188, WO2019075216, WO2019075220, WO2019075270, WO2019075300, WO2019075359, WO2019075378, WO2019075385, WO2019075392, WO2019075405, WO2019075413, WO2019075417, WO2019075472, WO2019075487, WO2019076277, WO2019076486, WO2019077092, WO2019077132, WO2019077951, WO2019078600, WO2019078697, WO2019078698, WO2019078699, WO2019079249, WO2019079337, WO2019079569, WO2019079671 WO2019079762, WO2019079772, WO2019079809, WO2019079914, WO2019080858, WO2019080872, WO2019080883, WO2019080889, WO2019080909, WO2019080941, WO2019081595, WO2019081692, WO2019081902, WO2019081983, WO2019082020, WO2019082208, WO2019083506, WO2019084024, WO2019084053, WO2019084055, WO2019084057, WO2019084060, WO2019084064, WO2019084067, WO2019084249, WO2019084288, WO2019084307, WO2019084319, WO2019084332, WO2019084438, WO2019084460, WO2019084552, WO2019084553, WO2019084692, WO2019085102, WO2019085238, WO2019085804. WO2019085902, WO2019086362, WO2019086497, WO2019086499, WO2019086500, WO2019086512, WO2019086573, WO2019086574, WO2019086580, WO2019086878, WO2019087087, WO2019087094, WO2019087115, WO2019087133, WO2019087994, WO2019088658, WO2019089395, WO2019089472, WO2019089473, WO2019089544, WO2019089592, WO2019089594, WO2019089610, WO2019089753, WO2019089755, WO2019089848, WO2019089855, WO2019089858, WO2019089870, WO2019089921, WO2019089969, WO2019089973, WO2019089982, WO2019090002, WO2019090003, WO2019090004, WO2019090069, WO2019090074, WO2019090076, WO2019090078, WO2019090081, WO2019090082, WO2019090085, WO2019090088, WO2019090090, WO2019090110, WO2019090134, WO2019090263, WO2019090329, WO2019090355, WO2019091384, WO2019092148, WO2019092181, WO2019092451, WO2019092452, WO2019092505, WO2019092507, WO2019092677, WO2019093342, WO2019093807, WO2019094265, WO2019094482, WO2019094578, WO2019094595, WO2019094626, WO2019094637, WO2019094700, WO2019094983, WO2019096115, WO2019096121, WO2019096136, WO2019096788, WO2019096874, WO2019096900, WO2019097244, WO2019097305, WO2019099374, WO2019099433, WO2019099440, WO2019099479, WO2019099483, WO2019099597, WO2019099744, WO2019099882, WO2019099993, WO2019100052, WO2019098212, WO2019098133, WO2019087155, WO2019085982, WO2019084427, WO2019076361, WO2019065979, WO2019056991, WO2019051541, WO2019040453, WO2019040230, WO2019036433, WO2019035241, WO2019034580, WO2019030260, WO2019027828, WO2019025983, WO2019025391, WO2019024979, WO2019013308, WO2019006330, WO2019004213, WO2018235964, WO2018235247, WO2018235024, WO2018227686, WO2018224441, WO2018217630, WO2018208553, WO2018200582, WO2018187057, WO2018183139, WO2018182421, WO2018182420, WO2018177369, WO2018175453, WO2018170096, WO2018158349, WO2018147960, WO2018147915, WO2018147432, WO2018145649, WO2018145648, WO2018140121, WO2018132635, WO2018131893, WO2018131718, WO2018129397, WO2018126369, WO2018111662, WO2018108759, WO2018107388, WO2018102473, WO2018099402, WO2018097724, WO2018089300, WO2018087349, WO2018086239, WO2018083535, WO2018083240, WO2018083238, WO2018083237, WO2018083235, WO2018079857, WO2018078186, WO2018078123, WO2018068766, WO2018067754, WO2018065389, WO2018064515, WO2018062495, WO2018057849, WO2018057051, WO2018053649, WO2018051348 WO2018044172, WO2018035330, WO2018032574, WO2018030405, WO2018021979, WO2018017863, WO2018014067, WO2018011555, WO2018011420, WO2018007456, WO2017222056, WO2017218750, WO2017218691, WO2017198811, WO2017191327, WO217189983, WO2017183028, WO2017177032, WO2017141604, WO2017141208, WO2017140831, WO2017136524, WO2017134134, WO2017133682, WO2017133222, WO2017132259, WO2017121867, WO2017121307, WO2017120614, WO2017113181, WO2017112621, WO2017105091, WO2017104778, WO2017102920, WO2017102830, WO2017097889, WO2017091905, WO2017082512, WO2017076805, WO2017076804, WO2017075229, WO2017075045, WO2017072716, WO2017072183, WO2017071513, WO2017055966, WO2017055542, WO2017046994, WO2017046212, WO2017046211, WO2017046208, WO2017046207, WO2017046205, WO2017046202, WO2017046201, and WO2017046198, the contents of each of which are herein incorporated by reference in their entirety.

[0496] In some embodiments, payloads may encode cancer and immunoinflammatory disease-associated antibodies (or fragments thereof) as described in Arenas-Ramirez et al. (Sci Transl Med, November 2016, Vol. 8(367), p 367ra166; the contents of which are herein incorporated by reference in their entirety). Such embodiments may include antibody NARA1 or fragments thereof.

[0497] In some embodiments, payloads may encode cancer and immunoinflammatory disease-associated antibodies (or fragments thereof) taught in International Publication Number WO2014028776 and US Patent Publication Number US20180201692, the contents of each of which are herein incorporated by reference in their entirety. Such embodiments may include antibody Trastuzumab or fragments thereof. In certain embodiments, the payload region encodes antibody Trastuzumab or fragments thereof selected from SEQ ID NO: 55-62, as described in WO2014028776. In certain embodiments, the payload region encodes antibody Trastuzumab or fragments thereof selected from SEQ ID NO: 1-24, as described in US20180201692.

[0498] In some embodiments, payloads may encode cancer and immunoinflammatory disease-associated antibodies (or fragments thereof) taught in International Publication Number WO2018089788, the contents of which are herein incorporated by reference in their entirety. Such embodiments may include antibody Tremelimumab or fragments thereof. In certain embodiments, the payload region encodes antibody Tremelimumab or fragments thereof selected from SEQ ID NO: 9-16, as described in WO2018089788.

[0499] In some embodiments, payloads may encode cancer and immunoinflammatory disease-associated antibodies (or fragments thereof) taught in International Publication Number WO2016201388, the contents of which are herein incorporated by reference in their entirety. Such embodiments may include antibody anti-CD33 or fragments thereof. In certain embodiments, the payload region encodes antibody anti-CD33 or fragments thereof selected from SEQ ID NO: 248-251, as described in WO2016201388.

[0500] In some embodiments, payloads may encode cancer and immunoinflammatory disease-associated antibodies (or fragments thereof) taught in US Patent Publication Number US20180333503, the contents of which are herein incorporated by reference in their entirety. Such embodiments may include antibody Pembrolizumab or fragments thereof. In certain embodiment, the payload region encodes antibody Pembrolizumab or fragments thereof selected from SEQ ID NO: 20.29 as described in US20180333503.

[0501] In some embodiments, payloads may encode cancer and immunoinflammatory disease-associated antibodies (or fragments thereof) taught in International Publication Number WO2018089780, the contents of which are herein incorporated by reference in their entirety. Such embodiments may include antibody Durvalumab (Imfinzi, MEDI-4736, MEDI-4736) or fragments thereof. In certain embodiments, the payload region encodes antibody Durvalumab (Imfinzi, MEDI-4736, and MEDI-4736) or fragments thereof selected from SEQ ID NO: 1-8 as described in WO2018089780.

[0502] In some embodiments, payloads may encode cancer and immunoinflammatory disease-associated antibodies (or fragments thereof) taught in International Publication Number WO2010129469 and WO201012949, the contents of each of which are herein incorporated by reference in their entirety. Such embodiments may include antibody Adalimumab or fragments thereof. In certain embodiments, the payload region encodes the antibody Adalimumab or fragments thereof selected from SEQ ID NO: 76-83 as described in WO2010129469. In certain embodiments, the payload region encodes the antibody Adalimumab or fragments thereof selected from SEQ ID NO: 1-37 as described in WO2010129469.

[0503] In some embodiments, payloads may encode cancer and immunoinflammatory disease-associated antibodies (or fragments thereof) taught in International Publication Number WO2014028776 and in US Patent Publication Number US20190137523, the contents of each of which are herein incorporated by reference in their entirety. Such embodiments may include antibody Bevacizumab or fragments thereof. In certain embodiments, the payload region encodes antibody Bevacizumab or fragments thereof selected from SEQ ID NO: 68-75, as described in WO2014028778. In certain embodiments, the payload region encodes antibody Bevacizumab or fragments thereof selected from SEQ ID NO: 2-5, as described in US20190137523.

[0504] In some embodiments, payloads may encode cancer and immunoinflammatory disease-associated antibodies (or fragments thereof) taught in International Publication Number US20180221480, the contents of which are herein incorporated by reference in their entirety. Such embodiments may include antibody natalizumab or fragments thereof. In certain embodiments, the payload region encodes antibody natalizumab or fragments thereof selected from SEQ ID NO: 1-14, as described in US20180221480.

[0505] In some embodiments, payloads may encode cancer and immunoinflammatory disease-associated antibodies (or fragments thereof) taught in US Patent Publication Number US2018005106, the contents of which are herein incorporated by reference in their entirety. Such embodiments may include antibody Vedolizumab (Entyvio) or fragments thereof. In certain embodiments, the payload region encodes antibody Vedolizumab (Entyvio) or fragments thereof selected from SEQ ID NO: 1-13 as described in US20180051086.

[0506] In some embodiments, payloads may encode cancer and immunoinflammatory disease-associated antibodies (or fragments thereof) taught in US Patent Publication Number US2019009243, the contents of which are herein incorporated by reference in their entirety. Such embodiments may include antibody Eculizumab or fragments thereof. In certain embodiments, the payload region encodes antibody Eculizumab or fragments thereof selected from SEQ ID NO: 1-3, as described in US20190092843.

[0507] In some embodiments, payloads may encode cancer and immunoinflammatory disease-associated antibodies (or fragments thereof) taught in International Publication Number WO2019079549 and US Patent Publication Number US20170253653, the contents of each of which are herein incorporated by reference in their entirety. Such embodiments may include antibody Avelumab or fragments thereof. In certain embodiments, the payload region encodes antibody Avelumab or fragments thereof selected from SEQ ID NO: 3-4, as described in WO2019079549. In certain embodiments, the payload region encodes antibody Avelumab or fragments thereof selected from SEQ ID NO: 1.35, as described in US20170253653.

[0508] In some embodiments, payloads may encode cancer and immunoinflammatory disease-associated antibodies (or fragments thereof) taught in International Publication Number WO2019079549, the contents of which are herein incorporated by reference in their entirety. Such embodiments may include antibody anti-CD47 antibody Hu5f9-G4 Antibody or fragments thereof. In certain embodiments, the payload region encodes antibody anti-CD47 antibody Hu5f9-G4 Antibody or fragments thereof selected from SEQ ID NO: 1-2, as described in WO2019079549.

[0509] In some embodiments, payloads may encode cancer and immunoinflammatory disease-associated antibodies (or fragments thereof) taught in US Patent Publication Number US20190135920, the contents of which are herein incorporated by reference in their entirety. Such embodiments may include antibody Nivolumab or fragments thereof. In certain embodiments, the payload region encodes antibody Nivolumab or fragments thereof selected from SEQ ID NO: 1-36, as described in US20190135920.

[0510] In some embodiments, payloads may encode cancer and immunoinflammatory disease-associated antibodies (or fragments thereof) taught in International Publication Number WO2018140121 and WO2018147927, the contents of each of which are herein incorporated by reference in their entirety. Such embodiments may include antibody Golimumab or fragments thereof. In certain embodiments, the payload region encodes antibody Golimumab or fragments thereof selected from SEQ ID NO: 36-37, as described in WO2018140121 and WO2018147927.

[0511] In some embodiments, payloads may encode cancer and immunoinflammatory disease-associated antibodies (or fragments thereof) taught in US Patent Publication Number US20140212413, the contents of which are herein incorporated by reference in their entirety. Such embodiments may include antibody Infliximab (Remicade) or fragments thereof. In certain embodiments, the payload region encodes antibody Infliximab (Remicade) or fragments thereof selected from SEQ ID NO: 2-5, as described in US20140212413.

[0512] In some embodiments, payloads may encode cancer and immunoinflammatory disease-associated antibodies (or fragments thereof) taught in International Publication Number WO2019020606, the contents of which are herein incorporated by reference in their entirety. Such embodiments may include antibody Rituximab or fragments thereof. In certain embodiments, the payload region encodes antibody Rituximab or fragments thereof selected from SEQ ID NO: 1-20, as described in WO2019020606.

[0513] In some embodiments, payloads may encode cancer and immunoinflammatory disease-associated antibodies (or fragments thereof) taught in US Patent Publication Number US20190117769, the contents of which are herein incorporated by reference in their entirety. Such embodiments may include antibody Pertuzumab or fragments thereof. In certain embodiments, the payload region encodes antibody Pertuzumab or fragments thereof selected from SEQ ID NO: 11-12, 15-16, as described in US20190117769.

[0514] In some embodiments, payloads may encode cancer and immunoinflammatory disease-associated antibodies (or fragments thereof) taught in US Patent Publication Number US20190117769, the contents of which are herein incorporated by reference in their entirety. Such embodiments may include antibody Trastuzmab or fragments thereof. In certain embodiments, the payload region encodes antibody Trastuzmab or fragments thereof selected from SEQ ID NO: 13-14, as described in US20190117769.

[0515] In some embodiments, payloads may encode cancer and immunoinflammatory disease-associated antibodies (or fragments thereof) taught in US Patent Publication Number US20190016807, the contents of which are herein incorporated by reference in their entirety. Such embodiments may include antibody Atezolizumab or fragments thereof. In certain embodiments, the payload region encodes antibody Atezolizumab or fragments thereof selected from SEQ ID NO: 1-40 as described in US20190016807.

[0516] In some embodiments, payloads may encode cancer and immunoinflammatory disease-associated antibodies (or fragments thereof) taught in International Publication Number WO2013055922, the contents of which are herein incorporated by reference in their entirety. Such embodiments may include antibody Pepinemab or fragments thereof. In certain embodiments, the payload region encodes antibody Pepinemab or fragments thereof selected from SEQ ID NO: 9, 10, 17, 18 as described in WO2013055922.

[0517] In some embodiments, payloads may encode cancer and immunoinflammatory disease-associated antibodies (or fragments thereof) taught in International Publication Number WO2014093396, the contents of which are herein incorporated by reference in their entirety. Such embodiments may include anti blood dendritic cell antigen 2 (BDCA2) antibody or fragments thereof. Such embodiments may include antibody BIIB059 or fragments thereof.

[0518] In some embodiments, the payload region of the viral particle comprises one or more nucleic acid sequences encoding one or more of the cancer, inflammation and immune system payload antibody polypeptides listed in Table 9 of U.S. provisional patent application 62/844,433 (CII1-CII13310; SEQ ID NO: 6357-19665), the contents of which are herein incorporated by reference in their entirety.

[0519] In some embodiments, the payload region of the viral particle comprises one or more nucleic acid sequences encoding Priliximab, a fragment or variant thereof. As a non-limiting example, the payload region of the viral particle comprises one or more nucleic acid sequences encoding Priliximab may be used to treat, prevent and/or reduce the effects of multiple sclerosis. As another non-limiting example, the payload region of the viral particle comprises one or more nucleic acid sequences encoding Priliximab, a fragment or variant thereof may be used to treat, prevent and/or reduce the effects of Crohn's Disease.

[0520] In some embodiments, the payload region of the viral particle comprises one or more nucleic acid sequences encoding Rovelizumab, a fragment or variant thereof. As a non-limiting example, the payload region of the viral particle comprises one or more nucleic acid sequences encoding Rovelizumab, a fragment or variant thereof may be used to treat, prevent and/or reduce the effects of multiple sclerosis.

[0521] In some embodiments, the payload region of the viral particle comprises one or more nucleic acid sequences encoding Nerelimomab, a fragment or variant thereof. As a non-limiting example, the payload region of the viral particle comprises one or more nucleic acid sequences encoding Nerelimomab, a fragment or variant thereof may be used as an immunosuppressant.

[0522] In some embodiments, the payload region of the viral particle comprises one or more nucleic acid sequences encoding BAYX1351, a fragment or variant thereof. As a non-limiting example, the payload region of the viral particle comprises one or more nucleic acid sequences encoding BAYX1351, a fragment or variant thereof may be used as an immunosuppressant.

[0523] In some embodiments, the payload region of the viral particle comprises one or more nucleic acid sequences encoding Clenoliximab (also known as CE9γ4PE, IDEC-151 and PRIMATIZED®), a fragment or variant thereof. As a non-limiting example, the payload region of the viral particle comprises one or more nucleic acid sequences encoding Clenoliximab (also known as CE9γ4PE, IDEC-151 and PRIMATIZED®), a fragment or variant thereof may be used to treat, prevent or reduce the effects of rheumatoid arthritis and/or asthma. As a non-limiting example, the payload region of the viral particle comprises one or more nucleic acid sequences encoding the heavy chain of Clenoliximab (also known as CE9γ4PE, IDEC-151 and PRIMATIZED®), a fragment or variant thereof may be used to treat, prevent or reduce the effects of rheumatoid arthritis and/or asthma. As a non-limiting example, the payload region of the viral particle comprises one or more nucleic acid sequences encoding the light chain of Clenoliximab (also known as CE9γ4PE, IDEC-151 and PRIMATIZED®), a fragment or variant thereof may be used to treat, prevent or reduce the effects of rheumatoid arthritis and/or asthma. As a non-limiting example, the payload region of the viral particle comprises one or more nucleic acid sequences encoding the heavy chain of Clenoliximab (also known as CE9γ4PE, IDEC-151 and PRIMATIZED®) as described in U.S. Pat. No. 6,136,310 as SEQ ID NO: 11 (the contents of which are herein incorporated by reference in its entirety), a fragment or variant thereof may be used to treat, prevent or reduce the effects of rheumatoid arthritis and/or asthma. As a non-limiting example, the payload region of the viral particle comprises one or more nucleic acid sequences encoding the light chain of Clenoliximab (also known as CE9γ4PE, IDEC-151 and PRIMATIZED®) as described in U.S. Pat. No. 6,136,310 as SEQ ID NO: 5 (the contents of which are herein incorporated by reference in its entirety), a fragment or variant thereof may be used to treat, prevent or reduce the effects of rheumatoid arthritis and/or asthma.

[0524] In some embodiments, the payload region of the viral particle comprises one or more nucleic acid sequences encoding Maslimomab, a fragment or variant thereof. As a non-limiting example, the payload region of the viral particle comprises one or more nucleic acid sequences encoding Maslimomab, a fragment or variant thereof may be used as an immunosuppressant.

[0525] In some embodiments, the payload region of the viral particle comprises one or more nucleic acid sequences encoding Atorolimumab (also known as P3x22914G4), a fragment or variant thereof. As a non-limiting example, the payload region of the viral particle comprises one or more nucleic acid sequences encoding Atorolimumab (also known as P3x22914G4), a fragment or variant thereof may be used as an immunosuppressant.

[0526] In some embodiments, the payload region of the viral particle comprises one or more nucleic acid sequences encoding Vapaliximab (also known as 2D10), a fragment or variant thereof. As a non-limiting example, the payload region of the viral particle comprises one or more nucleic acid sequences encoding Vapaliximab (also known as 2D10), a fragment or variant thereof may be used as an immunosuppressant.

[0527] In some embodiments, the payload region of the viral particle comprises one or more nucleic acid sequences encoding Ziralimumab (also known as ABX-RB2, cem2.6), a fragment or variant thereof. As a non-limiting example, the payload region of the viral particle comprises one or more nucleic acid sequences encoding Ziralimumab (also known as ABX-RB2, cem2.6), a fragment or variant thereof may be used to treat, prevent and/or reduce the effects of cancer, inflammation and/or immune system disorders.

[0528] In some embodiments, the payload region of the viral particle comprises one or more nucleic acid sequences encoding Zolimomab aritox (also known as H65-ricin A chain immunotoxin and H65-RTA), a fragment or variant thereof. As a non-limiting example, the payload region of the viral particle comprises one or more nucleic acid sequences encoding Zolimomab aritox (also known as H65-ricin A chain immunotoxin and H65-RTA), a fragment or variant thereof may be used to treat, prevent or reduce the effects of systemic lupus erythematosus, graft-versus-host disease and/or cutaneous T cell lymphoma.

[0529] In some embodiments, the payload region of the viral particle comprises one or more nucleic acid sequences encoding Zanolimumab (also known as HuMax-CD4), a fragment or variant thereof. As a non-limiting example, the payload region of the viral particle comprises one or more nucleic acid sequences encoding Zanolmumab (also known as HuMax-CD4), a fragment or variant thereof may be used to treat, prevent or reduce the effects of rheumatoid arthritis, psoriasis and/or T-cell lymphoma.

[0530] In some embodiments, the payload region of the viral particle comprises one or more nucleic acid sequences encoding Bertilimumab (also known as CAT-213), a fragment or variant thereof. As a non-limiting example, the payload region of the viral particle comprises one or more nucleic acid sequences encoding Bertilimumab (also known as CAT-213), a fragment or variant thereof may be used to treat, prevent or reduce the effects of allergies.

[0531] In some embodiments, the payload region of the viral particle comprises one or more nucleic acid sequences encoding Pascolizumab (also known as SB-240683), a fragment or variant thereof. As a non-limiting example, the payload region of the viral particle comprises one or more nucleic acid sequences encoding Pascolizumab (also known as SB-240683), a fragment or variant thereof may be used to treat, prevent or reduce the effects of allergies.

[0532] In some embodiments, the payload region of the viral particle comprises one or more nucleic acid sequences encoding Odulimomab (also known as afolimomab, anti-LFA1 and ANTILFA), a fragment or variant thereof. As a non-limiting example, the payload region of the viral particle comprises one or more nucleic acid sequences encoding Odulimomab (also known as afolimomab, anti-LFA1 and ANTILFA), a fragment or variant thereof may be used to treat, prevent or reduce the effects of allograft rejection.

[0533] In some embodiments, the payload region of the viral particle comprises one or more nucleic acid sequences encoding Enlimomab pegol, a fragment or variant thereof. As a non-limiting example, the payload region of the viral particle comprises one or more nucleic acid sequences encoding Enlimomab pegol, a fragment or variant thereof may be used to treat, prevent or reduce the effects of renal transplant rejection.

[0534] In some embodiments, the payload region of the viral particle comprises a nucleic acid sequence encoding an antibody or a fragment thereof as described in United States Publication Nos. US20130122003, US20150056211, US20160069 US20150056211, US20160069894 or U.S. Pat. No. 7,524,496. In a non-limiting example, the antibody targets IL-6. In another non-limiting example, the antibody targets EGF.

### Antibodies for the Treatment of Blood and Blood Vessel Disease

[0535] In some embodiments, the payload region of the AAV particle comprises one or more nucleic acid sequences encoding blood and blood vessel disease-associated antibodies, variants or fragments thereof.

[0536] In some embodiments, the payload region of the AAV particle comprises one or more nucleic acid sequences encoding one or more of the payload antibody polypeptides listed in Table 5, or variants or fragments thereof.

[0537] In some embodiments, the payload region of the AAV particle comprises one or more nucleic acid sequences listed in Table 5, or variants or fragments thereof.

[0538] In some embodiments, the payload region of the AAV particle comprises a nucleic acid sequence encoding a payload antibody with at least 50% identity to one or more payload antibody polypeptides listed in Table 5. The encoded antibody polypeptide may have 50%, 51%, 52%, 53%, 54%, 55%, 56%, 57%, 58%, 59%, 60%, 61%, 62%, 63%, 64%, 65%, 66%, 67%, 68%, 69%, 70%, 71%, 72%, 73%, 74%, 75%, 76%, 77%, 78%, 79%, 80%. 81%, 82%, 83%, 84%, 85%, 86%, 87%, 88%, 89%, 90%, 91%, 92%, 93%, 94%, 95%,96%,97%, 98%, 99%, or 100% identity to one or more of the payload antibody polypeptides listed in Table 5, or variants or fragments thereof.

[0539] In some embodiments, the full sequence of the encoded antibody polypeptide may have 50%, 51%, 52%, 53%, 54%, 55%, 56%, 57%, 58%, 59%, 60%, 61%, 62%, 63%, 64%, 65%, 66%, 67%, 68%, 69%, 70%, 71%, 72%, 73%, 74%, 75%, 76%, 77%, 78%, 79%, 80%, 81%, 82%, 83%, 84%, 85%, 86%, 87%, 88%, 89%. 90%, 91%, 92%, 93%, 94%, 95%, 96%, 97%, 98%, 99%, or 100% identity to one or more of the payload antibody polypeptides listed in Table 5, or variants or fragments thereof.

[0540] In some embodiments, the variable region sequence(s) of the encoded antibody polypeptide may have 50%, 51%, 52%, 53%, 54%, 55%, 56%, 57%, 58%, 59%, 60%, 61%, 62%, 63%, 64%, 65%, 66%, 67%, 68%, 69%, 70%, 71%, 72%, 73%, 74%, 75%, 76%, 77%, 78%, 79%, 80%, 81%, 82%, 83%, 84%, 85%, 86%, 87%, 88%, 89%, 90%, 91%, 92%, 93%, 94%, 95%, 96%, 97%, 98%, 99%, or 100% identity to one or more of the payload antibody polypeptides listed in Table 5, or variants or fragments thereof.

[0541] In some embodiments, the heavy chain of the encoded antibody polypeptide may have 50%,51%,52%, 53%,54%, 55%, 56%, 57%, 58%, 59%, 60%, 61%, 62%, 63%, 64%, 65%, 66%, 67%, 68%, 69%, 70%, 71%, 72%, 73%, 74%, 75%, 76%,77%,78%, 79%, 80%, 81%, 82%, 83%, 84%, 85%, 86%, 87%,88%, 89%, 90%, 91%, 92%, 93%, 94%, 95%, 96%, 97%, 98%, 99%, or 100% identity to one or more of the payload heavy chain antibody polypeptides listed in Table 5, or variants or fragments thereof.

[0542] In some embodiments, the light chain of the encoded antibody polypeptide may have 50%, 51%, 52%,53%, 54%, 55%, 56%, 57%, 58%, 59%, 60%, 61%, 62%, 63%, 64%, 65%, 66%,67%, 68%, 69%, 70%, 71%, 72%, 73%, 74%, 75%, 76%, 77%, 78%, 79%, 80%, 81%, 82%, 83%, 84%, 85%, 86%, 87%, 88%, 89%, 90%, 91%, 92%, 93%, 94%, 95%, 96%, 97%, 98%, 99%, or 100% identity to one or more of the payload light chain antibody polypeptides listed in Table 5, or variants or fragments thereof.

[0543] In some embodiments, the CDR region of the encoded antibody polypeptide may have 50%, 51%, 52%, 53%, 54%, 55%, 56%, 57%, 58%, 59%, 60%, 61%, 62%, 63%, 64%, 65%, 66%, 67%, 68%, 69%, 70%, 71%, 72%, 73%, 74%, 75%, 76%, 77%, 78%, 79%, 80%,81%,82%, 83%,84%,85%, 86%, 87%, 88%, 89%, 90%,91%, 92%, 93%,94%,95%, 96%,97%,98%, 99%, or 100% identity to the CDRs of one or more of the payload antibody polypeptides listed in Table 5, or variants or fragments thereof.

[0544] In some embodiments, the payload antibody has 90% identity to one or more of the antibody polypeptides listed in Table 5, or variants or fragments thereof.

[0545] In some embodiments, the payload antibody has 91% identity to one or more of the antibody polypeptides listed in Table 5, or variants or fragments thereof.

[0546] In some embodiments, the payload antibody has 92% identity to one or more of the antibody polypeptides listed in Table 5, or variants or fragments thereof.

[0547] In some embodiments, the payload antibody has 93% identity to one or more of the antibody polypeptides listed in Table 5, or variants or fragments thereof.

[0548] In some embodiments, the payload antibody has 94% identity to one or more of the antibody polypeptides listed in Table 5, or variants or fragments thereof.

[0549] In some embodiments, the payload antibody has 95% identity to one or more of the antibody polypeptides listed in Table 5, or variants or fragments thereof.

[0550] In some embodiments, the payload antibody has 96% identity to one or more of the antibody polypeptides listed in Table 5, or variants or fragments thereof.

[0551] In some embodiments, the payload antibody has 97% identity to one or more of the antibody polypeptides listed in Table 5, or variants or fragments thereof.

[0552] In some embodiments, the payload antibody has 98% identity to one or more of the antibody polypeptides listed in Table 5, or variants or fragments thereof.

[0553] In some embodiments, the payload antibody has 99% identity to one or more of the antibody polypeptides listed in Table 5, or variants or fragments thereof.

[0554] In some embodiments, the payload antibody has 100% identity to one or more of the antibody polypeptides listed in Table 5, or variants or fragments thereof.

[0555] In some embodiments, the payload region of the AAV particle comprises a nucleic acid sequence with at least 50% identity to one or more nucleic acid sequences listed in Table 5, or variants or fragments thereof. The payload nucleic acid sequence may have 50%, 51%, 52%, 53%, 54%, 55%, 56%, 57%, 58%, 59%, 60%, 61%, 62%, 63%, 64%, 65%,66%,67%,68%, 69%, 70%, 71%, 72%, 73%, 74%, 75%, 76%, 77%, 78%, 79%, 80%, 81%, 82%, 83%, 84%, 85%, 86%, 87%, 88%, 89%, 90%, 91%, 92%, 93%, 94%, 95%, 96%, 97%, 98%, 99%, or 100% identity to one or more nucleic acid sequences listed in Table 5, or variants or fragments thereof.

[0556] In some embodiments, the payload nucleic acid sequence has 90% identity to one or more of the nucleic acid sequences listed in Table 5, or variants or fragments thereof.

[0557] In some embodiments, the payload nucleic acid sequence has 91% identity to one or more of the nucleic acid sequences listed in Table 5, or variants or fragments thereof.

[0558] In some embodiments, the payload nucleic acid sequence has 92% identity to one or more of the nucleic acid sequences listed in Table 5, or variants or fragments thereof.

[0559] In some embodiments, the payload nucleic acid sequence has 93% identity to one or more of the nucleic acid sequences listed in Table 5, or variants or fragments thereof.

[0560] In some embodiments, the payload nucleic acid sequence has 94% identity to one or more of the nucleic acid sequences listed in Table 5, or variants or fragments thereof.

[0561] In some embodiments, the payload nucleic acid sequence has 95% identity to one or more of the nucleic acid sequences listed in Table 5, or variants or fragments thereof.

[0562] In some embodiments, the payload nucleic acid sequence has 96% identity to one or more of the nucleic acid sequences listed in Table 5, or variants or fragments thereof.

[0563] In some embodiments, the payload nucleic acid sequence has 97% identity to one or more of the nucleic acid sequences listed in Table 5, or variants or fragments thereof.

[0564] In some embodiments, the payload nucleic acid sequence has 98% identity to one or more of the nucleic acid sequences listed in Table 5, or variants or fragments thereof.

[0565] In some embodiments, the payload nucleic acid sequence has 99% identity to one or more of the nucleic acid sequences listed in Table 5, or variants or fragments thereof.

[0566] In some embodiments, the payload nucleic acid sequence has 100% identity to one or more of the nucleic acid sequences listed in Table 5, or variants or fragments thereof.

[0567] In some embodiments, the payload antibody may be variants of any of the antibody polypeptides listed in Table 5, that exclude one or more amino acids designated as “X” or “x” in the described polypeptide sequence, wherein X may represent any amino acid. In some embodiments, the payload nucleic acid sequence may be variants of any of the nucleic acid sequences listed in Table 5, that exclude one or more nucleic acids designated as “n” or “N” in the described nucleic acid sequence, wherein n may represent any nucleic acid.

TABLE 5
Blood and blood vessel disease antibodies

| | | Type | | SEQ |
|---|---|---|---|---|
| Ab ID | Component | (PRT/DNA) | Reference | ID NO. |
| BLD1 | CDR | PRT | WO2018054813; SEQ ID NO: 2 | 7347 |
| BLD2 | CDR | PRT | WO2018054813; SEQ ID NO: 9 | 7348 |
| BLD3 | CDR | PRT | WO2018054813; SEQ ID NO: 4 | 7349 |
| BLD4 | CDR | PRT | WO2018054813; SEQ ID NO: 12 | 7350 |
| BLD5 | CDR | PRT | WO2018054813; SEQ ID NO: 15 | 7351 |
| BLD6 | CDR | PRT | WO2018054813; SEQ ID NO: 5 | 7352 |
| BLD7 | CDR | PRT | WO2018054813; SEQ ID NO: 16 | 7353 |
| BLD8 | CDR | PRT | WO2018054813; SEQ ID NO: 13 | 7354 |
| BLD9 | CDR | PRT | WO2018054813; SEQ ID NO: 1 | 7355 |
| BLD10 | CDR | PRT | WO2018054813; SEQ ID NO: 8 | 7356 |
| BLD11 | CDR | PRT | WO2018054813; SEQ ID NO: 6 | 7357 |
| BLD12 | CDR | PRT | WO2018054813; SEQ ID NO: 14 | 7358 |
| BLD13 | CDR | PRT | WO2018054813; SEQ ID NO: 3 | 7359 |
| BLD14 | CDR | PRT | WO2018054813; SEQ ID NO: 10 | 7360 |
| BLD15 | CDR | PRT | WO2018054813; SEQ ID NO: 11 | 7361 |
| BLD16 | CDR | PRT | U.S. Pat. No. 8,080,243; SEQ ID NO: 46 | 7362 |
| BLD17 | CDR | PRT | U.S. Pat. No. 8,080,243; SEQ ID NO: 39 | 7363 |
| BLD18 | CDR | PRT | U.S. Pat. No. 8,080,243; SEQ ID NO: 49 | 7364 |
| BLD19 | CDR | PRT | U.S. Pat. No. 8,080,243; SEQ ID NO: 37 | 7365 |
| BLD20 | CDR | PRT | U.S. Pat. No. 8,080,243; SEQ ID NO: 44 | 7366 |
| BLD21 | CDR | PRT | U.S. Pat. No. 8,080,243; SEQ ID NO: 9 | 7367 |
| BLD22 | CDR | PRT | U.S. Pat. No. 8,080,243; SEQ ID NO: 52 | 7368 |
| BLD23 | CDR | PRT | U.S. Pat. No. 8,080,243; SEQ ID NO: 45 | 7369 |
| BLD24 | CDR | PRT | U.S. Pat. No. 8,080,243; SEQ ID NO: 10 | 7370 |
| BLD25 | CDR | PRT | U.S. Pat. No. 8,080,243; SEQ ID NO: 48 | 7371 |
| BLD26 | CDR | PRT | U.S. Pat. No. 8,080,243; SEQ ID NO: 58 | 7372 |
| BLD27 | CDR | PRT | U.S. Pat. No. 8,080,243; SEQ ID NO: 47 | 7373 |
| BLD28 | CDR | PRT | U.S. Pat. No. 8,080,243; SEQ ID NO: 36 | 7374 |
| BLD29 | CDR | PRT | U.S. Pat. No. 8,080,243; SEQ ID NO: 56 | 7375 |
| BLD30 | CDR | PRT | U.S. Pat. No. 8,080,243; SEQ ID NO: 41 | 7376 |
| BLD31 | CDR | PRT | U.S. Pat. No. 8,080,243; SEQ ID NO: 57 | 7377 |
| BLD32 | CDR | PRT | U.S. Pat. No. 8,080,243; SEQ ID NO: 59 | 7378 |
| BLD33 | CDR | PRT | U.S. Pat. No. 8,080,243; SEQ ID NO: 34 | 7379 |
| BLD34 | CDR | PRT | U.S. Pat. No. 8,080,243; SEQ ID NO: 30 | 7380 |
| BLD35 | CDR | PRT | U.S. Pat. No. 8,080,243; SEQ ID NO: 51 | 7381 |
| BLD36 | CDR | PRT | U.S. Pat. No. 8,080,243; SEQ ID NO: 38 | 7382 |
| BLD37 | CDR | PRT | U.S. Pat. No. 8,080,243; SEQ ID NO: 43 | 7383 |
| BLD38 | CDR | PRT | U.S. Pat. No. 8,080,243; SEQ ID NO: 50 | 7384 |
| BLD39 | CDR | PRT | U.S. Pat. No. 8,080,243; SEQ ID NO: 29 | 7385 |
| BLD40 | CDR | PRT | U.S. Pat. No. 8,080,243; SEQ ID NO: 35 | 7386 |
| BLD41 | CDR | PRT | U.S. Pat. No. 8,080,243; SEQ ID NO: 13 | 7387 |
| BLD42 | CDR | PRT | U.S. Pat. No. 8,080,243; SEQ ID NO: 31 | 7388 |
| BLD43 | CDR | PRT | U.S. Pat. No. 8,080,243; SEQ ID NO: 55 | 7389 |
| BLD44 | CDR | PRT | U.S. Pat. No. 8,080,243; SEQ ID NO: 11 | 7390 |
| BLD45 | CDR | PRT | U.S. Pat. No. 8,080,243; SEQ ID NO: 32 | 7391 |
| BLD46 | CDR | PRT | U.S. Pat. No. 8,080,243; SEQ ID NO: 61 | 7392 |
| BLD47 | CDR | PRT | U.S. Pat. No. 8,080,243; SEQ ID NO: 42 | 7393 |
| BLD48 | CDR | PRT | U.S. Pat. No. 8,080,243; SEQ ID NO: 8 | 7394 |
| BLD49 | CDR | PRT | U.S. Pat. No. 8,080,243; SEQ ID NO: 40 | 7395 |
| BLD50 | CDR | PRT | U.S. Pat. No. 8,080,243; SEQ ID NO: 33 | 7396 |
| BLD51 | Fab | PRT | WO2017180936; SEQ ID NO: 2 | 7397 |
| BLD52 | Fab | PRT | WO2017180936; SEQ ID NO: 33 | 7398 |
| BLD53 | HC | DNA | WO2018054813; SEQ ID NO: 32 | 7399 |
| BLD54 | HC | DNA | WO2018054813; SEQ ID NO: 34 | 7400 |
| BLD55 | HC | DNA | U.S. Pat. No. 8,080,243; SEQ ID NO: 26 | 7401 |
| BLD56 | HC | PRT | WO2018093766; SEQ ID NO: 26 | 7402 |
| BLD57 | HC | PRT | WO2018093766; SEQ ID NO: 30 | 7403 |
| BLD58 | HC | PRT | WO2018093766; SEQ ID NO: 28 | 7404 |
| BLD59 | HC | PRT | WO2018054813; SEQ ID NO: 30 | 7405 |
| BLD60 | HC | PRT | WO2018054813; SEQ ID NO: 28 | 7406 |
| BLD61 | HC | PRT | WO2018054813; SEQ ID NO: 36 | 7407 |
| BLD62 | HC | PRT | WO2018054813; SEQ ID NO: 38 | 7408 |
| BLD63 | HC | PRT | WO2018134184; SEQ ID NO: 1 | 7409 |
| BLD64 | HC | PRT | U.S. Pat. No. 8,080,243; SEQ ID NO: 15 | 7410 |
| BLD65 | HC | PRT | WO2017180936; SEQ ID NO: 1 | 7411 |
| BLD66 | LC | DNA | WO2018054813; SEQ ID NO: 33 | 7412 |
| BLD67 | LC | DNA | WO2018054813; SEQ ID NO: 31 | 7413 |
| BLD68 | LC | DNA | U.S. Pat. No. 8,080,243; SEQ ID NO: 25 | 7414 |
| BLD69 | LC | PRT | WO2018093766; SEQ ID NO: 29 | 7415 |
| BLD70 | LC | PRT | WO2018093766; SEQ ID NO: 18 | 7416 |
| BLD71 | LC | PRT | WO2018093766; SEQ ID NO: 27 | 7417 |
| BLD72 | LC | PRT | WO2018093766; SEQ ID NO: 16 | 7418 |
| BLD73 | LC | PRT | WO2018093766; SEQ ID NO: 17 | 7419 |
| BLD74 | LC | PRT | WO2018054813; SEQ ID NO: 27 | 7420 |
| BLD75 | LC | PRT | WO2018054813; SEQ ID NO: 35 | 7421 |
| BLD76 | LC | PRT | WO2018054813; SEQ ID NO: 19 | 7422 |
| BLD77 | LC | PRT | WO2018054813; SEQ ID NO: 29 | 7423 |
| BLD78 | LC | PRT | WO2018054813; SEQ ID NO: 37 | 7424 |
| BLD79 | LC | PRT | WO2018134184; SEQ ID NO: 2 | 7425 |
| BLD80 | LC | PRT | U.S. Pat. No. 8,080,243; SEQ ID NO: 14 | 7426 |
| BLD81 | scFv | PRT | WO2018093766; SEQ ID NO: 113 | 7427 |
| BLD82 | scFv | PRT | WO2018093766; SEQ ID NO: 114 | 7428 |
| BLD83 | scFv | PRT | WO2018093766; SEQ ID NO: 115 | 7429 |
| BLD84 | scFv | PRT | WO2018093766; SEQ ID NO: 116 | 7430 |
| BLD85 | scFv | PRT | WO2018093766; SEQ ID NO: 117 | 7431 |
| BLD86 | scFv | PRT | WO2018093766; SEQ ID NO: 118 | 7432 |
| BLD87 | scFv | PRT | WO2018093766; SEQ ID NO: 120 | 7433 |
| BLD88 | scFv | PRT | WO2018093766; SEQ ID NO: 121 | 7434 |
| BLD89 | scFv | PRT | WO2018093766; SEQ ID NO: 122 | 7435 |
| BLD90 | scFv | PRT | WO2018093766; SEQ ID NO: 123 | 7436 |
| BLD91 | scFv | PRT | WO2018093766; SEQ ID NO: 128 | 7437 |
| BLD92 | scFv | PRT | WO2018093766; SEQ ID NO: 129 | 7438 |
| BLD93 | scFv | PRT | WO2018093766; SEQ ID NO: 119 | 7439 |
| BLD94 | scFv | PRT | WO2018093766; SEQ ID NO: 125 | 7440 |
| BLD95 | scFv | PRT | WO2018093766; SEQ ID NO: 126 | 7441 |
| BLD96 | scFv | PRT | WO2018093766; SEQ ID NO: 127 | 7442 |
| BLD97 | scFv | PRT | WO2018093766; SEQ ID NO: 130 | 7443 |
| BLD98 | scFv | PRT | WO2018093766; SEQ ID NO: 131 | 7444 |
| BLD99 | scFv | PRT | WO2018093766; SEQ ID NO: 132 | 7445 |
| BLD100 | scFv | PRT | WO2018093766; SEQ ID NO: 133 | 7446 |
| BLD101 | scFv-Fc | PRT | WO2018093766; SEQ ID NO: 14 | 7447 |
| BLD102 | scFv-Fc | PRT | WO2018093766; SEQ ID NO: 10 | 7448 |
| BLD103 | scFv-Fc | PRT | WO2018093766; SEQ ID NO: 13 | 7449 |
| BLD104 | scFv-Fc | PRT | WO2018093766; SEQ ID NO: 9 | 7450 |
| BLD105 | scFv-Fc | PRT | WO2018093766; SEQ ID NO: 12 | 7451 |
| BLD106 | scFv-Fc | PRT | WO2018093766; SEQ ID NO: 11 | 7452 |
| BLD107 | scFv-Fc | PRT | WO2018093766; SEQ ID NO: 7 | 7453 |
| BLD108 | scFv-Fc | PRT | WO2018093766; SEQ ID NO: 8 | 7454 |
| BLD109 | scFv-Fc | PRT | WO2018093766; SEQ ID NO: 6 | 7455 |
| BLD110 | VH | PRT | WO2018093766; SEQ ID NO: 39 | 7456 |
| BLD111 | VH | PRT | WO2018093766; SEQ ID NO: 59 | 7457 |
| BLD112 | VH | PRT | WO2018093766; SEQ ID NO: 33 | 7458 |
| BLD113 | VH | PRT | WO2018093766; SEQ ID NO: 47 | 7459 |
| BLD114 | VH | PRT | WO2018093766; SEQ ID NO: 37 | 7460 |
| BLD115 | VH | PRT | WO2018093766; SEQ ID NO: 45 | 7461 |
| BLD116 | VH | PRT | WO2018093766; SEQ ID NO: 25 | 7462 |
| BLD117 | VH | PRT | WO2018093766; SEQ ID NO: 41 | 7463 |
| BLD118 | VH | PRT | WO2018093766; SEQ ID NO: 23 | 7464 |
| BLD119 | VH | PRT | WO2018093766; SEQ ID NO: 22 | 7465 |
| BLD120 | VH | PRT | WO2018093766; SEQ ID NO: 24 | 7466 |
| BLD121 | VH | PRT | WO2018093766; SEQ ID NO: 19 | 7467 |
| BLD122 | VH | PRT | WO2018093766; SEQ ID NO: 20 | 7468 |
| BLD123 | VH | PRT | WO2018093766; SEQ ID NO: 21 | 7469 |
| BLD124 | VH | PRT | WO2018093766; SEQ ID NO: 35 | 7470 |
| BLD125 | VH | PRT | WO2018093766; SEQ ID NO: 43 | 7471 |
| BLD126 | VH | PRT | WO2018093766; SEQ ID NO: 67 | 7472 |
| BLD127 | VH | PRT | WO2018093766; SEQ ID NO: 51 | 7473 |
| BLD128 | VH | PRT | WO2018054813; SEQ ID NO: 20 | 7474 |
| BLD129 | VH | PRT | WO2018054813; SEQ ID NO: 18 | 7475 |
| BLD130 | VH | PRT | WO2018054813; SEQ ID NO: 22 | 7476 |
| BLD131 | VH | PRT | WO2018054813; SEQ ID NO: 24 | 7477 |
| BLD132 | VH | PRT | WO2018054813; SEQ ID NO: 26 | 7478 |
| BLD133 | VH | PRT | U.S. Pat. No. 8,080,243; SEQ ID NO: 23 | 7479 |
| BLD134 | VH | PRT | U.S. Pat. No. 8,080,243; SEQ ID NO: 22 | 7480 |
| BLD135 | VH | PRT | U.S. Pat. No. 8,080,243; SEQ ID NO: 20 | 7481 |
| BLD136 | VH | PRT | U.S. Pat. No. 8,080,243; SEQ ID NO: 21 | 7482 |
| BLD137 | VH | PRT | U.S. Pat. No. 8,080,243; SEQ ID NO: 54 | 7483 |
| BLD138 | VL | PRT | WO2018093766; SEQ ID NO: 52 | 7484 |
| BLD139 | VL | PRT | WO2018093766; SEQ ID NO: 42 | 7485 |
| BLD140 | VL | PRT | WO2018093766; SEQ ID NO: 44 | 7486 |
| BLD141 | VL | PRT | WO2018093766; SEQ ID NO: 36 | 7487 |
| BLD142 | VL | PRT | WO2018093766; SEQ ID NO: 32 | 7488 |
| BLD143 | VL | PRT | WO2018093766; SEQ ID NO: 62 | 7489 |
| BLD144 | VL | PRT | WO2018093766; SEQ ID NO: 48 | 7490 |
| BLD145 | VL | PRT | WO2018093766; SEQ ID NO: 58 | 7491 |
| BLD146 | VL | PRT | WO2018093766; SEQ ID NO: 34 | 7492 |
| BLD147 | VL | PRT | WO2018054813; SEQ ID NO: 25 | 7493 |
| BLD148 | VL | PRT | WO2018054813; SEQ ID NO: 17 | 7494 |
| BLD149 | VL | PRT | WO2018054813; SEQ ID NO: 21 | 7495 |
| BLD150 | VL | PRT | WO2018054813; SEQ ID NO: 23 | 7496 |
| BLD151 | VL | PRT | US20180134806; SEQ ID NO: 75 | 7497 |
| BLD152 | VL | PRT | U.S. Pat. No. 8,080,243; SEQ ID NO: 53 | 7498 |
| BLD153 | VL | PRT | U.S. Pat. No. 8,080,243; SEQ ID NO: 18 | 7499 |
| BLD154 | VL | PRT | U.S. Pat. No. 8,080,243; SEQ ID NO: 19 | 7500 |
| BLD155 | VL | PRT | U.S. Pat. No. 8,080,243; SEQ ID NO: 17 | 7501 |
| BLD156 | VL | PRT | U.S. Pat. No. 8,080,243; SEQ ID NO: 16 | 7502 |
| BLD157 | VL | PRT | U.S. Pat. No. 9,068,001; SEQ ID NO: 36 | 7503 |
| BLD158 | VL | PRT | U.S. Pat. No. 9,068,001; SEQ ID NO: 37 | 7504 |
| BLD159 | VL | PRT | U.S. Pat. No. 9,068,001; SEQ ID NO: 38 | 7505 |
| BLD160 | VL | PRT | U.S. Pat. No. 9,068,001; SEQ ID NO: 39 | 7506 |
| BLD161 | VL | PRT | U.S. Pat. No. 9,068,001; SEQ ID NO: 45 | 7507 |
| BLD162 | VL | PRT | U.S. Pat. No. 9,068,001; SEQ ID NO: 49 | 7508 |
| BLD163 | VL | PRT | U.S. Pat. No. 9,068,001; SEQ ID NO: 51 | 7509 |
| BLD164 | VH | PRT | U.S. Pat. No. 9,068,001; SEQ ID NO: 40 | 7510 |
| BLD165 | VH | PRT | U.S. Pat. No. 9,068,001; SEQ ID NO: 41 | 7511 |
| BLD166 | VH | PRT | U.S. Pat. No. 9,068,001; SEQ ID NO: 42 | 7512 |
| BLD167 | VH | PRT | U.S. Pat. No. 9,068,001; SEQ ID NO: 43 | 7513 |
| BLD168 | VH | PRT | U.S. Pat. No. 9,068,001; SEQ ID NO: 55 | 7514 |
| BLD169 | VH | PRT | U.S. Pat. No. 9,068,001; SEQ ID NO: 59 | 7515 |
| BLD170 | VH | PRT | U.S. Pat. No. 9,068,001; SEQ ID NO: 63 | 7516 |
| BLD171 | VH | PRT | U.S. Pat. No. 9,068,001; SEQ ID NO: 76 | 7517 |

[0568] In some embodiments, the payload region of the AAV particle comprises a nucleic acid sequence encoding a polypeptide which is an antibody, an antibody-based composition, or a fragment thereof. As a non-limiting example, the antibody may be one or more of the polypeptides listed in Table 5, or variants or fragments thereof. As another non-limiting example, the antibody may be one or more of the heavy chain sequences listed in Table 5. As a non-limiting example, the antibody may be one or more of the light chain sequences listed in Table 5, or variants or fragments thereof.

[0569] In some embodiments, the payload region of the AAV particle comprises a nucleic acid sequence encoding a polypeptide comprising a heavy chain and alight chain sequence listed in Table 5, or variants or fragments thereof. The payload region may also comprise a linker between the heavy and light chain sequences. The linker may be a sequence known in the art or described in Table 2.

[0570] In some embodiments, the payload region of the AAV particle comprises a nucleic acid sequence encoding a polypeptide comprising a heavy chain and alight chain sequence listed in Table 5, or variants or fragments thereof, where the heavy chain sequence is from a different antibody than the light chain sequence. The payload region may also comprise a linker between the heavy and light chain sequences. The linker may be a sequence known in the art or described in Table 2.

[0571] In some embodiments, the payload region comprises, in the 5′ to 3′ direction, an antibody light chain sequence, a linker and a heavy chain sequence. In another embodiment, the linker is not used.

[0572] In some embodiments, the payload region comprises a nucleic acid sequence encoding, in the 5 to 3′ direction, an antibody light chain sequence from Table 5, one or more linkers from Table 2 and a heavy chain sequence from Table 5.

[0573] In some embodiments, the payload region comprises, in the 5′ to 3′ direction, an antibody heavy chain sequence, a linker region (may comprise one or more linkers) and alight chain sequence. In another embodiment, the linker is not used.

[0574] In some embodiments, the payload region comprises a nucleic acid sequence encoding, in the 5 to 3′ direction, an antibody heavy chain sequence from Table 5, one or more linkers from Table 2, and alight chain sequence from Table 5.

[0575] In some embodiments, the payload region comprises a nucleic acid sequence encoding a single heavy chain. As a non-limiting example, the heavy chain is an amino acid sequence or fragment thereof described in Table 5.

[0576] Shown in Table 5 are a listing of antibodies and their polynucleotides and/or polypeptides sequences. These sequences may be encoded by or included in the AAV particles of the present disclosure. Variants or fragments of the antibody sequences described in Table 5 may be utilized in the AAV particles of the present disclosure.

[0577] In some embodiments, the AAV particles may comprise a viral genome, wherein one or more components may be codon-optimized. Codon-optimization may be achieved by any method known to one with skill in the art such as, but not limited to, by a method according to Genescript, EMBOSS, Bioinformatics, NUS, NUS2, Geneinfinity, IDT, NUS3, GregThatcher, Insilico, Molbio, N2P, Snapgene, and/or VectorNTI. Antibody heavy and/or light chain sequences within the same viral genome may be codon-optimized according to the same or according to different methods.

[0578] In some cases, the payload region of the AAV particles may encode one or more isoforms or variants of heavy and light chain antibody domains. Such variants may be humanized or optimized antibody domains comprising one or more complementarity determining regions (CDRs) from the heavy and light chains listed in Table 5. CDRs of the antibodies encoded by the viral genomes of the present disclosure may be 50%, 60%, 70%, 80%, 90%, 95% identical to CDRs listed in or incorporated in the sequences of Table 5. Methods of determining CDRs are well known in the art and are described herein. Payload regions may encode antibody variants with one or more heavy chain variable domain (VW) or light chain variable domain (V) derived from the antibody sequences in Table 5. In some cases, such variants may include bispecific antibodies. Bispecific antibodies encoded by payload regions may comprise variable domain pairs from two different antibodies.

[0579] In some embodiments, the AAV particles may comprise a heavy and a light chain of an antibody described herein and two promoters. As a non-limiting example, the AAV particles may comprise a nucleic acid sequence of a genome as described in FIG. 1 or FIG. 2 of US Patent Publication No. US20030219733, the contents of which are herein incorporated by reference in their entirety. As another non-limiting example, the AAV particles may be a dual-promoter AAV for antibody expression as described by Lewis et al. (J. of. Virology, September 2002, Vol. 76(17), p 8769-8775; the contents of which are herein incorporated by reference in their entirety).

[0580] Payload regions of the viral genomes may encode any blood and blood vessel disease-associated antibodies, not limited to those described in Table 5, including antibodies that are known in the art and/or antibodies that are commercially available. This may include fragments of such antibodies or antibodies that have been developed to comprise one or more of such fragments [e.g., variable domains or complementarity determining regions (CDRs)].

[0581] In some embodiments, the AAV particles may have a payload region comprising any of the blood and blood vessel disease-associated antibodies as described in International Publication Number WO2017048614, WO2017048902, WO2017049024, WO2017049035, WO2017049251, WO2017050820, WO2017050974, WO2017051002, WO2017051888, WO2017053703, WO2017053807, WO2017053889, WO2017053932, WO2017055273, WO2017055547, WO2017055612, WO2017055613, WO2017055614, WO2017055617, WO2017055908, WO2017058859, WO2017058944, WO2017059380, WO2017059878, WO2017060247, WO2017060504, WO2017062016, WO2017062456, WO2017062496, WO2017062672, WO2017062748, WO2017062888, WO2017062966, WO2017065203, WO2017065493, WO2017066760, WO2017070170, WO2017070364, WO2017070395, WO2017070423, WO2017070476, WO2017070527, WO2017070561, WO2017070613, WO2017070616, WO2017070622, WO2017070623, WO2017070624, WO2017070626, WO2017072361, WO2017074013, WO2017075052, WO2017075119, WO2017075325, WO2017075432, WO2017076916, WO2017077391, WO2017079591, WO2017079768, WO2017079831, WO2017079832, WO2017079833, WO2017079834, WO2017079835, WO2017081066, WO2017083314, WO2017083371, WO2017083488, WO2017083515, WO2017083750, WO2017085035, WO2017086627, WO2017088028, WO2017088821, WO2017088974, WO2017089334, WO2017089895, WO2017091487, WO2017093410, WO2017093985, WO2017095088, WO2017095486, WO2017095487, WO2017095875, WO2017095918, WO2017099712, WO2017100289, WO2017100305, WO2017100540, WO2017100597, WO2017106326, WO2017106453, WO2017106504, WO2017106656, WO2017106684, WO2017106859, WO2017109721, WO2017112536, WO2017112762, WO2017112775, WO2017112877, WO2017112944, WO2017114230, WO2017114401, WO2017114972, WO2017114973, WO2017114975, WO2017114976, WO2017117384, WO2017118307, WO2017118761, WO2017119434, WO2017119435, WO2017120222, WO2017120261, WO2017120344, WO2017120525, WO2017120534, WO2017123557, WO2017123636, WO2017123644, WO2017123646, WO2017125586, WO2017127468, WO2017127833, WO2017128534, WO2017132578, WO2017133175, WO2017133633, WO2017133639, WO2017133640, WO2017133673, WO2017134234, WO2017134301, WO2017134302, WO2017134305, WO2017134306, WO2017135791, WO2017136313, WO2017136820, WO2017137542, WO2017137583, WO2017137954, WO2017138471, WO2017139212, WO2017139276, WO2017139623, WO2017139975, WO2017140256, WO2017141980, WO2017142832, WO2017143406, WO2017144681, WO2017144896, WO2017147247, WO2017147383, WO2017147742, WO2017149122, WO2017149143, WO2017149513, WO2017151783, WO2017152085, WO2017152102, WO2017153567, WO2017155355, WO2017156298, WO2017156488, WO2017157948, WO2017158116, WO2017160104, WO2017160699, WO2017160700, WO2017162791, WO2017163049, WO2017165245, WO2017165464, WO2017165614, WO2017165683, WO2017165734, WO217165766, WO2017165864, WO2017170597, WO2017170847, WO2017172990, WO2017173256, WO2017173328, WO2017173349, WO2017174017, WO2017174586, WO2017176651, WO2017176760, WO2017176864, WO2017177013, WO2017177175, WO2017177333, WO2017178493, WO2017180530, WO2017180555, WO2017180936, WO2017180993, WO2017181021, WO2017181031, WO2017181039, WO2017181109, WO2017181119, WO2017181139, WO2017182603, WO2017184201, WO2017184973, WO2017185037, WO2017186121, WO2017186908, WO2017188570, WO2017189279, WO2017189556, WO2017189813, WO2017189827, WO2017189959, WO2017189963, WO2017190001, WO2017190100, WO2017191062, WO2017192470, WO2017192668, WO2017193059, WO2017193107, WO2017193115, WO2017194265, WO2017194782, WO2017194783, WO2017196426, WO2017197259, WO2017197263, WO2017197347, WO2017197376, WO2017198148, WO2017198741, WO2017201325, WO2017201340, WO2017201731, WO2017202387, WO2017202879, WO2017203450, WO2017205536, WO2017205538, WO2017205651, WO2017205694, WO2017205721, WO2017206773, WO2017207574, WO2017207739, WO2017208210, WO2017210058, WO2017211313, WO2017211731, WO2017212462, WO2017214186, WO2017214207, WO2017214298, WO2017214338, WO2017214706, WO2017215585, WO2017215590, WO2017216724, WO2017218355, WO2017218515, WO2017218533, WO2017218824, WO2017218825, WO2017219025, WO217219029, WO2017219093, WO2017219687, WO2017219690, WO2017221128, WO2017222330, WO2017222337, WO2017223283, WO2017223284, WO2017223286, WO2018004283, WO2018005276, WO2018005551, WO2018005556, WO2018005559, WO2018005697, WO2018005904, WO2018006092, WO2018007258, WO2018007314, WO2018007570, WO2018007922, WO2018007923, WO2018007924, WO2018007999, WO2018009624, WO2018009732, WO2018009811, WO2018009894, WO2018009921, WO2018010140, WO2018010789, WO2018011073, WO2018011283, WO2018011344, WO2018011353, WO2018011421, WO2018011584, WO2018013563, WO2018013917, WO2018013918, WO2018014126, WO2018016884, WO2018017714, WO2018017797, WO2018017996, WO2018022762, WO2018022786, WO2018023100, WO2018023121, WO2018023136, WO2018026018, WO2018026722, WO2018026969, WO2018027155, WO2018029124, WO2018030806, WO2018031408, WO2018031424, WO2018032638, WO2018035001, WO2018035107, WO2018035119, WO2018035210, WO2018036852, WO2018037000, WO2018037001, WO2018038243, WO2018039068, WO2018044105, WO2018044619, WO2018044640, WO2018044903, WO2018045018, WO2018045054, WO2018045325, WO2018047154, WO2018047894, WO2018048234, WO2018049053, WO2018049474, WO2018050027, WO2018050028, WO2018050783, WO2018052153, WO2018052827, WO2018053029, WO2018053597, WO2018054240, WO2018054241, WO2018057823, WO2018058002, WO2018064205, WO2018064602, WO2018064611, WO2018065552, WO2018069500, WO2018069927, WO2018070390, WO2018070479, WO2018071500, WO2018071624, WO2018071796, WO2018071871, WO2018071873, WO2018071913, WO2018073363, WO2018073680, WO2018075378, WO2018075408, WO2018075600, WO2018075621, WO2018075792, WO2018075794, WO2018075807, WO2018075813, WO2018075820, WO2018075960. WO2018075980, WO2018076024, WO2018077208, WO2018077775, WO2018077893, WO2018081282, WO2018081370, WO2018081448, WO2018081649, WO2018081754, WO2018081755, WO2018081832, WO2018081897, WO2018081898, WO2018083071, WO2018083248, WO2018083633, WO2018083692, WO2018084236, WO2018084836, WO2018085400. WO2018085599, WO2018085731, WO2018086585, WO2018086605, WO2018087644, WO2018088850, WO2018089305, WO2018089532, WO2018089890, WO2018090057, WO2018091661, WO2018093766, WO2018094021, WO2018094112, WO2018094144, WO2018094282, WO2018098277, WO2018099614, WO2018100036, WO2018101470, WO2018102589, WO2018102597, WO2018102612, WO2018102682, WO2018102785, WO2018102786, WO2018102787, WO2018102795, WO2018104554, WO2018104562, WO2018105560, WO2018106645, WO2018106732, WO2018106776, WO2018106781, WO2018106862, WO2018107058, WO2018107069, WO2018109228, WO2018109588, WO2018109663, WO2018112426, WO2018112549, WO2018113781, WO2018115225, WO2018115319, WO2018115885, WO2018115887, WO2018116178, WO2018116255, WO2018116267, WO2018118713, WO2018118754, WO2018119001, WO2018119171, WO2018119279, WO2018122053, WO2018124107, WO2018124121, WO2018124277, WO2018126259, WO2018126317, WO2018127610, WO2018127787, WO2018127791, WO2018128779, WO2018128939, WO2018128973, WO2018129329, WO2018129395, WO2018129400, WO2018129533, WO2018130513, WO2018130657, WO2018132423, WO2018133837, WO2018134691, WO2018134787, WO2018134817, WO2018135653, WO2018136163, WO2018136553, WO2018136562, WO2018136570, WO2018136825, WO2018136910, WO2018137705, WO2018138297, WO2018138681, WO2018138709, WO2018139404, WO2018140242, WO2018140510, WO2018140660, WO2018140725, WO2018140729, WO2018140733, WO2018140831, WO2018141863, WO2018141964, WO2018142322, WO2018144410, WO2018144425, WO2018144999, WO2018145075, WO2018145125, WO2018146074, WO2018146253, WO2018146549, WO2018146594, WO2018147245, WO2018148224, WO2018148476, WO2018151816, WO2018152181, WO2018152359, WO2018152687, WO2018153340, WO2018153372, WO2018154392, WO2018156494, WO2018157169, WO2018158632, WO2018159845, WO2018160731, WO2018160841, WO2018160897, WO2018161017, WO2018162749, WO2018164441, WO2018165062, WO2018165089, WO2018165228, WO2018165475, WO2018166468, WO2018166495, WO2018167267, WO2018168768, WO2018168769, WO2018168779, WO2018169948, WO2018169993, WO2018170145, WO2018170188, WO2018170256, WO2018170338, WO2018170351, WO2018174274, WO2018174408, WO2018175319, WO2018175476, WO2018175752, WO2018175790, WO2018175833, WO2018176132, WO2018176844, WO2018177967, WO2018178047, WO2018178122, WO2018178123, WO2018178307, WO2018178352, WO2018178354, WO2018181870, WO2018181935, WO2018182284, WO2018183216, WO2018183219, WO2018183459, WO2018185110, WO2018185232, WO2018185709, WO2018187332, WO2018187350, WO2018187613, WO2018187682, WO2018187791, WO2018187799, WO2018188331, WO2018191479, WO2018191502, WO2018191548, WO2018191660, WO2018191718, WO2018191723, WO2018193427, WO2018193457, WO2018195008, WO2018195034, WO2018195283, WO2018195418, WO2018195506, WO2018195912, WO2018197492, WO2018200422, WO2018200818, WO2018201014, WO2018201087, WO2018203289, WO2018204363, WO2018204427, WO2018204520, WO2018204677, WO2018204679, WO2018204757, WO2018204868, WO2018204871, WO2018204895, WO2018205917, WO2018208091, WO2018208121, WO2018208625, WO2018208670, WO2018208709, WO2018208856, WO2018209344, WO2018213297, WO2018213316, WO2018213331, WO2018213430, WO2018213592, WO2018213679, WO2018215571, WO2018215614, WO2018215768, WO2018217116, WO2018217227, WO2018218083, WO2018218185, WO2018218215, WO2018218219, WO2018218222, WO2018218240, WO2018218352, WO2018220584, WO2018221521, WO2018222019, WO2018222433, WO2018222901, WO2018222935, WO2018223051, WO2018223098, WO2018223101, WO2018223182, WO2018224550, WO2018225041, WO2018226339, WO2018226580, WO2018226776, WO2018226833, WO2018228406, WO2018229193, WO2018229194, WO2018229195, WO2018229197, WO2018229303, WO2018229612, WO2018231254, WO2018232088, WO2018232188, WO2018232278, WO2018232366, WO2018232467, WO2018233333, WO2018234383, WO2018234575, WO2018234576, WO2018237064, WO2018237157, WO2018237173, WO2018237192, WO2018237287, WO2018237338, WO2019000620, WO2019001560, WO2019003074, WO2019003162, WO2019003164, WO2019004831, WO2019005634, WO2019005635, WO2019005636, WO2019005638, WO2019005756, WO2019005847, WO2019006280, WO2019008123, WO2019009231, WO2019009407, WO2019009419, WO2019009879, WO2019010219, WO2019010224, WO2019010486, WO2019011167, WO2019012014, WO2019013392, WO2019013394, WO2019014360, WO2019014623, WO2019014768, WO2019018757, WO2019018828, WO2019023056, WO2019023148, WO2019023347, WO2019023396, WO2019023410, WO2019023482, WO2019023564, WO2019025484, WO2019025908, WO2019027903, WO2019028283, WO2019028292. WO2019028427, WO2019028530, WO2019030757, WO2019031938, WO2019031939, WO2019032661, WO2019032662, WO2019032663, WO2019032927, WO2019032929, WO2019032945, WO2019032955, WO2019033046, WO2019033057, WO2019035005, WO2019035034, WO2019036460, WO2019040390, WO2019040471, WO2019040649, WO2019042119, WO2019042285, WO2019042889, WO2019043065, WO2019045452, WO2019045856, WO2019046225, WO2019046321, WO2019046600, WO2019046817, WO2019047921, WO2019047932, WO2019049967, WO2019050326, WO2019050935, WO2019051132, WO2019051335, WO2019051397, WO2019051470, WO2019052562, WO2019054460, WO2019054819, WO2019055399, WO2019055537, WO2019055631, WO2019055841, WO2019056099, WO2019057102, WO2019057992, WO2019060653, WO2019062831, WO2019062871, WO2019065795, WO2019066617, WO2019066620, WO2019067499, WO2019067540, WO2019067805, WO2019069229, WO2019070577, WO2019070680, WO2019070714, WO2019070740, WO2019071205, WO2019074333, WO2019074912, WO2019075270, WO2019075385, WO2019075413, WO2019075519, WO2019078697, WO2019079569, WO2019079772, WO2019079809, WO2019081595, WO2019081692, WO2019081902, WO2019084024, WO2019084053, WO2019084057, WO2019084060, WO2019084064, WO2019084067, WO2019084249, WO2019084307, WO2019084332, WO2019084438, WO2019084460, WO2019084692, WO2019085804, WO2019086512. WO2019086580, WO2019087087, WO2019087115, WO2019087151, WO2019088658, WO2019089395, WO2019089473, WO2019089592, WO2019089610, WO2019089755, WO2019089848, WO2019089855, WO2019089858, WO2019090002, WO2019090003, WO2019090004, WO2019090069, WO2019090074, WO2019090076, WO2019090078, WO2019090081, WO2019090082, WO2019090085, WO2019090088, WO2019090090, WO2019090134, WO2019090263, WO2019091384, WO2019092505, WO2019092677, WO2019094533, WO2019094576, WO2019094578, WO2019094595, WO2019094608, WO2019094700, WO2019094938, WO2019094983, WO2019097244, WO2019099479, WO2019099483, WO2019099639, WO2019099744, WO2019099993, WO2017180936, WO2019088143, WO2019046912, WO2019035055, WO2019012019, WO2018234543, WO2018224439, WO2018211529, WO2018156741, WO2018135501, WO2018113788, WO2018111010, WO2018054813, WO2018022844, WO2018021450, WO2017219034, and WO2017076967, the contents of each of which are herein incorporated by reference in their entirety.

[0582] In some embodiments, payloads may encode blood and blood vessel disease-associated antibodies (or fragments thereof) as described in Arenas-Ramirez et al, (Sci Transl Med, November 2016, Vol. 8(367), p 367ra166; the contents of which are herein incorporated by reference in their entirety). Such embodiments may include antibody NARA1 or fragments thereof.

[0583] In some embodiments, payloads may encode blood and blood vessel disease-associated antibodies (or fragments thereof) as described in Liu et al. (Molecular Therapy; February 2018, Vol. 26(2), p. 542-549, the contents of which are herein incorporated by reference in their entirety). Such embodiments may include antibody AAV8-antiVEGFfab (RGX-314) or fragments thereof. In some embodiments, antibody AAV8-antVEGFfab (RGX-314) may be used for the treatment of patients suffering from neovascular age-related macular degeneration (NVAMD). In some embodiments, payloads may encode VEGF associated antibodies (or fragments thereof) described in International Publication WO2017180936; the contents of which are herein incorporated by reference in their entirety. The payload region may encode a heavy chain antibody, such as, but not limited to, SEQ ID NO: 2 of International Publication Number WO2017180936. In some embodiments, the payload region may encode alight chain antibody, such as, but not limited to, SEQ ID NO: 1 of International Publication Number WO2017180936. In some embodiments, the payload may be SEQ ID NO: 24, 35-44 of International Publication Number WO2017180936. Such embodiments may include antibody Ranibizumab or fragments.

[0584] In some embodiments, payloads may encode blood and blood vessel disease-associated antibodies (or fragments thereof) taught in U.S. Pat. No. 8,080,243, the contents of which are herein incorporated by reference in their entirety. Such embodiments may include antibody Bococizumab or fragments thereof. In certain embodiments, the payload region encodes antibody Bococizumab or fragments thereof selected from SEQ ID NO: 53-54, as described in U.S. Pat. No. 8,080,243.

[0585] In some embodiments, payloads may encode blood and blood vessel disease-associated antibodies (or fragments thereof) taught in International Publication Number WO201805413, the contents of which are herein incorporated by reference in their entirety. Such embodiments may include antibodies 1A6, 1A6, TPP-3238, TPP-3290, TPP-3577, TPP-3583, or fragments thereof. In certain embodiments, the payload region encodes antibodies 1A6, 1A6, TPP-3238, TPP-3290, TPP-3577, TPP-3583, or fragments thereof selected from SEQ ID NO: 21-38, as described in WO2018054813.

[0586] In some embodiments, payloads may encode blood and blood vessel disease-associated antibodies (or fragments thereof) taught in International Publication Number WO2018093766, the contents of which are herein incorporated by reference in their entirety. Such embodiments may include antibodies 6C12, TPP-4935, TPP-5906, TPP-5907, TPP-7776, TPP-7777, TPP-7778, TPP-7779, TPP-7781, TPP-7782, TPP-7783, TPP-7787, TPP-7788, TPP-7789, TPP-7790, TPP-7791, TPP-7792, TPP-7793, TPP-7794, TPP-7795, TPP-7796, TPP-7797, or fragments thereof. In certain embodiments, the payload region antibodies 6C12, TPP-4935, TPP-5906, TPP-5907, TPP-7776, TPP-7777, TPP-7778, TPP-7779, TPP-7781, TPP-7782, TPP-7783, TPP-7787, TPP-7788, TPP-7789, TPP-7790, TPP-7791, TPP-7792, TPP-7793, TPP-7794, TPP-7795, TPP-7796, TPP-7797, or fragments thereof selected from SEQ ID NO: 16-67, as described in WO2018093766.

[0587] In some embodiments, payloads may encode blood and blood vessel disease-associated antibodies (or fragments thereof) taught in International Publication Number WO2018134184, the contents of which are herein incorporated by reference in their entirety. Such embodiments may include antibody BAY1213790, or fragments thereof. In certain embodiments, the payload region antibody BAY1213790, or fragments thereof selected from SEQ ID NO: 1-2, as described in WO2018134184.

[0588] In some embodiments, payloads may encode blood and blood vessel disease-associated antibodies (or fragments thereof) taught in US Patent Publication Number US20180134806, the contents of which are herein incorporated by reference in their entirety. Such embodiments may include antibody CSL312 or 3F7 Factor XIIa antagonist monoclonal antibody or fragments thereof. In certain embodiments, the payload region encodes antibody CSL312 or 3F7 Factor XIIa antagonist monoclonal antibody or fragments thereof selected from SEQ ID NO: 6-77, as described in US20180134806.

### Antibodies for the Treatment of Respiratory Diseases

[0589] In some embodiments, the payload region of the AAV particle comprises one or more nucleic acid sequences encoding respiratory disease-associated antibodies, variants or fragments thereof.

[0590] In some embodiments, the payload region of the AAV particle comprises one or more nucleic acid sequences encoding one or more of the payload antibody polypeptides listed in Table 6, or variants or fragments thereof.

[0591] In some embodiments, the payload region of the AAV particle comprises one or more nucleic acid sequences listed in Table 6 or variants or fragments thereof.

[0592] In some embodiments, the payload region of the AAV particle comprises a nucleic acid sequence encoding a payload antibody with at least 50% identity to one or more payload antibody polypeptides listed in Table 6. The encoded antibody polypeptide may have 50%, 51%, 52%, 53%, 54%, 55%, 56%, 57%, 58%, 59%, 60%, 61%, 62%, 63%, 64%, 65%, 66%, 67%, 68%, 69%, 70%, 71%, 72%, 73%, 74%, 75%, 76%, 77%, 78%, 79%, 80%, 81%, 82%, 83%, 84%, 85%, 86%, 87%, 88%, 89%, 90%, 91%, 92%, 93%, 94%, 95%, 96%, 97%, 98%, 99%, or 100% identity to one or more of the payload antibody polypeptides listed in Table 6, or variants or fragments thereof.

[0593] In some embodiments, the full sequence of the encoded antibody polypeptide may have 50%, 51%, 52%, 53%, 54%, 55%, 56%, 57%, 58%, 59%, 60%, 61%, 62%, 63%, 64%, 65%, 66%, 67%, 68%, 69%, 70%, 71%, 72%, 73%, 74%, 75%, 76%, 77%, 78%, 79%, 80%, 81%, 82%, 83%, 84%, 85%, 86%, 87%, 88%, 89%, 90%, 91%, 92%, 93%, 94%, 95%, 96%, 97%, 98%, 99%, or 100% identity to one or more of the payload antibody polypeptides listed in Table 6, or variants or fragments thereof.

[0594] In some embodiments, the variable region sequence(s) of the encoded antibody polypeptide may have 50%, 51%, 52%, 53%, 54%, 55%, 56%, 57%, 58%, 59%, 60%, 61%, 62%, 63%, 64%, 65%, 66%, 67%, 68%, 69%, 70%, 71%, 72%, 73%, 74%, 75%, 76%, 77%, 78%, 79%, 80%, 81%, 82%, 83%, 84%, 85%, 86%, 87%, 88%, 89%, 90%, 91%, 92%, 93%, 94%, 95%, 96%, 97%, 98%, 99%, or 100% identity to one or more of the payload antibody polypeptides listed in Table 6, or variants or fragments thereof.

[0595] In some embodiments, the heavy chain of the encoded antibody polypeptide may have 50%, 51%, 52%, 53%, 54%, 55%, 56%, 57%, 58%, 59%, 60%, 61%, 62%,63%,64%, 65%, 66%,67%, 68%, 69%, 70%, 71%, 72%, 73%, 74%, 75%, 76%, 77%, 78%, 79%, 80%, 81%, 82%, 83%, 84%, 85%, 86%, 87%, 88%, 89%, 90%, 91%, 92%, 93%, 94%, 95%, 96%, 97%, 98%, 99%, or 100% identity to one or more of the payload heavy chain antibody polypeptides listed in Table 6, or variants or fragments thereof.

[0596] In some embodiments, the light chain of the encoded antibody polypeptide may have 50%, 51%, 52%,53%, 54%, 55%, 56%, 57%, 58%, 59%, 60%, 61%, 62%,63%, 64%, 65%, 66%, 67%, 68%, 69%, 70%, 71%, 72%, 73%, 74%, 75%, 76%, 77%, 78%, 79%, 80%, 81%, 82%, 83%, 84%, 85%, 86%, 87%, 88%, 89%, 90%, 91%, 92%, 93%, 94%, 95%, 96%, 97%, 98%, 99%, or 100% identity to one or more of the payload light chain antibody polypeptides listed in Table 6, or variants or fragments thereof.

[0597] In some embodiments, the CDR region of the encoded antibody polypeptide may have 50%, 51%, 52%, 53%, 54%, 55%, 56%, 57%, 58%, 59%, 60%, 61%, 62%, 63%, 64%, 65%, 66%, 67%, 68%, 69%, 70%, 71%, 72%, 73%, 74%, 75%, 76%, 77%, 78%, 79%, 80%, 81%, 82%, 83%, 84%, 85%, 86%, 87%, 88%, 89%, 90%, 91%, 92%, 93%, 94%, 95%, 96%, 97%, 98%, 99%, or 100% identity to the CDRs of one or more of the payload antibody polypeptides listed in Table 6, or variants or fragments thereof.

[0598] In some embodiments, the payload antibody has 90% identity to one or more of the antibody polypeptides listed in Table 6, or variants or fragments thereof.

[0599] In some embodiments, the payload antibody has 91% identity to one or more of the antibody polypeptides listed in Table 6, or variants or fragments thereof.

[0600] In some embodiments, the payload antibody has 92% identity to one or more of the antibody polypeptides listed in Table 6, or variants or fragments thereof.

[0601] In some embodiments, the payload antibody has 93% identity to one or more of the antibody polypeptides listed in Table 6, or variants or fragments thereof.

[0602] In some embodiments, the payload antibody has 94% identity to one or more of the antibody polypeptides listed in Table 6, or variants or fragments thereof.

[0603] In some embodiments, the payload antibody has 95% identity to one or more of the antibody polypeptides listed in Table 6, or variants or fragments thereof.

[0604] In some embodiments, the payload antibody has 96% identity to one or more of the antibody polypeptides listed in Table 6, or variants or fragments thereof.

[0605] In some embodiments, the payload antibody has 97% identity to one or more of the antibody polypeptides listed in Table 6, or variants or fragments thereof.

[0606] In some embodiments, the payload antibody has 98% identity to one or more of the antibody polypeptides listed in Table 6, or variants or fragments thereof.

[0607] In some embodiments, the payload antibody has 99% identity to one or more of the antibody polypeptides listed in Table 6, or variants or fragments thereof.

[0608] In some embodiments, the payload antibody has 100% identity to one or more of the antibody polypeptides listed in Table 6, or variants or fragments thereof.

[0609] In some embodiments, the payload region of the AAV particle comprises a nucleic acid sequence with at least 50% identity to one or more nucleic acid sequences listed in Table 6, or variants or fragments thereof. The payload nucleic acid sequence may have 50%, 51%, 52%, 53%, 54%, 55%, 56%, 57%, 58%, 59%, 60%, 61%, 62%, 63%, 64%, 65%,6%, 67%, 68%, 69%, 70%, 71%, 72%, 73%, 74%, 75%, 76%, 77%, 78%, 79%, 80%, 81%, 82%, 83%, 84%, 85%, 86%, 87%, 88%, 89%, 90%, 91%, 92%, 93%, 94%, 95%, 96%, 97%, 98%, 99%, or 100% identity to one or more nucleic acid sequences listed in Tables 6, or variants or fragments thereof.

[0610] In some embodiments, the payload nucleic acid sequence has 90% identity to one or more of the nucleic acid sequences listed in Table 6, or variants or fragments thereof.

[0611] In some embodiments, the payload nucleic acid sequence has 91% identity to one or more of the nucleic acid sequences listed in Table 6, or variants or fragments thereof.

[0612] In some embodiments, the payload nucleic acid sequence has 92% identity to one or more of the nucleic acid sequences listed in Table 6, or variants or fragments thereof.

[0613] In some embodiments, the payload nucleic acid sequence has 93% identity to one or more of the nucleic acid sequences listed in Table 6, or variants or fragments thereof.

[0614] In some embodiments, the payload nucleic acid sequence has 94% identity to one or more of the nucleic acid sequences listed in Table 6, or variants or fragments thereof.

[0615] In some embodiments, the payload nucleic acid sequence has 95% identity to one or more of the nucleic acid sequences listed in Table 6, or variants or fragments thereof.

[0616] In some embodiments, the payload nucleic acid sequence has 96% identity to one or more of the nucleic acid sequences listed in Table 6, or variants or fragments thereof.

[0617] In some embodiments, the payload nucleic acid sequence has 97% identity to one or more of the nucleic acid sequences listed in Table 6, or variants or fragments thereof.

[0618] In some embodiments, the payload nucleic acid sequence has 98% identity to one or more of the nucleic acid sequences listed in Table 6, or variants or fragments thereof.

[0619] In some embodiments, the payload nucleic acid sequence has 99% identity to one or more of the nucleic acid sequences listed in Table 6, or variants or fragments thereof.

[0620] In some embodiments, the payload nucleic acid sequence has 100% identity to one or more of the nucleic acid sequences listed in Table 6, or variants or fragments thereof.

[0621] In some embodiments, the payload antibody may be variants of any of the antibody polypeptides listed in Table 6, that exclude one or more amino acids designated as “X” or “x” in the described polypeptide sequence, wherein X may represent any amino acid. In some embodiments, the payload nucleic acid sequence may be variants of any of the nucleic acid sequences listed in Table 6, that exclude one or more nucleic acids designated as “n” or “N” in the described nucleic acid sequence, wherein n may represent any nucleic acid.

TABLE 6
Respiratory disease antibodies

| | | Type | | SEQ |
|---|---|---|---|---|
| Ab ID | Component | (PRT/DNA) | Reference | ID NO |
| RSP1 | HC | PRT | US20120027754; SEQ ID NO: 1 | 7518 |
| RSP2 | HC | PRT | US20120027754; SEQ ID NO: 3 | 7519 |
| RSP3 | HC | PRT | US20120027754; SEQ ID NO: 78 | 7520 |
| RSP4 | HC | PRT | US20120027754; SEQ ID NO: 79 | 7521 |
| RSP5 | HC | PRT | US20120027754; SEQ ID NO: 80 | 7522 |
| RSP6 | HC | PRT | US20120027754; SEQ ID NO: 81 | 7523 |
| RSP7 | HC | PRT | US20120027754; SEQ ID NO: 144 | 7524 |
| RSP8 | HC | PRT | US20120027754; SEQ ID NO: 145 | 7525 |
| RSP9 | HC | PRT | WO2017049024; SEQ ID NO: 60 | 7526 |
| RSP10 | LC | PRT | US20120027754; SEQ ID NO: 2 | 7527 |
| RSP11 | LC | PRT | US20120027754; SEQ ID NO: 4 | 7528 |
| RSP12 | LC | PRT | US20120027754; SEQ ID NO: 75 | 7529 |
| RSP13 | LC | PRT | US20120027754; SEQ ID NO: 76 | 7530 |
| RSP14 | LC | PRT | US20120027754; SEQ ID NO: 77 | 7531 |
| RSP15 | LC | PRT | US20120027754; SEQ ID NO: 86 | 7532 |
| RSP16 | LC | PRT | US20120027754; SEQ ID NO: 92 | 7533 |
| RSP17 | LC | PRT | US20120027754; SEQ ID NO: 93 | 7534 |
| RSP18 | LC | PRT | US20120027754; SEQ ID NO: 98 | 7535 |
| RSP19 | LC | PRT | US20120027754; SEQ ID NO: 135 | 7536 |
| RSP20 | LC | PRT | US20120027754; SEQ ID NO: 136 | 7537 |
| RSP21 | LC | PRT | US20120027754; SEQ ID NO: 137 | 7538 |
| RSP22 | LC | PRT | US20120027754; SEQ ID NO: 138 | 7539 |
| RSP23 | LC | PRT | US20120027754; SEQ ID NO: 139 | 7540 |
| RSP24 | LC | PRT | US20120027754; SEQ ID NO: 140 | 7541 |
| RSP25 | LC | PRT | US20120027754; SEQ ID NO: 141 | 7542 |
| RSP26 | LC | PRT | US20120027754; SEQ ID NO: 142 | 7543 |
| RSP27 | LC | PRT | WO2017049024; SEQ ID NO: 61 | 7544 |
| RSP28 | VH | PRT | US20120027754; SEQ ID NO: 82 | 7545 |
| RSP29 | VH | PRT | US20120027754; SEQ ID NO: 83 | 7546 |
| RSP30 | VH | PRT | US20120027754; SEQ ID NO: 84 | 7547 |
| RSP31 | VH | PRT | US20120027754; SEQ ID NO: 85 | 7548 |
| RSP32 | VH | PRT | US20120027754; SEQ ID NO: 94 | 7549 |
| RSP33 | VH | PRT | US20120027754; SEQ ID NO: 95 | 7550 |
| RSP34 | VH | PRT | US20120027754; SEQ ID NO: 96 | 7551 |
| RSP35 | VH | PRT | US20120027754; SEQ ID NO: 97 | 7552 |
| RSP36 | VH | PRT | WO2017049024; SEQ ID NO: 1 | 7553 |
| RSP37 | VH | PRT | WO2017049024; SEQ ID NO: 3 | 7554 |
| RSP38 | VL | PRT | US20120027754; SEQ ID NO: 87 | 7555 |
| RSP39 | VL | PRT | US20120027754; SEQ ID NO: 88 | 7556 |
| RSP40 | VL | PRT | US20120027754; SEQ ID NO: 89 | 7557 |
| RSP41 | VL | PRT | US20120027754; SEQ ID NO: 90 | 7558 |
| RSP42 | VL | PRT | US20120027754; SEQ ID NO: 91 | 7559 |
| RSP43 | VL | PRT | US20120027754; SEQ ID NO: 99 | 7560 |
| RSP44 | VL | PRT | US20120027754; SEQ ID NO: 100 | 7561 |
| RSP45 | VL | PRT | US20120027754; SEQ ID NO: 134 | 7562 |
| RSP46 | VL | PRT | WO2017049024; SEQ ID NO: 2 | 7563 |
| RSP47 | VL | PRT | WO2017049024; SEQ ID NO: 4 | 7564 |
| RSP48 | VL | PRT | WO2017049024; SEQ ID NO: 5 | 7565 |
| RSP49 | VL | PRT | WO2017049024; SEQ ID NO: 6 | 7566 |
| RSP50 | VL | PRT | WO2017049024; SEQ ID NO: 7 | 7567 |
| RSP51 | VL | PRT | WO2017049024; SEQ ID NO: 8 | 7568 |
| RSP52 | VL | PRT | WO2017049024; SEQ ID NO: 9 | 7569 |
| RSP53 | VL | PRT | WO2017049024; SEQ ID NO: 10 | 7570 |
| RSP54 | VL | PRT | WO2017049024; SEQ ID NO: 11 | 7571 |
| RSP55 | VL | PRT | WO2017049024; SEQ ID NO: 12 | 7572 |
| RSP56 | VL | PRT | WO2017049024; SEQ ID NO: 13 | 7573 |
| RSP57 | VL | PRT | WO2017049024; SEQ ID NO: 14 | 7574 |

[0622] In some embodiments, the payload region of the AAV particle comprises a nucleic acid sequence encoding a polypeptide which is an antibody, an antibody-based composition, or a fragment thereof. As a non-limiting example, the antibody may be one or more of the polypeptides listed in Table 6, or variants or fragments thereof. As another non-limiting example, the antibody may be one or more of the heavy chain sequences listed in Table 6. As a non-limiting example, the antibody may be one or more of the light chain sequences listed in Table 6, or variants or fragments thereof.

[0623] In some embodiments, the payload region of the AAV particle comprises a nucleic acid sequence encoding a polypeptide comprising a heavy chain and alight chain sequence listed in Table 6, or variants or fragments thereof. The payload region may also comprise a linker between the heavy and light chain sequences. The linker may be a sequence known in the art or described in Table 2.

[0624] In some embodiments, the payload region of the AAV particle comprises a nucleic acid sequence encoding a polypeptide comprising a heavy chain and alight chain sequence listed in Tables 6, or variants or fragments thereof, where the heavy chain sequence is from a different antibody than the light chain sequence. The payload region may also comprise a linker between the heavy and light chain sequences. The linker may be a sequence known in the art or described in Table 2.

[0625] In some embodiments, the payload region comprises, in the 5′ to 3′ direction, an antibody light chain sequence, a linker and a heavy chain sequence. In another embodiment, the linker is not used.

[0626] In some embodiments, the payload region comprises a nucleic acid sequence encoding, in the 5′ to 3′ direction, an antibody light chain sequence from Table 6, one or more linkers from Table 2 and a heavy chain sequence from Table 6.

[0627] In some embodiments, the payload region comprises, in the 5′ to 3′ direction, an antibody heavy chain sequence, a linker region (may comprise one or more linkers) and alight chain sequence. In another embodiment, the linker is not used.

[0628] In some embodiments, the payload region comprises a nucleic acid sequence encoding, in the 5′ to 3′ direction, an antibody heavy chain sequence from Table 6, one or more linkers from Table 2, and alight chain sequence from Table 6.

[0629] In some embodiments, the payload region comprises a nucleic acid sequence encoding a single heavy chain. As a non-limiting example, the heavy chain is an amino acid sequence or fragment thereof described in Table 6.

[0630] Shown in Table 6 are a listing of antibodies and their polynucleotides and/or polypeptides sequences. These sequences may be encoded by or included in the AAV particles of the present disclosure. Variants or fragments of the antibody sequences described in Tables 6 may be utilized in the AAV particles of the present disclosure.

[0631] In some embodiments, the AAV particles may comprise a viral genome, wherein one or more components may be codon-optimized. Codon-optimization may be achieved by any method known to one with skill in the art such as, but not limited to, by a method according to Genescript, EMBOSS, Bioinformatics, NUS, NUS2, Geneinfinity, IDT, NUS3, GregThatcher, Insilico, Molbio, N2P, Snapgene, and/or VectorNTI. Antibody heavy and/or light chain sequences within the same viral genome may be codon-optimized according to the same or according to different methods.

[0632] In some cases, the payload region of the AAV particles may encode one or more isoforms or variants of heavy and light chain antibody domains. Such variants may be humanized or optimized antibody domains comprising one or more complementarity determining regions (CDRs) from the heavy and light chains listed in Tables 6. CDRs of the antibodies encoded by the viral genomes of the present disclosure may be 50%, 60%,70%, 80%, 90%, 95% identical to CDRs listed in or incorporated in the sequences of Tables 6. Methods of determining CDRs are well known in the art and are described herein. Payload regions may encode antibody variants with one or more heavy chain variable domain (V_{H}) or light chain variable domain (V_{L}) derived from the antibody sequences in Tables 6. In some cases, such variants may include bispecific antibodies. Bispecific antibodies encoded by payload regions may comprise variable domain pairs from two different antibodies.

[0633] In some embodiments, the AAV particles may comprise a heavy and a light chain of an antibody described herein and two promoters. As a non-limiting example, the AAV particles may comprise a nucleic acid sequence of a genome as described in FIG. 1 or FIG. 2 of US Patent Publication No. US20030219733, the contents of which are herein incorporated by reference in their entirety. As another non-limiting example, the AAV particles may be a dual-promoter AAV for antibody expression as described by Lewis et al. (J. of. Virology, September 2002, Vol. 76(17), p 8769-8775; the contents of which are herein incorporated by reference in their entirety).

[0634] In some embodiments, payloads may encode respiratory disease-associated antibodies (or fragments thereof) taught in US Publication Number US20120027754, the contents of which are herein incorporated by reference in their entirety. Such embodiments may include antibody BG00011 (STX-100) or fragments thereof. In certain embodiments, the payload region encodes antibody BG00011 (STX-100) or fragments thereof such as but not limited to SEQ ID NO: 7518.7524; 7527.7543; 7545-7552; and/or 7555-7562 described herein.

[0635] Payload regions of the viral genomes may encode any respiratory disease-associated antibodies, not limited to those described in Table 6, including antibodies that are known in the art and/or antibodies that are commercially available. This may include fragments of such antibodies or antibodies that have been developed to comprise one or more of such fragments [e.g., variable domains or complementarity determining regions (CDRs)].

[0636] In some embodiments, the AAV particles may have a payload region comprising any of the respiratory disease-associated antibodies as described in International Publication Number WO2016059622, WO2017046658, WO2017048593, WO2017048614, WO2017049024, WO2017049035, WO2017049139, WO2017049149, WO2017049251, WO2017049296, WO2017051888, WO2017053170, WO2017053250, WO2017053423, WO2017053469, WO2017053748, WO2017053807, WO2017053856, WO2017054646, WO2017055291, WO2017055547, WO2017055612, WO2017055613, WO2017055614, WO2017058780, WO2017058866, WO2017059243, WO2017059252, WO2017059380, WO2017059557, WO2017060322, WO2017062016, WO2017062456, WO2017062615, WO2017062619, WO2017062792, WO2017062820, WO2017062888, WO2017062952, WO2017062966, WO2017065493, WO2017068186, WO2017069628, WO2017070423, WO2017070456, WO2017070460, WO2017070475, WO2017070476, WO2017070622, WO2017070626, WO2017070649, WO2017070654, WO2017071625, WO2017072361, WO2017072366, WO2017072662, WO2017072757, WO2017074013, WO2017074074, WO2017075124, WO2017075188, WO2017075432, WO2017075615, WO2017076308, WO2017077391, WO2017079112, WO2017079115, WO2017079116, WO2017079117, WO2017079121, WO2017079369, WO2017079520, WO2017083296, WO2017083515, WO2017083582, WO2017084078, WO2017084495, WO2017087547, WO2017087587, WO2017087588, WO2017087589, WO2017087678, WO2017087800, WO2017087921, WO2017088734, WO2017088974, WO2017089447, WO2017091429, WO2017091487, WO2017091577, WO2017091719, WO2017092645, WO2017093448, WO2017093478, WO2017093844, WO2017095486, WO2017095487, WO2017095744, WO2017095823, WO2017095875, WO2017095918 WO2017096017, WO2017096026, WO2017096051, WO2017096163, WO2017096179, WO2017096182, WO2017096189, WO2017096276, WO2017096281, WO2017096397, WO2017099362, WO2017099712, WO2017100289, WO2017100540, WO2017100597, WO217106061, WO2017106129, WO2017106352, WO2017106453, WO2017106566, WO2017106609, WO2017106656, WO2017106684, WO2017106810, WO2017109496, WO2017112536, WO2017112741, WO2017112803, WO2017112811, WO2017112829, WO2017112877, WO2017112944, WO2017112954, WO2017112955, WO2017112956, WO2017117202, WO2017117384, WO2017117430, WO2017118321, WO2017118675, WO2017118841, WO2017119434, WO2017119435, WO2017119811, WO2017120280, WO2017120344, WO2017120534, WO2017120557, WO2017120599, WO2017120612, WO2017120996, WO2017120997, WO2017120998, WO2017121771, WO2017121905, WO2017122666, WO2017123556, WO2017123557, WO2017123646, WO2017123978, WO2017124001, WO2017124002, WO2017125532, WO2017125830, WO2017125831, WO2017127468, WO2017127499, WO2017127664, WO2017127933, WO2017130076, WO2017132457, WO2017132459, WO2017132555, WO2017132562, WO2017132827, WO2017133540, WO2017133673, WO2017134197, WO2017134234, WO2017134301, WO2017134302, WO2017134305, WO2017134306, WO2017136350, WO2017136562, WO217136607, WO2017137542, WO2017137954, WO2017139623, WO2017139975, WO2017140256, WO2017142294, WO2017142928, WO2017143270, WO2017144681, WO2017147368, WO2017147383, WO2017148424, WO2017149394, WO2017149513, WO2017149515, WO2017151176, WO2017151979, WO2017152076, WO2017152085, WO2017152088, WO217152102, WO2017153402, WO2017153953, WO2017153955, WO2017155355, WO2017156032, WO2017156479, WO2017156488, WO2017156500, WO2017157305, WO2017158116, WO2017158436, WO2017159287, WO2017159699, WO2017160587, WO2017160754, WO2017161206, WO2017161414, WO2017161976, WO2017162555, WO2017162791, WO2017165398, WO2017165464, WO2017165742, WO2017165766, WO2017165778, WO2017167967, WO2017171373, WO2017172260, WO2017172518, WO2017172990, WO2017173328, WO2017174568, WO2017175018, WO2017175054, WO2017175058, WO2017176864, WO2017177013, WO2017177169, WO2017177179, WO2017177955, WO2017178493, WO2017180536, WO2017180813, WO2017180864, WO2017180904, WO2017180993, WO2017181031, WO2017181034, WO2017181039, WO2017181049, WO2017181109, WO2017181119, WO2017181139, WO2017181420, WO2017182672, WO2017184942, WO2017185037, WO2017185177, WO2017186121, WO2017186182, WO2017186908, WO2017186928, WO2017187307, WO2017189279, WO2017189588, WO2017189959, WO2017189963, WO2017189964, WO2017190001, WO2017190025, WO2017190100, WO2017191062, WO2017191108, WO2017191325, WO2017193032, WO2017193059, WO2017193096, WO2017193107, WO2017194568, WO2017194782, WO2017194783, WO2017196263, WO2017196764, WO2017196847, WO2017196867, WO2017197199, WO2017197259, WO2017197331, WO2017197376, WO2017198148, WO2017198212, WO2017200493, WO2017201131, WO2017201204, WO2017201340, WO2017201440, WO2017201442, WO2017201731, WO2017202387, WO2017203450, WO2017204349, WO2017205216, WO2017205465, WO2017205536, WO2017205538, WO2017205694, WO2017205726, WO2017205738, WO2017205767, WO2017205875, WO2017206840, WO2017207477, WO2017207480, WO2017210058, WO2017210844, WO2017211873, WO2017212250, WO2017212442, WO2017214151, WO2017214182, WO2017214186, WO2017214282, WO2017214301, WO2017214335, WO2017214456, WO2017214458, WO2017214462, WO2017214706, WO2017215585, WO2017215590, WO2017218355, WO2017218435, WO2017218515, WO2017219025, WO2017219029, WO2017219687, WO2017219690, WO2017219995, WO2017220569, WO2017220988, WO2017220989, WO2017220990, WO2017223284, WO2018002339, WO2018005276, WO2018005519, WO2018005551, WO2018005556, WO2018005559, WO2018005697, WO2018005904, WO2018006785, WO2018006882, WO2018007592, WO2018007885, WO2018009507, WO2018009732, WO2018009811, WO2018010846, WO2018011421, WO2018013818, WO2018014122, WO2018014260, WO2018014855, WO2018014864, WO201015448, WO2018017673, WO2018017864, WO2018022762, WO2018023121, WO2018023136, WO2018025178, WO2018025982, WO2018026018, WO2018026248, WO2018026722, WO2018026748, WO2018026953, WO2018027025, WO2018027039, WO2018027084, WO2018027124, WO2018027203, WO2018027204, WO2018027252, WO2018029124, WO2018029284, WO2018029474, WO2018030806, WO2018031258, WO2018031408, WO2018031490, WO2018033135, WO2018033749, WO2018034434, WO2018035061, WO2018035107, WO2018035119, WO2018035210, WO2018035407, WO2018036438, WO2018036472, WO2018036473, WO2018036561, WO2018038583, WO2018038945, WO2018039020, WO2018039107 WO2018039274, WO2018039626, WO2018043311, WO2018044105, WO2018044640, WO2018045054, WO2018045090, WO2018045325, WO2018047894, WO2018048234, WO2018048975, WO2018049083, WO2018049118, WO2018049120, WO2018049474, WO2018050027, WO2018050028, WO2018050066, WO2018050111, WO2018050833, WO2018050852, WO2018052789, WO2018052818, WO2018053029, WO2018053032, WO2018053106, WO2018053434, WO2018053709, WO2018054353, WO2018054484, WO2018054973, WO2018057303, WO2018057669, WO2018057776, WO2018057823, WO2018057955, WO2018058001, WO2018059437, WO2018059465, WO2018059502, WO2018062402, WO2018064190, WO2018064255, WO2018064478, WO2018064611, WO2018066585, WO2018066626, WO2018067198, WO2018067331, WO2018067331, WO2018067993, WO2018068028, WO2018068282, WO2018068283, WO2018068336, WO2018068691, WO2018069467, WO2018069500, WO2018069871, WO2018070936, WO2018072743, WO2018073648, WO2018073680, WO2018075304, WO2018075375, WO2018075378, WO2018075591, WO2018075740, WO2018075813, WO2018075954 WO2018075960, WO2018075961, WO2018075974, WO2018075989, WO2018077893, WO2018079740, WO2018080812, WO2018081512, WO2018081648, WO2018082590, WO2018083248, WO2018083282, WO2018084836, WO2018085252, WO2018085358, WO2018085468, WO2018085469, WO2018085533, WO2018085555, WO2018085731, WO2018086139. WO2018086585, WO2018086605, WO2018087276, WO2018088877, WO2018088878, WO2018089293, WO2018089305, WO2018089532, WO2018089628, WO2018089829, WO2018090950, WO2018091661, WO2018091720, WO2018091739, WO2018091740, WO2018093866, WO2018094414, WO2018095428, WO2018097951, WO2018098035, WO2018098362, WO2018098365, WO2018099539, WO2018099968, WO2018099978, WO2018101448, WO2018102536, WO2018102589, WO2018102594, WO2018102597, WO2018102682, WO2018102746, WO2018102785, WO2018102787, WO2018102795, WO2018103884, WO2018104478, WO2018104483, WO2018106529, WO2018106588, WO2018106644, WO2018106645, WO2018106862, WO2018106864, WO2018107058, WO2018107069, WO2018107109, WO2018107134, WO2018110515, WO2018112334, WO2018112346, WO2018113258, WO2018113595, WO2018114728, WO2018115017, WO2018115051, WO2018115305, WO2018115319, WO2018115960, WO2018118754, WO2018118780, WO2018119118, WO2018119166, WO2018119171, WO2018119196, WO2018119314, WO2018119351, WO2018121473, WO2018121474, WO2018121475, WO2018121578, WO2018121580, WO2018121679, WO2018126233, WO2018126259, WO2018126595, WO2018127175, WO2018127586, WO2018127709, WO2018127710, WO2018127711, WO2018127713, WO2018127787, WO2018127791, WO2018128779, WO2018129007, WO2018129029, WO2018129261, WO2018129329, WO2018129331, WO2018129395, WO2018129400, WO2018129404, WO2018129451, WO2018129524, WO2018129533, WO2018129553, WO2018129559, WO2018133837, WO2018134681, WO2018135653, WO2018136163, WO2018136412, WO2018136825, WO2018137293, WO2018137294, WO2018137295, WO2018137598, WO2018138113, WO2018138297, WO2018138496, WO2018138521, WO2018139404, WO2018140242, WO2018140525, WO2018140725, WO2018140970, WO2018140973, WO2018141909, WO2018141959, WO2018141964, WO2018142322, WO2018144535, WO2018144999, WO2018145075, WO2018145120, WO2018145206, WO2018146074, WO2018146199, WO2018146253, WO2018146549, WO2018146612, WO2018147245, WO2018148180, WO2018148224, WO2018148383, WO2018148445, WO2018148447, WO2018148476, WO2018148585, WO2018148595, WO2018150029, WO2018150187, WO2018150326, WO2018151816, WO2018151820, WO2018151836, WO2018152518, WO2018152530, WO2018152687, WO2018153340, WO2018153372, WO2018154520, WO2018156494, WO2018156634, WO2018156740, WO2018157147, WO2018157169, WO2018158398, WO2018158658, WO2018159582, WO2018160538, WO2018160539, WO2018160704, WO2018160731, WO2018160841, WO2018160917, WO2018161092, WO2018161872, WO2018162430, WO2018162446, WO2018162724, WO2018162749, WO2018164441, WO2018165062, WO2018165228, WO2018165362, WO2018165619, WO2018165895, WO2018167322, WO2018168768, WO201816769, WO2018168779, WO2018169948, WO2018170338, WO2018174408, WO2018174544, WO2018174629, WO2018174984, WO2018175179, WO2018175403, WO2018175476, WO2018175740, WO2018175790, WO2018175833, WO2018175988, WO2018176132, WO2018177220, WO2018177324, WO2018178040, WO2018178046, WO2018178047, WO2018178122, WO2018178123, WO2018178354, WO2018178364, WO2018182266, WO2018182284, WO2018182422, WO2018182529, WO2018183041, WO2018183182, WO2018183366, WO2018183608, WO2018185050, WO2018185110, WO2018185232, WO2018185526, WO2018185709, WO2018187158, WO2018187191, WO2018187613, WO2018188047, WO2018189220, WO2018189381, WO2018191074, WO2018191414, WO2018191479, WO2018191545, WO2018191660, WO2018191718, WO2018194381, WO2018195226, WO2018195283, WO2018195418, WO2018197492, WO2018197675, WO2018198091, WO2018199176, WO2018199318, WO2018199593, WO2018200586, WO2018200812, WO2018200918, WO2018201014, WO2018201047, WO2018201051, WO2018201056, WO2018201096, WO2018202649, WO2018202794, WO2018204278, WO2018204303, WO2018204368, WO2018204677, WO2018204679, WO2018204872, WO2018205926, WO2018208121, WO2018208670, WO2018208856, WO2018209194, WO2018209701, WO2018210230, WO2018212136, WO2018213297, WO2018213316, WO2018213335, WO2018213592, WO2018213665, WO2018213680, WO2018215535, WO2018215571, WO2018215835, WO2018215935, WO2018215936, WO2018215937, WO2018215938, WO2018215964, WO2018217058, WO2018217227, WO2018217688, WO2018217799, WO2018217945, WO2018217947, WO2018218068, WO2018218083, WO2018218215, WO2018218240, WO2018219327, WO2018219901, WO2018220080, WO2018220100, WO2018220169, WO2018220546, WO2018221521, WO2018221969, WO2018222019, WO2018222675, WO2018222685, WO2018222689, WO2018222711, WO2018222718, WO2018222722, WO2018222770, WO2018222949, WO2018222962, WO2018223182, WO2018223923, WO2018223958, WO2018224550, WO2018224609, WO2018226339, WO2018226578, WO2018226833, WO2018227018, WO2018229193, WO2018229194, WO2018229195, WO2018229197, WO2018229612, WO2018229715, WO2018231827, WO2018232088, WO2018232144, WO2018232164, WO2018232188, WO2018232349, WO2018232372. WO2018232467, WO2018233333, WO2018234576, WO2018234793, WO2018235855, WO2018236728, WO2018236904, WO2018237010, WO2018237157, WO2018237173, WO2018237192, WO2018237287, WO2018237326, WO2018237335, WO2018237364, WO2019001559, WO2019003074, WO2019003159, WO2019003164, WO2019005208, WO2019005503, WO2019005634, WO2019005635, WO2019005636, WO2019005638, WO2019005756, WO2019005847, WO2019006007, WO2019006162, WO2019008377, WO2019008378, WO2019008379, WO2019009388, WO2019009879, WO2019010314, WO2019010566, WO2019011852, WO2019014091, WO2019014586, WO2019014623, WO2019015696, WO2019016371, WO2019016402, WO2019018640, WO2019018647, WO2019018730, WO2019018757, WO2019022187, WO2019023148, WO2019023460, WO2019023482, WO2019023661, WO2019024911, WO2019024933, WO2019025545, WO2019027721, WO2019027754, WO2019028051, WO2019028283, WO2019028555, WO2019029351, WO2019030706, WO2019031939, WO2019031965, WO2019032661, WO2019032662, WO2019032663, WO2019032699, WO2019032945, WO2019033057. WO2019034427, WO2019034779, WO2019034895, WO2019035630, WO2019035939, WO2019036724, WO2019039891, WO2019040348, WO2019040471, WO2019040608, WO2019040685, WO2019040727, WO2019040780, WO2019040808, WO2019042153, WO2019042226, WO2019042282, WO2019042285, WO2019043059, WO2019046321, WO2019046338, WO2019046652, WO2019047932, WO2019048040, WO2019048489, WO2019050326, WO2019050362, WO2019050935, WO2019051308, WO2019052562, WO2019054819, WO2019055537, WO2019055689, WO2019055842, WO2019056281, WO2019057100, WO2019057102, WO2019057124, WO2019057792, WO2019059411, WO2019059771, WO2019060418, WO2019060542, WO2019060653, WO2019062518, WO2019062642, WO2019062755, WO2019062871, WO2019062877, WO2019063802, WO2019065964, WO2019066535, WO2019067332, WO2019067491, WO2019067499, WO2019067805, WO2019067978, WO2019068904, WO2019068907, WO2019070013, WO2019070161, WO2019072220, WO2019073069, WO2019074124, WO2019075136, WO2019075270, WO2019075405, WO2019075413, WO2019075417, WO2019075433 WO2019075472, WO2019076277, WO2019077132, WO2019078600, WO2019078697, WO2019078698, WO2019079249, WO2019079569, WO2019079671, WO2019079762, WO2019079772, WO2019079809, WO2019079914, WO2019080858, WO2019080872, WO2019080883, WO2019080889, WO2019080909, WO2019080941, WO2019081595, WO2019081902 WO2019081983, WO2019083506, WO2019084057, WO2019084060, WO2019084064, WO2019084067, WO2019084249, WO2019084460, WO2019084553, WO2019084692, WO2019086573, WO2019086574, WO2019086878, WO2019087087, WO201908658, WO2019089473, WO2019089755, WO2019089921, WO2019089969, WO2019090002, WO2019090003, WO2019090069, WO2019090074, WO2019090076, WO2019090078, WO2019090081, WO2019090082, WO2019090085, WO2019090088, WO2019090090, WO2019090110, WO2019090134, WO2019090263, WO2019091384, WO2019092181, WO2019092451, WO2019092452, WO2019093807, WO2019094482, WO2019094578, WO2019094700, WO2019096900, WO2019097244, WO2019099440, WO2019099597, and WO2018081435, the contents of each of which are herein incorporated by reference in their entirety.

### Antibodies for the Treatment of Muscle Diseases

[0637] In some embodiments, the payload region of the AAV particle comprises one or more nucleic acid sequences encoding muscle disease-associated antibodies, variants or fragments thereof.

[0638] In some embodiments, the payload region of the AAV particle comprises one or more nucleic acid sequences encoding one or more of the payload antibody polypeptides listed in Tables 3-16, or variants or fragments thereof.

[0639] In some embodiments, the payload region of the AAV particle comprises one or more nucleic acid sequences listed in Tables 3-16, or variants or fragments thereof.

[0640] In some embodiments, the payload region of the AAV particle comprises a nucleic acid sequence encoding a payload antibody with at least 50% identity to one or more payload antibody polypeptides listed in Tables 3-16. The encoded antibody polypeptide may have 50%, 51%, 52%, 53%, 54%, 55%, 56%, 57%, 58%, 59%, 60%, 61%, 62%, 63%, 64%, 65%, 66%, 67%, 68%, 69%, 70%, 71%, 72%, 73%, 74%, 75%, 76%,77%, 78%, 79%, 80%, 81%, 82%, 83%, 84%, 85%, 86%, 87%, 88%, 89%, 90%, 91%, 92%, 93%, 94%, 95%, 96%, 97%, 98%, 99%, or 100% identity to one or more of the payload antibody polypeptides listed in Tables 3-16, or variants or fragments thereof.

[0641] In some embodiments, the full sequence of the encoded antibody polypeptide may have 50%, 51%, 52%, 53%, 54%, 55%, 56%, 57%, 58%, 59%, 60%, 61%, 62%, 63%, 64%, 65%, 66%, 67%, 68%, 69%, 70%, 71%, 72%, 73%, 74%, 75%, 76%,77%, 78%, 79%, 80%, 81%, 82%, 83%, 84%, 85%, 86%, 87%, 88%, 89%, 90%, 91%, 92%, 93%, 94%, 95%, 96%, 97%, 98%, 99%, or 100% identity to one or more of the payload antibody polypeptides listed in Tables 3-16, or variants or fragments thereof.

[0642] In some embodiments, the variable region sequence(s) of the encoded antibody polypeptide may have 50%, 51%, 52%, 53%, 54%, 55%, 56%, 57%, 58%, 59%,60%,61%, 62%, 63%, 64%, 65%, 66%, 67%, 68%, 69%, 70%, 71%, 72%, 73%, 74%, 75%, 76%, 77%, 78%, 79%, 80%, 81%, 82%, 83%, 84%, 85%, 86%, 87%, 88%, 89%, 90%, 91%, 92%, 93%, 94%, 95%, 96%, 97%, 98%, 99%, or 100% identity to one or more of the payload antibody polypeptides listed in Tables 3-16, or variants or fragments thereof.

[0643] In some embodiments, the heavy chain of the encoded antibody polypeptide may have 50%, 51%, 52%, 53%, 54%, 55%, 56%, 57%, 58%, 59%, 60%, 61%, 62%, 63%, 64%, 65%, 66%, 67%, 68%, 69%, 70%, 71%, 72%, 73%, 74%, 75%, 76%, 77%, 78%, 79%, 80%, 81%, 82%, 83%, 84%, 85%, 86%,87%, 88%, 89%, 90%, 91%, 92%, 93%, 94%, 95%, 96%, 97%, 98%, 99%, or 100% identity to one or more of the payload heavy chain antibody polypeptides listed in Tables 3-16, or variants or fragments thereof.

[0644] In some embodiments, the light chain of the encoded antibody polypeptide may have 50%, 51%, 52%, 53%, 54%, 55%, 56%, 57%, 58%, 59%, 60%, 61%, 62%, 63%, 64%, 65%, 66%, 67%, 68%, 69%, 70%, 71%, 72%, 73%, 74%, 75%, 76%, 77%, 78%, 79%, 80%, 81%, 82%, 83%, 84%, 85%, 86%, 87%, 88%, 89%, 90%, 91%, 92%, 93%, 94%, 95%, 96%, 97%, 98%, 99%, or 100% identity to one or more of the payload light chain antibody polypeptides listed in Tables 3-16, or variants or fragments thereof.

[0645] In some embodiments, the CDR region of the encoded antibody polypeptide may have 50%, 51%, 52%, 53%, 54%, 55%, 56%, 57%, 58%, 59%, 60%, 61%, 62%, 63%, 64%, 65%, 66%, 67%, 68%, 69%, 70%, 71%, 72%, 73%, 74%, 75%, 76%, 77%, 78%, 79%, 80%, 81%, 82%, 83%, 84%, 85%, 86%, 87%, 88%, 89%, 90%, 91%, 92%, 93%, 94%, 95%, 96%, 97%, 98%, 99%, or 100% identity to the CDRs of one or more of the payload antibody polypeptides listed in Tables 3-16, or variants or fragments thereof.

[0646] In some embodiments, the payload antibody has 90% identity to one or more of the antibody polypeptides listed in Tables 3-16, or variants or fragments thereof.

[0647] In some embodiments, the payload antibody has 91% identity to one or more of the antibody polypeptides listed in Tables 3-16, or variants or fragments thereof.

[0648] In some embodiments, the payload antibody has 92% identity to one or more of the antibody polypeptides listed in Tables 3-16, or variants or fragments thereof.

[0649] In some embodiments, the payload antibody has 93% identity to one or more of the antibody polypeptides listed in Tables 3-16, or variants or fragments thereof.

[0650] In some embodiments, the payload antibody has 94% identity to one or more of the antibody polypeptides listed in Tables 3-16, or variants or fragments thereof.

[0651] In some embodiments, the payload antibody has 95% identity to one or more of the antibody polypeptides listed in Tables 3-16, or variants or fragments thereof.

[0652] In some embodiments, the payload antibody has 96% identity to one or more of the antibody polypeptides listed in Tables 3-16, or variants or fragments thereof.

[0653] In some embodiments, the payload antibody has 97% identity to one or more of the antibody polypeptides listed in Tables 3-16, or variants or fragments thereof.

[0654] In some embodiments, the payload antibody has 98% identity to one or more of the antibody polypeptides listed in Tables 3-16, or variants or fragments thereof.

[0655] In some embodiments, the payload antibody has 99% identity to one or more of the antibody polypeptides listed in Tables 3-16, or variants or fragments thereof.

[0656] In some embodiments, the payload antibody has 100% identity to one or more of the antibody polypeptides listed in Tables 3-16, or variants or fragments thereof.

[0657] In some embodiments, the payload region of the AAV particle comprises a nucleic acid sequence with at least 50% identity to one or more nucleic acid sequences listed in Tables 3.16, or variants or fragments thereof. The payload nucleic acid sequence may have 50%, 51%, 52%, 53%, 54%, 55%, 56%, 57%, 58%, 59%, 60%, 61%, 62%, 63%, 64%, 65%, 66%,67%,68%, 69%, 70%, 71%, 72%, 73%, 74%, 75%, 76%, 77%, 78%, 79%, 80%, 81%, 82%, 83%, 84%, 85%, 86%, 87%, 88%, 89%, 90%, 91%, 92%, 93%, 94%, 95%, 96%, 97%, 98%, 99%, or 100% identity to one or more nucleic acid sequences listed in Tables 3-16, or variants or fragments thereof.

[0658] In some embodiments, the payload nucleic acid sequence has 90% identity to one or more of the nucleic acid sequences listed in Tables 3-16, or variants or fragments thereof.

[0659] In some embodiments, the payload nucleic acid sequence has 91% identity to one or more of the nucleic acid sequences listed in Tables 3-16, or variants or fragments thereof.

[0660] In some embodiments, the payload nucleic acid sequence has 92% identity to one or more of the nucleic acid sequences listed in Tables 3-16, or variants or fragments thereof.

[0661] In some embodiments, the payload nucleic acid sequence has 93% identity to one or more of the nucleic acid sequences listed in Tables 3-16, or variants or fragments thereof.

[0662] In some embodiments, the payload nucleic acid sequence has 94% identity to one or more of the nucleic acid sequences listed in Tables 3-16, or variants or fragments thereof.

[0663] In some embodiments, the payload nucleic acid sequence has 95% identity to one or more of the nucleic acid sequences listed in Tables 3-16, or variants or fragments thereof.

[0664] In some embodiments, the payload nucleic acid sequence has 96% identity to one or more of the nucleic acid sequences listed in Tables 3-16, or variants or fragments thereof.

[0665] In some embodiments, the payload nucleic acid sequence has 97% identity to one or more of the nucleic acid sequences listed in Tables 3-16, or variants or fragments thereof.

[0666] In some embodiments, the payload nucleic acid sequence has 98% identity to one or more of the nucleic acid sequences listed in Tables 3-16, or variants or fragments thereof.

[0667] In some embodiments, the payload nucleic acid sequence has 99% identity to one or more of the nucleic acid sequences listed in Tables 3-16, or variants or fragments thereof.

[0668] In some embodiments, the payload nucleic acid sequence has 100% identity to one or more of the nucleic acid sequences listed in Tables 3-16, or variants or fragments thereof.

[0669] In some embodiments, the payload region of the AAV particle comprises a nucleic acid sequence encoding a polypeptide which is an antibody, an antibody-based composition, or a fragment thereof. As a non-limiting example, the antibody may be one or more of the polypeptides listed in Tables 3-16, or variants or fragments thereof. As another non-limiting example, the antibody may be one or more of the heavy chain sequences listed in Tables 3-16. As a non-limiting example, the antibody may be one or more of the light chain sequences listed in Tables 3-16, or variants or fragments thereof.

[0670] In some embodiments, the payload region of the AAV particle comprises a nucleic acid sequence encoding a polypeptide comprising a heavy chain and a light chain sequence listed in Tables 3-16, or variants or fragments thereof. The payload region may also comprise a linker between the heavy and light chain sequences. The linker may be a sequence known in the art or described in Table 2.

[0671] In some embodiments, the payload region of the AAV particle comprises a nucleic acid sequence encoding a polypeptide comprising a heavy chain and alight chain sequence listed in Tables 3-16, or variants or fragments thereof, where the heavy chain sequence is from a different antibody than the light chain sequence. The payload region may also comprise a linker between the heavy and light chain sequences. The linker may be a sequence known in the art or described in Table 2.

[0672] In some embodiments, the payload region comprises, in the 5 to 3′ direction, an antibody light chain sequence, a linker and a heavy chain sequence. In another embodiment, the linker is not used.

[0673] In some embodiments, the payload region comprises a nucleic acid sequence encoding, in the 5 to 3′ direction, an antibody light chain sequence from Tables 3-16, one or more linkers from Table 2 and a heavy chain sequence from Tables 3-16.

[0674] In some embodiments, the payload region comprises, in the 5′ to 3′ direction, an antibody heavy chain sequence, a linker region (may comprise one or more linkers) and alight chain sequence. In another embodiment, the linker is not used.

[0675] In some embodiments, the payload region comprises a nucleic acid sequence encoding, in the 5′ to 3′ direction, an antibody heavy chain sequence from Tables 3-16, one or more linkers from Table 2, and alight chain sequence from Tables 3-16.

[0676] In some embodiments, the payload region comprises a nucleic acid sequence encoding a single heavy chain. As a non-limiting example, the heavy chain is an amino acid sequence or fragment thereof described in Tables 3-16.

[0677] Shown in Tables 3-16 are a listing of antibodies and their polynucleotides and/or polypeptides sequences. These sequences may be encoded by or included in the AAV particles of the present disclosure. Variants or fragments of the antibody sequences described in Tables 3-16 may be utilized in the AAV particles of the present disclosure.

[0678] In some embodiments, the AAV particles may comprise a viral genome, wherein one or more components may be codon-optimized. Codon-optimization may be achieved by any method known to one with skill in the art such as, but not limited to, by a method according to Genescript, EMBOSS, Bioinformatics, NUS, NUS2, Geneinfinity, IDT, NUS3, GregThatcher, Insilico, Molbio, N2P, Snapgene, and/or VectorNTI. Antibody heavy and/or light chain sequences within the same viral genome may be codon-optimized according to the same or according to different methods.

[0679] In some cases, the payload region of the AAV particles may encode one or more isoforms or variants of heavy and light chain antibody domains. Such variants may be humanized or optimized antibody domains comprising one or more complementarity determining regions (CDRs) from the heavy and light chains listed in Tables 3-16. CDRs of the antibodies encoded by the viral genomes of the present disclosure may be 50%, 60%, 70%, 80%, 90%, 95% identical to CDRs listed in or incorporated in the sequences of Tables 3-16. Methods of determining CDRs are well known in the art and are described herein. Payload regions may encode antibody variants with one or more heavy chain variable domain (V_{H}) or light chain variable domain (V_{L}) derived from the antibody sequences in Tables 3-16. In some cases, such variants may include bispecific antibodies. Bispecific antibodies encoded by payload regions may comprise variable domain pairs from two different antibodies.

[0680] In some embodiments, the AAV particles may comprise a heavy and alight chain of an antibody described herein and two promoters. As a non-limiting example, the AAV particles may comprise a nucleic acid sequence of a genome as described in FIG. 1 or FIG. 2 of US Patent Publication No. US20030219733, the contents of which are herein incorporated by reference in their entirety. As another non-limiting example, the AAV particles may be a dual-promoter AAV for antibody expression as described by Lewis et al. (J. of. Virology, September 2002, Vol. 76(17), p 8769-8775; the contents of which are herein incorporated by reference in their entirety).

[0681] Payload regions of the viral genomes may encode any muscle disease-associated antibodies, not limited to those described in Tables 3-16, including antibodies that are known in the art and/or antibodies that are commercially available. This may include fragments of such antibodies or antibodies that have been developed to comprise one or more of such fragments [e.g., variable domains or complementarity determining regions (CDRs)].

[0682] In some embodiments, the AAV particles may have a payload region comprising any of the muscle disease-associated antibodies as described in International Publication Number WO2017054086, WO2017062016, WO2017070476, WO2017075119, WO2017075325, WO2017085035, WO2017095487, WO2017100193, WO2017100467, WO2017106236, WO2017106326, WO2017106578, WO2017106684, WO2017106932, WO2017110981, WO2017120344, WO2017132555, WO2017156488, WO2017156500, WO2017180536, WO2017180976, WO2017181011, WO2017181015, WO2017181031, WO2017181039, WO2017189805, WO2017189959, WO2017189963, WO2017189964, WO2017199250, WO2017208211, WO2017217128, WO2017217525, WO2017218824, WO2018009903, WO2018022608, WO2018027329, WO2018030777, WO2018035119, WO2018039506, WO2018049237, WO2018053029, WO2018053434, WO2018067701, WO2018075960 WO2018081282, WO2018085842, WO2018089532, WO2018098480, WO2018119246, WO2018127791, WO2018128779, WO2018129395, WO2018132423, WO2018146199, WO2018148585, WO2018160896, WO2018166495, WO2018167322, WO2018169948, WO2018170408, WO2018175790, WO2018183219, WO2018183376, WO2018185110, WO2018191707, WO2018195418, WO2018213204, WO2018218049, WO2018221521, WO2018226578, WO2018232088, WO2018232366, WO2018237192, WO2019003159, WO2019005503, WO2019009419, WO2019012336, WO2019015673, WO2019023661, WO2019024911, WO2019025908, WO2019028456, WO2019031938, WO2019032898, WO2019042153, WO2019042889, WO2019046338, WO2019046600, WO2019054819, WO2019057992, WO2019060619, WO2019067293, WO2019067815, WO2019073507, WO2019078916, WO2019079809, WO2019089592, WO2019090069, WO2019090074, WO2019090076, WO2019090078, WO2019090081, WO2019090082, WO2019090085, WO2019090088, WO2019090090, WO2019090263, WO2019092505, WO2019092507, WO2019094578, WO2019094700, WO2019020734, WO2018003983, and WO2017170090, the contents of each of which are herein incorporated by reference in their entirety.

[0683] In some embodiments, the payload region of the viral particle comprises one or more nucleic acid sequences encoding one or more of the muscle disease payload antibody polypeptides listed in Table 6 of U.S. provisional patent application 62/844,433 (MUS1-MUS485; SEQ ID NO: 5647-6131), the contents of which are herein incorporated by reference in their entirety. A non-exhaustive listing of muscle diseases includes Multiple System Atrophy (MSA), Amyotrophic Lateral Sclerosis (ALS) and Duchenne Muscular Dystrophy (DMD).

### Antibodies for the Treatment of Endocrine and Metabolic Diseases

[0684] In some embodiments, the payload region of the AAV particle comprises one or more nucleic acid sequences encoding endocrine and metabolic disease-associated antibodies, variants or fragments thereof.

[0685] In some embodiments, the payload region of the AAV particle comprises one or more nucleic acid sequences encoding one or more of the payload antibody polypeptides listed in Tables 3-16, or variants or fragments thereof.

[0686] In some embodiments, the payload region of the AAV particle comprises one or more nucleic acid sequences listed in Tables 3-16, or variants or fragments thereof.

[0687] In some embodiments, the payload region of the AAV particle comprises a nucleic acid sequence encoding a payload antibody with at least 50% identity to one or more payload antibody polypeptides listed in Tables 3-16. The encoded antibody polypeptide may have 50%, 51%, 52%, 53%, 54%, 55%, 56%, 57%, 58%, 59%, 60%, 61%, 62%, 63%, 64%, 65%, 66%, 67%, 68%, 69%, 70%, 71%, 72%, 73%, 74%, 75%, 76%, 77%, 78%, 79%, 80%, 81%, 82%, 83%, 84%, 85%, 86%, 87%, 88%, 89%, 90%, 91%, 92%, 93%, 94%, 95%, 96%, 97%,98, 99%, or 100% identity to one or more of the payload antibody polypeptides listed in Tables 3-16, or variants or fragments thereof.

[0688] In some embodiments, the full sequence of the encoded antibody polypeptide may have 50%, 51%, 52%, 53%, 54%, 55%, 56%, 57%, 58%, 59%, 60%, 61%, 62%, 63%, 64%, 65%, 66%, 67%, 68%, 69%, 70%, 71%, 72%, 73%, 74%, 75%, 76%, 77%, 78%, 79%, 80%, 81%, 82%, 83%, 84%, 85%, 86%, 87%, 88%, 89%, 90%, 91%, 92%, 93%, 94%, 95%, 96%, 97%, 98%, 99%, or 100% identity to one or more of the payload antibody polypeptides listed in Tables 3-16, or variants or fragments thereof.

[0689] In some embodiments, the variable region sequence(s) of the encoded antibody polypeptide may have 50%, 51%, 52%, 53%, 54%, 55%, 56%, 57%, 58%, 59%,60%, 61%, 62%, 63%, 64%, 65%, 66%, 67%, 68%, 69%, 70%, 71%, 72%, 73%, 74%, 75%, 76%, 77%, 78%, 79%, 80%, 81%, 82%, 83%,84%, 85%, 86%, 87%, 88%, 89%, 90%, 91%, 92%, 93%, 94%, 95%, 96%, 97%, 98%, 99%, or 100% identity to one or more of the payload antibody polypeptides listed in Tables 3-16, or variants or fragments thereof.

[0690] In some embodiments, the heavy chain of the encoded antibody polypeptide may have 50%, 51%, 52%, 53%, 54%, 55%, 56%, 57%, 58%, 59%, 60%, 61%, 62%, 63%, 64%, 65%, 66%, 67%, 68%, 69%, 70%, 71%, 72%, 73%, 74%, 75%, 76%, 77%, 78%, 79%, 80%, 81%, 82%, 83%, 84%, 85%, 86%, 87%, 88%, 89%, 90%, 91%, 92%, 93%, 94%, 95%, 96%, 97%, 98%, 99%, or 100% identity to one or more of the payload heavy chain antibody polypeptides listed in Tables 3-16, or variants or fragments thereof.

[0691] In some embodiments, the light chain of the encoded antibody polypeptide may have 50%, 51%, 52%, 53%, 54%, 55%, 56%, 57%, 58%, 59%, 60%, 61%, 62%, 63%, 64%, 65%, 66%, 67%, 68%, 69%, 70%, 71%, 72%, 73%, 74%, 75%, 76%,77%, 78%, 79%, 80%, 81%, 82%, 83%, 84%, 85%%,6, 87%,88%,89%, 90%,91%,92%, 93%, 94%,95%, 96%,97%, 98%,99%, or 100% identity to one or more of the payload light chain antibody polypeptides listed in Tables 3-16, or variants or fragments thereof.

[0692] In some embodiments, the CDR region of the encoded antibody polypeptide may have 50%, 51%, 52%, 53%, 54%, 55%, 56%, 57%, 58%, 59%, 60%, 61%, 62%,63%,64%, 65%, 66%, 67%, 68%, 69%, 70%, 71%, 72%, 73%, 74%, 75%, 76%, 77%, 78%, 79%, 80%, 81%, 82%, 83%, 84%, 85%, 86%, 87%, 88%, 89%, 90%, 91%, 92%, 93%, 94%, 95%, 96%, 97%, 98%, 99%, or 100% identity to the CDRs of one or more of the payload antibody polypeptides listed in Tables 3-16, or variants or fragments thereof.

[0693] In some embodiments, the payload antibody has 90% identity to one or more of the antibody polypeptides listed in Tables 3-16, or variants or fragments thereof.

[0694] In some embodiments, the payload antibody has 91% identity to one or more of the antibody polypeptides listed in Tables 3-16, or variants or fragments thereof.

[0695] In some embodiments, the payload antibody has 92% identity to one or more of the antibody polypeptides listed in Tables 3-16, or variants or fragments thereof.

[0696] In some embodiments, the payload antibody has 93% identity to one or more of the antibody polypeptides listed in Tables 3-16, or variants or fragments thereof.

[0697] In some embodiments, the payload antibody has 94% identity to one or more of the antibody polypeptides listed in Tables 3-16, or variants or fragments thereof.

[0698] In some embodiments, the payload antibody has 95% identity to one or more of the antibody polypeptides listed in Tables 3-16, or variants or fragments thereof.

[0699] In some embodiments, the payload antibody has 96% identity to one or more of the antibody polypeptides listed in Tables 3-16, or variants or fragments thereof.

[0700] In some embodiments, the payload antibody has 97% identity to one or more of the antibody polypeptides listed in Tables 3-16, or variants or fragments thereof.

[0701] In some embodiments, the payload antibody has 98% identity to one or more of the antibody polypeptides listed in Tables 3-16, or variants or fragments thereof.

[0702] In some embodiments, the payload antibody has 99% identity to one or more of the antibody polypeptides listed in Tables 3-16, or variants or fragments thereof.

[0703] In some embodiments, the payload antibody has 100% identity to one or more of the antibody polypeptides listed in Tables 3-16, or variants or fragments thereof.

[0704] In some embodiments, the payload region of the AAV particle comprises a nucleic acid sequence with at least 50% identity to one or more nucleic acid sequences listed in Tables 3-16, or variants or fragments thereof. The payload nucleic acid sequence may have 50%, 51%, 52%, 53%, 54%, 55%, 56%, 57%, 58%, 59%, 60%, 61%, 62%, 63%, 64%, 65%, 66%, 67%, 68%, 69%, 70%, 71%, 72%, 73%, 74%, 75%, 76%, 77%, 78%, 79%, 80%, 81%, 82%, 83%, 84%, 85%, 86%, 87%, 88%, 89%, 90%, 91%, 92%, 93%, 94%, 95%, 96%, 97%, 98%, 99%, or 100% identity to one or more nucleic acid sequences listed in Tables 3-16, or variants or fragments thereof.

[0705] In some embodiments, the payload nucleic acid sequence has 90% identity to one or more of the nucleic acid sequences listed in Tables 3-16, or variants or fragments thereof.

[0706] In some embodiments, the payload nucleic acid sequence has 91% identity to one or more of the nucleic acid sequences listed in Tables 3-16, or variants or fragments thereof.

[0707] In some embodiments, the payload nucleic acid sequence has 92% identity to one or more of the nucleic acid sequences listed in Tables 3-16, or variants or fragments thereof.

[0708] In some embodiments, the payload nucleic acid sequence has 93% identity to one or more of the nucleic acid sequences listed in Tables 3-16, or variants or fragments thereof.

[0709] In some embodiments, the payload nucleic acid sequence has 94% identity to one or more of the nucleic acid sequences listed in Tables 3-16, or variants or fragments thereof.

[0710] In some embodiments, the payload nucleic acid sequence has 95% identity to one or more of the nucleic acid sequences listed in Tables 3-16, or variants or fragments thereof.

[0711] In some embodiments, the payload nucleic acid sequence has 96% identity to one or more of the nucleic acid sequences listed in Tables 3-16, or variants or fragments thereof.

[0712] In some embodiments, the payload nucleic acid sequence has 97% identity to one or more of the nucleic acid sequences listed in Tables 3-16, or variants or fragments thereof.

[0713] In some embodiments, the payload nucleic acid sequence has 98% identity to one or more of the nucleic acid sequences listed in Tables 3-16, or variants or fragments thereof.

[0714] In some embodiments, the payload nucleic acid sequence has 99% identity to one or more of the nucleic acid sequences listed in Tables 3-16, or variants or fragments thereof.

[0715] In some embodiments, the payload nucleic acid sequence has 100% identity to one or more of the nucleic acid sequences listed in Tables 3-16, or variants or fragments thereof.

[0716] In some embodiments, the payload region of the AAV particle comprises a nucleic acid sequence encoding a polypeptide which is an antibody, an antibody-based composition, or a fragment thereof. As a non-limiting example, the antibody may be one or more of the polypeptides listed in Tables 3-16, or variants or fragments thereof. As another non-limiting example, the antibody may be one or more of the heavy chain sequences listed in Tables 3-16. As a non-limiting example, the antibody may be one or more of the light chain sequences listed in Tables 3-16, or variants or fragments thereof.

[0717] In some embodiments, the payload region of the AAV particle comprises a nucleic acid sequence encoding a polypeptide comprising a heavy chain and alight chain sequence listed in Tables 3-16, or variants or fragments thereof. The payload region may also comprise a linker between the heavy and light chain sequences. The linker may be a sequence known in the art or described in Table 2.

[0718] In some embodiments, the payload region of the AAV particle comprises a nucleic acid sequence encoding a polypeptide comprising a heavy chain and alight chain sequence listed in Tables 3-16, or variants or fragments thereof, where the heavy chain sequence is from a different antibody than the light chain sequence. The payload region may also comprise a linker between the heavy and light chain sequences. The linker may be a sequence known in the art or described in Table 2.

[0719] In some embodiments, the payload region comprises, in the 5′ to 3′ direction, an antibody light chain sequence, a linker and a heavy chain sequence. In another embodiment, the linker is not used.

[0720] In some embodiments, the payload region comprises a nucleic acid sequence encoding, in the 5′ to 3′ direction, an antibody light chain sequence from Tables 3-16, one or more linkers from Table 2 and a heavy chain sequence from Tables 3-16.

[0721] In some embodiments, the payload region comprises, in the 5′ to 3′ direction, an antibody heavy chain sequence, a linker region (may comprise one or more linkers) and alight chain sequence. In another embodiment, the linker is not used.

[0722] In some embodiments, the payload region comprises a nucleic acid sequence encoding, in the 5′ to 3′ direction, an antibody heavy chain sequence from Tables 3.16, one or more linkers from Table 2, and alight chain sequence from Tables 3-16.

[0723] In some embodiments, the payload region comprises a nucleic acid sequence encoding a single heavy chain. As a non-limiting example, the heavy chain is an amino acid sequence or fragment thereof described in Tables 3-16.

[0724] Shown in Tables 3-16 are a listing of antibodies and their polynucleotides and/or polypeptides sequences. These sequences may be encoded by or included in the AAV particles of the present disclosure. Variants or fragments of the antibody sequences described in Tables 3-16 may be utilized in the AAV particles of the present disclosure.

[0725] In some embodiments, the AAV particles may comprise a viral genome, wherein one or more components may be codon-optimized. Codon-optimization may be achieved by any method known to one with skill in the art such as, but not limited to, by a method according to Genescript, EMBOSS, Bioinformatics, NUS, NUS2, Geneinfinity, IDT, NUS3, GregThatcher, Insilico, Molbio, N2P, Snapgene, and/or VectorNTI. Antibody heavy and/or light chain sequences within the same viral genome may be codon-optimized according to the same or according to different methods.

[0726] In some cases, the payload region of the AAV particles may encode one or more isoforms or variants of heavy and light chain antibody domains. Such variants may be humanized or optimized antibody domains comprising one or more complementarity determining regions (CDRs) from the heavy and light chains listed in Tables 3-16. CDRs of the antibodies encoded by the viral genomes of the present disclosure may be 50%, 60%, 70%, 80%, 90%, 95% identical to CDRs listed in or incorporated in the sequences of Tables 3-16. Methods of determining CDRs are well known in the art and are described herein. Payload regions may encode antibody variants with one or more heavy chain variable domain (V_{H}) or light chain variable domain (V_{L}) derived from the antibody sequences in Tables 3-16. In some cases, such variants may include bispecific antibodies. Bispecific antibodies encoded by payload regions may comprise variable domain pairs from two different antibodies.

[0727] In some embodiments, the AAV particles may comprise a heavy and a light chain of an antibody described herein and two promoters. As a non-limiting example, the AAV particles may comprise a nucleic acid sequence of a genome as described in FIG. 1 or FIG. 2 of US Patent Publication No. US20030219733, the contents of which are herein incorporated by reference in their entirety. As another non-limiting example, the AAV particles may be a dual-promoter AAV for antibody expression as described by Lewis et al. (J. of. Virology, September 2002, Vol. 76(17), p 8769-8775; the contents of which are herein incorporated by reference in their entirety).

[0728] Payload regions of the viral genomes may encode any endocrine and metabolic disease-associated antibodies, not limited to those described in Tables 3-16, including antibodies that are known in the art and/or antibodies that are commercially available. This may include fragments of such antibodies or antibodies that have been developed to comprise one or more of such fragments [e.g., variable domains or complementarity determining regions (CDRs)].

[0729] In some embodiments, the AAV particles may have a payload region comprising any of the endocrine and metabolic system disease-associated antibodies as described in International Publication Number WO2017046676, WO2017049139, WO2017049149, WO2017049452, WO2017053556, WO2017053748, WO2017054086, WO2017055613, WO2017055908, WO2017058944, WO2017059196, WO2017059243, WO2017059289, WO2017062016, WO2017062456, WO2017062619, WO2017062693, WO2017062748, WO2017062888, WO2017064716, WO2017065493, WO2017070475, WO2017070527, WO2017070649, WO2017073619, WO2017075052, WO2017075119, WO2017075252, WO2017075432, WO2017075540, WO2017077085, WO2017079112, WO2017079115, WO2017079116, WO2017079117, WO2017079121, WO2017079150, WO2017079591, WO2017083296, WO2017083441, WO2017083515, WO2017087547, WO2017087589, WO2017091683, WO2017093947, WO2017095744, WO2017096163, WO2017096276, WO2017102789, WO2017103895, WO2017106129, WO2017106352, WO2017106656, WO2017107914, WO2017109496, WO2017112741, WO2017112762, WO2017112775, WO2017112803, WO2017112944, WO2017112954, WO2017112955, WO2017112956, WO2017117384, WO2017117430, WO2017120344, WO2017121877, WO2017123557, WO2017127764, WO2017132457, WO2017132459, WO2017136313, WO2017137503, WO2017139623, WO2017142832, WO2017143069, WO2017144681, WO2017147293, WO2017147368, WO2017147383, WO2017147742, WO2017152076, WO2017153567, WO2017156058, WO2017158064, WO2017158116, WO2017160622, WO2017173349, WO2017173384, WO2017175018, WO2017176760, WO2017177179, WO2017178569, WO2017180461, WO2017180536, WO2017180864, WO2017180913, WO2017181111, WO2017185177, WO2017185492, WO2017185949, WO2017189279, WO2017189805, WO2017189813, WO2017190001, WO2017198741, WO2017201204, WO2017201325, WO2017203450, WO2017205651, WO2017208211, WO2017210058, WO2017210443, WO2017212442, WO2017214458, WO2017214462, WO2017214547, WO2017214548, WO2017218515, WO2018004283, WO2018005054, WO2018005519, WO2018005682, WO2018013918, WO2018014122, WO2018019897, WO2018020476, WO2018026722, WO2018027204, WO2018031865, WO2018035061, WO2018035084, WO2018035119, WO2018039020, WO2018039107, WO2018039274, WO2018044105, WO2018044640, WO2018044903, WO2018044948, WO2018047894, WO2018049118, WO2018049120, WO2018049124, WO2018053029, WO2018053270, WO2018053468, WO2018057776, WO2018057823, WO2018064436, WO2018071792, WO2018071873, WO2018075304, WO2018075375, WO2018075740, WO2018075820, WO2018081370, WO2018081375, WO2018081437, WO2018083248, WO2018085359, WO2018085533, WO2018086139, WO2018089335, WO2018089532, WO2018089890, WO2018091444, WO2018093841, WO2018094112, WO2018094414, WO2018098168, WO2018098348, WO2018098362, WO2018099539, WO2018099978, WO2018102589, WO2018102597. WO2018102785, WO2018104554, WO2018111890, WO2018113781, WO2018115885, WO2018119118, WO2018119314, WO2018119351, WO2018127787, WO2018140586, WO2018140729, WO2018146189, WO2018146253, WO2018146549, WO2018146612, WO2018148585, WO2018151836, WO2018156494, WO2018160917, WO2018165619, WO2018174408, WO2018175476, WO2018175790, WO2018175833, WO2018177220, WO2018178040, WO2018181866, WO2018183041, WO2018183173, WO2018184558, WO2018185043, WO2018187158, WO2018189220, WO2018191074, WO2018191502, WO2018195302, WO2018204303, WO2018208625, WO2018212656, WO2018213260, WO2018215995, WO2018220040, WO2018222675, WO2018222711, WO2018223051, WO2018225041, WO2018226776, WO2018229193, WO2018236904, WO2018237064, WO2018237157, WO2018237326, WO2018237335, WO2019005503, WO2019005756, WO2019006162, WO2019010314, WO2019014091, WO2019018538, WO2019023148, WO2019023410, WO2019027935, WO2019036855, WO2019037711, WO2019040471, WO2019046856, WO2019046858, WO2019046859, WO2019050326, WO2019053612, WO2019055537, WO2019059411, WO2019060707, WO2019066535, WO2019066536, WO2019067978, WO2019068904, WO2019074973, WO2019089472, WO2019089832, WO2019071206, WO2019057805, WO2018237097, WO2018237095, WO2018225781, WO2018187642, WO2018158247, WO2018144773, WO2018136440, WO2018102654, WO2018093331, WO2018071718, WO2018022505, WO2018022407, WO2017177181, WO2017136195, WO2017112824, WO2017104783, WO2017084026, WO2017074065, WO2017074063, WO2017074061, WO2017066204, WO2017062334, WO2017049011, the contents of each of which are herein incorporated by reference in their entirety.

### Antibodies for the Treatment of Nervous System Diseases

[0730] In some embodiments, the payload region of the AAV particle comprises one or more nucleic acid sequences encoding nervous system disease-associated antibodies, variants or fragments thereof.

[0731] In some embodiments, the payload region of the AAV particle comprises one or more nucleic acid sequences encoding one or more of the payload antibody polypeptides listed in Table 7, Table 8, Table 9, Table 10, or variants or fragments thereof. As used herein, “antibody polynucleotide” refers to a nucleic acid sequence encoding an antibody polypeptide.

[0732] In some embodiments, the payload region of the AAV particle comprises one or more nucleic acid sequences listed in Table 7, Table 8, Table 9, Table 10, or variants or fragments thereof.

[0733] In some embodiments, the payload region may encode antibodies associated with misfolded SOD1 monomers and/or dimers as described by Maier et al. 2018 (Sci Transl Med. 2018 Dec. 5; 10(470); the contents of which are herein incorporated by reference in their entirety).

[0734] In some embodiments, payloads may encode APP associated antibodies taught in U.S. Pat. No. 8,961,972, the contents of which are herein incorporated by reference in their entirety. Such embodiments may include antibody LY3002813 or variants or fragments thereof. In some embodiments, the payload region encodes antibody heavy chain variable regions such as but not limited to SEQ ID NO: 11, 36 and/or 47 of U.S. Pat. No. 8,961,972. In some embodiments, the payload region encodes antibody heavy chain variable regions such as but not limited to SEQ ID NO: 12, 13, 42, 37, and/or 48 of U.S. Pat. No. 8,961,972. In some embodiments, the payload region encodes antibody heavy chain regions such as but not limited to SEQ ID NO: 14, 38 and/or 49 of US Patent Number U88961972. In some embodiments, the payload region encodes antibody heavy chain variable regions such as but not limited to SEQ ID NO: 15, 16, 44, 39, and/or 50 of U.S. Pat. No. 8,961,972.

[0735] In some embodiments, the payload region of the AAV particle comprises a nucleic acid sequence encoding a payload antibody with at least 50% identity to one or more payload antibody polypeptides listed in Table 7, Table 8, Table 9, Table 10. The encoded antibody polypeptide may have 50%, 51%, 52%, 53%, 54%, 55%, 56%, 57%, 58%, 59%, 60%, 61%, 62%, 63%, 64%, 65%, 66%, 67%, 68%, 69%, 70%, 71%, 72%, 73%, 74%, 75%, 76%, 77%, 78%, 79%, 80%, 81%, 82%, 83%, 84%, 85%, 86%, 87%, 88%, 89%, 90%,91%,92%, 93%, 94%, 95%, 96%, 97%,98%,99%, or 100% identity to one or more of the payload antibody polypeptides listed in Table 7, Table 8, Table 9, Table 10, or variants or fragments thereof.

[0736] In some embodiments, the full sequence of the encoded antibody polypeptide may have 50%, 51%, 52%, 53%, 54%, 55%, 56%, 57%, 58%, 59%, 60%, 61%, 62%,63%,64%, 65%, 66%,67%, 68%, 69%, 70%, 71%, 72%, 73%, 74%, 75%, 76%, 77%, 78%, 79%, 80%, 81%, 82%, 83%, 84%, 85%, 86%, 87%, 88%, 89%, 90%, 91%, 92%, 93%, 94%, 95%, 96%, 97%, 98%, 99%, or 100% identity to one or more of the payload antibody polypeptides listed in Table 7, Table 8, Table 9, Table 10, or variants or fragments thereof.

[0737] In some embodiments, the variable region sequence(s) of the encoded antibody polypeptide may have 50%, 51%, 52%, 53%, 54%, 55%, 56%, 57%, 58%, 59%, 60%, 61%, 62%, 63%, 64%, 65%, 66%, 67%, 68%, 69%, 70%, 71%, 72%, 73%, 74%, 75%, 76%, 77%, 78%, 79%, 80%, 81%, 82%, 83%, 84%,85%, 86%, 87%, 88%, 89%, 90%, 91%, 92%, 93%, 94%, 95%, 96%, 97%, 98%, 99%, or 100% identity to one or more of the payload antibody polypeptides listed in Table 7, Table 8, Table 9, Table 10, or variants or fragments thereof.

[0738] In some embodiments, the heavy chain of the encoded antibody polypeptide may have 50%, 51%, 52%, 53%, 54%, 55%, 56%, 57%, 58%, 59%, 60%, 61%, 62%, 63%, 64%, 65%, 66%, 67%, 68%, 69%, 70%, 71%, 72%, 73%, 74%, 75%, 76%, 77%, 78%, 79%, 80%, 81%, 82%, 83%, 84%, 85%, 86%, 87%, 88%, 89%, 90%, 91%, 92%, 93%, 94%, 95%, 96%, 97%, 98%, 99%, or 100% identity to one or more of the payload heavy chain antibody polypeptides listed in Table 7, Table 8, Table 9, Table 10, or variants or fragments thereof.

[0739] In some embodiments, the light chain of the encoded antibody polypeptide may have 50%, 51%, 52%, 53%, 54%, 55%, 56%, 57%, 58%, 59%, 60%, 61%, 62%, 63%, 64%, 65%, 66%, 67%, 68%, 69%, 70%, 71%, 72%, 73%, 74%, 75%, 76%, 77%, 78%, 79%, 80%, 81%, 82%, 83%, 84%, 85%, 86%, 87%, 88%, 89%, 90%, 91%, 92%, 93%, 94%, 95%, 96%, 97%, 98%, 99%, or 100% identity to one or more of the payload light chain antibody polypeptides listed in Table 7, Table 8, Table 9, Table 10, or variants or fragments thereof.

[0740] In some embodiments, the CDR region of the encoded antibody polypeptide may have 50%, 51%,52%, 53%,54%, 55%, 56%, 57%, 58%, 59%, 60%, 61%, 62%, 63%, 64%, 65%, 66%, 67%, 68%, 69%, 70%, 71%, 72%, 73%, 74%, 75%, 76%, 77%, 78%, 79%, 80%,81%,82%, 83%,84%,85%, 86%, 87%, 88%, 89%, 90%,91%, 92%, 93%,94%,95%, 96%,97%,98%, 99%, or 100% identity to the CDRs of one or more of the payload antibody polypeptides listed in Table 7, Table 8, Table 9, Table 10, or variants or fragments thereof.

[0741] In some embodiments, the payload antibody has 90% identity to one or more of the antibody polypeptides listed in Table 7, Table 8, Table 9, Table 10, or variants or fragments thereof.

[0742] In some embodiments, the payload antibody has 91% identity to one or more of the antibody polypeptides listed in Table 7, Table 8, Table 9, Table 10, or variants or fragments thereof.

[0743] In some embodiments, the payload antibody has 92% identity to one or more of the antibody polypeptides listed in Table 7, Table 8, Table 9, Table 10, or variants or fragments thereof.

[0744] In some embodiments, the payload antibody has 93% identity to one or more of the antibody polypeptides listed in Table 7, Table 8, Table 9, Table 10, or variants or fragments thereof.

[0745] In some embodiments, the payload antibody has 94% identity to one or more of the antibody polypeptides listed in Table 7, Table 8, Table 9, Table 10, or variants or fragments thereof.

[0746] In some embodiments, the payload antibody has 95% identity to one or more of the antibody polypeptides listed in Table 7, Table 8, Table 9, Table 10, or variants or fragments thereof.

[0747] In some embodiments, the payload antibody has 96% identity to one or more of the antibody polypeptides listed in Table 7, Table 8, Table 9, Table 10, or variants or fragments thereof.

[0748] In some embodiments, the payload antibody has 97% identity to one or more of the antibody polypeptides listed in Table 7, Table 8, Table 9, Table 10, or variants or fragments thereof.

[0749] In some embodiments, the payload antibody has 98% identity to one or more of the antibody polypeptides listed in Table 7, Table 8, Table 9, Table 10, or variants or fragments thereof.

[0750] In some embodiments, the payload antibody has 99% identity to one or more of the antibody polypeptides listed in Table 7, Table 8, Table 9, Table 10, or variants or fragments thereof.

[0751] In some embodiments, the payload antibody has 100% identity to one or more of the antibody polypeptides listed in Table 7, Table 8, Table 9, Table 10, or variants or fragments thereof.

[0752] In some embodiments, the payload region of the AAV particle comprises a nucleic acid sequence with at least 50% identity to one or more nucleic acid sequences listed in Table 7, Table 8, Table 9, Table 10, or variants or fragments thereof. The payload nucleic acid sequence may have 50%, 51%, 52%, 53%, 54%, 55%, 56%, 57%, 58%, 59%, 60%, 61%, 62%, 63%, 64%, 65%, 66%, 67%, 68%, 69%, 70%, 71%, 72%, 73%, 74%, 75%, 76%, 77%, 78%, 79%, 80%, 81%, 82%, 83%, 84%, 85%, 86%, 87%, 88%,89%, 90%, 91%, 92%, 93%, 94%, 95%, 96%, 97%, 98%, 99%, or 100% identity to one or more nucleic acid sequences listed in Table 7, Table 8, Table 9, Table 10, or variants or fragments thereof.

[0753] In some embodiments, the payload nucleic acid sequence has 90% identity to one or more of the nucleic acid sequences listed in Table 7, Table 8, Table 9, Table 10, or variants or fragments thereof.

[0754] In some embodiments, the payload nucleic acid sequence has 91% identity to one or more of the nucleic acid sequences listed in Table 7, Table 8, Table 9, Table 10, or variants or fragments thereof.

[0755] In some embodiments, the payload nucleic acid sequence has 92% identity to one or more of the nucleic acid sequences listed in Table 7, Table 8, Table 9, Table 10, or variants or fragments thereof.

[0756] In some embodiments, the payload nucleic acid sequence has 93% identity to one or more of the nucleic acid sequences listed in Table 7, Table 8, Table 9, Table 10, or variants or fragments thereof.

[0757] In some embodiments, the payload nucleic acid sequence has 94% identity to one or more of the nucleic acid sequences listed in Table 7, Table 8, Table 9, Table 10, or variants or fragments thereof.

[0758] In some embodiments, the payload nucleic acid sequence has 95% identity to one or more of the nucleic acid sequences listed in Table 7, Table 8, Table 9, Table 10, or variants or fragments thereof.

[0759] In some embodiments, the payload nucleic acid sequence has 96% identity to one or more of the nucleic acid sequences listed in Table 7, Table 8, Table 9, Table 10, or variants or fragments thereof.

[0760] In some embodiments, the payload nucleic acid sequence has 97% identity to one or more of the nucleic acid sequences listed in Table 7, Table 8, Table 9, Table 10, or variants or fragments thereof.

[0761] In some embodiments, the payload nucleic acid sequence has 98% identity to one or more of the nucleic acid sequences listed in Table 7, Table 8, Table 9, Table 10, or variants or fragments thereof.

[0762] In some embodiments, the payload nucleic acid sequence has 99% identity to one or more of the nucleic acid sequences listed in Table 7, Table 8, Table 9, Table 10, or variants or fragments thereof.

[0763] In some embodiments, the payload nucleic acid sequence has 100% identity to one or more of the nucleic acid sequences listed in Table 7, Table 8, Table 9, Table 10, or variants or fragments thereof.

[0764] In some embodiments, the payload antibody may be variants of any of the antibody polypeptides listed in Table 7, that exclude one or more amino acids designated as “X” or “x” in the described polypeptide sequence, wherein X may represent any amino acid. In some embodiments, the payload nucleic acid sequence may be variants of any of the nucleic acid sequences listed in Table 7, that exclude one or more nucleic acids designated as “n” or “N” in the described nucleic acid sequence, wherein n may represent any nucleic acid.

TABLE 7
Nervous system disease antibodies

| | | Type | | SEQ |
|---|---|---|---|---|
| Ab ID | Component | (PRT/DNA) | Reference | ID NO |
| NEU1 | Fab | PRT | U.S. 10/093,947; SEQ ID NO: 3 | 7575 |
| NEU2 | HC | DNA | U.S. 10/093,947; SEQ ID NO: 1 | 7576 |
| NEU3 | HC | PRT | WO2013130393; SEQ ID NO: 2 | 7577 |
| NEU4 | HC | PRT | U.S. Pat. No. 9,283,271; SEQ ID NO: 70 | 7578 |
| NEU5 | HC | PRT | U.S. Pat. No. 9,283,271; SEQ ID NO: 66 | 7579 |
| NEU6 | HC | PRT | U.S. Pat. No. 9,283,271; SEQ ID NO: 78 | 7580 |
| NEU7 | HC | PRT | U.S. Pat. No. 9,283,271; SEQ ID NO: 60 | 7581 |
| NEU8 | HC | PRT | U.S. Pat. No. 9,283,271; SEQ ID NO: 68 | 7582 |
| NEU9 | HC | PRT | U.S. Pat. No. 9,283,271; SEQ ID NO: 80 | 7583 |
| NEU10 | HC | PRT | U.S. Pat. No. 9,283,271; SEQ ID NO: 82 | 7584 |
| NEU11 | HC | PRT | U.S. Pat. No. 9,283,271; SEQ ID NO: 72 | 7585 |
| NEU12 | HC | PRT | U.S. Pat. No. 9,283,271; SEQ ID NO: 76 | 7586 |
| NEU13 | HC | PRT | U.S. Pat. No. 9,283,271; SEQ ID NO: 74 | 7587 |
| NEU14 | HC | PRT | U.S. Pat. No. 9,283,271; SEQ ID NO: 64 | 7588 |
| NEU15 | HC | PRT | U.S. Pat. No. 9,283,271; SEQ ID NO: 62 | 7589 |
| NEU16 | LC | PRT | U.S. Pat. No. 9,283,271; SEQ ID NO: 65 | 7590 |
| NEU17 | LC | PRT | U.S. Pat. No. 9,283,271; SEQ ID NO: 71 | 7591 |
| NEU18 | LC | PRT | U.S. Pat. No. 9,283,271; SEQ ID NO: 61 | 7592 |
| NEU19 | LC | PRT | U.S. Pat. No. 9,283,271; SEQ ID NO: 69 | 7593 |
| NEU20 | LC | PRT | U.S. Pat. No. 9,283,271; SEQ ID NO: 83 | 7594 |
| NEU21 | LC | PRT | U.S. Pat. No. 9,283,271; SEQ ID NO: 79 | 7595 |
| NEU22 | LC | PRT | U.S. Pat. No. 9,283,271; SEQ ID NO: 67 | 7596 |
| NEU23 | LC | PRT | U.S. Pat. No. 9,283,271; SEQ ID NO: 63 | 7597 |
| NEU24 | LC | PRT | U.S. Pat. No. 9,283,271; SEQ ID NO: 75 | 7598 |
| NEU25 | LC | PRT | U.S. Pat. No. 9,283,271; SEQ ID NO: 77 | 7599 |
| NEU26 | LC | PRT | U.S. Pat. No. 9,283,271; SEQ ID NO: 73 | 7600 |
| NEU27 | LC | PRT | U.S. Pat. No. 9,283,271; SEQ ID NO: 81 | 7601 |
| NEU28 | VH | DNA | US20160168267; SEQ ID NO: 27 | 7602 |
| NEU29 | VH | DNA | US20160168267; SEQ ID NO: 47 | 7603 |
| NEU30 | VH | DNA | U.S. Pat. No. 9,283,271; SEQ ID NO: 47 | 7604 |
| NEU31 | VH | DNA | US20160168267; SEQ ID NO: 31 | 7605 |
| NEU32 | VH | DNA | US20160168267; SEQ ID NO: 39 | 7606 |
| NEU33 | VH | DNA | US20160168267; SEQ ID NO: 7 | 7607 |
| NEU34 | VH | DNA | US20160168267; SEQ ID NO: 11 | 7608 |
| NEU35 | VH | DNA | US20160168267; SEQ ID NO: 15 | 7609 |
| NEU36 | VH | DNA | US20160168267; SEQ ID NO: 43 | 7610 |
| NEU37 | VH | DNA | US20160168267; SEQ ID NO: 35 | 7611 |
| NEU38 | VH | DNA | US20160168267; SEQ ID NO: 19 | 7612 |
| NEU39 | VH | DNA | U.S. Pat. No. 9,283,271; SEQ ID NO: 19 | 7613 |
| NEU40 | VH | DNA | US20160168267; SEQ ID NO: 3 | 7614 |
| NEU41 | VH | DNA | US20160168267; SEQ ID NO: 23 | 7615 |
| NEU42 | VH | DNA | U.S. Pat. No. 9,283,271; SEQ ID NO: 27 | 7616 |
| NEU43 | VH | PRT | U.S. Pat. No. 9,283,271; SEQ ID NO: 12 | 7617 |
| NEU44 | VH | PRT | U.S. Pat. No. 9,283,271; SEQ ID NO: 8 | 7618 |
| NEU45 | VH | PRT | U.S. Pat. No. 9,283,271; SEQ ID NO: 16 | 7619 |
| NEU46 | VH | PRT | U.S. Pat. No. 9,283,271; SEQ ID NO: 36 | 7620 |
| NEU47 | VH | PRT | U.S. Pat. No. 9,283,271; SEQ ID NO: 40 | 7621 |
| NEU48 | VL | DNA | US20160168267; SEQ ID NO: 49 | 7622 |
| NEU49 | VL | DNA | US20160168267; SEQ ID NO: 41 | 7623 |
| NEU50 | VL | DNA | US20160168267; SEQ ID NO: 21 | 7624 |
| NEU51 | VL | DNA | US20160168267; SEQ ID NO: 5 | 7625 |
| NEU52 | VL | DNA | US20160168267; SEQ ID NO: 13 | 7626 |
| NEU53 | VL | DNA | U.S. Pat. No. 9,283,271; SEQ ID NO: 25 | 7627 |
| NEU54 | VL | DNA | US20160168267; SEQ ID NO: 45 | 7628 |
| NEU55 | VL | DNA | US20160168267; SEQ ID NO: 33 | 7629 |
| NEU56 | VL | DNA | US20160168267; SEQ ID NO: 17 | 7630 |
| NEU57 | VL | DNA | US20160168267; SEQ ID NO: 37 | 7631 |
| NEU58 | VL | DNA | U.S. Pat. No. 9,283,271; SEQ ID NO: 9 | 7632 |
| NEU59 | VL | PRT | U.S. Pat. No. 9,283,271; SEQ ID NO: 6 | 7633 |
| NEU60 | VL | PRT | U.S. Pat. No. 9,283,271; SEQ ID NO: 14 | 7634 |
| NEU61 | VL | PRT | U.S. Pat. No. 9,283,271; SEQ ID NO: 42 | 7635 |
| NEU62 | VL | PRT | U.S. Pat. No. 9,283,271; SEQ ID NO: 34 | 7636 |
| NEU63 | VL | PRT | U.S. Pat. No. 9,283,271; SEQ ID NO: 18 | 7637 |
| NEU64 | VL | PRT | U.S. Pat. No. 9,283,271; SEQ ID NO: 10 | 7638 |
| NEU65 | VL | PRT | U.S. Pat. No. 9,283,271; SEQ ID NO: 38 | 7639 |
| NEU66 | FAB | PRT | WO2017055540; SEQ ID NO: 4 | 7640 |
| NEU67 | Full Antibody | PRT | WO2015155694; SEQ ID NO: 61 | 7641 |
| NEU68 | Full Antibody | PRT | WO2015155694; SEQ ID NO: 63 | 7642 |
| NEU69 | HC | PRT | U.S. Pat. No. 8,562,991; SEQ ID NO: 53 | 7643 |
| NEU70 | HC | PRT | U.S. Pat. No. 8,562,991; SEQ ID NO: 55 | 7644 |
| NEU71 | HC | PRT | U.S. Pat. No. 8,562,991; SEQ ID NO: 57 | 7645 |
| NEU72 | HC | PRT | U.S. Pat. No. 8,562,991; SEQ ID NO: 61 | 7646 |
| NEU73 | HC | PRT | U.S. Pat. No. 8,562,991; SEQ ID NO: 63 | 7647 |
| NEU74 | HC | PRT | U.S. Pat. No. 8,562,991; SEQ ID NO: 65 | 7648 |
| NEU75 | HC | PRT | U.S. Pat. No. 8,562,991; SEQ ID NO: 66 | 7649 |
| NEU76 | HC | PRT | U.S. Pat. No. 8,562,991; SEQ ID NO: 68 | 7650 |
| NEU77 | HC | PRT | U.S. Pat. No. 8,562,991; SEQ ID NO: 70 | 7651 |
| NEU78 | HC | PRT | U.S. Pat. No. 8,562,991; SEQ ID NO: 73 | 7652 |
| NEU79 | HC | PRT | U.S. Pat. No. 8,562,991; SEQ ID NO: 74 | 7653 |
| NEU80 | HC | PRT | U.S. Pat. No. 8,562,991; SEQ ID NO: 75 | 7654 |
| NEU81 | HC | PRT | WO2018195457; SEQ ID NO: 1 | 7655 |
| NEU82 | HC | PRT | WO2018195457; SEQ ID NO: 3 | 7656 |
| NEU83 | HC | PRT | WO2018083628; SEQ ID NO: 1 | 7657 |
| NEU84 | HC | PRT | WO2018083628; SEQ ID NO: 31 | 7658 |
| NEU85 | HC | PRT | WO2017062682; SEQ ID NO: 15 | 7659 |
| NEU86 | HC | PRT | WO2017062682; SEQ ID NO: 27 | 7660 |
| NEU87 | LC | PRT | U.S. Pat. No. 8,562,991; SEQ ID NO: 54 | 7661 |
| NEU88 | LC | PRT | U.S. Pat. No. 8,562,991; SEQ ID NO: 56 | 7662 |
| NEU89 | LC | PRT | U.S. Pat. No. 8,562,991; SEQ ID NO: 58 | 7663 |
| NEU90 | LC | PRT | U.S. Pat. No. 8,562,991; SEQ ID NO: 62 | 7664 |
| NEU91 | LC | PRT | U.S. Pat. No. 8,562,991; SEQ ID NO: 64 | 7665 |
| NEU92 | LC | PRT | U.S. Pat. No. 8,562,991; SEQ ID NO: 67 | 7666 |
| NEU93 | LC | PRT | U.S. Pat. No. 8,562,991; SEQ ID NO: 71 | 7667 |
| NEU94 | LC | PRT | U.S. Pat. No. 8,562,991; SEQ ID NO: 72 | 7668 |
| NEU95 | LC | PRT | U.S. Pat. No. 8,562,991; SEQ ID NO: 76 | 7669 |
| NEU96 | LC | PRT | WO2017055540; SEQ ID NO: 1 | 7670 |
| NEU97 | LC | PRT | WO2017055540; SEQ ID NO: 3 | 7671 |
| NEU98 | LC | PRT | WO2017055540; SEQ ID NO: 14 | 7672 |
| NEU99 | LC | PRT | WO2018195457; SEQ ID NO: 2 | 7673 |
| NEU100 | LC | PRT | WO2018195457; SEQ ID NO: 4 | 7674 |
| NEU101 | LC | PRT | WO2018083628; SEQ ID NO: 12 | 7675 |
| NEU102 | VH | PRT | WO2017210278; SEQ ID NO: 8 | 7676 |
| NEU103 | VH | PRT | WO2017210278; SEQ ID NO: 16 | 7677 |
| NEU104 | VH | PRT | U.S. Pat. No. 8,562,991; SEQ ID NO: 19 | 7678 |
| NEU105 | VH | PRT | U.S. Pat. No. 8,562,991; SEQ ID NO: 20 | 7679 |
| NEU106 | VH | PRT | U.S. Pat. No. 8,562,991; SEQ ID NO: 21 | 7680 |
| NEU107 | VH | PRT | U.S. Pat. No. 8,562,991; SEQ ID NO: 25 | 7681 |
| NEU108 | VH | PRT | U.S. Pat. No. 8,562,991; SEQ ID NO: 26 | 7682 |
| NEU109 | VH | PRT | U.S. Pat. No. 8,562,991; SEQ ID NO: 27 | 7683 |
| NEU110 | VH | PRT | WO2015155694; SEQ ID NO: 64 | 7684 |
| NEU111 | VH | PRT | WO2017055540; SEQ ID NO: 20 | 7685 |
| NEU112 | VH | PRT | WO2018083628; SEQ ID NO: 2 | 7686 |
| NEU113 | VL | PRT | WO2017210278; SEQ ID NO: 9 | 7687 |
| NEU114 | VL | PRT | WO2017210278; SEQ ID NO: 10 | 7688 |
| NEU115 | VL | PRT | WO2017210278; SEQ ID NO: 15 | 7689 |
| NEU116 | VL | PRT | U.S. Pat. No. 8,562,991; SEQ ID NO: 22 | 7690 |
| NEU117 | VL | PRT | U.S. Pat. No. 8,562,991; SEQ ID NO: 23 | 7691 |
| NEU118 | VL | PRT | U.S. Pat. No. 8,562,991; SEQ ID NO: 24 | 7692 |
| NEU119 | VL | PRT | U.S. Pat. No. 8,562,991; SEQ ID NO: 28 | 7693 |
| NEU120 | VL | PRT | U.S. Pat. No. 8,562,991; SEQ ID NO: 29 | 7694 |
| NEU121 | VL | PRT | U.S. Pat. No. 8,562,991; SEQ ID NO: 30 | 7695 |
| NEU122 | VL | PRT | WO2018083628; SEQ ID NO: 13 | 7696 |

[0765] In some embodiments, the payload region of the AAV particle may include a nucleic acid sequence encoding a polypeptide which is may be an antibody, an antibody-based composition, or a fragment thereof, which when expressed, results in the silencing, suppression, and/or reduction of any one of mutant, variant and/or wild type APP (amyloid beta precursor protein) gene protein products. In some embodiments, the payload region of the AAV particle may include one or more nucleic acid sequences encoding APP associated antibodies, variants or fragments thereof.

[0766] In some embodiments, payloads may encode APP associated antibodies taught in U.S. Pat. No. 8,961,972, the contents of which are herein incorporated by reference in their entirety. Such embodiments may include antibody LY3002813 or variants or fragments thereof. In some embodiments, the payload region encodes antibody heavy chain variable regions such as but not limited to SEQ ID NO: 11, 36 and/or 47 of US Patent Number US8961972. In some embodiments, the payload region encodes antibody heavy chain variable regions such as but not limited to SEQ ID NO: 12, 13, 42, 37, and/or 48 of U.S. Pat. No. 8,961,972. In some embodiments, the payload region encodes antibody heavy chain regions such as but not limited to SEQ ID NO: 14, 38 and/or 49 of U.S. Pat. No. 8,961,972. In some embodiments, the payload region encodes antibody heavy chain variable regions such as but not limited to SEQ ID NO: 15, 16, 44, 39, and/or 50 of U.S. Pat. No. 8,961,972.

[0767] In some embodiments, payloads may encode beta-secretase 1 (BACE1) associated antibodies taught in U.S. Pat. No. 8,956,614 or variants or fragments thereof; the contents of which are herein incorporated by reference in their entirety.

[0768] In some embodiments, payloads may encode APP associated antibodies (or fragments thereof) such as but not limited to PMN310, described in Gibbs et al. 2019 (Sci Rep. 2019; 9: 9870; the contents of which are herein incorporated by reference in their entirety).

[0769] In some embodiments, payloads may encode APP associated antibodies (or fragments thereof) such as but not limited to AF1, described in Julian et al. (Journal of Biological Chemistry, 2019 294, 8438-8451; the contents of which are herein incorporated by reference in their entirety).

[0770] In some embodiments, ALS may be associated with cytoplasmic aggregation of TAR DNA binding protein 43 (TDP43). Payload regions described herein may encode TAR DNA binding protein 43 (TDP43) associated antibodies (or fragments). As a non-limiting example, the antibodies described herein may target the RNA recognition motif 1 (RRM1) of TDP43. In some embodiments, the payload regions of the present disclosure may encode the VH7Vk9 antibody described by Pozzi et al. (J Clin Invest. 2019; 129(4):1581-1595; the contents of which are herein incorporated by reference in their entirety). In some embodiments, the payload regions of the present disclosure may encode the VH7Vk9 antibody derived from the sequences described in US Patent Number U.S. Ser. No. 10/202,443; the contents of which are herein incorporated by reference in their entirety). As a non-limiting example, the heavy chain variable region of the VH7Vk9 antibody may be derived from SEQ ID NOs: 1, 2, 4, and/or 5 of U.S. Ser. No. 10/202,443; and light chain variable region derived from SEQ ID Nos 3, and/or 6 of U.S. Ser. No. 10/202,443.

[0771] In some embodiments, payloads may encode APP-associated antibodies (or fragments thereof) taught in U.S. Pat. No. 9,944,696, the contents of each of which are herein incorporated by reference in their entirety. Such embodiments may include antibody Donanemab, or fragments thereof.

[0772] In some embodiments, payloads may encode APP-associated antibodies (or fragments thereof) taught in US Publication Number US20180333487, the contents of each of which are herein incorporated by reference in their entirety. Such embodiments may include antibody ducanumab, or fragments thereof.

[0773] In some embodiments, payloads may encode APP-associated antibodies (or fragments thereof) taught in International Publication Number WO2019040612, the contents of each of which are herein incorporated by reference in their entirety. Such embodiments may include antibody Adacanumab, or fragments thereof.

[0774] As a non-limiting example, the APP associated antibody may have 50%, 51%, 52%, 53%, 54%, 55%, 56%, 57%, 58%, 59%, 60%, 61%, 62%, 63%, 64%, 65%, 66%, 67%, 68%, 69%, 70%, 71%, 72%, 73%, 74%, 75%, 76%, 77%, 78%, 79%, 80%,81%, 82%, 83%, 84%, 85%, 86%, 87%, 88%, 89%, 90%, 91%, 92%, 93%, 94%, 95%, 96%, 97%, 98%, 99%, or 100% identity to one or more of the antibody polypeptides or polynucleotides listed in Table 8, or variants or fragments thereof. As a non-limiting example, the APP associated antibody may have 50%, 51%, 52%, 53%, 54%, 55%, 56%, 57%, 58%, 59%, 60%, 61%, 62%, 63%, 64%, 65%, 66%, 67%, 68%, 69%, 70%, 71%, 72%, 73%, 74%, 75%, 76%, 77%, 78%, 79%, 80%, 81%, 82%, 83%, 84%, 85%, 86%, 87%, 88%, 89%, 90%, 91%, 92%, 93%,94%,95%, 96%,97%,98%, 99%, or 100% identity to one or more of the antibody polypeptides or polynucleotides listed in Table 8, or variants or fragments thereof.

[0775] In some embodiments, the payload antibody may be variants of any of the antibody polypeptides listed in Table 8, that exclude one or more amino acids designated as “X” or “x” in the described polypeptide sequence, wherein X may represent any amino acid. In some embodiments, the payload nucleic acid sequence may be variants of any of the nucleic acid sequences listed in Table 8, that exclude one or more nucleic acids designated as “n” or “N” in the described nucleic acid sequence, wherein n may represent any nucleic acid.

TABLE 8
Amyloid antibodies

| | | Type | | SEQ |
|---|---|---|---|---|
| Ab ID | Component | (PRT/DNA) | Reference | ID NO |
| AMYL1 | CDR | DNA | U.S. Pat. No. 8,025,878; SEQ ID NO: 255 | 7697 |
| AMYL2 | CDR | DNA | U.S. Pat. No. 8,025,878; SEQ ID NO: 253 | 7698 |
| AMYL3 | CDR | DNA | U.S. Pat. No. 8,025,878; SEQ ID NO: 167 | 7699 |
| AMYL4 | CDR | DNA | U.S. Pat. No. 8,025,878; SEQ ID NO: 171 | 7700 |
| AMYL5 | CDR | DNA | U.S. Pat. No. 8,025,878; SEQ ID NO: 169 | 7701 |
| AMYL6 | CDR | DNA | U.S. Pat. No. 8,025,878; SEQ ID NO: 257 | 7702 |
| AMYL7 | CDR | PRT | WO2016087944; WO2017211827; SEQ ID NO: 5 | 7703 |
| AMYL8 | CDR | PRT | U.S. 10/047,121; SEQ ID NO: 33 | 7704 |
| AMYL9 | CDR | PRT | WO2017211827; SEQ ID NO: 9 | 7705 |
| AMYL10 | CDR | PRT | WO2015038888; SEQ ID NO: 23 | 7706 |
| AMYL11 | CDR | PRT | U.S. 10/047,121; SEQ ID NO: 20 | 7707 |
| AMYL12 | CDR | PRT | U.S. 10/047,121; SEQ ID NO: 19 | 7708 |
| AMYL13 | CDR | PRT | WO2016087944: WO2017211827; SEQ ID NO: 8 | 7709 |
| AMYL14 | CDR | PRT | U.S. 10/047,121; SEQ ID NO: 38 | 7710 |
| AMYL15 | CDR | PRT | U.S. 10/047,121; SEQ ID NO: 18 | 7711 |
| AMYL16 | CDR | PRT | WO2015038888; SEQ ID NO: 26 | 7712 |
| AMYL17 | CDR | PRT | WO2015038888; SEQ ID NO: 24 | 7713 |
| AMYL18 | CDR | PRT | WO2015038888; SEQ ID NO: 28 | 7714 |
| AMYL19 | CDR | PRT | WO2016087944; WO2017211827; SEQ ID NO: 3 | 7715 |
| AMYL20 | CDR | PRT | U.S. 10/047,121; SEQ ID NO: 35 | 7716 |
| AMYL21 | CDR | PRT | WO2016087944; WO2017211827; SEQ ID NO: 4 | 7717 |
| AMYL22 | CDR | PRT | U.S. 10/047,121; SEQ ID NO: 34 | 7718 |
| AMYL23 | CDR | PRT | U.S. Pat. No. 8,025,878; SEQ ID NO: 7 | 7719 |
| AMYL24 | CDR | PRT | U.S. Pat. No. 8,025,878; SEQ ID NO: 26 | 7720 |
| AMYL25 | CDR | PRT | U.S. Pat. No. 8,025,878; SEQ ID NO: 9 | 7721 |
| AMYL26 | CDR | PRT | U.S. Pat. No. 8,025,878; SEQ ID NO: 32 | 7722 |
| AMYL27 | CDR | PRT | U.S. Pat. No. 8,025,878; SEQ ID NO: 31 | 7723 |
| AMYL28 | CDR | PRT | U.S. Pat. No. 8,025,878; SEQ ID NO: 3 | 7724 |
| AMYL29 | CDR | PRT | U.S. Pat. No. 8,025,878; SEQ ID NO: 6 | 7725 |
| AMYL30 | CDR | PRT | U.S. Pat. No. 8,025,878; SEQ ID NO: 10 | 7726 |
| AMYL31 | CDR | PRT | U.S. Pat. No. 8,025,878; SEQ ID NO: 34 | 7727 |
| AMYL32 | CDR | PRT | U.S. Pat. No. 8,025,878; SEQ ID NO: 11 | 7728 |
| AMYL33 | CDR | PRT | U.S. Pat. No. 8,025,878; SEQ ID NO: 36 | 7729 |
| AMYL34 | CDR | PRT | U.S. Pat. No. 8,025,878; SEQ ID NO: 1 | 7730 |
| AMYL35 | CDR | PRT | U.S. Pat. No. 8,025,878; SEQ ID NO: 29 | 7731 |
| AMYL36 | CDR | PRT | U.S. Pat. No. 8,025,878; SEQ ID NO: 28 | 7732 |
| AMYL37 | CDR | PRT | U.S. Pat. No. 8,025,878; SEQ ID NO: 27 | 7733 |
| AMYL38 | CDR | PRT | U.S. Pat. No. 8,025,878; SEQ ID NO: 8 | 7734 |
| AMYL39 | CDR | PRT | U.S. Pat. No. 8,025,878; SEQ ID NO: 38 | 7735 |
| AMYL40 | CDR | PRT | U.S. Pat. No. 8,025,878; SEQ ID NO: 2 | 7736 |
| AMYL41 | CDR | PRT | U.S. Pat. No. 8,025,878; SEQ ID NO: 12 | 7737 |
| AMYL42 | CDR | PRT | U.S. Pat. No. 8,961,972; SEQ ID NO: 4 | 7738 |
| AMYL43 | CDR | PRT | U.S. Pat. No. 8,961,972; SEQ ID NO: 35 | 7739 |
| AMYL44 | CDR | PRT | U.S. Pat. No. 8,961,972; SEQ ID NO: 52 | 7740 |
| AMYL45 | CDR | PRT | U.S. Pat. No. 8,961,972; SEQ ID NO: 36 | 7741 |
| AMYL46 | CDR | PRT | U.S. Pat. No. 8,961,972; SEQ ID NO: 41 | 7742 |
| AMYL47 | CDR | PRT | U.S. Pat. No. 8,961,972; SEQ ID NO: 9 | 7743 |
| AMYL48 | CDR | PRT | U.S. Pat. No. 8,961,972; SEQ ID NO: 10 | 7744 |
| AMYL49 | CDR | PRT | U.S. Pat. No. 8,961,972; SEQ ID NO: 46 | 7745 |
| AMYL50 | CDR | PRT | U.S. Pat. No. 8,961,972; SEQ ID NO: 54 | 7746 |
| AMYL51 | CDR | PRT | U.S. Pat. No. 8,961,972; SEQ ID NO: 6 | 7747 |
| AMYL52 | CDR | PRT | U.S. Pat. No. 8,961,972; SEQ ID NO: 40 | 7748 |
| AMYL53 | CDR | PRT | U.S. Pat. No. 8,961,972; SEQ ID NO: 7 | 7749 |
| AMYL54 | CDR | PRT | U.S. Pat. No. 8,961,972; SEQ ID NO: 53 | 7750 |
| AMYL55 | CDR | PRT | U.S. Pat. No. 8,961,972; SEQ ID NO: 3 | 7751 |
| AMYL56 | CDR | PRT | U.S. Pat. No. 8,961,972; SEQ ID NO: 45 | 7752 |
| AMYL57 | CDR | PRT | U.S. Pat. No. 8,961,972; SEQ ID NO: 51 | 7753 |
| AMYL58 | CDR | PRT | U.S. Pat. No. 8,961,972; SEQ ID NO: 5 | 7754 |
| AMYL59 | CDR | PRT | U.S. Pat. No. 8,961,972; SEQ ID NO: 8 | 7755 |
| AMYL60 | CDR | PRT | U.S. Pat. No. 9,222,947; SEQ ID NO: 22 | 7756 |
| AMYL61 | CDR | PRT | U.S. Pat. No. 9,222,947; SEQ ID NO: 23 | 7757 |
| AMYL62 | CDR | PRT | U.S. Pat. No. 9,222,947; SEQ ID NO: 27 | 7758 |
| AMYL63 | CDR | PRT | U.S. Pat. No. 9,222,947; SEQ ID NO: 18 | 7759 |
| AMYL64 | CDR | PRT | U.S. Pat. No. 9,222,947; SEQ ID NO: 19 | 7760 |
| AMYL65 | CDR | PRT | U.S. Pat. No. 9,222,947; SEQ ID NO: 16 | 7761 |
| AMYL66 | CDR | PRT | U.S. Pat. No. 9,222,947; SEQ ID NO: 24 | 7762 |
| AMYL67 | CDR | PRT | U.S. Pat. No. 9,222,947; SEQ ID NO: 25 | 7763 |
| AMYL68 | CDR | PRT | U.S. Pat. No. 9,222,947; SEQ ID NO: 17 | 7764 |
| AMYL69 | FAb | PRT | U.S. 10/047,121; SEQ ID NO: 62 | 7765 |
| AMYL70 | FAb | PRT | U.S. 10/047,121; SEQ ID NO: 50 | 7766 |
| AMYL71 | FAb | PRT | U.S. 10/047,121; SEQ ID NO: 54 | 7767 |
| AMYL72 | FAb | PRT | U.S. 10/047,121; SEQ ID NO: 64 | 7768 |
| AMYL73 | FAb | PRT | U.S. 10/047,121; SEQ ID NO: 56 | 7769 |
| AMYL74 | FAb | PRT | U.S. 10/047,121; SEQ ID NO: 52 | 7770 |
| AMYL75 | FAb | PRT | U.S. 10/047,121; SEQ ID NO: 59 | 7771 |
| AMYL76 | FR | DNA | U.S. Pat. No. 8,025,878; SEQ ID NO: 170 | 7772 |
| AMYL77 | FR | DNA | U.S. Pat. No. 8,025,878; SEQ ID NO: 166 | 7773 |
| AMYL78 | FR | DNA | U.S. Pat. No. 8,025,878; SEQ ID NO: 252 | 7774 |
| AMYL79 | FR | DNA | U.S. Pat. No. 8,025,878; SEQ ID NO: 256 | 7775 |
| AMYL80 | FR | DNA | U.S. Pat. No. 8,025,878; SEQ ID NO: 172 | 7776 |
| AMYL81 | FR | DNA | U.S. Pat. No. 8,025,878; SEQ ID NO: 168 | 7777 |
| AMYL82 | FR | DNA | U.S. Pat. No. 8,025,878; SEQ ID NO: 254 | 7778 |
| AMYL83 | FR | DNA | U.S. Pat. No. 8,025,878; SEQ ID NO: 258 | 7779 |
| AMYL84 | FR | DNA | U.S. Pat. No. 8,025,878; SEQ ID NO: 88 | 7780 |
| AMYL85 | FR | PRT | U.S. Pat. No. 8,025,878; SEQ ID NO: 245 | 7781 |
| AMYL86 | FR | PRT | U.S. Pat. No. 8,025,878; SEQ ID NO: 159 | 7782 |
| AMYL87 | FR | PRT | U.S. Pat. No. 8,025,878; SEQ ID NO: 248 | 7783 |
| AMYL88 | FR | PRT | U.S. Pat. No. 8,025,878; SEQ ID NO: 247 | 7784 |
| AMYL89 | FR | PRT | U.S. Pat. No. 8,025,878; SEQ ID NO: 161 | 7785 |
| AMYL90 | FR | PRT | U.S. Pat. No. 8,025,878; SEQ ID NO: 117 | 7786 |
| AMYL91 | FR | PRT | U.S. Pat. No. 8,025,878; SEQ ID NO: 162 | 7787 |
| AMYL92 | Full antibody | DNA | U.S. Pat. No. 8,025,878; SEQ ID NO: 261 | 7788 |
| AMYL93 | Full antibody | DNA | U.S. Pat. No. 8,025,878; SEQ ID NO: 259 | 7789 |
| AMYL94 | Full antibody | DNA | U.S. Pat. No. 8,025,878; SEQ ID NO: 173 | 7790 |
| AMYL95 | Full antibody | DNA | U.S. Pat. No. 8,025,878; SEQ ID NO: 175 | 7791 |
| AMYL96 | Full antibody | PRT | U.S. Pat. No. 8,025,878; SEQ ID NO: 163 | 7792 |
| AMYL97 | Full antibody | PRT | U.S. Pat. No. 8,025,878; SEQ ID NO: 270 | 7793 |
| AMYL98 | Full antibody | PRT | U.S. Pat. No. 8,025,878; SEQ ID NO: 266 | 7794 |
| AMYL99 | Full antibody | PRT | U.S. Pat. No. 8,025,878; SEQ ID NO: 271 | 7795 |
| AMYL100 | Full antibody | PRT | U.S. Pat. No. 8,025,878; SEQ ID NO: 244 | 7796 |
| AMYL101 | Full antibody | PRT | U.S. Pat. No. 8,025,878; SEQ ID NO: 249 | 7797 |
| AMYL102 | Full antibody | PRT | U.S. Pat. No. 8,025,878; SEQ ID NO: 158 | 7798 |
| AMYL103 | Full antibody | PRT | U.S. Pat. No. 8,025,878; SEQ ID NO: 268 | 7799 |
| AMYL104 | Full antibody | PRT | U.S. Pat. No. 8,025,878; SEQ ID NO: 267 | 7800 |
| AMYL105 | Full antibody | PRT | U.S. Pat. No. 8,025,878; SEQ ID NO: 174 | 7801 |
| AMYL106 | Full antibody | PRT | U.S. Pat. No. 8,025,878; SEQ ID NO: 260 | 7802 |
| AMYL107 | HC | DNA | U.S. Pat. No. 8,961,972; SEQ ID NO: 43 | 7803 |
| AMYL108 | HC | DNA | U.S. Pat. No. 8,961,972; SEQ ID NO: 56 | 7804 |
| AMYL109 | HC | PRT | U.S. 10/047,121; SEQ ID NO: 41 | 7805 |
| AMYL110 | HC | PRT | U.S. 10/047,121; SEQ ID NO: 42 | 7806 |
| AMYL111 | HC | PRT | WO2018081642; SEQ ID NO: 92 | 7807 |
| AMYL112 | HC | PRT | U.S. Pat. No. 8,961,972; SEQ ID NO: 24 | 7808 |
| AMYL113 | HC | PRT | U.S. Pat. No. 8,961,972; SEQ ID NO: 23 | 7809 |
| AMYL114 | HC | PRT | U.S. Pat. No. 8,961,972; SEQ ID NO: 50 | 7810 |
| AMYL115 | HC | PRT | U.S. Pat. No. 8,961,972; SEQ ID NO: 34 | 7811 |
| AMYL116 | HC | PRT | U.S. Pat. No. 8,961,972; SEQ ID NO: 39 | 7812 |
| AMYL117 | LC | DNA | U.S. Pat. No. 8,961,972; SEQ ID NO: 55 | 7813 |
| AMYL118 | LC | PRT | U.S. 10/047,121; SEQ ID NO: 44 | 7814 |
| AMYL119 | LC | PRT | U.S. 10/047,121; SEQ ID NO: 43 | 7815 |
| AMYL120 | LC | PRT | U.S. Pat. No. 8,961,972; SEQ ID NO: 49 | 7816 |
| AMYL121 | LC | PRT | U.S. Pat. No. 8,961,972; SEQ ID NO: 33 | 7817 |
| AMYL122 | LC | PRT | U.S. Pat. No. 8,961,972; SEQ ID NO: 38 | 7818 |
| AMYL123 | LC | PRT | U.S. Pat. No. 8,961,972; SEQ ID NO: 22 | 7819 |
| AMYL124 | VH | DNA | U.S. Pat. No. 8,025,878; SEQ ID NO: 113 | 7820 |
| AMYL125 | VH | DNA | U.S. Pat. No. 8,025,878; SEQ ID NO: 151 | 7821 |
| AMYL126 | VH | DNA | U.S. Pat. No. 8,961,972; SEQ ID NO: 19 | 7822 |
| AMYL127 | VH | DNA | U.S. Pat. No. 8,961,972; SEQ ID NO: 18 | 7823 |
| AMYL128 | VH | PRT | U.S. 10/047,121; SEQ ID NO: 25 | 7824 |
| AMYL129 | VH | PRT | U.S. 10/047,121; SEQ ID NO: 30 | 7825 |
| AMYL130 | VH | PRT | U.S. 10/047,121; SEQ ID NO: 29 | 7826 |
| AMYL131 | VH | PRT | U.S. 10/047,121; SEQ ID NO: 27 | 7827 |
| AMYL132 | VH | PRT | WO2017127764; SEQ ID NO: 10 | 7828 |
| AMYL133 | VH | PRT | WO2015038888; SEQ ID NO: 29 | 7829 |
| AMYL134 | VH | PRT | U.S. 10/047,121; SEQ ID NO: 8 | 7830 |
| AMYL135 | VH | PRT | U.S. 10/047,121; SEQ ID NO: 7 | 7831 |
| AMYL136 | VH | PRT | U.S. 10/047,121; SEQ ID NO: 9 | 7832 |
| AMYL137 | VH | PRT | U.S. 10/047,121; SEQ ID NO: 12 | 7833 |
| AMYL138 | VH | PRT | U.S. 10/047,121; SEQ ID NO: 11 | 7834 |
| AMYL139 | VH | PRT | U.S. 10/047,121; SEQ ID NO: 13 | 7835 |
| AMYL140 | VH | PRT | U.S. 10/047,121; SEQ ID NO: 1 | 7836 |
| AMYL141 | VH | PRT | WO2016087944: WO2017211827; SEQ ID NO: 1 | 7837 |
| AMYL142 | VH | PRT | WO2017211827; SEQ ID NO: 10 | 7838 |
| AMYL143 | VH | PRT | U.S. 10/047,121; SEQ ID NO: 6 | 7839 |
| AMYL144 | VH | PRT | U.S. 10/047,121; SEQ ID NO: 10 | 7840 |
| AMYL145 | VH | PRT | U.S. 10/047,121; SEQ ID NO: 3 | 7841 |
| AMYL146 | VH | PRT | U.S. 10/047,121; SEQ ID NO: 4 | 7842 |
| AMYL147 | VH | PRT | U.S. Pat. No. 8,025,878; SEQ ID NO: 132 | 7843 |
| AMYL148 | VH | PRT | U.S. Pat. No. 8,025,878; SEQ ID NO: 148 | 7844 |
| AMYL149 | VH | PRT | U.S. Pat. No. 8,025,878; SEQ ID NO: 115 | 7845 |
| AMYL150 | VH | PRT | U.S. Pat. No. 8,025,878; SEQ ID NO: 48 | 7846 |
| AMYL151 | VH | PRT | U.S. Pat. No. 8,025,878; SEQ ID NO: 51 | 7847 |
| AMYL152 | VH | PRT | U.S. Pat. No. 8,025,878; SEQ ID NO: 50 | 7848 |
| AMYL153 | VH | PRT | U.S. Pat. No. 8,025,878; SEQ ID NO: 54 | 7849 |
| AMYL154 | VH | PRT | U.S. Pat. No. 8,025,878; SEQ ID NO: 53 | 7850 |
| AMYL155 | VH | PRT | U.S. Pat. No. 8,025,878; SEQ ID NO: 120 | 7851 |
| AMYL156 | VH | PRT | U.S. Pat. No. 8,025,878; SEQ ID NO: 121 | 7852 |
| AMYL157 | VH | PRT | U.S. Pat. No. 8,025,878; SEQ ID NO: 126 | 7853 |
| AMYL158 | VH | PRT | U.S. Pat. No. 8,025,878; SEQ ID NO: 150 | 7854 |
| AMYL159 | VH | PRT | U.S. Pat. No. 8,025,878; SEQ ID NO: 130 | 7855 |
| AMYL160 | VH | PRT | U.S. Pat. No. 8,025,878; SEQ ID NO: 129 | 7856 |
| AMYL161 | VH | PRT | U.S. Pat. No. 8,025,878; SEQ ID NO: 127 | 7857 |
| AMYL162 | VH | PRT | U.S. Pat. No. 8,025,878; SEQ ID NO: 52 | 7858 |
| AMYL163 | VH | PRT | U.S. Pat. No. 8,025,878; SEQ ID NO: 55 | 7859 |
| AMYL164 | VH | PRT | U.S. Pat. No. 8,025,878; SEQ ID NO: 56 | 7860 |
| AMYL165 | VH | PRT | U.S. Pat. No. 8,025,878; SEQ ID NO: 149 | 7861 |
| AMYL166 | VH | PRT | U.S. Pat. No. 8,025,878; SEQ ID NO: 147 | 7862 |
| AMYL167 | VH | PRT | U.S. Pat. No. 8,025,878; SEQ ID NO: 123 | 7863 |
| AMYL168 | VH | PRT | U.S. Pat. No. 8,025,878; SEQ ID NO: 114 | 7864 |
| AMYL169 | VH | PRT | U.S. Pat. No. 8,025,878; SEQ ID NO: 138 | 7865 |
| AMYL170 | VH | PRT | U.S. Pat. No. 8,025,878; SEQ ID NO: 152 | 7866 |
| AMYL171 | VH | PRT | U.S. Pat. No. 8,025,878; SEQ ID NO: 122 | 7867 |
| AMYL172 | VH | PRT | U.S. Pat. No. 8,025,878; SEQ ID NO: 135 | 7868 |
| AMYL173 | VH | PRT | U.S. Pat. No. 8,025,878; SEQ ID NO: 125 | 7869 |
| AMYL174 | VH | PRT | U.S. Pat. No. 8,025,878; SEQ ID NO: 128 | 7870 |
| AMYL175 | VH | PRT | U.S. Pat. No. 8,025,878; SEQ ID NO: 124 | 7871 |
| AMYL176 | VH | PRT | U.S. Pat. No. 8,025,878; SEQ ID NO: 133 | 7872 |
| AMYL177 | VH | PRT | U.S. Pat. No. 8,961,972; SEQ ID NO: 21 | 7873 |
| AMYL178 | VH | PRT | U.S. Pat. No. 8,961,972; SEQ ID NO: 48 | 7874 |
| AMYL179 | VH | PRT | U.S. Pat. No. 8,961,972; SEQ ID NO: 12 | 7875 |
| AMYL180 | VH | PRT | U.S. Pat. No. 8,961,972; SEQ ID NO: 15 | 7876 |
| AMYL181 | VH | PRT | U.S. Pat. No. 8,961,972; SEQ ID NO: 32 | 7877 |
| AMYL182 | VH | PRT | U.S. Pat. No. 8,961,972; SEQ ID NO: 13 | 7878 |
| AMYL183 | VH | PRT | U.S. Pat. No. 8,961,972; SEQ ID NO: 37 | 7879 |
| AMYL184 | VH | PRT | U.S. Pat. No. 9,222,947; SEQ ID NO: 12 | 7880 |
| AMYL185 | VH | PRT | U.S. Pat. No. 9,222,947; SEQ ID NO: 14 | 7881 |
| AMYL186 | VL | DNA | U.S. Pat. No. 8,025,878; SEQ ID NO: 104 | 7882 |
| AMYL187 | VL | DNA | U.S. Pat. No. 8,025,878; SEQ ID NO: 237 | 7883 |
| AMYL188 | VL | DNA | U.S. Pat. No. 8,961,972; SEQ ID NO: 17 | 7884 |
| AMYL189 | VL | PRT | U.S. 10/047,121; SEQ ID NO: 2 | 7885 |
| AMYL190 | VL | PRT | U.S. 10/047,121; SEQ ID NO: 15 | 7886 |
| AMYL191 | VL | PRT | U.S. 10/047,121; SEQ ID NO: 14 | 7887 |
| AMYL192 | VL | PRT | U.S. 10/047,121; SEQ ID NO: 16 | 7888 |
| AMYL193 | VL | PRT | U.S. 10/047,121; SEQ ID NO: 5 | 7889 |
| AMYL194 | VL | PRT | WO2016087944; WO2017211827; SEQ ID NO: 2 | 7890 |
| AMYL195 | VL | PRT | WO2017211827; SEQ ID NO: 11 | 7891 |
| AMYL196 | VL | PRT | U.S. 10/047,121; SEQ ID NO: 26 | 7892 |
| AMYL197 | VL | PRT | U.S. 10/047,121; SEQ ID NO: 31 | 7893 |
| AMYL198 | VL | PRT | U.S. 10/047,121; SEQ ID NO: 32 | 7894 |
| AMYL199 | VL | PRT | U.S. 10/047,121; SEQ ID NO: 28 | 7895 |
| AMYL200 | VL | PRT | WO2017127764; SEQ ID NO: 11 | 7896 |
| AMYL201 | VL | PRT | WO2015038888; SEQ ID NO: 30 | 7897 |
| AMYL202 | VL | PRT | U.S. Pat. No. 8,025,878; SEQ ID NO: 42 | 7898 |
| AMYL203 | VL | PRT | U.S. Pat. No. 8,025,878; SEQ ID NO: 39 | 7899 |
| AMYL204 | VL | PRT | U.S. Pat. No. 8,025,878; SEQ ID NO: 209 | 7900 |
| AMYL205 | VL | PRT | U.S. Pat. No. 8,025,878; SEQ ID NO: 230 | 7901 |
| AMYL206 | VL | PRT | U.S. Pat. No. 8,025,878; SEQ ID NO: 206 | 7902 |
| AMYL207 | VL | PRT | U.S. Pat. No. 8,025,878; SEQ ID NO: 202 | 7903 |
| AMYL208 | VL | PRT | U.S. Pat. No. 8,025,878; SEQ ID NO: 201 | 7904 |
| AMYL209 | VL | PRT | U.S. Pat. No. 8,025,878; SEQ ID NO: 205 | 7905 |
| AMYL210 | VL | PRT | U.S. Pat. No. 8,025,878; SEQ ID NO: 236 | 7906 |
| AMYL211 | VL | PRT | U.S. Pat. No. 8,025,878; SEQ ID NO: 227 | 7907 |
| AMYL212 | VL | PRT | U.S. Pat. No. 8,025,878; SEQ ID NO: 197 | 7908 |
| AMYL213 | VL | PRT | U.S. Pat. No. 8,025,878; SEQ ID NO: 203 | 7909 |
| AMYL214 | VL | PRT | U.S. Pat. No. 8,025,878; SEQ ID NO: 44 | 7910 |
| AMYL215 | VL | PRT | U.S. Pat. No. 8,025,878; SEQ ID NO: 195 | 7911 |
| AMYL216 | VL | PRT | U.S. Pat. No. 8,025,878; SEQ ID NO: 207 | 7912 |
| AMYL217 | VL | PRT | U.S. Pat. No. 8,025,878; SEQ ID NO: 223 | 7913 |
| AMYL218 | VL | PRT | U.S. Pat. No. 8,025,878; SEQ ID NO: 43 | 7914 |
| AMYL219 | VL | PRT | U.S. Pat. No. 8,025,878; SEQ ID NO: 46 | 7915 |
| AMYL220 | VL | PRT | U.S. Pat. No. 8,025,878; SEQ ID NO: 45 | 7916 |
| AMYL221 | VL | PRT | U.S. Pat. No. 8,025,878; SEQ ID NO: 116 | 7917 |
| AMYL222 | VL | PRT | U.S. Pat. No. 8,025,878; SEQ ID NO: 193 | 7918 |
| AMYL223 | VL | PRT | U.S. Pat. No. 8,025,878; SEQ ID NO: 235 | 7919 |
| AMYL224 | VL | PRT | U.S. Pat. No. 8,025,878; SEQ ID NO: 188 | 7920 |
| AMYL225 | VL | PRT | U.S. Pat. No. 8,025,878; SEQ ID NO: 225 | 7921 |
| AMYL226 | VL | PRT | U.S. Pat. No. 8,025,878; SEQ ID NO: 189 | 7922 |
| AMYL227 | VL | PRT | U.S. Pat. No. 8,025,878; SEQ ID NO: 190 | 7923 |
| AMYL228 | VL | PRT | U.S. Pat. No. 8,025,878; SEQ ID NO: 185 | 7924 |
| AMYL229 | VL | PRT | U.S. Pat. No. 8,025,878; SEQ ID NO: 186 | 7925 |
| AMYL230 | VL | PRT | U.S. Pat. No. 8,025,878; SEQ ID NO: 191 | 7926 |
| AMYL231 | VL | PRT | U.S. Pat. No. 8,025,878; SEQ ID NO: 47 | 7927 |
| AMYL232 | VL | PRT | U.S. Pat. No. 8,025,878; SEQ ID NO: 41 | 7928 |
| AMYL233 | VL | PRT | U.S. Pat. No. 8,025,878; SEQ ID NO: 192 | 7929 |
| AMYL234 | VL | PRT | U.S. Pat. No. 8,025,878; SEQ ID NO: 181 | 7930 |
| AMYL235 | VL | PRT | U.S. Pat. No. 8,025,878; SEQ ID NO: 105 | 7931 |
| AMYL236 | VL | PRT | U.S. Pat. No. 8,025,878; SEQ ID NO: 238 | 7932 |
| AMYL237 | VL | PRT | U.S. Pat. No. 8,025,878; SEQ ID NO: 179 | 7933 |
| AMYL238 | VL | PRT | U.S. Pat. No. 8,025,878; SEQ ID NO: 182 | 7934 |
| AMYL239 | VL | PRT | U.S. Pat. No. 8,961,972; SEQ ID NO: 47 | 7935 |
| AMYL240 | VL | PRT | U.S. Pat. No. 8,961,972; SEQ ID NO: 11 | 7936 |
| AMYL241 | VL | PRT | U.S. Pat. No. 8,961,972; SEQ ID NO: 14 | 7937 |
| AMYL242 | VL | PRT | U.S. Pat. No. 8,961,972; SEQ ID NO: 31 | 7938 |
| AMYL243 | VL | PRT | U.S. Pat. No. 8,961,972; SEQ ID NO: 20 | 7939 |
| AMYL244 | VL | PRT | U.S. Pat. No. 8,961,972; SEQ ID NO: 16 | 7940 |
| AMYL245 | VL | PRT | U.S. Pat. No. 9,222,947; SEQ ID NO: 15 | 7941 |
| AMYL246 | VL | PRT | U.S. Pat. No. 9,222,947; SEQ ID NO: 13 | 7942 |
| AMYL247 | VR | PRT | U.S. Pat. No. 8,025,878; SEQ ID NO: 20 | 7943 |
| AMYL248 | VR | PRT | U.S. Pat. No. 8,025,878; SEQ ID NO: 24 | 7944 |
| AMYL249 | VR | PRT | U.S. Pat. No. 8,025,878; SEQ ID NO: 23 | 7945 |
| AMYL250 | VR | PRT | U.S. Pat. No. 8,025,878; SEQ ID NO: 21 | 7946 |
| AMYL251 | VR | PRT | U.S. Pat. No. 8,025,878; SEQ ID NO: 19 | 7947 |
| AMYL252 | VR | PRT | U.S. Pat. No. 8,025,878; SEQ ID NO: 22 | 7948 |
| AMYL253 | VR | PRT | U.S. Pat. No. 8,025,878; SEQ ID NO: 17 | 7949 |
| AMYL254 | VR | PRT | U.S. Pat. No. 8,025,878; SEQ ID NO: 14 | 7950 |
| AMYL255 | VR | PRT | U.S. Pat. No. 8,025,878; SEQ ID NO: 13 | 7951 |
| AMYL256 | VR | PRT | U.S. Pat. No. 8,025,878; SEQ ID NO: 18 | 7952 |
| AMYL257 | VR | PRT | U.S. Pat. No. 8,025,878; SEQ ID NO: 15 | 7953 |
| AMYL258 | VR | PRT | U.S. Pat. No. 8,025,878; SEQ ID NO: 16 | 7954 |
| AMYL259 | HC | PRT | WO2017180555; SEQ ID NO: 11 | 7955 |
| AMYL260 | HC | PRT | WO2018031361; SEQ ID NO: 49 | 7956 |
| AMYL261 | HC | PRT | US20180305444; SEQ ID NO: 12 | 7957 |
| AMYL262 | HC | PRT | US20180305444; SEQ ID NO: 20 | 7958 |
| AMYL263 | HC | PRT | WO2017055540; SEQ ID NO: 2 | 7959 |
| AMYL264 | HC | PRT | WO2017055540; SEQ ID NO: 9 | 7960 |
| AMYL265 | HC | PRT | WO2017055540; SEQ ID NO: 10 | 7961 |
| AMYL266 | HC | PRT | WO2017055540; SEQ ID NO: 12 | 7962 |
| AMYL267 | HC | PRT | WO2017055540; SEQ ID NO: 13 | 7963 |
| AMYL268 | HC | PRT | WO2017055540; SEQ ID NO: 15 | 7964 |
| AMYL269 | HC | PRT | WO2017055540; SEQ ID NO: 17 | 7965 |
| AMYL270 | HC | PRT | WO2018005282; SEQ ID NO: 60 | 7966 |
| AMYL271 | HC | PRT | WO2018005282; SEQ ID NO: 64 | 7967 |
| AMYL272 | HC | PRT | U.S. Pat. No. 7,892,544; SEQ ID NO: 17 | 7968 |
| AMYL273 | LC | PRT | WO2017160555; SEQ ID NO: 12 | 7969 |
| AMYL274 | LC | PRT | WO2017160555; SEQ ID NO: 13 | 7970 |
| AMYL275 | LC | PRT | WO2018031361; SEQ ID NO: 50 | 7971 |
| AMYL276 | LC | PRT | US20180305444; SEQ ID NO: 13 | 7972 |
| AMYL277 | LC | PRT | US20180305444; SEQ ID NO: 14 | 7973 |
| AMYL278 | LC | PRT | WO2018005282; SEQ ID NO: 63 | 7974 |
| AMYL279 | VH | PRT | WO2017160555; SEQ ID NO: 8 | 7975 |
| AMYL280 | VH | PRT | WO2018031361; SEQ ID NO: 31 | 7976 |
| AMYL281 | VH | PRT | WO2018031361; SEQ ID NO: 46 | 7977 |
| AMYL282 | VH | PRT | WO2018031361; SEQ ID NO: 48 | 7978 |
| AMYL283 | VH | PRT | WO2018031361; SEQ ID NO: 54 | 7979 |
| AMYL284 | VH | PRT | WO2018031361; SEQ ID NO: 55 | 7980 |
| AMYL285 | VH | PRT | U.S. 10/047,121; SEQ ID NO: 27 | 7981 |
| AMYL286 | VH | PRT | US20180305444; SEQ ID NO: 9 | 7982 |
| AMYL287 | VH | PRT | US20180305444; SEQ ID NO: 19 | 7983 |
| AMYL288 | VH | PRT | U.S. Pat. No. 9,573,994; SEQ ID NO: 13 | 7984 |
| AMYL289 | VH | PRT | U.S. Pat. No. 9,573,994; SEQ ID NO: 14 | 7985 |
| AMYL290 | VH | PRT | U.S. Pat. No. 9,573,994; SEQ ID NO: 15 | 7986 |
| AMYL291 | VH | PRT | U.S. Pat. No. 9,573,994; SEQ ID NO: 16 | 7987 |
| AMYL292 | VH | PRT | U.S. Pat. No. 9,573,994; SEQ ID NO: 17 | 7988 |
| AMYL293 | VH | PRT | U.S. Pat. No. 9,573,994; SEQ ID NO: 18 | 7989 |
| AMYL294 | VH | PRT | WO2018005282; SEQ ID NO: 40 | 7990 |
| AMYL295 | VH | PRT | WO2018005282; SEQ ID NO: 42 | 7991 |
| AMYL296 | VH | PRT | WO2018005282; SEQ ID NO: 44 | 7992 |
| AMYL297 | VH | PRT | WO2018005282; SEQ ID NO: 46 | 7993 |
| AMYL298 | VH | PRT | WO2018005282; SEQ ID NO: 48 | 7994 |
| AMYL299 | VH | PRT | WO2018005282; SEQ ID NO: 50 | 7995 |
| AMYL300 | VH | PRT | WO2018005282; SEQ ID NO: 52 | 7996 |
| AMYL301 | VH | PRT | WO2018005282; SEQ ID NO: 54 | 7997 |
| AMYL302 | VH | PRT | U.S. Pat. No. 7,892,544; SEQ ID NO: 16 | 7998 |
| AMYL303 | VH | PRT | U.S. Pat. No. 7,892,544; SEQ ID NO: 61 | 7999 |
| AMYL304 | VL | PRT | WO2017180555; SEQ ID NO: 9 | 8000 |
| AMYL305 | VL | PRT | WO2017160555; SEQ ID NO: 10 | 8001 |
| AMYL306 | VL | PRT | WO2018031361; SEQ ID NO: 45 | 8002 |
| AMYL307 | VL | PRT | WO2018031361; SEQ ID NO: 47 | 8003 |
| AMYL308 | VL | PRT | WO2018031361; SEQ ID NO: 53 | 8004 |
| AMYL309 | VL | PRT | US20180305444; SEQ ID NO: 10 | 8005 |
| AMYL310 | VL | PRT | US20180305444; SEQ ID NO: 11 | 8006 |
| AMYL311 | VL | PRT | U.S. Pat. No. 9,573,994; SEQ ID NO: 8 | 8007 |
| AMYL312 | VL | PRT | U.S. Pat. No. 9,573,994; SEQ ID NO: 9 | 8008 |
| AMYL313 | VL | PRT | U.S. Pat. No. 9,573,994; SEQ ID NO: 10 | 8009 |
| AMYL314 | VL | PRT | U.S. Pat. No. 9,573,994; SEQ ID NO: 11 | 8010 |
| AMYL315 | VL | PRT | U.S. Pat. No. 9,573,994; SEQ ID NO: 12 | 8011 |
| AMYL316 | VL | PRT | U.S. Pat. No. 9,573,994; SEQ ID NO: 19 | 8012 |
| AMYL317 | VL | PRT | U.S. Pat. No. 9,573,994; SEQ ID NO: 20 | 8013 |
| AMYL318 | VL | PRT | U.S. Pat. No. 9,573,994; SEQ ID NO: 21 | 8014 |
| AMYL319 | VL | PRT | U.S. Pat. No. 9,573,994; SEQ ID NO: 22 | 8015 |
| AMYL320 | VL | PRT | WO2017055540; SEQ ID NO: 21 | 8016 |
| AMYL321 | VL | PRT | WO2018005282; SEQ ID NO: 39 | 8017 |
| AMYL322 | VL | PRT | WO2018005282; SEQ ID NO: 41 | 8018 |
| AMYL323 | VL | PRT | WO2018005282; SEQ ID NO: 43 | 8019 |
| AMYL324 | VL | PRT | WO2018005282; SEQ ID NO: 45 | 8020 |
| AMYL325 | VL | PRT | WO2018005282; SEQ ID NO: 47 | 8021 |
| AMYL326 | VL | PRT | WO2018005282; SEQ ID NO: 49 | 8022 |
| AMYL327 | VL | PRT | WO2018005282; SEQ ID NO: 51 | 8023 |
| AMYL328 | VL | PRT | WO2018005282; SEQ ID NO: 53 | 8024 |
| AMYL329 | VL | PRT | U.S. Pat. No. 7,892,544; SEQ ID NO: 59 | 8025 |
| AMYL330 | VL | PRT | U.S. Pat. No. 7,892,544; SEQ ID NO: 75 | 8026 |

[0776] In some embodiments, the payload region of the AAV particle may include a nucleic acid sequence encoding a polypeptide which is an antibody, an antibody-based composition, or a fragment thereof, which when expressed, results in the silencing, suppression, and/or reduction of any one of mutant, variant and/or wild type Homo sapiens synuclein alpha (SCA), Homo sapiens synuclein beta (SNCB), or Homo sapiens synuclein gamma (SNCG) gene protein products. In some embodiments, the payload region of the AAV particle may include one or more nucleic acid sequences encoding synuclein associated disease antibodies, variants or fragments thereof. As anon-limiting example, the synuclein associated disease antibody may have 50%, 51%, 52%, 53%, 54%, 55%, 56%, 57%, 58%, 59%, 60%, 61%, 62%, 63%, 64%, 65%, 66%, 67%, 68%, 69%, 79%, 71%, 72%, 73%, 74%, 75%: 76%, 77%, 78%, 79%, 80%, 81%, 82%, 83%, 84%, 85%, 86%, 87%, 88%, 89%, 90%, 91%, 92%, 93%, 94%, 95%, 96%, 97%, 98%, 99%, or 100% identity to one or more of the antibody polypeptides or polynucleotides listed in Table 9, or variants or fragments thereof.

[0777] In some embodiments, the payload antibody may be variants of any of the antibody polypeptides listed in Table 9, that exclude one or more amino acids designated as “X” or “x” in the described polypeptide sequence, wherein X may represent any amino acid. In some embodiments, the payload nucleic acid sequence may be variants of any of the nucleic acid sequences listed in Table 9, that exclude one or more nucleic acids designated as “n” or “N” in the described nucleic acid sequence, wherein n may represent any nucleic acid.

TABLE 9
Synuclein antibodies

| | | Type | | SEQ |
|---|---|---|---|---|
| Ab ID | Component | (PRT/DNA) | Reference | ID NO |
| SYN1 | CDR | PRT | U.S. Pat. No. 9,222,947; SEQ ID NO: 21 | 8027 |
| SYN2 | CDR | PRT | US20190062415; SEQ ID NO: 11 | 8028 |
| SYN3 | CDR | PRT | U.S. Pat. No. 9,580,493; SEQ ID NO: 18 | 8029 |
| SYN4 | CDR | PRT | US20190062415; SEQ ID NO: 12 | 8030 |
| SYN5 | CDR | PRT | U.S. Pat. No. 9,580,493; SEQ ID NO: 6 | 8031 |
| SYN6 | CDR | PRT | U.S. Pat. No. 9,580,493; SEQ ID NO: 12 | 8032 |
| SYN7 | CDR | PRT | U.S. Pat. No. 9,580,493; SEQ ID NO: 23 | 8033 |
| SYN8 | CDR | PRT | U.S. Pat. No. 9,580,493; SEQ ID NO: 16 | 8034 |
| SYN9 | CDR | PRT | US20190062415; SEQ ID NO: 10 | 8035 |
| SYN10 | CDR | PRT | U.S. Pat. No. 9,580,493; SEQ ID NO: 25 | 8036 |
| SYN11 | CDR | PRT | U.S. Pat. No. 9,580,493; SEQ ID NO: 13 | 8037 |
| SYN12 | CDR | PRT | U.S. Pat. No. 9,580,493; SEQ ID NO: 7 | 8038 |
| SYN13 | CDR | PRT | U.S. Pat. No. 9,580,493; SEQ ID NO: 11 | 8039 |
| SYN14 | CDR | PRT | U.S. Pat. No. 9,580,493; SEQ ID NO: 17 | 8040 |
| SYN15 | Full antibody | PRT | U.S. Pat. No. 9,580,493; SEQ ID NO: 10 | 8041 |
| SYN16 | VH | DNA | US20150232542; SEQ ID NO: 2 | 8042 |
| SYN17 | VH | DNA | US20150232542; SEQ ID NO: 8 | 8043 |
| SYN18 | VH | DNA | US20150232542; SEQ ID NO: 14 | 8044 |
| SYN19 | VH | DNA | US20190062415; SEQ ID NO: 5 | 8045 |
| SYN20 | VH | DNA | U.S. Pat. No. 9,580,493; SEQ ID NO: 21 | 8046 |
| SYN21 | VH | DNA | U.S. Pat. No. 9,580,493; SEQ ID NO: 19 | 8047 |
| SYN22 | VH | PRT | US20150232542; SEQ ID NO: 14 | 8048 |
| SYN23 | VH | PRT | US20150232542; SEQ ID NO: 2 | 8049 |
| SYN24 | VH | PRT | US20150232542; SEQ ID NO: 8 | 8050 |
| SYN25 | VH | PRT | U.S. Pat. No. 9,580,493; SEQ ID NO: 15 | 8051 |
| SYN26 | VH | PRT | US20190062415; SEQ ID NO: 6 | 8052 |
| SYN27 | VH | PRT | US20190062415; SEQ ID NO: 9 | 8053 |
| SYN28 | VH | PRT | US20190062415; SEQ ID NO: 16 | 8054 |
| SYN29 | VH | PRT | US20190062415; SEQ ID NO: 14 | 8055 |
| SYN30 | VH | PRT | US20190062415; SEQ ID NO: 17 | 8056 |
| SYN31 | VH | PRT | US20190062415; SEQ ID NO: 15 | 8057 |
| SYN32 | VH | PRT | US20190062415; SEQ ID NO: 18 | 8058 |
| SYN33 | VH | PRT | U.S. Pat. No. 9,580,493; SEQ ID NO: 20 | 8059 |
| SYN34 | VH | PRT | US20190062415; SEQ ID NO: 13 | 8060 |
| SYN35 | VL | DNA | US20150232542; SEQ ID NO: 11 | 8061 |
| SYN36 | VL | DNA | US20150232542; SEQ ID NO: 5 | 8062 |
| SYN37 | VL | DNA | US20150232542; SEQ ID NO: 20 | 8063 |
| SYN38 | VL | DNA | US20150232542; SEQ ID NO: 17 | 8064 |
| SYN39 | VL | DNA | US20190062415; SEQ ID NO: 7 | 8065 |
| SYN40 | VL | DNA | U.S. Pat. No. 9,580,493; SEQ ID NO: 27 | 8066 |
| SYN41 | VL | DNA | U.S. Pat. No. 9,580,493; SEQ ID NO: 28 | 8067 |
| SYN42 | VL | PRT | US20150232542; SEQ ID NO: 17 | 8068 |
| SYN43 | VL | PRT | US20150232542; SEQ ID NO: 20 | 8069 |
| SYN44 | VL | PRT | US20150232542; SEQ ID NO: 5 | 8070 |
| SYN45 | VL | PRT | US20150232542; SEQ ID NO: 11 | 8071 |
| SYN46 | VL | PRT | U.S. Pat. No. 9,580,493; SEQ ID NO: 26 | 8072 |
| SYN47 | VL | PRT | U.S. Pat. No. 9,580,493; SEQ ID NO: 22 | 8073 |
| SYN48 | VL | PRT | U.S. Pat. No. 9,580,493; SEQ ID NO: 9 | 8074 |
| SYN49 | VL | PRT | US20190062415; SEQ ID NO: 8 | 8075 |
| SYN50 | VL | PRT | U.S. Pat. No. 9,580,493; SEQ ID NO: 14 | 8076 |

[0778] In some embodiments, the payload region of the AAV particle may include a nucleic acid sequence encoding a polypeptide which is an antibody, an antibody-based composition, or a fragment thereof, which when expressed, results in the silencing, suppression, and/or reduction of any one of apolipoprotein E (APOE) allele (e.g., ApoE2, ApoE3 and/or ApoE4) protein products. In some embodiments, the payload region of the AAV particle may include one or more nucleic acid sequences encoding APOE associated disease antibodies, variants or fragments thereof.

[0779] In some embodiments, payloads may encode APOE antibodies taught in International Publication Number WO2013168174 or variants or fragments thereof; the contents of which are herein incorporated by reference in their entirety.

[0780] As a non-limiting example, the APOE associated disease antibody may have 50%, 51%, 52%, 53%, 54%, 55%, 56%, 57%, 58%, 59%, 60%, 61%, 62%, 63%, 64%, 65%, 66%, 67%, 68%, 69%, 70%, 71%, 72%, 73%, 74%, 75%, 76%, 77%, 78%, 79%, 80%, 81%, 82%, 83%, 84%, 85%, 86%, 87%, 88%, 89%, 90%, 91%, 92%, 93%, 94%, 95%, 96%, 97%, 98%, 99%, or 100% identity to one or more of the antibody polypeptides or polynucleotides listed in Table 10, or variants or fragments thereof.

[0781] In some embodiments, the payload antibody may be variants of any of the antibody polypeptides listed in Table 10, that exclude one or more amino acids designated as “X” or “x” in the described polypeptide sequence, wherein X may represent any amino acid. In some embodiments, the payload nucleic acid sequence may be variants of any of the nucleic acid sequences listed in Table 10, that exclude one or more nucleic acids designated as “n” or “N” in the described nucleic acid sequence, wherein n may represent any nucleic acid.

TABLE 10
APOE antibodies

| | | Type | | SEQ |
|---|---|---|---|---|
| Ab ID | Component | (PRT/DNA) | Reference | ID NO |
| APOE1 | VH | PRT | WO2018081642; SEQ ID NO: 104 | 8077 |
| APOE2 | VH | PRT | WO2018081642; SEQ ID NO: 77 | 8078 |
| APOE3 | VH | PRT | WO2018081642; SEQ ID NO: 50 | 8079 |
| APOE4 | VH | PRT | WO2018081642; SEQ ID NO: 84 | 8080 |
| APOE5 | VH | PRT | WO2018081642; SEQ ID NO: 85 | 8081 |
| APOE6 | VH | PRT | WO2018081642; SEQ ID NO: 58 | 8082 |
| APOE7 | VH | PRT | WO2018081642; SEQ ID NO: 54 | 8083 |
| APOE8 | VH | PRT | WO2018081642; SEQ ID NO: 62 | 8084 |
| APOE9 | VH | PRT | WO2018081642; SEQ ID NO: 126 | 8085 |
| APOE10 | VH | PRT | WO2018081642; SEQ ID NO: 33 | 8086 |
| APOE11 | VH | PRT | WO2018081642; SEQ ID NO: 66 | 8087 |
| APOE12 | VH | PRT | WO2018081642; SEQ ID NO: 4 | 8088 |
| APOE13 | VH | PRT | WO2018081642; SEQ ID NO: 18 | 8089 |
| APOE14 | VH | PRT | WO2018081642; SEQ ID NO: 116 | 8090 |
| APOE15 | VH | PRT | WO2018081642; SEQ ID NO: 122 | 8091 |
| APOE16 | VH | PRT | WO2018081642; SEQ ID NO: 98 | 8092 |
| APOE17 | VH | PRT | WO2018081642; SEQ ID NO: 118 | 8093 |
| APOE18 | VH | PRT | WO2018081642; SEQ ID NO: 124 | 8094 |
| APOE19 | VH | PRT | WO2018081642; SEQ ID NO: 109 | 8095 |
| APOE20 | VH | PRT | WO2018081642; SEQ ID NO: 32 | 8096 |
| APOE21 | VH | PRT | WO2018081642; SEQ ID NO: 102 | 8097 |
| APOE22 | VH | PRT | WO2018081642; SEQ ID NO: 65 | 8098 |
| APOE23 | VH | PRT | WO2018081642; SEQ ID NO: 90 | 8099 |
| APOE24 | VH | PRT | WO2018081642; SEQ ID NO: 52 | 8100 |
| APOE25 | VH | PRT | WO2018081642; SEQ ID NO: 56 | 8101 |
| APOE26 | VH | PRT | WO2018081642; SEQ ID NO: 69 | 8102 |
| APOE27 | VH | PRT | WO2018081642; SEQ ID NO: 26 | 8103 |
| APOE28 | VH | PRT | WO2018081642; SEQ ID NO: 75 | 8104 |
| APOE29 | VH | PRT | WO2018081642; SEQ ID NO: 80 | 8105 |
| APOE30 | VH | PRT | WO2018081642; SEQ ID NO: 81 | 8106 |
| APOE31 | VH | PRT | WO2018081642; SEQ ID NO: 28 | 8107 |
| APOE32 | VH | PRT | WO2018081642; SEQ ID NO: 34 | 8108 |
| APOE33 | VH | PRT | WO2018081642; SEQ ID NO: 76 | 8109 |
| APOE34 | VH | PRT | WO2018081642; SEQ ID NO: 16 | 8110 |
| APOE35 | VH | PRT | WO2018081642; SEQ ID NO: 6 | 8111 |
| APOE36 | VH | PRT | WO2018081642; SEQ ID NO: 22 | 8112 |
| APOE37 | VH | PRT | WO2018081642; SEQ ID NO: 8 | 8113 |
| APOE38 | VH | PRT | WO2018081642; SEQ ID NO: 2 | 8114 |
| APOE39 | VH | PRT | WO2018081642; SEQ ID NO: 14 | 8115 |
| APOE40 | VH | PRT | WO2018081642; SEQ ID NO: 12 | 8116 |
| APOE41 | VH | PRT | WO2018081642; SEQ ID NO: 20 | 8117 |
| APOE42 | VH | PRT | WO2018081642; SEQ ID NO: 125 | 8118 |
| APOE43 | VH | PRT | WO2018081642; SEQ ID NO: 119 | 8119 |
| APOE44 | VH | PRT | WO2018081642; SEQ ID NO: 111 | 8120 |
| APOE45 | VH | PRT | WO2018081642; SEQ ID NO: 112 | 8121 |
| APOE46 | VH | PRT | WO2018081642; SEQ ID NO: 10 | 8122 |
| APOE47 | VH | PRT | WO2018081642; SEQ ID NO: 103 | 8123 |
| APOE48 | VH | PRT | WO2018081642; SEQ ID NO: 27 | 8124 |
| APOE49 | VH | PRT | WO2018081642; SEQ ID NO: 67 | 8125 |
| APOE50 | VH | PRT | WO2018081642; SEQ ID NO: 120 | 8126 |
| APOE51 | VH | PRT | WO2018081642; SEQ ID NO: 70 | 8127 |
| APOE52 | VH | PRT | WO2018081642; SEQ ID NO: 57 | 8128 |
| APOE53 | VH | PRT | WO2018081642; SEQ ID NO: 53 | 8129 |
| APOE54 | VH | PRT | WO2018081642; SEQ ID NO: 82 | 8130 |
| APOE55 | VH | PRT | WO2018081642; SEQ ID NO: 83 | 8131 |
| APOE56 | VH | PRT | WO2018081642; SEQ ID NO: 61 | 8132 |
| APOE57 | VH | PRT | WO2018081642; SEQ ID NO: 94 | 8133 |
| APOE58 | VH | PRT | WO2018081642; SEQ ID NO: 113 | 8134 |
| APOE59 | VL | PRT | WO2018081642; SEQ ID NO: 115 | 8135 |
| APOE60 | VL | PRT | WO2018081642; SEQ ID NO: 121 | 8136 |
| APOE61 | VL | PRT | WO2018081642; SEQ ID NO: 3 | 8137 |
| APOE62 | VL | PRT | WO2018081642; SEQ ID NO: 17 | 8138 |
| APOE63 | VL | PRT | WO2018081642; SEQ ID NO: 19 | 8139 |
| APOE64 | VL | PRT | WO2018081642; SEQ ID NO: 15 | 8140 |
| APOE65 | VL | PRT | WO2018081642; SEQ ID NO: 11 | 8141 |
| APOE66 | VL | PRT | WO2018081642; SEQ ID NO: 13 | 8142 |
| APOE67 | VL | PRT | WO2018081642; SEQ ID NO: 9 | 8143 |
| APOE68 | VL | PRT | WO2018081642; SEQ ID NO: 1 | 8144 |
| APOE69 | VL | PRT | WO2018081642; SEQ ID NO: 97 | 8145 |
| APOE70 | VL | PRT | WO2018081642; SEQ ID NO: 21 | 8146 |
| APOE71 | VL | PRT | WO2018081642; SEQ ID NO: 96 | 8147 |
| APOE72 | VL | PRT | WO2018081642; SEQ ID NO: 73 | 8148 |
| APOE73 | VL | PRT | WO2018081642; SEQ ID NO: 105 | 8149 |
| APOE74 | VL | PRT | WO2018081642; SEQ ID NO: 106 | 8150 |
| APOE75 | VL | PRT | WO2018081642; SEQ ID NO: 31 | 8151 |
| APOE76 | VL | PRT | WO2018081642; SEQ ID NO: 88 | 8152 |
| APOE77 | VL | PRT | WO2018081642; SEQ ID NO: 64 | 8153 |
| APOE78 | VL | PRT | WO2018081642; SEQ ID NO: 29 | 8154 |
| APOE79 | VL | PRT | WO2018081642; SEQ ID NO: 63 | 8155 |
| APOE80 | VL | PRT | WO2018081642; SEQ ID NO: 86 | 8156 |
| APOE81 | VL | PRT | WO2018081642; SEQ ID NO: 5 | 8157 |
| APOE82 | VL | PRT | WO2018081642; SEQ ID NO: 7 | 8158 |
| APOE83 | VL | PRT | WO2018081642; SEQ ID NO: 123 | 8159 |
| APOE84 | VL | PRT | WO2018081642; SEQ ID NO: 117 | 8160 |
| APOE85 | VL | PRT | WO2018081642; SEQ ID NO: 107 | 8161 |
| APOE86 | VL | PRT | WO2018081642; SEQ ID NO: 108 | 8162 |
| APOE87 | VL | PRT | WO2018081642; SEQ ID NO: 74 | 8163 |
| APOE88 | VL | PRT | WO2018081642; SEQ ID NO: 51 | 8164 |
| APOE89 | VL | PRT | WO2018081642; SEQ ID NO: 55 | 8165 |
| APOE90 | VL | PRT | WO2018081642; SEQ ID NO: 68 | 8166 |
| APOE91 | VL | PRT | WO2018081642; SEQ ID NO: 99 | 8167 |
| APOE92 | VL | PRT | WO2018081642; SEQ ID NO: 23 | 8168 |
| APOE93 | VL | PRT | WO2018081642; SEQ ID NO: 78 | 8169 |
| APOE94 | VL | PRT | WO2018081642; SEQ ID NO: 79 | 8170 |
| APOE95 | VL | PRT | WO2018081642; SEQ ID NO: 101 | 8171 |
| APOE96 | VL | PRT | WO2018081642; SEQ ID NO: 72 | 8172 |
| APOE97 | VL | PRT | WO2018081642; SEQ ID NO: 30 | 8173 |
| APOE98 | VL | PRT | WO2018081642; SEQ ID NO: 49 | 8174 |

[0782] In some embodiments, the payload region of the AAV particle comprises a nucleic acid sequence encoding a polypeptide which is an antibody, an antibody-based composition, or a fragment thereof. As a nonlimiting example, the antibody may be one or more of the polypeptides listed in Table 7, Table 8, Table 9, Table 10, or variants or fragments thereof. As another non-limiting example, the antibody may be one or more of the heavy chain sequences listed in Table 7, Table 8, Table 9, Table 10. As a non-limiting example, the antibody may be one or more of the light chain sequences listed in Table 7, Table 8, Table 9, Table 10, or variants or fragments thereof.

[0783] In some embodiments, the payload region of the AAV particle comprises a nucleic acid sequence encoding a polypeptide comprising a heavy chain and alight chain sequence listed in Table 7, Table 8, Table 9, Table 10, or variants or fragments thereof. The payload region may also comprise a linker between the heavy and light chain sequences. The linker may be a sequence known in the art or described in Table 2.

[0784] In some embodiments, the payload region of the AAV particle comprises a nucleic acid sequence encoding a polypeptide comprising a heavy chain and alight chain sequence listed in Table 7, Table 8, Table 9, Table 10, or variants or fragments thereof, where the heavy chain sequence is from a different antibody than the light chain sequence. The payload region may also comprise a linker between the heavy and light chain sequences. The linker may be a sequence known in the art or described in Table 2.

[0785] In some embodiments, the payload region comprises, in the 5′ to 3′ direction, an antibody light chain sequence, a linker and a heavy chain sequence. In another embodiment, the linker is not used.

[0786] In some embodiments, the payload region comprises a nucleic acid sequence encoding, in the 5′ to 3′ direction, an antibody light chain sequence from Table 7, Table 8, Table 9, Table 10, one or more linkers from Table 2 and a heavy chain sequence from Table 7, Table 8, Table 9, Table 10.

[0787] In some embodiments, the payload region comprises, in the 5′ to 3′ direction, an antibody heavy chain sequence, a linker region (may comprise one or more linkers) and alight chain sequence. In another embodiment, the linker is not used.

[0788] In some embodiments, the payload region comprises a nucleic acid sequence encoding, in the 5′ to 3′ direction, an antibody heavy chain sequence from Table 7, Table 8, Table 9, Table 10, one or more linkers from Table 2, and alight chain sequence from Table 7, Table 8, Table 9, Table 10.

[0789] In some embodiments, the payload region comprises a nucleic acid sequence encoding a single heavy chain. As a non-limiting example, the heavy chain is an amino acid sequence or fragment thereof described in Table 7, Table 8, Table 9, Table 10.

[0790] Shown in Table 7, Table 8, Table 9, Table 10 are a listing of antibodies and their polynucleotides and/or polypeptides sequences. These sequences may be encoded by or included in the AAV particles of the present disclosure. Variants or fragments of the antibody sequences described in Table 7, Table 8, Table 9, Table 10 may be utilized in the AAV particles of the present disclosure.

[0791] In some embodiments, the AAV particles may comprise a viral genome, wherein one or more components may be codon-optimized. Codon-optimization may be achieved by any method known to one with skill in the art such as, but not limited to, by a method according to Genescript, EMBOSS, Bioinformatics, NUS, NUS2, Geneinfinity, IDT, NUS3, GregThatcher, Insilico, Molbio, N2P, Snapgene, and/or VectorNTI. Antibody heavy and/or light chain sequences within the same viral genome may be codon-optimized according to the same or according to different methods.

[0792] In some cases, the payload region of the AAV particles may encode one or more isoforms or variants of heavy and light chain antibody domains. Such variants may be humanized or optimized antibody domains comprising one or more complementarity determining regions (CDRs) from the heavy and light chains listed in Table 7, Table 8, Table 9, Table 10. CDRs of the antibodies encoded by the viral genomes of the present disclosure may be 50%, 60%,70%, 80%, 90%, 95% identical to CDRs listed in or incorporated in the sequences of Table 7, Table 8, Table 9, Table 10. Methods of determining CDRs are well known in the art and are described herein. Payload regions may encode antibody variants with one or more heavy chain variable domain (V_{H}) or light chain variable domain (V_{L}) derived from the antibody sequences in Table 7, Table 8, Table 9, Table 10. In some cases, such variants may include bispecific antibodies. Bispecific antibodies encoded by payload regions may comprise variable domain pairs from two different antibodies.

[0793] In some embodiments, the AAV particles may comprise a heavy and a light chain of an antibody described herein and two promoters. As a non-limiting example, the AAV particles may comprise a nucleic acid sequence of a genome as described in FIG. 1 or FIG. 2 of US Patent Publication No. US20030219733, the contents of which are herein incorporated by reference in their entirety. As another non-limiting example, the AAV particles may be a dual-promoter AAV for antibody expression as described by Lewis et al. (J. of. Virology, September 2002, Vol. 76(17), p 8769-8775; the contents of which are herein incorporated by reference in their entirety).

[0794] Payload regions of the viral genomes may encode any nervous system disease-associated antibodies, not limited to those described in Table 7, Table 8, Table 9, Table 10, including antibodies that are known in the art and/or antibodies that are commercially available. This may include fragments of such antibodies or antibodies that have been developed to comprise one or more of such fragments [e.g., variable domains or complementarity determining regions (CDRs)].

[0795] In some embodiments, the AAV particles may have a payload region comprising any of the nervous system disease-associated antibodies as described in International Publication Number WO2016059622, WO2017046658, WO2017046676, WO2017046774, WO2017046776, WO2017049035, WO2017049139, WO2017049251, WO2017053807, WO2017059380, WO2017062016, WO2017062615, WO2017062619, WO2017062693, WO2017062820, WO2017062952, WO2017062966, WO2017065837, WO2017068186, WO2017070395, WO2017070476, WO2017072196, WO2017072662, WO2017073981, WO2017074013, WO2017074074, WO2017075119, WO2017075432, WO2017075615, WO2017076308, WO2017077382, WO2017083296, WO2017083488, WO2017085035, WO2017086627, WO2017087587, WO2017087588, WO2017087589, WO2017089895, WO2017091487, WO2017091719, WO2017093408, WO2017093410, WO2017093448, WO2017095088, WO2017095486, WO2017095875, WO2017099712, WO2017100193, WO2017102833, WO2017106061, WO2017106129, WO2017106236, WO2017106352, WO2017106656, WO2017109721, WO2017112536, WO2017112877, WO2017112954, WO2017112955, WO2017112956, WO2017118761, WO2017119434, WO2017120222, WO2017120534, WO2017123556, WO2017123978, WO2017124002, WO2017125487, WO2017125830, WO2017125831, WO2017125871, WO2017127664, WO2017127702, WO2017132459, WO2017132555, WO2017132562, WO2017134234, WO2017134301, WO2017134302, WO2017134305, WO2017134306, WO2017135791, WO2017136313, WO2017136350, WO2017136355, WO2017136693, WO2017136820, WO2017137542, WO2017142928, WO2017147293, WO2017147383, WO2017147719, WO2017149513, WO2017152076, WO2017152102, WO2017153402, WO2017153567, WO2017156488, WO2017159287, WO2017160555, WO2017160622, WO2017165683, WO2017165766, WO2017171373, WO2017172733, WO2017172990, WO2017174586, WO2017175018, WO2017176007, WO2017176760, WO2017176835, WO2017176864, WO2017177955, WO2017178288, WO2017178653, WO2017180555, WO2017180813, WO2017180904, WO2017180993, WO2017181031, WO2017181039, WO2017181098, WO2017181119, WO2017182603, WO2017185037, WO2017186928, WO2017189805, WO2017189959, WO2017189963, WO2017189964, WO2017191062, WO2017191559, WO2017191560, WO2017191561, WO2017192538, WO2017192567, WO2017192668, WO2017193059, WO2017193107, WO2017193115, WO2017194646, WO2017194782, WO2017194783, WO2017197265, WO2017197331, WO2017197376, WO2017199250, WO2017201440, WO2017201442, WO2017201731, WO2017202387, WO2017204277, WO2017205101, WO2017205536, WO2017205538, WO2017205875, WO2017208210, WO2017210138, WO2017210278, WO2017212250, WO2017214338, WO2017214706, WO2017218435, WO2017218515, WO2017219025, WO2017219029, WO2017219687, WO2017219690, WO2017220800, WO2017220988, WO2017220990, WO2017223284, WO2018001858, WO2018005682, WO2018005706, WO2018005967, WO2018006005, WO2018006092, WO2018007592, WO2018009624, WO2018009903, WO2018010846, WO2018011073, WO2018011353, WO2018013714, WO2018013918, WO2018015573, WO2018016884, WO2018018031, WO2018022479, WO2018023136, WO2018026533, WO2018026722, WO2018026992, WO2018027329, WO2018031361, WO2018033749, WO2018034977, WO2018035061, WO2018035084, WO2018035210, WO2018039506, WO2018044619, WO2018044948, WO2018045325, WO2018048234, WO2018049237, WO2018050027, WO2018050699, WO2018053405, WO2018053434, WO2018059502, WO2018060351, WO2018062402, WO2018064190, WO2018068282, WO2018068283, WO2018069927, WO2018071796, WO2018071871, WO2018071913, WO2018073648, WO2018075339, WO2018075792, WO2018075813, WO2018075960, WO2018077893, WO2018081282, WO2018081370, WO2018081375, WO2018081642, WO2018081649, WO2018083538, WO2018084836, WO2018085731, WO2018086139, WO2018086585, WO2018086605, WO2018089532, WO2018091444, WO2018091739, WO2018091740, WO2018098365, WO2018098480, WO2018102589, WO2018102594, WO2018102746, WO2018102785, WO2018102787, WO2018102795, WO2018103884, WO2018106776, WO2018106781, WO2018107058, WO2018107134, WO2018109058, WO2018115225, WO2018115231, WO2018115885, WO2018119001, WO2018119171, WO2018119351, WO2018124107, WO2018124121, WO2018126232, WO2018127519, WO2018127586, WO2018127709, WO2018127710, WO2018127711, WO2018127791, WO2018128779, WO2018129331, WO2018129404, WO2018129524, WO2018129533, WO2018129553, WO2018129559, WO2018132423, WO2018134691, WO2018134787, WO2018136163, WO2018139404, WO2018140026, WO2018140725, WO2018140970, WO2018140973, WO2018141730, WO2018141964, WO2018144637, WO2018144999, WO2018146074, WO2018146199, WO2018148223, WO2018148224, WO2018148445, WO2018148447, WO2018149358, WO2018149938, WO2018151836, WO2018152359, WO2018152530, WO2018152687, WO2018153340, WO2018153372, WO2018154392, WO2018154580, WO2018156509, WO2018156740, WO2018157769, WO2018158658, WO2018160539, WO2018160731, WO2018160896, WO2018161092, WO2018164441, WO2018165062, WO2018165362, WO2018166495, WO2018167322, WO2018169948, WO2018170145, WO2018170351, WO2018170359, WO2018174544, WO2018175179, WO2018175790, WO2018175833, WO2018175988, WO2018178040, WO2018178077, WO2018178950, WO2018182266, WO2018182284, WO2018183175, WO2018183216, WO2018183219, WO2018183366, WO2018185247, WO2018185526, WO2018185709, WO2018187350, WO2018187682, WO2018188047, WO2018189225, WO2018189381, WO2018191545, WO2018191707, WO2018191718, WO2018195008, WO2018195418, WO2018197492, WO2018198091, WO2018199176, WO2018200586, WO2018200812, WO2018201096, WO2018202649, WO2018204352, WO2018204546, WO2018204677, WO2018204679, WO2018204757, WO2018204895, WO2018206790, WO2018208670, WO2018208709, WO2018209346, WO2018210898, WO2018212136, WO2018213204, WO2018213316, WO2018213592, WO2018213665, WO2018213679, WO2018213680, WO2018215831, WO2018217918, WO2018218083, WO2018218185, WO2018218219, WO2018218240, WO2018220216, WO2018220225, WO2018220234, WO2018221521, WO2018221892, WO2018222139, WO2018222685, WO2018222949, WO2018223051, WO2018223098, WO2018223101, WO2018223140, WO2018223923, WO2018224609, WO2018224630, WO2018226776, WO2018226833, WO2018229193, WO2018229194, WO2018229195, WO2018229197, WO2018231254, WO2018232188, WO2018232366, WO2018232372, WO2018233813 WO2018234793, WO2018237192, WO2018237287, WO2018237326, WO2018237338, WO2019003165, WO2019005756, WO2019005847, WO2019007509, WO2019008377, WO2019008378, WO2019008379, WO2019009419, WO2019010224, WO2019010566, WO2019011719, WO2019012014, WO2019012015, WO2019014360, WO2019014623, WO2019015673, WO2019015936, WO2019016213, WO2019016247, WO2019016402, WO2019018640, WO2019020774, WO2019023564, WO2019024911, WO2019024933, WO2019028051, WO2019028367, WO2019028456, WO2019032661, WO2019032662, WO2019032663, WO2019032699, WO2019033046, WO2019033114, WO2019035005, WO2019035034, WO2019036419, WO2019036460, WO2019040617, WO2019042282, WO2019046338, WO2019047932, WO2019050326, WO2019050362, WO2019052562, WO2019054819, WO2019055841, WO2019055842, WO2019057102, WO2019057772, WO2019059771, WO2019062871, WO2019067491, WO2019067499, WO2019067805, WO2019067815, WO2019068904, WO2019070680, WO2019073080, WO2019075136, WO2019075168, WO2019075472, WO2019079240, WO2019079249, WO2019079569, WO2019080858, WO2019080941, WO2019081022, WO2019081595, WO2019084057, WO2019084064, WO2019084067, WO2019084249, WO2019084332, WO2019084460, WO2019085804, WO2019086878, WO2019087087, WO2019089848, WO2019089870, WO2019089973, WO2019090003, WO2019090069, WO2019090074, WO2019090076, WO2019090078, WO2019090081, WO2019090082, WO2019090085, WO2019090088, WO2019090090, WO2019090110, WO2019092451, WO2019092452, WO2019092505, WO2019094482, WO2019094576, WO2019094578, WO2019094595, WO2019094608, WO2019094983, WO2016005466, WO2017211827, WO2018081460, WO2019040612, WO2019077500, WO2019064053, WO2019036432, WO2018227063, WO2018207638, WO2018204153, WO2018195457, WO2018194951, WO2018154390, WO2018128454, WO2018123979, WO2018119299, WO2018119288, WO2018104893, WO2018083628, WO2018017370, WO2018005282, WO2017164349, WO2017123517, WO2017111166, WO2017091745, WO2017072090, and WO2017055540, the contents of each of which are herein incorporated by reference in their entirety.

[0796] In some embodiments, the AAV particles may have a payload region comprising any of the nervous system disease-associated antibodies as described in US Patent Number U.S. Ser. No. 10/047,121, U.S. Ser. No. 10/112,990, U.S. Pat. Nos. 9,090,709, 9,573,994, 9,585,956, U89605055, U.S. Pat. Nos. 9,676,840, 9,828,435, and 9,944,696, the contents of each of which are herein incorporated by reference in their entirety.

[0797] In some embodiments, the AAV particles may have a payload region comprising any of the nervous system disease-associated antibodies as described in US Patent Publication Number US20160000910, US20160009793, US20160168267, US20160244514, US20160272699, US20170137502, US20170198030, US20170306017, US20170369559, US20180305444, US20180327485, US20180333487, US20190031746, US20190038613, US20190046536, US20190112361, US20190112362, US20190112364, and US20190112365, the contents of each of which are herein incorporated by reference in their entirety.

[0798] In some embodiments, payloads may encode nervous system disease-associated antibodies (or fragments thereof) taught in U.S. Pat. No. 8,025,878, the contents of which are herein incorporated by reference in their entirety. Such embodiments may include antibody BAN2401 or 158, or fragments thereof. In certain embodiments, the payload region encodes antibody BAN2401 or 158, or fragments thereof selected from SEQ ID NO: 25-38, 104-120,136,148, 154-158,167,169,171, 173-179, 183, 237-244, 253, 255, 257, 259-271, as described in U.S. Pat. No. 8,025,878.

[0799] In some embodiments, payloads may encode nervous system disease-associated antibodies (or fragments thereof) taught in U.S. Pat. No. 8,025,878, the contents of which are herein incorporated by reference in their entirety. Such embodiments may include antibody AF062243, or fragments thereof. In certain embodiments, the payload region encodes antibody AF062243, or fragments thereof selected from SEQ ID NO: 159-163,166,168,170, 172, 104-120, 136, 148, 154-158, as described in U.S. Pat. No. 8,025,878.

[0800] In some embodiments, payloads may encode nervous system disease-associated antibodies (or fragments thereof) taught in U.S. Pat. No. 8,025,878, the contents of which are herein incorporated by reference in their entirety. Such embodiments may include antibody AB064054, or fragments thereof. In certain embodiments, the payload region encodes antibody AB064054, or fragments thereof selected from SEQ ID NO: 245-248, 252, 254, 256, 258, as described in U.S. Pat. No. 8,025,878.

[0801] In some embodiments, payloads may encode nervous system disease-associated antibodies (or fragments thereof) taught in US Publication Number US20150232542, the contents of which are herein incorporated by reference in their entirety. Such embodiments may include antibody 118054, or fragments thereof. In certain embodiments, the payload region encodes antibody 811054, or fragments thereof selected from SEQ ID NO: 2, 5, 8, 11, 14, 17, 20, as described in US20150232542.

[0802] In some embodiments, payloads may encode nervous system disease-associated antibodies (or fragments thereof) taught in US Patent Number U.S. Ser. No. 10/093,947, the contents of which are herein incorporated by reference in their entirety. Such embodiments may include antibody NIC9D9 anti-nicotine monoclonal antibody, or fragments thereof. In certain embodiments, the payload region encodes antibody NIC9D9 anti-nicotine monoclonal antibody, or fragments thereof selected from SEQ ID NO: 1-3, as described in U.S. Ser. No. 10/093,947.

[0803] In some embodiments, payloads may encode nervous system disease-associated antibodies (or fragments thereof) taught in US Patent Publication Number US20190062415, the contents of which are herein incorporated by reference in their entirety. Such embodiments may include antibody RG7935, or fragments thereof. In certain embodiments, the payload region encodes RG7935, or fragments thereof selected from SEQ ID NO: 5-18, as described in US20190062415.

[0804] In some embodiments, payloads may encode nervous system disease-associated antibodies (or fragments thereof) taught in U.S. Pat. No. 8,961,972, the contents of which are herein incorporated by reference in their entirety. Such embodiments may include antibody LY3002813, or fragments thereof. In certain embodiments, the payload region encodes LY3002813, or fragments thereof selected from SEQ ID NO: 3-56, as described in U.S. Pat. No. 8,961,972.

[0805] In some embodiments, payloads may encode nervous system disease-associated antibodies (or fragments thereof) taught in US Patent Number U.S. Ser. No. 10/047,121, the contents of which are herein incorporated by reference in their entirety. Such embodiments may include antibody m4C9, 4C9hum, or m10B3, or fragments thereof. In certain embodiments, the payload region encodes m4C9, 4C9hum, or m10B3, or fragments thereof selected from SEQ ID NO: 1-38, as described in U.S. Ser. No. 10/047,121.

[0806] In some embodiments, payloads may encode nervous system disease-associated antibodies (or fragments thereof) taught in International Publication Number WO2015038888, the contents of which are herein incorporated by reference in their entirety. Such embodiments may include antibody MABT5102A, or fragments thereof. In certain embodiments, the payload region encodes MABT5102A, or fragments thereof selected from SEQ ID NO: 2, 3, 5, 6, 7, 8, 9, 10, 11, 23, 24, 26, 27, 28, 29, 30, as described in WO2015038888.

[0807] In some embodiments, payloads may encode nervous system disease-associated antibodies (or fragments thereof) taught in International Publication Number WO2016087944 and WO201721127, the contents of each of which are herein incorporated by reference in their entirety. Such embodiments may include antibody BIIB037, or fragments thereof. In certain embodiments, the payload region encodes BIIB037, or fragments thereof selected from SEQ ID NO: 1-11, as described in WO2016087944 and WO2017211827.

[0808] In some embodiments, payloads may encode nervous system disease-associated antibodies (or fragments thereof) taught in International Publication Number WO2013055922, the contents of which are herein incorporated by reference in their entirety. Such embodiments may include antibody Pepinemab or fragments thereof. In certain embodiments, the payload region encodes antibody Pepinemab or fragments thereof selected from SEQ ID NO: 9, 10, 17, 18 as described in WO2013055922.

Parkinson's Disease and Dementia with Lewy Bodies Antibodies

[0809] In some embodiments, the payload region of the viral particle comprises one or more nucleic acid sequences encoding one or more of the Parkinson's Disease and dementia with Lewy Bodies payload antibody polypeptides listed in Table 3 of U.S. provisional patent application 62/844,433 (PDLB1-PDLB437; SEQ ID NO: 3787-4223), the contents of which are herein incorporated by reference in their entirety.

[0810] In some embodiments, the payload region of the viral particle comprises one or more nucleic acid sequences encoding one or more of the polypeptides that comprise a portion of filamentous bacteriophage gene 3 protein (g3p) sufficient to bind to and/or disaggregate amyloid described in International Publication No. WO2014193935, the contents of which are herein incorporated by reference in their entirety. As a non-limiting example, the payload region of the viral particle comprises one or more nucleic acid sequences encoding one or more of the polypeptides described in WO2014193935 may be used to treat, prevent and/or reduce the effects of Parkinson's Disease and/or dementia. As another non-limiting example, the payload region of the viral particle comprises one or more nucleic acid sequences encoding one or more of the polypeptides described in WO2014193935 may be used to treat, prevent and/or reduce the effects of Alzheimer's Disease. As another non-limiting example, the payload region of the viral particle comprises one or more nucleic acid sequences encoding one or more of the polypeptides described in WO2014193935 may be used to treat, prevent and/or reduce the effects of Huntington's Disease. As another non-limiting example, the payload region of the viral particle comprises one or more nucleic acid sequences encoding one or more of the polypeptides described in WO2014193935 may be used to treat, prevent and/or reduce the effects of muscle disease such as, but not limited to, Multiple System Atrophy (MSA), Amyotrophic Lateral Sclerosis (ALS) and Duchenne Muscular Dystrophy (DMD).

### Alzheimer's Disease Antibodies

[0811] In some embodiments, the payload region of the viral particle comprises one or more nucleic acid sequences encoding one or more of the Alzheimer's Disease payload antibody polypeptides listed in Table 4 of U.S. provisional patent application 62/844,433 (AD1-AD1178; SEQ ID NO: 4224-5401), the contents of which are herein incorporated by reference in their entirety.

### Huntington's Disease Antibodies

[0812] In some embodiments, the payload region of the viral particle comprises one or more nucleic acid sequences encoding one or more of the Huntington's Disease payload antibody polypeptides listed in Table 5 of U.S. provisional patent application 62/844,433 (HD1-HD245; SEQ ID NO: 5402-5646), the contents of which are herein incorporated by reference in their entirety.

### Neuropathy Antibodies

[0813] In some embodiments, the payload region of the viral particle comprises one or more nucleic acid sequences encoding one or more of the neuropathy payload antibody polypeptides listed in Table 7 of U.S. provisional patent application 62/844,433 (NEURO1-NEURO65; SEQ ID NO:6132-6196), the contents of which are herein incorporated by reference in their entirety.

### Psychiatric Disorder Antibodies

[0814] In some embodiments, the payload region of the viral particle comprises one or more nucleic acid sequences encoding one or more of the psychiatric disorder payload antibody polypeptides listed in Table 8 of U.S. provisional patent application 62/844,433 (PSYCH1-PSYCH160; SEQ ID NO: 6197-6356), the contents of which are herein incorporated by reference in their entirety.

### Tau

[0815] In some embodiments, the payload region of the viral particle comprises one or more nucleic acid sequences encoding one or more of the payload antibody polypeptides listed in Table 13 of U.S. provisional patent application 62/844,433 (TAU1-TAU1322; SEQ ID NO: 20979-22300), the contents of which are herein incorporated by reference in their entirety.

[0816] Payload regions of the viral genomes of the disclosure may encode any anti-tau antibodies, or tau-associated antibodies, not limited to those described in Table 13, including antibodies that are known in the art and/or antibodies that are commercially available as described in of U.S. provisional patent application 62/844,433. This may include fragments of such antibodies or antibodies that have been developed to comprise one or more of such fragments (e.g., variable domains or complementarity determining regions (CDRs)).

[0817] In one embodiment, the payload region of the AAV particle comprises one or more nucleic acid sequences encoding one or more of the payload antibody polypeptides listed in Table 11.

[0818] In one embodiment, the payload region of the AAV particle comprises one or more nucleic acid sequences listed in Table 11.

[0819] In some embodiments, the payload region of the AAV particle comprises a nucleic acid sequence encoding a payload antibody with at least 50% identity to one or more payload antibody polypeptides listed in Table 11, The encoded antibody polypeptide may have 50%, 51%, 52%, 53%, 54%, 55%, 56%, 57%, 58%, 59%, 60%, 61%, 62%, 63%, 64%, 65%, 66%, 67%, 68%, 69%, 70%, 71%, 72%, 73%, 74%, 75%, 76%, 77%, 78%, 79%, 80%, 81%, 82%, 83%, 84%, 85%, 86%, 87%, 88%, 89%, 90%, 91%, 92%, 93%, 94%, 95%, 96%, 97%, 98%, 99%, or 100% identity to one or more of the payload antibody polypeptides listed in Table 11.

[0820] In one embodiment, the full sequence of the encoded antibody polypeptide may have 50%, 51%, 52%, 53%, 54%, 55%, 56%, 57%, 58%, 59%, 60%, 1%, 62%, 63%, 64%, 65%, 66%, 67%, 68%, 69%, 70%, 71%, 72%, 73%, 74%, 75%, 76%, 77%, 78%, 79%, 80%, 81%, 82%, 83%, 84%, 85%, 86%, 87%, 88%, 89%, 90%, 91%, 92%, 93%, 94%, 95%, 96%, 97%, 98%, 99%, or 100% identity to one or more of the payload antibody polypeptides listed in Table 11.

[0821] In one embodiment, the variable region sequence(s) of the encoded antibody polypeptide may have 50%, 51%, 52%, 53%, 54%, 55%, 56%, 57%, 58%, 59%, 60%, 61%,62%, 63%, 64%, 65%, 66%, 67%, 68%, 69%, 70%, 71%, 72%, 73%, 74%, 75%, 76%, 77%, 78%, 79%, 80%, 81%, 82%, 83%, 84%, 85%, 86%, 87%, 88%, 89%, 90%, 91%, 92%, 93%, 94%, 95%, 96%, 97%, 98%, 99%, or 100% identity to one or more of the payload antibody polypeptides listed in Table 11.

[0822] In one embodiment, the heavy chain of the encoded antibody polypeptide may have 50%,51%,52%,53%, 54%,55%, 56%, 57%, 58%, 59%, 60%, 61%, 62%, 63%, 64%, 65%, 66%, 67%, 68%, 69%, 70%, 71%, 72%, 73%, 74%, 75%, 76%, 77%, 78%, 79%, 80%, 81%, 82%, 83%, 84%, 85%, 86%, 87%, 88%, 89%, 90%, 91%, 92%, 93%, 94%, 95%, 96%, 97%, 98%, 99%, or 100% identity to one or more of the payload heavy chain antibody polypeptides listed in Table 11.

[0823] In one embodiment, the light chain of the encoded antibody polypeptide may have 50%,51%,52%,53%, 54%, 55%, 56%, 57%, 58%, 59%, 60%, 61%, 62%, 63%, 64%, 65%, 66%, 67%, 68%, 69%, 70%, 71%, 72%, 73%, 74%, 75%, 76%,77%, 78%, 79%, 80%, 81%, 82%, 83%, 84%, 85%,86, 86%, 87%, 88%, 89%, 90%, 91%,92%, 93%, 94%,95%,96%, 97%,98%,99%, or 100% identity to one or more of the payload light chain antibody polypeptides listed in Table 11.

[0824] In one embodiment, the CDR region of the encoded antibody polypeptide may have 50%, 51%,52%,53%, 54%,55%, 56%, 57%, 58%, 59%, 60%, 61%, 62%, 63%,64%, 65%, 66%, 67%, 68%, 69%, 70%, 71%, 72%, 73%, 74%, 75%, 76%, 77%, 78%, 79%, 80%, 81%, 82%, 83%, 84%, 85%, 86%, 87%, 88%, 89%, 90%, 91%, 92%, 93%, 94%, 95%, 96%, 97%, 98%, 99%, or 100% identity to the CDRs of one or more of the payload antibody polypeptides listed in Table 11.

[0825] In one embodiment, the payload antibody has 90% identity to one or more of the antibody polypeptides listed in Table 11.

[0826] In one embodiment, the payload antibody has 91% identity to one or more of the antibody polypeptides listed in Table 11.

[0827] In one embodiment, the payload antibody has 92% identity to one or more of the antibody polypeptides listed in Table 11.

[0828] In one embodiment, the payload antibody has 93% identity to one or more of the antibody polypeptides listed in Table 11.

[0829] In one embodiment, the payload antibody has 94% identity to one or more of the antibody polypeptides listed in Table 11.

[0830] In one embodiment, the payload antibody has 95% identity to one or more of the antibody polypeptides listed in Table 11.

[0831] In one embodiment, the payload antibody has 96% identity to one or more of the antibody polypeptides listed in Table 11.

[0832] In one embodiment, the payload antibody has 97% identity to one or more of the antibody polypeptides listed in Table 11.

[0833] In one embodiment, the payload antibody has 98% identity to one or more of the antibody polypeptides listed in Table 11.

[0834] In one embodiment, the payload antibody has 99% identity to one or more of the antibody polypeptides listed in Table 11.

[0835] In one embodiment, the payload antibody has 100% identity to one or more of the antibody polypeptides listed in Table 11.

[0836] In some embodiments, the payload region of the AAV particle comprises a nucleic acid sequence with at least 50% identity to one or more nucleic acid sequences listed in Table 11. The payload nucleic acid sequence may have 50%, 51%, 52%, 53%, 54%, 55%, 56%, 57%, 58%, 59%, 60%, 61%, 62%, 63%, 64%, 65%, 66%, 67%, 68%, 69%, 70%, 71%, 72%, 73%, 74%, 75%, 76%, 77%, 78%, 79%, 80%, 81%, 82%, 83%, 84%, 85%, 86%, 87%, 88%, 89%, 90%, 91%, 92%,93%,94%, 95%,96%,97%, 98%, 99%, or 100% identity to one or more nucleic acid sequences listed in Table 11.

[0837] In one embodiment, the payload nucleic acid sequence has 90% identity to one or more of the nucleic acid sequences listed in Table 11.

[0838] In one embodiment, the payload nucleic acid sequence has 91% identity to one or more of the nucleic acid sequences listed in Table 11.

[0839] In one embodiment, the payload nucleic acid sequence has 92% identity to one or more of the nucleic acid sequences listed in Table 11.

[0840] In one embodiment, the payload nucleic acid sequence has 93% identity to one or more of the nucleic acid sequences listed in Table 11.

[0841] In one embodiment, the payload nucleic acid sequence has 94% identity to one or more of the nucleic acid sequences listed in Table 11.

[0842] In one embodiment, the payload nucleic acid sequence has 95% identity to one or more of the nucleic acid sequences listed in Table 11.

[0843] In one embodiment, the payload nucleic acid sequence has 96% identity to one or more of the nucleic acid sequences listed in Table 11.

[0844] In one embodiment, the payload nucleic acid sequence has 97% identity to one or more of the nucleic acid sequences listed in Table 11.

[0845] In one embodiment, the payload nucleic acid sequence has 98% identity to one or more of the nucleic acid sequences listed in Table 11.

[0846] In one embodiment, the payload nucleic acid sequence has 99% identity to one or more of the nucleic acid sequences listed in Table 11.

[0847] In one embodiment, the payload nucleic acid sequence has 100% identity to one or more of the nucleic acid sequences listed in Table 11.

TABLE 11
Tats Associated Disease Antibodies

| | | Type | | SEQ |
|---|---|---|---|---|
| Antibody No. | Component | (PRT/DNA) | Reference | ID NO |
| Tau1323 | VH | PRT | WO2017191560; SEQ ID NO: 7 | 13165 |
| Tau1324 | VL | PRT | WO2017191560; SEQ ID NO: 11 | 13166 |
| Tau1325 | VH | PRT | WO2017191560; SEQ ID NO: 15 | 13167 |
| Tau1326 | VH | PRT | WO2017191560; SEQ ID NO: 16 | 13168 |
| Tau1327 | VH | PRT | WO2017191560; SEQ ID NO: 17 | 13169 |
| Tau1328 | VH | PRT | WO2017191560; SEQ ID NO: 18 | 13170 |
| Tau1329 | VH | PRT | WO2017191560; SEQ ID NO: 19 | 13171 |
| Tau1330 | VL | PRT | WO2017191560; SEQ ID NO: 20 | 13172 |
| Tau1331 | VL | PRT | WO2017191560; SEQ ID NO: 21 | 13173 |
| Tau1332 | VL | PRT | WO2017191560; SEQ ID NO: 22 | 13174 |
| Tau1333 | VL | PRT | WO2017191560; SEQ ID NO: 23 | 13175 |
| Tau1334 | VH | PRT | WO2017191560; SEQ ID NO: 46 | 13176 |
| Tau1335 | VH | PRT | WO2017191560; SEQ ID NO: 47 | 13177 |
| Tau1336 | VH | PRT | WO2017191560; SEQ ID NO: 48 | 13178 |
| Tau1337 | VH | PRT | WO2017191560; SEQ ID NO: 49 | 13179 |
| Tau1338 | VH | PRT | WO2017191560; SEQ ID NO: 50 | 13180 |
| Tau1339 | VH | PRT | WO2017191560; SEQ ID NO: 51 | 13181 |
| Tau1340 | VH | PRT | WO2017191560; SEQ ID NO: 52 | 13182 |
| Tau1341 | VH | PRT | WO2017191560; SEQ ID NO: 53 | 13183 |
| Tau1342 | VH | PRT | WO2017191560; SEQ ID NO: 54 | 13184 |
| Tau1343 | VH | PRT | WO2017191560; SEQ ID NO: 55 | 13185 |
| Tau1344 | VH | PRT | WO2017191560; SEQ ID NO: 56 | 13186 |
| Tau1345 | VH | PRT | WO2017191560; SEQ ID NO: 57 | 13187 |
| Tau1346 | VH | PRT | WO2017191560; SEQ ID NO: 66 | 13188 |
| Tau1347 | HC | PRT | WO2017191560; SEQ ID NO: 72 | 13189 |
| Tau1348 | LC | PRT | WO2017191560; SEQ ID NO: 73 | 13190 |
| Tau1349 | VH | PRT | WO2017191561; SEQ ID NO: 7 | 13191 |
| Tau1350 | VL | PRT | WO2017191561; SEQ ID NO: 11 | 13192 |
| Tau1351 | VH | PRT | WO2017191561; SEQ ID NO: 15 | 13193 |
| Tau1352 | VH | PRT | WO2017191561; SEQ ID NO: 16 | 13194 |
| Tau1353 | VH | PRT | WO2017191561; SEQ ID NO: 17 | 13195 |
| Tau1354 | VH | PRT | WO2017191561; SEQ ID NO: 18 | 13196 |
| Tau1355 | VH | PRT | WO2017191561; SEQ ID NO: 19 | 13197 |
| Tau1356 | VH | PRT | WO2017191561; SEQ ID NO: 26 | 13198 |
| Tau1357 | VH | PRT | WO2017191561; SEQ ID NO: 21 | 13199 |
| Tau1358 | VH | PRT | WO2017191561; SEQ ID NO: 22 | 13200 |
| Tau1359 | VH | PRT | WO2017191561; SEQ ID NO: 23 | 13201 |
| Tau1360 | VH | PRT | WO2017191561; SEQ ID NO: 24 | 13202 |
| Tau1361 | VH | PRT | WO2017191561; SEQ ID NO: 25 | 13203 |
| Tau1362 | VH | PRT | WO2017191561; SEQ ID NO: 26 | 13204 |
| Tau1363 | VH | PRT | WO2017191561; SEQ ID NO: 27 | 13205 |
| Tau1364 | VL | PRT | WO2017191561; SEQ ID NO: 28 | 13206 |
| Tau1365 | VL | PRT | WO2017191561; SEQ ID NO: 29 | 13207 |
| Tau1366 | VL | PRT | WO2017191561; SEQ ID NO: 30 | 13208 |
| Tau1367 | HC | PRT | WO2017191561; SEQ ID NO: 54 | 13209 |
| Tau1368 | LC | PRT | WO2017191561; SEQ ID NO: 55 | 13210 |
| Tau1369 | LC | PRT | WO2018031361; SEQ ID NO: 67 | 13211 |
| Tau1370 | HC | PRT | WO2018031361; SEQ ID NO: 68 | 13212 |
| Tau1371 | VL | PRT | WO2018031361; SEQ ID NO: 75 | 13213 |
| Tau1372 | VH | PRT | WO2018031361; SEQ ID NO: 76 | 13214 |
| Tau1373 | VH | PRT | US20170137502; SEQ ID NO: 68 | 13215 |
| Tau1374 | VL | PRT | US20170137502; SEQ ID NO: 69 | 13216 |
| Tau1375 | VH | PRT | US20170137502; SEQ ID NO: 76 | 13217 |
| Tau1376 | VL | PRT | US20170137502; SEQ ID NO: 77 | 13218 |
| Tau1377 | VH | PRT | US20170137502; SEQ ID NO: 88 | 13219 |
| Tau1378 | VL | PRT | US20170137502; SEQ ID NO: 92 | 13220 |
| Tau1379 | VH | PRT | US20170137502; SEQ ID NO: 96 | 13221 |
| Tau1380 | VL | PRT | US20170137502; SEQ ID NO: 97 | 13222 |
| Tau1381 | VH | PRT | US20170137502; SEQ ID NO: 104 | 13223 |
| Tau1382 | VL | PRT | US20170137502; SEQ ID NO: 105 | 13224 |
| Tau1383 | VL | PRT | US20170137502; SEQ ID NO: 116 | 13225 |
| Tau1384 | VL | PRT | US20170137502; SEQ ID NO: 118 | 13226 |
| Tau1385 | VH | PRT | US20190112362; SEQ ID NO: 10 | 13227 |
| Tau1386 | VL | PRT | US20190112362; SEQ ID NO: 11 | 13228 |
| Tau1387 | VL | PRT | US20190112362; SEQ ID NO: 21 | 13229 |
| Tau1388 | VH | PRT | US20190112362; SEQ ID NO: 30 | 13230 |
| Tau1389 | VL | PRT | US20190112362; SEQ ID NO: 31 | 13231 |
| Tau1390 | VH | PRT | US20190112362; SEQ ID NO: 40 | 13232 |
| Tau1391 | VL | PRT | US20190112362; SEQ ID NO: 41 | 13233 |
| Tau1392 | VH | PRT | US20190112362; SEQ ID NO: 50 | 13234 |
| Tau1393 | VL | PRT | US20190112362; SEQ ID NO: 51 | 13235 |
| Tau1394 | VH | PRT | US20190112362; SEQ ID NO: 60 | 13236 |
| Tau1395 | VL | PRT | US20190112362; SEQ ID NO: 61 | 13237 |
| Tau1396 | VH | PRT | US20190112362; SEQ ID NO: 70 | 13238 |
| Tau1397 | VL | PRT | US20190112362; SEQ ID NO: 71 | 13239 |
| Tau1398 | VH | PRT | US20190112362; SEQ ID NO: 80 | 13240 |
| Tau1399 | VL | PRT | US20190112362; SEQ ID NO: 81 | 13241 |
| Tau1400 | VH | PRT | US20190112362; SEQ ID NO: 90 | 13242 |
| Tau1401 | VL | PRT | US20190112362; SEQ ID NO: 91 | 13243 |
| Tau1402 | VH | PRT | US20190112362; SEQ ID NO: 100 | 13244 |
| Tau1403 | VL | PRT | US20190112362; SEQ ID NO: 101 | 13245 |
| Tau1404 | VH | PRT | US20190112362; SEQ ID NO: 120 | 13246 |
| Tau1405 | VL | PRT | US20190112362; SEQ ID NO: 121 | 13247 |
| Tau1406 | VH | PRT | US20190112362; SEQ ID NO: 130 | 13248 |
| Tau1407 | VL | PRT | US20190112362; SEQ ID NO: 131 | 13249 |
| Tau1408 | VH | PRT | US20190112362; SEQ ID NO: 140 | 13250 |
| Tau1409 | VL | PRT | US20190112362; SEQ ID NO: 141 | 13251 |
| Tau1410 | VH | PRT | US20190112362; SEQ ID NO: 150 | 13252 |
| Tau1411 | VL | PRT | US20190112362; SEQ ID NO: 151 | 13253 |
| Tau1412 | VH | PRT | US20190112362; SEQ ID NO: 160 | 13254 |
| Tau1413 | VL | PRT | US20190112362; SEQ ID NO: 161 | 13255 |
| Tau1414 | VH | PRT | US20190112362; SEQ ID NO: 170 | 13256 |
| Tau1415 | VH | PRT | US20190112362; SEQ ID NO: 180 | 13257 |
| Tau1416 | VL | PRT | US20190112362; SEQ ID NO: 181 | 13258 |
| Tau1417 | VH | PRT | US20190112362; SEQ ID NO: 190 | 13259 |
| Tau1418 | VL | PRT | US20190112362; SEQ ID NO: 191 | 13260 |
| Tau1419 | VH | PRT | US20190112362; SEQ ID NO: 200 | 13261 |
| Tau1420 | VL | PRT | US20190112362; SEQ ID NO: 201 | 13262 |
| Tau1421 | VH | PRT | US20190112362; SEQ ID NO: 210 | 13263 |
| Tau1422 | VL | PRT | US20190112362; SEQ ID NO: 211 | 13264 |
| Tau1423 | VH | PRT | US20190112362; SEQ ID NO: 220 | 13265 |
| Tau1424 | VL | PRT | US20190112362; SEQ ID NO: 221 | 13266 |
| Tau1425 | VH | PRT | US20190112362; SEQ ID NO: 230 | 13267 |
| Tau1426 | VL | PRT | US20190112362; SEQ ID NO: 231 | 13268 |
| Tau1427 | VH | PRT | US20190112362; SEQ ID NO: 240 | 13269 |
| Tau1428 | VL | PRT | US20190112362; SEQ ID NO: 241 | 13270 |
| Tau1429 | VH | PRT | US20190112362; SEQ ID NO: 250 | 13271 |
| Tau1430 | VL | PRT | US20190112362; SEQ ID NO: 251 | 13272 |
| Tau1431 | VH | PRT | US20190112362; SEQ ID NO: 260 | 13273 |
| Tau1432 | VL | PRT | US20190112362; SEQ ID NO: 261 | 13274 |
| Tau1433 | VH | PRT | US20190112362; SEQ ID NO: 270 | 13275 |
| Tau1434 | VL | PRT | US20190112362; SEQ ID NO: 271 | 13276 |
| Tau1435 | VH | PRT | US20190112362; SEQ ID NO: 280 | 13277 |
| Tau1436 | VL | PRT | US20190112362; SEQ ID NO: 281 | 13278 |
| Tau1437 | HC | PRT | US20190112362; SEQ ID NO: 288 | 13279 |
| Tau1438 | LC | PRT | US20190112362; SEQ ID NO: 289 | 13280 |
| Tau1439 | VL | PRT | US20190112362; SEQ ID NO: 291 | 13281 |
| Tau1440 | VH | PRT | US20190112362; SEQ ID NO: 300 | 13282 |
| Tau1441 | VL | PRT | US20190112362; SEQ ID NO: 301 | 13283 |
| Tau1442 | VH | PRT | US20190112362; SEQ ID NO: 310 | 13284 |
| Tau1443 | VL | PRT | US20190112362; SEQ ID NO: 311 | 13285 |
| Tau1444 | VH | PRT | US20190112362; SEQ ID NO: 320 | 13286 |
| Tau1445 | VL | PRT | US20190112362; SEQ ID NO: 321 | 13287 |
| Tau1446 | VL | PRT | US20190112362; SEQ ID NO: 331 | 13288 |
| Tau1447 | VL | PRT | US20190112362; SEQ ID NO: 341 | 13289 |
| Tau1448 | HC | PRT | US20190112362; SEQ ID NO: 348 | 13290 |
| Tau1449 | LC | PRT | US20190112362; SEQ ID NO: 349 | 13291 |
| Tau1450 | LC | PRT | US20190112362; SEQ ID NO: 444 | 13292 |
| Tau1451 | HC | PRT | US20190112362; SEQ ID NO: 446 | 13293 |
| Tau1452 | HC | PRT | US20190112362; SEQ ID NO: 447 | 13294 |
| Tau1453 | HC | PRT | US20190112362; SEQ ID NO: 450 | 13295 |
| Tau1454 | HC | PRT | US20190112362; SEQ ID NO: 451 | 13296 |
| Tau1455 | HC | PRT | US20190112362; SEQ ID NO: 453 | 13297 |
| Tau1456 | HC | PRT | US20190112362; SEQ ID NO: 454 | 13298 |
| Tau1457 | HC | PRT | US20190112362; SEQ ID NO: 455 | 13299 |
| Tau1458 | HC | PRT | US20190112362; SEQ ID NO: 456 | 13300 |
| Tau1459 | HC | PRT | US20190112362; SEQ ID NO: 457 | 13301 |
| Tau1460 | HC | PRT | US20190112362; SEQ ID NO: 458 | 13302 |
| Tau1461 | HC | PRT | US20190112362; SEQ ID NO: 459 | 13303 |
| Tau1462 | LC | PRT | US20190112362; SEQ ID NO: 460 | 13304 |
| Tau1463 | LC | PRT | US20190112362; SEQ ID NO: 461 | 13305 |
| Tau1464 | LC | PRT | US20190112362; SEQ ID NO: 462 | 13306 |
| Tau1465 | LC | PRT | US20190112362; SEQ ID NO: 463 | 13307 |
| Tau1466 | LC | PRT | US20190112362; SEQ ID NO: 465 | 13308 |
| Tau1467 | LC | PRT | US20190112362; SEQ ID NO: 466 | 13309 |
| Tau1468 | LC | PRT | US20190112362; SEQ ID NO: 467 | 13310 |
| Tau1469 | VL | PRT | US20190112362; SEQ ID NO: 561 | 13311 |
| Tau1470 | LC | PRT | US20190112362; SEQ ID NO: 569 | 13312 |
| Tau1471 | VL | PRT | US20190112362; SEQ ID NO: 571 | 13313 |
| Tau1472 | LC | PRT | US20190112362; SEQ ID NO: 579 | 13314 |
| Tau1473 | VL | PRT | US20190112362; SEQ ID NO: 581 | 13315 |
| Tau1474 | LC | PRT | US20190112362; SEQ ID NO: 589 | 13316 |
| Tau1475 | HC | PRT | US20190112362; SEQ ID NO: 590 | 13317 |
| Tau1476 | LC | PRT | US20190112362; SEQ ID NO: 598 | 13318 |
| Tau1477 | LC | PRT | US20190112362; SEQ ID NO: 599 | 13319 |
| Tau1478 | LC | PRT | US20190112362; SEQ ID NO: 600 | 13320 |
| Tau1479 | LC | PRT | US20190112362; SEQ ID NO: 601 | 13321 |
| Tau1480 | HC | PRT | US20190112362; SEQ ID NO: 602 | 13322 |
| Tau1481 | VH | PRT | US20190112364; SEQ ID NO: 192 | 13323 |
| Tau1482 | VH | PRT | US20190112364; SEQ ID NO: 193 | 13324 |
| Tau1483 | VH | PRT | US20190112364; SEQ ID NO: 196 | 13325 |
| Tau1484 | HC | PRT | US20190112364; SEQ ID NO: 201 | 13326 |
| Tau1485 | HC | PRT | US20190112364; SEQ ID NO: 202 | 13327 |
| Tau1486 | VH | PRT | US20190112364; SEQ ID NO: 205 | 13328 |
| Tau1487 | HC | PRT | US20190112364; SEQ ID NO: 210 | 13329 |
| Tau1488 | HC | PRT | US20190112364; SEQ ID NO: 211 | 13330 |
| Tau1489 | VH | PRT | US20190112364; SEQ ID NO: 214 | 13331 |
| Tau1490 | HC | PRT | US20190112364; SEQ ID NO: 219 | 13332 |
| Tau1491 | HC | PRT | US20190112364; SEQ ID NO: 220 | 13333 |
| Tau1492 | VH | PRT | US20190112364; SEQ ID NO: 223 | 13334 |
| Tau1493 | HC | PRT | US20190112364; SEQ ID NO: 228 | 13335 |
| Tau1494 | HC | PRT | US20190112364; SEQ ID NO: 229 | 13336 |
| Tau1495 | VH | PRT | US20190112364; SEQ ID NO: 232 | 13337 |
| Tau1496 | HC | PRT | US20190112364; SEQ ID NO: 237 | 13338 |
| Tau1497 | HC | PRT | US20190112364; SEQ ID NO: 238 | 13339 |
| Tau1498 | VH | PRT | US20190112364; SEQ ID NO: 241 | 13340 |
| Tau1499 | HC | PRT | US20190112364; SEQ ID NO: 246 | 13341 |
| Tau1500 | HC | PRT | US20190112364; SEQ ID NO: 247 | 13342 |
| Tau1501 | VH | PRT | US20190112364; SEQ ID NO: 250 | 13343 |
| Tau1502 | HC | PRT | US20190112364; SEQ ID NO: 255 | 13344 |
| Tau1503 | HC | PRT | US20190112364; SEQ ID NO: 256 | 13345 |
| Tau1504 | VH | PRT | US20190112364; SEQ ID NO: 259 | 13346 |
| Tau1505 | HC | PRT | US20190112364; SEQ ID NO: 264 | 13347 |
| Tau1506 | HC | PRT | US20190112364; SEQ ID NO: 265 | 13348 |
| Tau1507 | VH | PRT | US20190112364; SEQ ID NO: 268 | 13349 |
| Tau1508 | HC | PRT | US20190112364; SEQ ID NO: 273 | 13350 |
| Tau1509 | HC | PRT | US20190112364; SEQ ID NO: 274 | 13351 |
| Tau1510 | VH | PRT | US20190112364; SEQ ID NO: 277 | 13352 |
| Tau1511 | HC | PRT | US20190112364; SEQ ID NO: 282 | 13353 |
| Tau1512 | HC | PRT | US20190112364; SEQ ID NO: 283 | 13354 |
| Tau1513 | VH | PRT | US20190112364; SEQ ID NO: 286 | 13355 |
| Tau1514 | HC | PRT | US20190112364; SEQ ID NO: 291 | 13356 |
| Tau1515 | HC | PRT | US20190112364; SEQ ID NO: 292 | 13357 |
| Tau1516 | VH | PRT | US20190112364; SEQ ID NO: 295 | 13358 |
| Tau1517 | HC | PRT | US20190112364; SEQ ID NO: 300 | 13359 |
| Tau1518 | HC | PRT | US20190112364; SEQ ID NO: 301 | 13360 |
| Tau1519 | VH | PRT | US20190112364; SEQ ID NO: 304 | 13361 |
| Tau1520 | HC | PRT | US20190112364; SEQ ID NO: 309 | 13362 |
| Tau1521 | HC | PRT | US20190112364; SEQ ID NO: 310 | 13363 |
| Tau1522 | VH | PRT | US20190112364; SEQ ID NO: 313 | 13364 |
| Tau1523 | HC | PRT | US20190112364; SEQ ID NO: 317 | 13365 |
| Tau1524 | HC | PRT | US20190112364; SEQ ID NO: 318 | 13366 |
| Tau1525 | VH | PRT | US20190112364; SEQ ID NO: 326 | 13367 |
| Tau1526 | HC | PRT | US20190112364; SEQ ID NO: 327 | 13368 |
| Tau1527 | HC | PRT | US20190112364; SEQ ID NO: 330 | 13369 |
| Tau1528 | VH | PRT | US20190112364; SEQ ID NO: 335 | 13370 |
| Tau1529 | HC | PRT | US20190112364; SEQ ID NO: 336 | 13371 |
| Tau1530 | HC | PRT | US20190112364; SEQ ID NO: 339 | 13372 |
| Tau1531 | HC | PRT | US20190112364; SEQ ID NO: 344 | 13373 |
| Tau1532 | HC | PRT | US20190112364; SEQ ID NO: 345 | 13374 |
| Tau1533 | VH | PRT | US20190112364; SEQ ID NO: 348 | 13375 |
| Tau1534 | HC | PRT | US20190112364; SEQ ID NO: 353 | 13376 |
| Tau1535 | HC | PRT | US20190112364; SEQ ID NO: 354 | 13377 |
| Tau1536 | VH | PRT | US20190112364; SEQ ID NO: 357 | 13378 |
| Tau1537 | HC | PRT | US20190112364; SEQ ID NO: 362 | 13379 |
| Tau1538 | HC | PRT | US20190112364; SEQ ID NO: 363 | 13380 |
| Tau1539 | VH | PRT | US20190112364; SEQ ID NO: 366 | 13381 |
| Tau1540 | HC | PRT | US20190112364; SEQ ID NO: 371 | 13382 |
| Tau1541 | HC | PRT | US20190112364; SEQ ID NO: 372 | 13383 |
| Tau1542 | VH | PRT | US20190112364; SEQ ID NO: 375 | 13384 |
| Tau1543 | HC | PRT | US20190112364; SEQ ID NO: 380 | 13385 |
| Tau1544 | HC | PRT | US20190112364; SEQ ID NO: 381 | 13386 |
| Tau1545 | VH | PRT | US20190112364; SEQ ID NO: 384 | 13387 |
| Tau1546 | HC | PRT | US20190112364; SEQ ID NO: 389 | 13388 |
| Tau1547 | HC | PRT | US20190112364; SEQ ID NO: 390 | 13389 |
| Tau1548 | VH | PRT | US20190112364; SEQ ID NO: 393 | 13390 |
| Tau1549 | HC | PRT | US20190112364; SEQ ID NO: 398 | 13391 |
| Tau1550 | HC | PRT | US20190112364; SEQ ID NO: 399 | 13392 |
| Tau1551 | VH | PRT | US20190112364; SEQ ID NO: 402 | 13393 |
| Tau1552 | LC | PRT | US20190112364; SEQ ID NO: 407 | 13394 |
| Tau1553 | LC | PRT | US20190112364; SEQ ID NO: 408 | 13395 |
| Tau1554 | VL | PRT | US20190112364; SEQ ID NO: 411 | 13396 |
| Tau1555 | LC | PRT | US20190112364; SEQ ID NO: 416 | 13397 |
| Tau1556 | LC | PRT | US20190112364; SEQ ID NO: 417 | 13398 |
| Tau1557 | VL | PRT | US20190112364; SEQ ID NO: 420 | 13399 |
| Tau1558 | LC | PRT | US20190112364; SEQ ID NO: 425 | 13400 |
| Tau1559 | LC | PRT | US20190112364; SEQ ID NO: 426 | 13401 |
| Tau1560 | VL | PRT | US20190112364; SEQ ID NO: 429 | 13402 |
| Tau1561 | LC | PRT | US20190112364; SEQ ID NO: 434 | 13403 |
| Tau1562 | LC | PRT | US20190112364; SEQ ID NO: 435 | 13404 |
| Tau1563 | VL | PRT | US20190112364; SEQ ID NO: 438 | 13405 |
| Tau1564 | LC | PRT | US20190112364; SEQ ID NO: 443 | 13406 |
| Tau1565 | LC | PRT | US20190112364; SEQ ID NO: 444 | 13407 |
| Tau1566 | VL | PRT | US20190112364; SEQ ID NO: 447 | 13408 |
| Tau1567 | LC | PRT | US20190112364; SEQ ID NO: 452 | 13409 |
| Tau1568 | LC | PRT | US20190112364; SEQ ID NO: 453 | 13410 |
| Tau1569 | VL | PRT | US20190112364; SEQ ID NO: 456 | 13411 |
| Tau1570 | LC | PRT | US20190112364; SEQ ID NO: 461 | 13412 |
| Tau1571 | LC | PRT | US20190112364; SEQ ID NO: 462 | 13413 |
| Tau1572 | VL | PRT | US20190112364; SEQ ID NO: 465 | 13414 |
| Tau1573 | LC | PRT | US20190112364; SEQ ID NO: 470 | 13415 |
| Tau1574 | LC | PRT | US20190112364; SEQ ID NO: 471 | 13416 |
| Tau1575 | VL | PRT | US20190112364; SEQ ID NO: 474 | 13417 |
| Tau1576 | LC | PRT | US20190112364; SEQ ID NO: 479 | 13418 |
| Tau1577 | LC | PRT | US20190112364; SEQ ID NO: 480 | 13419 |
| Tau1578 | VL | PRT | US20190112364; SEQ ID NO: 483 | 13420 |
| Tau1579 | LC | PRT | US20190112364; SEQ ID NO: 487 | 13421 |
| Tau1580 | LC | PRT | US20190112364; SEQ ID NO: 488 | 13422 |
| Tau1581 | VL | PRT | US20190112364; SEQ ID NO: 491 | 13423 |
| Tau1582 | LC | PRT | US20190112364; SEQ ID NO: 496 | 13424 |
| Tau1583 | LC | PRT | US20190112364; SEQ ID NO: 497 | 13425 |
| Tau1584 | VL | PRT | US20190112364; SEQ ID NO: 500 | 13426 |
| Tau1585 | LC | PRT | US20190112364; SEQ ID NO: 505 | 13427 |
| Tau1586 | LC | PRT | US20190112364; SEQ ID NO: 506 | 13428 |
| Tau1587 | VL | PRT | US20190112364; SEQ ID NO: 509 | 13429 |
| Tau1588 | LC | PRT | US20190112364; SEQ ID NO: 514 | 13430 |
| Tau1589 | LC | PRT | US20190112364; SEQ ID NO: 515 | 13431 |
| Tau1590 | VL | PRT | US20190112364; SEQ ID NO: 518 | 13432 |
| Tau1591 | LC | PRT | US20190112364; SEQ ID NO: 523 | 13433 |
| Tau1592 | LC | PRT | US20190112364; SEQ ID NO: 524 | 13434 |
| Tau1593 | VL | PRT | US20190112364; SEQ ID NO: 527 | 13435 |
| Tau1594 | LC | PRT | US20190112364; SEQ ID NO: 532 | 13436 |
| Tau1595 | LC | PRT | US20190112364; SEQ ID NO: 533 | 13437 |
| Tau1596 | VL | PRT | US20190112364; SEQ ID NO: 536 | 13438 |
| Tau1597 | LC | PRT | US20190112364; SEQ ID NO: 541 | 13439 |
| Tau1598 | LC | PRT | US20190112364; SEQ ID NO: 542 | 13440 |
| Tau1599 | VL | PRT | US20190112364; SEQ ID NO: 545 | 13441 |
| Tau1600 | LC | PRT | US20190112364; SEQ ID NO: 550 | 13442 |
| Tau1601 | LC | PRT | US20190112364; SEQ ID NO: 551 | 13443 |
| Tau1602 | VL | PRT | US20190112364; SEQ ID NO: 554 | 13444 |
| Tau1603 | LC | PRT | US20190112364; SEQ ID NO: 559 | 13445 |
| Tau1604 | LC | PRT | US20190112364; SEQ ID NO: 560 | 13446 |
| Tau1605 | VL | PRT | US20190112364; SEQ ID NO: 563 | 13447 |
| Tau1606 | LC | PRT | US20190112364; SEQ ID NO: 568 | 13448 |
| Tau1607 | LC | PRT | US20190112364; SEQ ID NO: 569 | 13449 |
| Tau1608 | VL | PRT | US20190112364; SEQ ID NO: 572 | 13450 |
| Tau1609 | LC | PRT | US20190112364; SEQ ID NO: 577 | 13451 |
| Tau1610 | LC | PRT | US20190112364; SEQ ID NO: 578 | 13452 |
| Tau1611 | VL | PRT | US20190112364; SEQ ID NO: 581 | 13453 |
| Tau1612 | LC | PRT | US20190112364; SEQ ID NO: 586 | 13454 |
| Tau1613 | LC | PRT | US20190112364; SEQ ID NO: 587 | 13455 |
| Tau1614 | VL | PRT | US20190112364; SEQ ID NO: 590 | 13456 |
| Tau1615 | VH | PRT | WO2018154390; SEQ ID NO: 18 | 13457 |
| Tau1616 | VH | PRT | WO2018154390; SEQ ID NO: 20 | 13458 |
| Tau1617 | VH | PRT | WO2018154390; SEQ ID NO: 22 | 13459 |
| Tau1618 | VH | PRT | WO2018154390; SEQ ID NO: 24 | 13460 |
| Tau1619 | VH | PRT | WO2018154390; SEQ ID NO: 26 | 13461 |
| Tau1620 | VH | PRT | WO2018154390; SEQ ID NO: 28 | 13462 |
| Tau1621 | VH | PRT | WO2018154390; SEQ ID NO: 30 | 13463 |
| Tau1622 | VL | PRT | WO2018154390; SEQ ID NO: 32 | 13464 |
| Tau163 | VL | PRT | WO2018154390; SEQ ID NO: 34 | 13465 |
| Tau1624 | VL | PRT | WO2018154390; SEQ ID NO: 36 | 13466 |
| Tau1625 | VL | PRT | WO2018154390; SEQ ID NO: 38 | 13467 |
| Tau1626 | VL | PRT | WO2018154390; SEQ ID NO: 40 | 13468 |
| Tau1627 | VL | PRT | WO2018154390; SEQ ID NO: 42 | 13469 |
| Tau1628 | LC | PRT | WO2018154390; SEQ ID NO: 44 | 13470 |
| Tau1629 | HC | PRT | WO2018154390; SEQ ID NO: 46 | 13471 |
| Tau1630 | LC | PRT | WO2018154390; SEQ ID NO: 48 | 13472 |
| Tau1631 | HC | PRT | WO2018154390; SEQ ID NO: 50 | 13473 |
| Tau1632 | VL | PRT | WO2018154390; SEQ ID NO: 84 | 13474 |
| Tau1633 | LC | PRT | WO2018154390; SEQ ID NO: 85 | 13475 |
| Tau1634 | VH | PRT | WO2018154390; SEQ ID NO: 89 | 13476 |
| Tau1635 | VL | PRT | WO2018154390; SEQ ID NO: 90 | 13477 |
| Tau1636 | VL | PRT | WO2018154390; SEQ ID NO: 105 | 13478 |
| Tau1637 | VL | PRT | WO2018154390; SEQ ID NO: 106 | 13479 |
| Tau1638 | VL | PRT | WO2018154390; SEQ ID NO: 107 | 13480 |
| Tau1639 | VL | PRT | WO2018154390; SEQ ID NO: 108 | 13481 |
| Tau1640 | VL | PRT | WO2018154390; SEQ ID NO: 109 | 13482 |
| Tau1641 | VL | PRT | WO2018154390; SEQ ID NO: 110 | 13483 |
| Tau1642 | VL | PRT | WO2018154390; SEQ ID NO: 111 | 13484 |
| Tau1643 | VL | PRT | WO2018154390; SEQ ID NO: 112 | 13485 |
| Tau1644 | VL | PRT | WO2018154390; SEQ ID NO: 113 | 13486 |
| Tau1645 | VL | PRT | WO2018154390; SEQ ID NO: 114 | 13487 |
| Tau1646 | VH | PRT | WO2018154390; SEQ ID NO: 127 | 13488 |
| Tau1647 | VH | PRT | WO2018154390; SEQ ID NO: 128 | 13489 |
| Tau1648 | VH | PRT | WO2018154390; SEQ ID NO: 129 | 13490 |
| Tau1649 | LC | PRT | WO2018154390; SEQ ID NO: 130 | 13491 |
| Tau1650 | LC | PRT | WO2018154390; SEQ ID NO: 131 | 13492 |
| Tau1651 | LC | PRT | WO2018154390; SEQ ID NO: 132 | 13493 |
| Tau1652 | HC | PRT | WO2018154390; SEQ ID NO: 133 | 13494 |
| Tau1653 | HC | PRT | WO2018154390; SEQ ID NO: 134 | 13495 |
| Tau1654 | VL | PRT | WO2018154390; SEQ ID NO: 162 | 13496 |
| Tau1655 | VL | PRT | WO2018154390; SEQ ID NO: 163 | 13497 |
| Tau1656 | VL | PRT | WO2018154390; SEQ ID NO: 164 | 13498 |
| Tau1657 | VL | PRT | WO2018154390; SEQ ID NO: 165 | 13499 |
| Tau1658 | VL | PRT | WO2018154390; SEQ ID NO: 166 | 13500 |
| Tau1659 | VL | PRT | WO2018154390; SEQ ID NO: 167 | 13501 |
| Tau1660 | VL | PRT | WO2018154390; SEQ ID NO: 168 | 13502 |
| Tau1661 | VL | PRT | WO2018154390; SEQ ID NO: 169 | 13503 |
| Tau1662 | VL | PRT | WO2018154390; SEQ ID NO: 170 | 13504 |
| Tau1663 | VL | PRT | WO2018154390; SEQ ID NO: 171 | 13505 |
| Tau1664 | VL | PRT | WO2018154390; SEQ ID NO: 172 | 13506 |
| Tau1665 | VL | PRT | WO2018154390; SEQ ID NO: 173 | 13507 |
| Tau1666 | VL | PRT | WO2018154390; SEQ ID NO: 174 | 13508 |
| Tau1667 | VL | PRT | WO2018154390; SEQ ID NO: 175 | 13509 |
| Tau1668 | VL | PRT | WO2018154390; SEQ ID NO: 176 | 13510 |
| Tau1669 | VL | PRT | WO2018154390; SEQ ID NO: 177 | 13511 |
| Tau1670 | VL | PRT | WO2018154390; SEQ ID NO: 178 | 13512 |
| Tau1671 | VL | PRT | WO2018154390; SEQ ID NO: 179 | 13513 |
| Tau1672 | VL | PRT | WO2018154390; SEQ ID NO: 180 | 13514 |
| Tau1673 | VL | PRT | WO2018154390; SEQ ID NO: 181 | 13515 |
| Tau1674 | VL | PRT | WO2018154390; SEQ ID NO: 182 | 13516 |
| Tau1675 | VL | PRT | WO2018154390; SEQ ID NO: 183 | 13517 |
| Tau1676 | VL | PRT | WO2018154390; SEQ ID NO: 185 | 13518 |

[0848] In one embodiment, the payload region of the AAV particle comprises a nucleic acid sequence encoding a polypeptide which is an antibody, an antibody-based composition, or a fragment thereof. As a non-limiting example, the antibody may be one or more of the polypeptides listed in Table 11. As another non-limiting example, the antibody may be one or more of the heavy chain sequences listed in Table 11. As a non-limiting example, the antibody may be one or more of the light chain sequences listed in Table 11.

[0849] In one embodiment, the payload region of the AAV particle comprises a nucleic acid sequence encoding a polypeptide comprising a heavy chain and a light chain sequence listed in Table 11. The payload region may also comprise a linker between the heavy and light chain sequences. The linker may be a sequence known in the art or described in Table 2.

[0850] In one embodiment, the payload region of the AAV particle comprises a nucleic acid sequence encoding a polypeptide comprising a heavy chain and alight chain sequence listed in Table 11, where the heavy chain sequence is from a different antibody than the light chain sequence. The payload region may also comprise a linker between the heavy and light chain sequences. The linker may be a sequence known in the art or described in Table 2.

[0851] In one embodiment, the payload region comprises, in the 5 to 3 direction, an antibody light chain sequence, a linker and a heavy chain sequence.

[0852] In one embodiment, the payload region comprises a nucleic acid sequence encoding, in the 5 to 3′ direction, an antibody light chain sequence from Table 11, one or more linkers from Table 2 and a heavy chain sequence from Table 11. Non-limiting examples are included in Table 4.

[0853] In one embodiment, the payload region comprises, in the 5 to 3 direction, an antibody heavy chain sequence, a linker region (may comprise one or more linkers) and alight chain sequence.

[0854] In one embodiment, the payload region comprises a nucleic acid sequence encoding, in the 5 to 3′ direction, an antibody heavy chain sequence from Table 11, one or more linkers from Table 2, and a light chain sequence from Table 11. Non-limiting examples are included in Table 11.

[0855] In one embodiment, the payload region comprises a nucleic acid sequence encoding a single heavy chain. As a non-limiting example, the heavy chain is an amino acid sequence or fragment thereof described in Table 11.

[0856] Shown in Table 11 are a listing of antibodies and their polynucleotides and/or polypeptides sequences. These sequences may be encoded by or included in the AAV particles of the present invention. Variants or fragments of the antibody sequences described in Table 11 may be utilized in the AAV particles of the present invention.

[0857] In some embodiments, the AAV particles may comprise codon-optimized versions of the nucleic acids encoding the polypeptides listed in Table 11. In some cases, the payload region of the AAV particles of the invention may encode one or more isoforms or variants of these heavy and light chain antibody domains. Such variants may be humanized or optimized antibody domains comprising one or more complementarity determining regions (CDRs) from the heavy and light chains listed in Table 11. CDRs of the antibodies encoded by the viral genomes of the present invention may be 50%,60%,70%,80%, 90%, 95% identical to CDRs listed in or incorporated in the sequences of Table 11. Methods of determining CDRs are well known in the art and are described herein. Payload regions may encode antibody variants with one or more heavy chain variable domain (V_{H}) or light chain variable domain (V_{L}) derived from the antibody sequences in Table 11. In some cases, such variants may include bispecific antibodies. Bispecific antibodies encoded by payload regions of the invention may comprise variable domain pairs from two different antibodies.

[0858] In one embodiment, the AAV particles may comprise a heavy and alight chain of an antibody described herein and two promoters. As a non-limiting example, the AAV particles may comprise a nucleic acid sequence of a genome as described in FIG. 1 or FIG. 2 of US Patent Publication No. US20030219733, the contents of which are herein incorporated by reference in its entirety. As another non-limiting example, the AAV particles may be a dual-promoter V for antibody expression as described by Lewis et al. (J. of. Virology, September 2002, Vol. 76(17), p 8769-8775; the contents of which are herein incorporated by reference in its entirety).

[0859] Payload regions of the viral genomes of the invention may encode any anti-tau antibodies, or tau-associated antibodies, not limited to those described in Table 11, including antibodies that are known in the art and/or antibodies that are commercially available. This may include fragments of such antibodies or antibodies that have been developed to comprise one or more of such fragments [e.g., variable domains or complementarity determining regions (CDRs)]. Anti-tau antibodies that may be encoded by payloads of the invention include, but are not limited to, AT8 (pSer²⁰²/pThr²⁰²; ThermoFisher, Waltham, Mass.; described in International Publication No. WO1995017429, the contents of which are herein incorporated in their entirety), AT100 (pSer²¹²/pSer²¹⁴; ThermoFisher, Waltham, Mass.; described in U.S. Pat. No. 6,121,003, the contents of which are herein incorporated in their entirety), AT180 (pThr²³¹; ThermoFisher, Waltham, Mass.; described in International Publication No. WO1995017429, the contents of which are herein incorporated by reference in their entirety), MC-1 (Tau^{2-18/312-342} conformational antibody; as described in International Publication WO199620218, the contents of which are herein incorporated by reference in their entirety), MC-6 (pSer²³⁵; described in U.S. Pat. No. 5,811,310, the contents of which are herein incorporated in their entirety), TG-3 (pThr²³¹; described in Jicha, G A et al., 1997 J Neurochem 69(5):2087-95, the contents of which are herein incorporated by reference in their entirety), CP13 (pSer²⁰²), CP27 (human Tau¹³⁰⁻¹⁵⁰), Tau12 (human Tau⁹⁻¹⁸; Abcam, Cambridge, Mass.), TG5 (Tau²²⁰⁻²⁴²; described in U.S. Pat. No. 5,811,310), DA9 (Tau¹⁰²⁻¹⁴⁰; described in U.S. Pat. No. 5,811,310), PHF-1 (pSer³⁹⁵/pSer⁴⁰⁴; described in International Publication WO199620218), Alz50 (Tau⁷⁻⁹ and Tau³¹²⁻³⁴² conformational epitope; described in U.S. Pat. No. 5,811,310 and Carmel, G et al 1996 J Biol Chem 271(51):32780-32795 and Jicha, G A et al, 1997 J Neurosci Res 48(2):128-132, the contents of each of which are herein incorporated by reference in their entirety), Tau-1 (de-phosphorylated Ser¹⁹⁵/Ser¹⁹⁸/Ser¹⁹⁹/Ser²⁰²; ThermoFisher, Waltham, Mass.), Tau46 (Tau⁴⁰⁴⁻⁴⁴¹; Abcam, Cambridge, Mass.), pS199 (ThermoFisher, Waltham, Mass.), pT205, pS396 (ThermoFisher, Waltham, Mass.; described in U.S. Pat. No. 8,647,631, the contents of which are herein incorporated by reference in their entirety), pS404 (ThermoFisher, Waltham, Mass.; described in U.S. Pat. No. 8,647,631, the contents of which are herein incorporated by reference in their entirety), pS422 (ThermoFisher, Waltham, Mass.), A0024 (hTau²⁴³⁻⁴⁴¹; Dako, Glostrup, Denmark), HT7 (hTau¹⁵⁹⁻¹⁶³; ThermoFisher, Waltham, Mass.), Tau2 (hTau⁵²⁻⁶⁸; Abcam, Cambridge, Mass.), AD2 (pSer³⁹⁶/pSer⁴⁰⁴; Bio-Rad Laboratories, Hercules, Calif.), AT120 (hTau²¹⁶⁻²²⁴; described in U.S. Pat. No. 5,843,779, the contents of which are herein incorporated by reference in their entirety), AT270 (pThr¹⁸¹; ThermoFisher, Waltham, Mass.), 12E8 (pSer²⁶² and/or Ser³⁵⁶), K9JA (hTau²⁴³⁻⁴⁴¹; Dako, Caprinteria, Calif.), TauC3 (hTau Asp441; Santa Cruz Biotechnology, Dallas, Tex.; described in United States Patent Publication US20120244174 and Gamblin, T C et al 2003 PNAS 100(17):10032-7, the contents of each of which are herein incorporated by reference in their entirety), 4E6G7 (pSer³⁹⁶/pSer⁴⁰⁴; described in United States Patent Publication No. US2010316564 and Congdon, E. E. et al., 2016. Molecular Neurodegeneration August 30; 11(1):62, the contents of which are herein incorporated by reference in their entirety), 682 and variants thereof, described in International Patent Publication WO2016007414, the contents of which are herein incorporated by reference in their entirety, RZ3 (pThr²³¹), PG5 (pSer⁴⁰⁹), BT2 (pS^{199/202}), DA31 (Tau¹⁵⁰⁻¹⁹⁰), CP9 (pThr²³¹) Ta1505 (phospho site between Tau⁴¹⁰⁻⁴²¹, particularly pSer⁴¹³ as described in United States Patent Publication US20150183854 and Umeda, T. et al., 2015. Ann Clin Trans Neurol 2(3): 241-255, the contents of each of which are herein incorporated by reference in their entirety), PHF-6 (pThr²³¹, as described in Hoffman R et al., 1997. Biochemistry 36; 8114-8124, the contents of which are herein incorporated by reference in their entirety), PHF-13 (pSer³⁹⁶, as described in Hoffman R et al., 1997. Biochemistry 36; 8114-8124), 1685 (Tau²⁵⁻⁴⁶, as described in United States Publication US20160031976, the contents of which are herein incorporated by reference in their entirety), DC8E8 (as described in United States Patent Publication US20150050215, the contents of which are herein incorporated by reference in their entirety), PT1 or PT3 (as described in U.S. Pat. No. 9,371,376, the contents of which are herein incorporated by reference in their entirety), 4G11 (Tau⁵⁷⁻⁶⁴ as described in International Publication WO2016137950, the contents of which are herein incorporated by reference in their entirety), 1A6 (Tau⁷⁻¹⁷ and Tau²¹⁵⁻²²⁰, as described in International Publication WO2016137950), Tau15 or Tau81 (as described in International Publication WO2016055941, the contents of which are herein incorporated by reference in their entirety), TOC-1 (dimerized or aggregated tau, as described in International Publication WO2012149365, the contents of which are herein incorporated by reference in their entirety), pS404lgG2a/k (Neotope Biosciences, South San Francisco, Calif.; as described in Ittner et al., 2015. Neurochemistry 132:135-145, the contents of which are herein incorporated by reference in their entirety), TOMA (tau oligomer monoclonal antibody; as described in Nos. U.S. Pat. Nos. 8,778,343 and 9,125,846, International Publications WO2012051498 and WO2011026031, or United States Publication Nos. US20150004169 and US20150322143, and Castillo-Carranza, D L et al., 2014 J Neurosci 34(12)4260-72, the contents of each of which are herein incorporated by reference in their entirety), TTC-99 (oligomeric tau), BMS-986168 (as described in United States Patent Publication US2014294831, International Publication WO2015081085 and U.S. Pat. No. 8,980,271, the contents of which are herein incorporated by reference in their entirety), 3H3 (pan-amyloid epitope; described in Levites, Y et al 2015 J Neurosci 35(16)6265-76, the contents of which are herein incorporated by reference in their entirety), cis-pT231 (described in International Publications WO2012149334 and WO2011056561, the contents of which are herein incorporated by reference in their entirety), CP-3 (pSer²¹⁴; described in Jicha et al 1999 J Neurosci 19(17):7486-94, the contents of which are herein incorporated by reference in their entirety), TNT1 (Tau²⁻¹⁸; as described in United States Patent Publication 20160031978, the contents of which are herein incorporated by reference in their entirety), Tau-nY29 (nTyr²⁹; described in Reynolds M R, et al., 2006 J Neurosci 26(42):10636-45, the contents of which are herein incorporated by reference in their entirety), Tau-nY197 (nTyr¹⁹⁷; described in Reyes, J F et al., 2012 Acta Neuropathol 123(1):119-32, the contents of which are herein incorporated by reference in their entirety), Tau-nY394 (nTyr³⁹⁴; described in Reyes, J F et al 2012), 4E4 (Tau³³⁷⁻³⁴³ Tau³³⁷⁻³⁹⁷; described in International Publication WO2012049570 and United States Patent Publication US20150252102, the contents of each of which are herein incorporated by reference in their entirety), ADx210 (described in United States Patent Publication US20140161875, the contents of which are herein incorporated by reference in their entirety), ADx215 (described in United States Patent Publication US20140161875), ADx202 (as described in International Publication WO2015004163, the contents of which are herein incorporated by reference in their entirety), AP422 (pSer⁴²²; described in Hasegawa, M et al 1996 FEBS Lett 384:25-30, the contents of which are herein incorporated by reference in their entirety), Tau5 (Tau²¹⁰⁻²⁴¹), RTA2 (Tau²⁷³⁻²⁸³), RTAC (Tau⁴²⁶⁻⁴⁴¹), RTA1 (Tau²⁵⁷⁻²⁷⁴), T46 (Tau³⁹⁵⁻⁴³²), T49, MIGT4, O.BG.15, 525, 3-39, 4F1, MapTau (Tau⁹⁵⁻¹⁰⁸; SMI Covance), T1, HYB33801 (Tau⁵⁻¹²), Tau13 (Tau²⁻¹⁸), B11E8, 5J20 (14-3-3 tau), DC25 (Tau³⁴⁷⁻³⁵³), DC39N1 (Tau⁴⁵⁻⁷³), DC-11 (Tau³²¹⁻³⁹¹; described in U.S. Pat. No. 7,746,180, the contents of which are herein incorporated by reference in their entirety), DC39 (Tau⁴⁰¹⁻⁴¹¹), DC4R, n847 (nitrated tau), SPM452, TI4, 1E1/A6 (Tau²⁷⁵⁻²⁹¹), 5E2, 8E6/C11 (Tau²⁰⁹⁻²²⁴), 2E12 (pT231), NFT200, 248E5 (Tau³⁻²¹⁴), IG2 (Thr¹⁷⁵, Thr¹⁸¹, Thr²³¹; as described in International Publication WO2016041553, the contents of which are herein incorporated by reference in their entirety), YP3 (as described in WO2007019273, the contents of which are herein incorporated by reference in their entirety), YP4 (as described in WO2007019273) and 14-3-3 Tau (pSer 14-3-3 binding motif; Abcam, Cambridge, Mass.). Further, anti-tau antibodies may be any of those listed in the antibody section of Alzforum.org or at the Antibody Resource Page.com, the contents of each of which are herein incorporated by reference in their entirety. Further, anti-tau antibodies may be any commercially available anti-tau antibody. Additional antibodies may include any of those taught in Petry, F. R. et al., 2014. PLoS One 9(5): e94251, the contents of which are herein incorporated by reference in their entirety. In one example, such antibodies may include any of those described in Jicha, G. A. et al., 1997. Journal of Neuroscience Research 48:128-132, the contents of which are herein incorporated by reference in their entirety. One such antibody, MC-1, recognizes distinct conformations of tau that are associated with neurological disease.

[0860] In some embodiments, payloads may encode anti-tau antibodies (or fragments thereof) taught in United States Publication No. US2014294831, the contents of which are herein incorporated by reference in their entirety. Such antibodies may include IPN001 and/or IPN002 antibodies or fragments of such antibodies. In some cases, variable domains of IPN002 as presented in FIGS. 2A and 2B of US2014294831 may be used (e.g., incorporated into another antibody). In some cases, CDR regions of IPN002 as underlined in FIGS. 2A and 28 may be used (e.g., incorporated into another antibody or used to prepare humanized versions of IPN002). In some cases, anti-tau antibodies may include any of the IPN001 or IPN002 antibody variants taught in US2014294831 (e.g., in FIGS. 9-16 of that publication). In one embodiment, this antibody is also referred to as BMS. 986168.

[0861] In some cases, payloads may encode anti-tau antibodies (or fragments thereof) taught in Otvos, L et al., 1994. J Neurosci. Res 39(6):669-73, the contents of which are herein incorporated by reference in their entirety. Such antibodies may include monoclonal antibody PHF-1 or fragments thereof. The PHF-1 antibody binds to tau paired helical filaments, a pathological conformation of tau, found in certain neurological disorders, including Alzheimer's disease. Further, antibody affinity is increased when either serine 396 or serine 404 of tau is phosphorylated and even further increased when both are phosphorylated.

[0862] In some embodiments, payloads may encode anti-tau antibodies (or fragments thereof) taught in U.S. Pat. No. 5,811,310, the contents of which are herein incorporated by reference in their entirety. Such embodiments may include monoclonal antibodies PHF-1 or MC-1 or fragments thereof. MC-1 is a conformational antibody binding to the epitopes presented in Jicha, G A., et al., 1997 J Neurosci Res 48(128.132).

[0863] In some embodiments, payloads may encode anti-tau antibodies (or fragments thereof) taught in International Publication Number WO2015035190, the contents of which are herein incorporated by reference in their entirety. Such embodiments may include, but are not limited to, antibodies PHF-1 or MC-1 or fragments thereof. Viral genomes of the V particles of the present invention may comprise or encode any of SEQ ID NO: 1-6 of WO2015035190.

[0864] Anti-tau antibodies (or fragments thereof) encoded by viral genomes of the invention may include antibodies that bind to one or more of the epitopes presented in Otvos, L. et al., 1994. J Neurosci. Res 39(6):669-73 (e.g., any of those presented in Table 1 of that publication).

[0865] In some embodiments, payloads may encode anti-tau antibodies (or fragments thereof) taught in U.S. Pat. No. 7,746,180, the contents of which are herein incorporated by reference in their entirety. Such embodiments may include antibody DC-11 or fragments thereof.

[0866] In some embodiments, the antibodies encoded by the viral genomes of the present invention may target any of the antigenic regions or epitopes described in United States Patent Publication No US2008050383 or US20100316564, the contents of which are herein incorporated by reference in their entirety. In one embodiment, the antibody targets pS396/pS404. Such embodiments may include antibody 4E6 and/or variants or fragments thereof. The affinity of antibody 4E6 for soluble PHF and its ability to reduce soluble phospho tau has been described in Congdon, E E. et al., 2016. Molecular Neurodegeneration August 30; 11(1):62, the contents of which are herein incorporated by reference in their entirety.

[0867] In some embodiments, the antibodies encoded by the viral genomes of the present invention may target any of the antigenic regions or epitopes described in International Patent Publication WO1998022120, the contents of which are herein incorporated by reference in their entirety. In one embodiment, the antibody may be PHF-6 (pT231), or fragments or variants thereof. In another embodiment, the antibody may be PHF-13 (pS396), or a fragment of variant thereof. These antibodies are further described in Hoffman et al., 1997. Biochemistry 36: 8114.8124, the contents of which are herein incorporated by reference in their entirety.

[0868] In some embodiments, the antibodies encoded by the viral genomes of the present invention may target any of the antigenic regions or epitopes described in International Publication WO2016126993, the contents of which are herein incorporated by reference in their entirety. The antibodies may be derived from any of the tau epitopes described in Table A of WO2016126993. In one embodiment, the antibody of the present invention may comprise any of the sequences listed in Table B or Table 1 of WO2016126993.

[0869] In some embodiments, the antibodies encoded by the viral genomes of the present invention may target any of the antigenic regions or epitopes described in United States Patent Publication US20120244174, the contents of which are herein incorporated by reference in their entirety. In one embodiment, the antibody may bind to caspase-cleaved tau. In one embodiment, the epitope for antibodies targeting caspase cleaved tau is aspartic acid 421. In another embodiment, the epitope for antibodies targeting caspase cleaved tau may be the C-terminus after glutamic residue Glu391. In yet another embodiment, the epitope for antibodies targeting caspase cleaved tau may be at the N-terminus at aspartic acid residue 13. In another embodiment, the antibody may be TauC3.

[0870] In some embodiments, the antibodies encoded by the viral genomes of the present invention may target any of the antigenic regions or epitopes described in United States Patent Publication US20160031978, the contents of which are herein incorporated by reference in their entirety. In one embodiment, the antibody may bind to tau N-terminal residues associated with the PP1/GSK3 signaling cascade. In one embodiment, the antibody may be TNT1.

[0871] In some embodiments, the antibodies encoded by the viral genomes of the present invention may be any of those described in d'Abramo, C et al., 2015. PLOS One 10(8):e0135774, the contents of which are herein incorporated by reference in their entirety. In one embodiment, the antibody may be CP13 (pS202), or a fragment or variant thereof. In another embodiment, the antibody may be RZ3 (pT231), or a fragment or variant thereof. In another embodiment, the antibody may be PG5 (pS409), or a fragment or variant thereof.

[0872] Anti-tau antibodies or fragments thereof encoded by the viral genomes of the present invention may target tau in any antigenic form. As non-limiting examples, antigenic tau may be an unphosphorylated or unmodified tau protein, a phosphorylated or otherwise post-translationally modified tau protein (O-GlnAcylated, or nitrosylated), an oligomeric species of tau protein, a soluble species of tau protein, an insoluble species of tau protein, a conformationally abnormal species of tau protein, a neuropathological form of tau protein and/or a neurofibrillary tangle or a precursor thereof.

[0873] Anti-tau antibodies or fragments thereof encoded by the viral genomes of the invention, may target any antigenic region or epitope along the full length of any of the six human tau protein isoforms. As non-limiting examples, the targeted antigenic peptides of the tau protein may be any of the following phosphorylated sites pT50, pS396, pS396-pS404, pS404, pS396-pS404-pS422, pS409, pS413, pS422, pS198, pS199, pS199-pS202, pS202, pT205, pT212, pS214, pT212-pS214, pT181, pT231, cis-pT231, pS235, pS238, pT245, pS262, pY310, pY394, pS324, pS356, pTau¹⁷⁷⁻¹⁸⁷, pY18, pS610, pS622, nitrosylated tau (nY18, nY29), methylated tau (di-meK281, dimeK311), O-GlnAcylated tau at S400, any of the following acetylated sites acK174, acK274, acK280, acK281 and/or any combination thereof. Acetylated tau proteins and associated antigenic peptides are described in Min et al, 2010, Neuron., 67, 953-966, Min et al., 2015, Nature Medicine., 10, 1154.1162, Cohen et al., 2011, Nature Communications., 2, 252, Gorsky et al., 2016, Scientific Report., 6, 22685, Tracy et al., 2016, Neuron., 90, 245-260, the contents of each of which are herein incorporated by reference in their entirety. Phosphorylated tau proteins and associated antigenic peptides are described in Asuni et al., 2007, J Neurosci., 27, 9115-9129, Boutajangout et al., 2010, J Neurosci., 30, 16559-16566, Boutajangout et al., 2011, J Neurochem., 118, 658-667, Chai et al., 2011, J Biol Chem., 286, 34457-34467, Gu et al., 2011, J Biol Chem., 288, 33081-33095, Sankaranarayanan et al., 2015, PloS One, 10, e0125614, Ittner et al., 2015, J Neurochem., 132, 135-145, D'Abramo et al., 2016, Neurobiol Aging, 37, 58-65, Collin et al., 2014, Brain., 137, 2834-2846, Kondo et al., 2015, Nature, 523, 431-436, the contents of each of which are herein incorporated by reference in their entirety.

[0874] In one embodiment, the antibody encoded by the viral genomes of the present invention may be a pS409 targeting antibody as described in Lee et al., 2016, Cell Reports, 16, 1690-1700, or International Patent Publication WO2013151762, the contents of each of which are herein incorporated by reference in their entirety. In some embodiments, this antibody may be RG6100 or R071057 or variants or fragments thereof.

[0875] In one embodiment, the antibody encoded by the viral genomes of the present invention may be a pS413 targeting antibody as described in Umeda et al., 2015, Ann Clin Trans Neurol., 2(3), 241.255 or International Patent Publication WO201310238, the contents of each of which are herein incorporated by reference in their entirety. In one embodiment, the antibody is Ta1505 or variants or fragments thereof.

[0876] In one embodiment, the antibody encoded by the viral genomes of the present invention may target a tau epitope with amino acid residues 210-275, more specifically pS238 and/or pT245, as described in International Publication WO2011053565, the contents of which are herein incorporated by reference in their entirety.

[0877] In one embodiment, the CDRs of an antibody encoded by the viral genomes of the present invention may be any of those listed in or incorporated in the antibody sequences of Table 11. In one embodiment, the CDRs may be any of those described in International Publication WO2015122922, the contents of which are herein incorporated by reference in their entirety.

[0878] In one embodiment, a CDR may be any of those chosen from the group of SEQ ID NO: 41, 49, or 57 of WO2015122922. Further a CDR of an antibody encoded by the viral genomes of the present invention may have 50%, 60%, 70%, 80%, 90%, or 95% identity to SEQ ID NO: 41, 49, or 57 of WO2015122922.

[0879] In one embodiment, the antibodies encoded by the viral genomes of the present invention may be any of those described in International Publication WO2016097315, the contents of which are herein incorporated by reference in their entirety. In one embodiment, the antibody may have an amino acid sequence as shown by SEQ ID NO: 2, 11, 20, 29, 38, 47, 56, 65, 74, 83, 92, 101, 110, 119, 128, 137, 146, 155, 164, 173, 182, 191, 209, 218, 226, or 227 of WO2016097315.

[0880] In one embodiment, the antibodies encoded by the viral genomes of the present invention may be a multispecific blood brain barrier receptor antibody that also targets tau, as described in International Publication WO2016094566, the contents of which are herein incorporated by reference in their entirety. In one embodiment, the antibody may have a sequence as shown by SEQ ID NO: 1, 2, 17, 18, 33, 34, 49, 50, 65, 66, 81, 82, 9-16, 25-32, 41-48, 57-64, 73-80, 89-96 of WO2016094566.

[0881] In some embodiments, the antibodies (or fragments thereof) encoded by the viral genomes of the present invention may be any of those taught in Nos. U.S. Pat. Nos. 8,778,343 and 9,125,846, International Publications WO2012051498 and WO2011026031, or United States Publication Nos. US20150004169 and US20150322143, the contents of each of which are herein incorporated by reference in their entirety. Such antibodies may include those that bind to oligomeric species of tau. Further, such an antibody may be referred to as TOMA (tau oligomer monoclonal antibody), as described in Castillo-Carranza et at (Castillo-Carranza, D L et al., 2014 J Neurosci 34(12)4260-72) the contents of which are herein incorporated by reference in their entirety. In one embodiment, the antibody that binds oligomeric tau may be TTC-99.

[0882] In some embodiments, the antibodies (or fragments thereof) encoded by the viral genomes of the present invention may be any of those taught in International Publications WO2014059442, the contents of which are herein incorporated by reference in their entirety. Such antibodies may include those that bind to oligomeric species of tau.

[0883] In some embodiments, the antibodies (or fragments thereof) encoded by the viral genomes of the present invention may be any of those taught in the International Publications WO2014008404 and WO2016126993, United States Patent Publication US20150183855, Yanamandra, K et al., 2013 Neuron 80(2):402-14 and Yanamandra, K et al 2015 Ann Clin Transl Neurol 2(3):278-88, the contents of each of which are herein incorporated by reference in their entirety. Such antibodies may block tau seeding. Non-limiting examples of antibodies described in these publications include HJ8.1.1, HJ81.2, HJ8.2, HJ8.3, HJ8.4, HJ8.5, HJ8.7, HJ8.8, HJ9.1, HJ9.2, HJ9.3, HJ9.4, HJ95, and variants thereof. Non-limiting examples of targeted epitopes of tau may include amino acids 22-34, 385-391, 405-411, 3-6, 118-122, 386-401, 7-13, and/or 272-281 of human tau.

[0884] In some embodiments, the antibodies (or fragments thereof) encoded by the viral genomes of the present invention may be any of those taught in the International Publications WO2002062851, the contents of which are herein incorporated by reference in their entirety.

[0885] In some embodiments, the antibodies (or fragments thereof) encoded by the viral genomes of the present invention may be as described in Bright, J et al., 2015 Neurobiol of Aging 36:693.709; Pedersen, J T and Sigurdsson E M, 2015 Trends Mol Med 21(6):394-402; Levites, Y et al 2015 J Neurosci 35(16)6265-76; Jicha et al 1999 J Neurosci 19(17):7486-94; Reyes J F et al., 2012 Acta Neuropathol 123(1):119-32; Reynolds M R, et al, 2006 J Neurosci 26(42):10636-45; Gamblin, T C et al 2003 PNAS 100(17):10032.7; Castillo-Carranza, D L et al., 2014 J Neurosci 34(12)4260-72; Walls, K C et al., 2014 Neurosci Lett 575:96-100; Yanamandra, K et al., 2013 Neuron 80(2):402-14; Yanamandra, K et al 2015 Ann Clin Transl Neurol 2(3):278.88; Allen B, et al., 2002 J Neurosci 22(21):9340.51; Gotz, J et al., 2010 Biochem Biophys Acta 1802(10):860-71; Hasegawa, M et al 1996 FEBS Lett 384:25-30; Carmel, G et al 1996 J Biol Chem 271(51):32780-32795; Jicha, G A et al, 1997 J Neurosci Res 48(2):128-132; Jicha, G A et al., 1997 J Neurochem 69(5):2087-95; the contents of each of which are herein incorporated by reference in their entirety.

[0886] Anti-tau antibodies or fragments thereof encoded by the viral genomes of the present invention may be any commercially available anti-tau antibody known in the art or developed by a person with skill in the art. Non-limiting examples of commercially available anti-tau antibodies include EPR2396(2) (pThr⁵⁰; Abcam, Cambridge, Mass.), 5H911 (pThr¹⁸¹; ThermoFisher, Waltham, Mass.), M7004D06 (pThr¹⁸¹; BioLegend, San Diego, Calif.), 1E7 (pThr¹⁸¹; EMD Millipore, Billerica, Mass.), EPR2400 (pSer¹⁹⁸; Abcam, Cambridge, Mass.), EPR2401Y (pSer¹⁹⁹; Abcam, Cambridge, Mass.), 2H23L4 (pSer¹⁹⁹; ThermoFisher, Waltham, Mass.), EPR2402 (pSer²⁰²; Abcam, Cambridge, Mass.), 10F8 (pSer²⁰²; Abcam, Cambridge, Mass.), EPR2403(2) (pThr²⁰⁵; Abcam, Cambridge, Mass.), EPR1884(2) (pSer²¹⁴; Abcam, Cambridge, Mass.), EPR2488 (pThr²³¹; Abcam, Cambridge, Mass.), 1H6L6 (pThr²³¹; ThermoFisher, Waltham, Mass.), 3G3 (pThr²³¹, pSer²³⁵; Abcam, Cambridge, Mass.), EPR2452 (pSer²³⁵; Abcam, Cambridge, Mass.), 12G10 (pSer²³⁸; Abcam, Cambridge, Mass.), EPR2454 (pSer²⁶²; Abcam, Cambridge, Mass.), EPR2457(2) (pSer³²⁴; Abcam, Cambridge, Mass.), EPR2603 (pSer³⁵⁶; Abcam, Cambridge, Mass.), EPR2731 (pSer³⁹⁶; Abcam, Cambridge, Mass.), EPR2605 (pSer⁴⁰⁴; Abcam, Cambridge, Mass.), EPR2866 (pSer⁴²²; Abcam, Cambridge, Mass.), 1A4 (pTau¹⁷⁷⁻¹⁸⁷; Origene, Rockville, Md.), 7G9 (pTau¹⁷⁷⁻¹⁸⁷; Origene, Rockville, Md.), 9B4 (pTau¹⁷⁷⁻¹⁸⁷; Origene, Rockville, Md.), 2A4 (pTau¹⁷⁷⁻¹⁸⁷; Origene, Rockville, Md.), 9G3 (pTyr¹⁸; NovusBio, Littleton, Colo.), EPR2455(2) (pSer⁶¹⁰; Abcam, Cambridge, Mass.), EP2456Y (pSer⁶²²; Abcam, Cambridge, Mass.; EMD Millipore, Billerica, Mass.), SMI 51 (PHF Tau⁹⁵⁻¹⁰⁸; BioLegend, San Diego, Calif.), TOMA-1 (Oligomeric Tau; EMD Millipore, Billerica, Mass.), Tau-nY18 (nTyr¹³; Origene, Rockville, Md.; BioLegend, San Diego, Calif.; EMD Millipore, Billerica, Mass.), Tau-nY29 (nTyr²⁹; BioLegend, San Diego, Calif.; EMD Millipore, Billerica, Mass.; Abcam, Cambridge, Mass.), 1C9.G6 (di-methyl-Lys²⁸¹; BioLegend, San Diego, Calif.), 7G5.F4 (di-methyl-Lys³¹¹; BioLegend, San Diego, Calif.), TNT-1 (Tau²⁻¹⁸; EMD Millipore, Billerica, Mass.), TNT-2 (Tau²⁻¹⁸; EMD Millipore, Billerica, Mass.), 7B8 (Tau⁵⁻¹²; Abcam, Cambridge, Mass.), Tau-13 (Tau²⁰⁻³⁵; BioLegend, San Diego, Calif.), 1-100 (Tau¹⁻¹⁰⁰; BioLegend, San Diego, Calif.), 2G9.F10 (Tau¹⁵⁷⁻¹⁶⁸; BioLegend, San Diego, Calif.; Origene, Rockville, Md.), 39E10 (Tau¹⁸⁹⁻¹⁹⁵; BioLegend, San Diego, Calif.; Origene, Rockville, Md.), 77E9 (Tau¹⁸⁵⁻¹⁹⁵; BioLegend, San Diego, Calif.; Origene, Rockville, Md.), ATS (pSer²⁰², pSer²⁰⁵; ThermoFisher, Waltham, Mass.), AT100 (pSer²¹², pSer²¹⁴; ThermoFisher, Waltham, Mass.), PHF-6 (pThr²³¹; NovusBio, Littleton, Colo.; EMD Millipore, Billerica, Mass.; BioLegend, San Diego, Calif.; ThermoFisher, Waltham, Mass.), AT180 (pThr²³¹; ThermoFisher, Waltham, Mass.), AT270 (pThr¹⁸¹; ThermoFisher, Waltham, Mass.), PHF-13 (pSer³⁹⁶; ThermoFisher, Waltham, Mass.; BioLegend, San Diego, Calif.), TauC3 (Asp⁴²¹; BioLegend, San Diego, Calif.; EMD Millipore, Billerica, Mass.; ThermoFisher, Waltham, Mass.), Tau12 (Tau⁶⁻¹⁸; BioLegend, San Diego, Calif.; EMD Millipore, Billerica, Mass.), Tau5 (Tau²¹⁰⁻²⁴¹; BioLegend, San Diego, Calif.; EMD Millipore, Billerica, Mass.; Abcam, Cambridge Mass.; ThermoFisher, Waltham, Mass.), HT7 (Tau¹⁵⁹⁻¹⁶³; ThermoFisher, Waltham, Mass.), 77G7 (Tau³¹⁶⁻³⁵⁵; BioLegend, San Diego, Calif.), Tau46 (Tau⁴⁰⁴⁻⁴⁴¹; BioLegend, San Diego, Calif.; NovusBio, Littleton, Colo.; Abcam, Cambridge, Mass.), UMAB239 (Tau⁶²³⁻⁷⁵⁸; Origene, Rockville, Md.), OTI6G3 (Tau⁶²³⁻⁷⁵⁸; Origene, Rockville, Md.), OTI13E11 (Tau⁶²³⁻⁷⁵⁸; Origene, Rockville, Md.), OTI13B5 (Tau⁶²³⁻⁷⁵⁸; Origene, Rockville, Md.), E178 (Tau⁷⁰⁰⁻⁸⁰⁰; Abcam, Cambridge, Mass.), SP70 (N-terminal Tau; Origene, Rockville, Md.; NovusBio, Littleton, Colo.; ThermoFisher, Waltham, Mass.; Abcam, Cambridge, Mass.), C45 (N-terminal Tau; Origene, Rockville, Md.), Tau7 (C-terminal Tau; EMD Millipore, Billerica, Mass.), S.125.0 (C-terminal Tau; ThermoFisher, Waltham, Mass.), 8E6/C11 (Three-repeat Tau²⁰⁹⁻²²⁴; EMD Millipore, Billerica, Mass.), 1E1/A6 (Four-repeat Tau²⁷⁵⁻²⁹¹; EMD Millipore, Billerica, Mass.), 7D12.1 (Four-repeat Tau²⁷⁵⁻²⁹¹; EMD Millipore, Billerica, Mass.), 5C7 (Four-repeat Tau²⁶⁷⁻²⁷⁸; BioLegend, San Diego, Calif.; Origene, Rockville, Md.), 5F9 (Four-repeat Tau²⁷⁵⁻²⁹¹; BioLegend, San Diego, Calif.; Origene, Rockville, Md.), 3H6.H7 (ON Tau³⁹⁻⁵⁰; BioLegend, San Diego, Calif.; Origene, Rockville, Md.), 4H5.B9 (1N Tau⁶⁸⁻⁷⁹; BioLegend, San Diego, Calif.; Origene, Rockville, Md.), 71C11 (2N Tau; BioLegend, San Diego, Calif.), PC1C6 (unphosphorylated tau; EMD Millipore, Billerica, Mass.), Tau2 (BioLegend, San Diego, Calif.; Origene, Rockville, Md.; EMD Millipore, Billerica, Mass.), 2E9 (Origene, Rockville, Md.; NovusBio, Littleton, Colo.), 4F1 (Origene, Rockville, Md.; NovusBio, Littleton, Colo.), 5B10 (NovusBio, Littleton, Colo.); 5E2 (EMD Millipore, Billerica, Mass.), Tau-93 (Origene, Rockville, Md.), T14 (ThermoFisher, Waltham, Mass.), T46 (ThermoFisher, Waltham, Mass.), BT2 (ThermoFisher, Waltham, Mass.) and/or variants or derivates thereof.

[0887] In one embodiment, the antibodies encoded by the viral genomes of the present invention may be multispecific antibodies for transferrin receptor and a brain antigen, wherein the brain antigen may be tau, as described in International Publication WO2016081643, the contents of which are herein incorporated by reference in their entirety. In one embodiment, the antibody may have a sequence as given by SEQ ID NO: 160 or 161 of WO2016081643.

[0888] In one embodiment, the antibodies encoded by the viral genomes of the present invention are any of those described in U.S. Pat. Nos. 8,871,447, 8,420,613, International Publication No. WO2014193935, WO2010011999, or in United States Publication Nos. US20110250217, US20110020237, US20100316590, or US20120225864, the contents of each of which are herein incorporated by reference in their entirety. In one embodiment, the antibody recognizes an amyloidogenic or aggregating protein.

### Antibodies for the Treatment of Migraine or Pain

[0889] In some embodiments, the payload region of the AAV particle comprises one or more nucleic acid sequences encoding migraine-associated antibodies, variants or fragments thereof.

[0890] In some embodiments, the payload region of the AAV particle comprises one or more nucleic acid sequences encoding one or more of the payload antibody polypeptides listed in Table 12, or variants or fragments thereof. As used herein, “antibody polynucleotide” refers to a nucleic acid sequence encoding an antibody polypeptide.

[0891] In some embodiments, the payload region of the AAV particle comprises one or more nucleic acid sequences listed in Table 12, or variants or fragments thereof.

[0892] In some embodiments, the payload region of the AAV particle comprises a nucleic acid sequence encoding a payload antibody with at least 50% identity to one or more payload antibody polypeptides listed in Table 12. The encoded antibody polypeptide may have 50%, 51%, 52%, 53%, 54%, 55%, 56%, 57%, 58%, 59%, 60%, 61%, 62%, 63%, 64%, 65%, 66%, 67%, 68%, 69%, 70%, 71%, 72%, 73%, 74%, 75%, 76%, 77%, 78%, 79%, 80%, 81%, 82%, 83%, 84%, 85%, 86%, 87%, 88%, 89%, 90%, 91%, 92%, 93%,94%,95%, 96%,97%,98%, 99%, or 100% identity to one or more of the payload antibody polypeptides listed in Table 12, or variants or fragments thereof.

[0893] In some embodiments, the full sequence of the encoded antibody polypeptide may have 50%, 51%, 52%, 53%, 54%, 55%, 56%, 57%, 58%, 59%, 60%, 61%, 62%, 63%, 64%, 65%, 66%, 67%, 68%, 69%, 70%, 71%, 72%, 73%, 74%, 75%, 76%, 77%, 78%, 79%, 80%, 81%, 82%, 83%, 84%, 85%, 86%, 87%, 88%, 89%, 90%, 91%, 92%, 93%, 94%, 95%, 96%, 97%, 98%, 99%, or 100% identity to one or more of the payload antibody polypeptides listed in Table 12, or variants or fragments thereof.

[0894] In some embodiments, the variable region sequence(s) of the encoded antibody polypeptide may have 50%, 51%, 52%, 53%, 54%, 55%, 56%, 57%, 58%, 59%, 60%, 61%, 62%, 63%, 64%, 65%, 66%, 67%, 68%, 69%, 70%, 71%, 72%, 73%, 74%, 75%, 76%, 77%, 78%, 79%, 80%, 81%, 82%, 83%, 84%, 85%, 86%, 87%, 88%, 89%, 90%, 91%, 92%, 93%, 94%, 95%, 96%, 97%, 98%, 99%, or 100% identity to one or more of the payload antibody polypeptides listed in Table 12, or variants or fragments thereof.

[0895] In some embodiments, the heavy chain of the encoded antibody polypeptide may have 50%,51%,52%, 53%,54%, 55%, 56%, 57%, 58%, 59%, 60%, 61%, 62%, 63%, 64%, 65%, 66%, 67%, 68%, 69%, 70%, 71%, 72%, 73%, 74%, 75%, 76%, 77%, 78%, 79%, 80%, 81%, 82%, 83%, 84%, 85%, 86%, 87%, 88%, 89%, 90%, 91%, 92%, 93%, 94%, 95%, 96%, 97%, 98%, 99%, or 100% identity to one or more of the payload heavy chain antibody polypeptides listed in Table 12, or variants or fragments thereof.

[0896] In some embodiments, the light chain of the encoded antibody polypeptide may have 50%, 51%, 52%,53%, 54%, 55%, 56%, 57%, 58%, 59%, 60%, 61%, 62%, 63%, 64%, 65%, 66%, 67%, 68%, 69%, 70%, 71%, 72%, 73%, 74%, 75%, 76%, 77%, 78%, 79%, 80%, 81%, 82%, 83%, 84%, 85%, 86% 87% 88%, 89%, 90%, 91%, 92%, 93%, 94%, 95%, 96%, 97%, 98%, 99%, or 100% identity to one or more of the payload light chain antibody polypeptides listed in Table 12, or variants or fragments thereof.

[0897] In some embodiments, the CDR region of the encoded antibody polypeptide may have 50%,51%,52%, 53%,54%, 55%, 56%, 57%, 58%, 59%, 60%, 61%, 62%, 63%, 64%, 65%, 66%, 67%, 68%, 69%, 70%, 71%, 72%, 73%, 74%, 75%, 76%, 77%, 78%, 79%, 80%, 81%, 82%, 83%, 84%, 85%, 86%, 87%, 88%, 89%, 90%, 91%, 92%, 93%, 94%, 95%, 96%, 97%, 98%, 99%, or 100% identity to the CDRs of one or more of the payload antibody polypeptides listed in Table 12, or variants or fragments thereof.

[0898] In some embodiments, the payload antibody has 90% identity to one or more of the antibody polypeptides listed in Table 12, or variants or fragments thereof.

[0899] In some embodiments, the payload antibody has 91% identity to one or more of the antibody polypeptides listed in Table 12, or variants or fragments thereof.

[0900] In some embodiments, the payload antibody has 92% identity to one or more of the antibody polypeptides listed in Table 12, or variants or fragments thereof.

[0901] In some embodiments, the payload antibody has 93% identity to one or more of the antibody polypeptides listed in Table 12, or variants or fragments thereof.

[0902] In some embodiments, the payload antibody has 94% identity to one or more of the antibody polypeptides listed in Table 12, or variants or fragments thereof.

[0903] In some embodiments, the payload antibody has 95% identity to one or more of the antibody polypeptides listed in Table 12, or variants or fragments thereof.

[0904] In some embodiments, the payload antibody has 96% identity to one or more of the antibody polypeptides listed in Table 12, or variants or fragments thereof.

[0905] In some embodiments, the payload antibody has 97% identity to one or more of the antibody polypeptides listed in Table 12, or variants or fragments thereof.

[0906] In some embodiments, the payload antibody has 98% identity to one or more of the antibody polypeptides listed in Table 12, or variants or fragments thereof.

[0907] In some embodiments, the payload antibody has 99% identity to one or more of the antibody polypeptides listed in Table 12, or variants or fragments thereof.

[0908] In some embodiments, the payload antibody has 100% identity to one or more of the antibody polypeptides listed in Table 12, or variants or fragments thereof.

[0909] In some embodiments, the payload region of the AAV particle comprises a nucleic acid sequence with at least 50% identity to one or more nucleic acid sequences listed in Table 12, or variants or fragments thereof. The payload nucleic acid sequence may have 50%, 51%, 52%, 53%, 54%, 55%, 56%, 57%, 58%, 59%, 60%, 61%, 62%, 63%, 64%, 65%, 66%, 67%, 68%, 69%, 70%, 71%, 72%, 73%, 74%, 75%, 76%, 77%, 78%, 79%, 80%, 81%, 82%, 83%, 84%, 85%, 86%, 87%, 88%, 89%, 90%, 91%, 92%, 93%, 94%, 95%, 96%, 97%, 98%, 99%, or 100% identity to one or more nucleic acid sequences listed in Table 12, or variants or fragments thereof.

[0910] In some embodiments, the payload nucleic acid sequence has 90% identity to one or more of the nucleic acid sequences listed in Table 12, or variants or fragments thereof.

[0911] In some embodiments, the payload nucleic acid sequence has 91% identity to one or more of the nucleic acid sequences listed in Table 12, or variants or fragments thereof.

[0912] In some embodiments, the payload nucleic acid sequence has 92% identity to one or more of the nucleic acid sequences listed in Table 12, or variants or fragments thereof.

[0913] In some embodiments, the payload nucleic acid sequence has 93% identity to one or more of the nucleic acid sequences listed in Table 12, or variants or fragments thereof.

[0914] In some embodiments, the payload nucleic acid sequence has 94% identity to one or more of the nucleic acid sequences listed in Table 12, or variants or fragments thereof.

[0915] In some embodiments, the payload nucleic acid sequence has 95% identity to one or more of the nucleic acid sequences listed in Table 12, or variants or fragments thereof.

[0916] In some embodiments, the payload nucleic acid sequence has 96% identity to one or more of the nucleic acid sequences listed in Table 12, or variants or fragments thereof.

[0917] In some embodiments, the payload nucleic acid sequence has 97% identity to one or more of the nucleic acid sequences listed in Table 12, or variants or fragments thereof.

[0918] In some embodiments, the payload nucleic acid sequence has 98% identity to one or more of the nucleic acid sequences listed in Table 12, or variants or fragments thereof.

[0919] In some embodiments, the payload nucleic acid sequence has 99% identity to one or more of the nucleic acid sequences listed in Table 12, or variants or fragments thereof.

[0920] In some embodiments, the payload nucleic acid sequence has 100% identity to one or more of the nucleic acid sequences listed in Table 12, or variants or fragments thereof.

[0921] In some embodiments, the payload antibody may be variants of any of the antibody polypeptides listed in Table 12, that exclude one or more amino acids designated as “X”, or “x” in the described polypeptide sequence, wherein X may represent any amino acid. In some embodiments, the payload nucleic acid sequence may be variants of any of the nucleic acid sequences listed in Table 12, that exclude one or more nucleic acids designated as “n” or “N” in the described nucleic acid sequence, wherein n may represent any nucleic acid.

TABLE 12
Migraine antibodies

| | | Type | | SEQ |
|---|---|---|---|---|
| Ab ID | Component | (PRT/DNA) | Reference | ID NO. |
| MGR1 | CDR | DNA | U.S. Pat. No. 9,745,373; SEQ ID NO: 208 | 8175 |
| MGR2 | CDR | DNA | U.S. Pat. No. 9,745,373; SEQ ID NO: 258 | 8176 |
| MGR3 | CDR | DNA | U.S. Pat. No. 9,745,373; SEQ ID NO: 248 | 8177 |
| MGR4 | CDR | DNA | U.S. Pat. No. 9,745,373; SEQ ID NO: 268 | 8178 |
| MGR5 | CDR | DNA | U.S. Pat. No. 9,745,373; SEQ ID NO: 148 | 8179 |
| MGR6 | CDR | DNA | U.S. Pat. No. 9,745,373; SEQ ID NO: 228 | 8180 |
| MGR7 | CDR | DNA | U.S. Pat. No. 9,745,373; SEQ ID NO: 251 | 8181 |
| MGR8 | CDR | DNA | U.S. Pat. No. 9,745,373; SEQ ID NO: 252 | 8182 |
| MGR9 | CDR | DNA | U.S. Pat. No. 9,745,373; SEQ ID NO: 235 | 8183 |
| MGR10 | CDR | DNA | U.S. Pat. No. 9,745,373; SEQ ID NO: 225 | 8184 |
| MGR11 | CDR | DNA | U.S. Pat. No. 9,745,373; SEQ ID NO: 215 | 8185 |
| MGR12 | CDR | DNA | U.S. Pat. No. 9,745,373; SEQ ID NO: 205 | 8186 |
| MGR13 | CDR | DNA | U.S. Pat. No. 9,745,373; SEQ ID NO: 175 | 8187 |
| MGR14 | CDR | DNA | U.S. Pat. No. 9,745,373; SEQ ID NO: 145 | 8188 |
| MGR15 | CDR | DNA | U.S. Pat. No. 9,745,373; SEQ ID NO: 265 | 8189 |
| MGR16 | CDR | DNA | U.S. Pat. No. 9,745,373; SEQ ID NO: 143 | 8190 |
| MGR17 | CDR | DNA | U.S. Pat. No. 9,745,373; SEQ ID NO: 255 | 8191 |
| MGR18 | CDR | DNA | U.S. Pat. No. 9,745,373; SEQ ID NO: 245 | 8192 |
| MGR19 | CDR | DNA | U.S. Pat. No. 9,745,373; SEQ ID NO: 207 | 8193 |
| MGR20 | CDR | DNA | U.S. Pat. No. 9,745,373; SEQ ID NO: 247 | 8194 |
| MGR21 | CDR | DNA | U.S. Pat. No. 9,745,373; SEQ ID NO: 147 | 8195 |
| MGR22 | CDR | DNA | U.S. Pat. No. 9,745,373; SEQ ID NO: 227 | 8196 |
| MGR23 | CDR | DNA | U.S. Pat. No. 9,745,373; SEQ ID NO: 177 | 8197 |
| MGR24 | CDR | DNA | U.S. Pat. No. 9,745,373; SEQ ID NO: 257 | 8198 |
| MGR25 | CDR | DNA | U.S. Pat. No. 9,745,373; SEQ ID NO: 217 | 8199 |
| MGR26 | CDR | DNA | U.S. Pat. No. 9,745,373; SEQ ID NO: 237 | 8200 |
| MGR27 | CDR | DNA | U.S. Pat. No. 9,745,373; SEQ ID NO: 213 | 8201 |
| MGR28 | CDR | DNA | U.S. Pat. No. 9,745,373; SEQ ID NO: 214 | 8202 |
| MGR29 | CDR | DNA | U.S. Pat. No. 9,745,373; SEQ ID NO: 233 | 8203 |
| MGR30 | CDR | DNA | U.S. Pat. No. 9,745,373; SEQ ID NO: 270 | 8204 |
| MGR31 | CDR | DNA | U.S. Pat. No. 9,745,373; SEQ ID NO: 266 | 8205 |
| MGR32 | CDR | DNA | U.S. Pat. No. 9,745,373; SEQ ID NO: 186 | 8206 |
| MGR33 | CDR | DNA | U.S. Pat. No. 9,745,373; SEQ ID NO: 176 | 8207 |
| MGR34 | CDR | DNA | U.S. Pat. No. 9,745,373; SEQ ID NO: 267 | 8208 |
| MGR35 | CDR | DNA | U.S. Pat. No. 9,745,373; SEQ ID NO: 178 | 8209 |
| MGR36 | CDR | DNA | U.S. Pat. No. 9,745,373; SEQ ID NO: 150 | 8210 |
| MGR37 | CDR | DNA | U.S. Pat. No. 9,745,373; SEQ ID NO: 229 | 8211 |
| MGR38 | CDR | DNA | U.S. Pat. No. 9,745,373; SEQ ID NO: 159 | 8212 |
| MGR39 | CDR | DNA | U.S. Pat. No. 9,745,373; SEQ ID NO: 149 | 8213 |
| MGR40 | CDR | DNA | U.S. Pat. No. 9,745,373; SEQ ID NO: 179 | 8214 |
| MGR41 | CDR | DNA | U.S. Pat. No. 9,745,373; SEQ ID NO: 249 | 8215 |
| MGR42 | CDR | DNA | U.S. Pat. No. 9,745,373; SEQ ID NO: 219 | 8216 |
| MGR43 | CDR | DNA | U.S. Pat. No. 9,745,373; SEQ ID NO: 209 | 8217 |
| MGR44 | CDR | DNA | U.S. Pat. No. 9,745,373; SEQ ID NO: 146 | 8218 |
| MGR45 | CDR | DNA | U.S. Pat. No. 9,745,373; SEQ ID NO: 226 | 8219 |
| MGR46 | CDR | DNA | U.S. Pat. No. 9,745,373; SEQ ID NO: 269 | 8220 |
| MGR47 | CDR | PRT | WO2007076336; SEQ ID NO: 6 | 8221 |
| MGR48 | CDR | PRT | WO2007076336; SEQ ID NO: 8 | 8222 |
| MGR49 | CDR | PRT | WO2007076336; SEQ ID NO: 11 | 8223 |
| MGR50 | CDR | PRT | WO2007076336; SEQ ID NO: 21 | 8224 |
| MGR51 | CDR | PRT | WO2007076336; SEQ ID NO: 16 | 8225 |
| MGR52 | CDR | PRT | US20150322142; SEQ ID NO: 4 | 8226 |
| MGR53 | CDR | PRT | US20150322142; SEQ ID NO: 55 | 8227 |
| MGR54 | CDR | PRT | US20150322142; SEQ ID NO: 7 | 8228 |
| MGR55 | CDR | PRT | US20150322142; SEQ ID NO: 3 | 8229 |
| MGR56 | CDR | PRT | WO2007076336; SEQ ID NO: 24 | 8230 |
| MGR57 | CDR | PRT | WO2007076336; SEQ ID NO: 22 | 8231 |
| MGR58 | CDR | PRT | WO2007076336; SEQ ID NO: 17 | 8232 |
| MGR59 | CDR | PRT | WO2007076336; SEQ ID NO: 14 | 8233 |
| MGR60 | CDR | PRT | US20150322142; SEQ ID NO: 6 | 8234 |
| MGR61 | CDR | PRT | US20150322142; SEQ ID NO: 53 | 8235 |
| MGR62 | CDR | PRT | WO2007076336; SEQ ID NO: 5 | 8236 |
| MGR63 | CDR | PRT | WO2007076336; SEQ ID NO: 20 | 8237 |
| MGR64 | CDR | PRT | WO2007076336; SEQ ID NO: 19 | 8238 |
| MGR65 | CDR | PRT | WO2007076336; SEQ ID NO: 15 | 8239 |
| MGR66 | CDR | PRT | WO2007076336; SEQ ID NO: 13 | 8240 |
| MGR67 | CDR | PRT | WO2007076336; SEQ ID NO: 10 | 8241 |
| MGR68 | CDR | PRT | WO2007076336; SEQ ID NO: 12 | 8242 |
| MGR69 | CDR | PRT | US20150322142; SEQ ID NO: 8 | 8243 |
| MGR70 | CDR | PRT | US20150322142; SEQ ID NO: 54 | 8244 |
| MGR71 | CDR | PRT | US20150322142; SEQ ID NO: 5 | 8245 |
| MGR72 | CDR | PRT | WO2007076336; SEQ ID NO: 23 | 8246 |
| MGR73 | CDR | PRT | WO2007076336; SEQ ID NO: 7 | 8247 |
| MGR74 | CDR | PRT | US20120294802; SEQ ID NO: 56 | 8248 |
| MGR75 | CDR | PRT | US20120294802; SEQ ID NO: 58 | 8249 |
| MGR76 | CDR | PRT | US20120294802; SEQ ID NO: 59 | 8250 |
| MGR77 | CDR | PRT | US20120294802; SEQ ID NO: 57 | 8251 |
| MGR78 | CDR | PRT | US20120294802; SEQ ID NO: 55 | 8252 |
| MGR79 | CDR | PRT | U.S. Pat. No. 9,102,731; SEQ ID NO: 64 | 8253 |
| MGR80 | CDR | PRT | U.S. Pat. No. 9,102,731; SEQ ID NO: 49 | 8254 |
| MGR81 | CDR | PRT | U.S. Pat. No. 9,102,731; SEQ ID NO: 47 | 8255 |
| MGR82 | CDR | PRT | U.S. Pat. No. 9,102,731; SEQ ID NO: 102 | 8256 |
| MGR83 | CDR | PRT | U.S. Pat. No. 9,102,731; SEQ ID NO: 80 | 8257 |
| MGR84 | CDR | PRT | U.S. Pat. No. 9,102,731; SEQ ID NO: 43 | 8258 |
| MGR85 | CDR | PRT | U.S. Pat. No. 9,102,731; SEQ ID NO: 84 | 8259 |
| MGR86 | CDR | PRT | U.S. Pat. No. 9,102,731; SEQ ID NO: 81 | 8260 |
| MGR87 | CDR | PRT | U.S. Pat. No. 9,102,731; SEQ ID NO: 96 | 8261 |
| MGR88 | CDR | PRT | U.S. Pat. No. 9,102,731; SEQ ID NO: 75 | 8262 |
| MGR89 | CDR | PRT | U.S. Pat. No. 9,102,731; SEQ ID NO: 78 | 8263 |
| MGR90 | CDR | PRT | U.S. Pat. No. 9,102,731; SEQ ID NO: 88 | 8264 |
| MGR91 | CDR | PRT | U.S. Pat. No. 9,102,731; SEQ ID NO: 92 | 8265 |
| MGR92 | CDR | PRT | U.S. Pat. No. 9,102,731; SEQ ID NO: 99 | 8266 |
| MGR93 | CDR | PRT | U.S. Pat. No. 9,102,731; SEQ ID NO: 87 | 8267 |
| MGR94 | CDR | PRT | U.S. Pat. No. 9,102,731; SEQ ID NO: 55 | 8268 |
| MGR95 | CDR | PRT | U.S. Pat. No. 9,102,731; SEQ ID NO: 89 | 8269 |
| MGR96 | CDR | PRT | U.S. Pat. No. 9,102,731; SEQ ID NO: 67 | 8270 |
| MGR97 | CDR | PRT | U.S. Pat. No. 9,102,731; SEQ ID NO: 70 | 8271 |
| MGR98 | CDR | PRT | U.S. Pat. No. 9,102,731; SEQ ID NO: 94 | 8272 |
| MGR99 | CDR | PRT | U.S. Pat. No. 9,102,731; SEQ ID NO: 52 | 8273 |
| MGR100 | CDR | PRT | U.S. Pat. No. 9,102,731; SEQ ID NO: 90 | 8274 |
| MGR101 | CDR | PRT | U.S. Pat. No. 9,102,731; SEQ ID NO: 44 | 8275 |
| MGR102 | CDR | PRT | U.S. Pat. No. 9,102,731; SEQ ID NO: 82 | 8276 |
| MGR103 | CDR | PRT | U.S. Pat. No. 9,102,731; SEQ ID NO: 54 | 8277 |
| MGR104 | CDR | PRT | U.S. Pat. No. 9,102,731; SEQ ID NO: 60 | 8278 |
| MGR105 | CDR | PRT | U.S. Pat. No. 9,102,731; SEQ ID NO: 65 | 8279 |
| MGR106 | CDR | PRT | U.S. Pat. No. 9,102,731; SEQ ID NO: 110 | 8280 |
| MGR107 | CDR | PRT | U.S. Pat. No. 9,102,731; SEQ ID NO: 58 | 8281 |
| MGR108 | CDR | PRT | U.S. Pat. No. 9,102,731; SEQ ID NO: 50 | 8282 |
| MGR109 | CDR | PRT | U.S. Pat. No. 9,102,731; SEQ ID NO: 68 | 8283 |
| MGR110 | CDR | PRT | U.S. Pat. No. 9,102,731; SEQ ID NO: 105 | 8284 |
| MGR111 | CDR | PRT | U.S. Pat. No. 9,102,731; SEQ ID NO: 59 | 8285 |
| MGR112 | CDR | PRT | U.S. Pat. No. 9,102,731; SEQ ID NO: 56 | 8286 |
| MGR113 | CDR | PRT | U.S. Pat. No. 9,102,731; SEQ ID NO: 113 | 8287 |
| MGR114 | CDR | PRT | U.S. Pat. No. 9,102,731; SEQ ID NO: 76 | 8288 |
| MGR115 | CDR | PRT | U.S. Pat. No. 9,102,731; SEQ ID NO: 53 | 8289 |
| MGR116 | CDR | PRT | U.S. Pat. No. 9,102,731; SEQ ID NO: 51 | 8290 |
| MGR117 | CDR | PRT | U.S. Pat. No. 9,102,731; SEQ ID NO: 71 | 8291 |
| MGR118 | CDR | PRT | U.S. Pat. No. 9,102,731; SEQ ID NO: 72 | 8292 |
| MGR119 | CDR | PRT | U.S. Pat. No. 9,102,731; SEQ ID NO: 106 | 8293 |
| MGR120 | CDR | PRT | U.S. Pat. No. 9,102,731; SEQ ID NO: 66 | 8294 |
| MGR121 | CDR | PRT | U.S. Pat. No. 9,102,731; SEQ ID NO: 48 | 8295 |
| MGR122 | CDR | PRT | U.S. Pat. No. 9,102,731; SEQ ID NO: 103 | 8296 |
| MGR123 | CDR | PRT | U.S. Pat. No. 9,102,731; SEQ ID NO: 69 | 8297 |
| MGR124 | CDR | PRT | U.S. Pat. No. 9,102,731; SEQ ID NO: 107 | 8298 |
| MGR125 | CDR | PRT | U.S. Pat. No. 9,102,731; SEQ ID NO: 95 | 8299 |
| MGR126 | CDR | PRT | U.S. Pat. No. 9,102,731; SEQ ID NO: 91 | 8300 |
| MGR127 | CDR | PRT | U.S. Pat. No. 9,102,731; SEQ ID NO: 77 | 8301 |
| MGR128 | CDR | PRT | U.S. Pat. No. 9,102,731; SEQ ID NO: 124 | 8302 |
| MGR129 | CDR | PRT | U.S. Pat. No. 9,102,731; SEQ ID NO: 61 | 8303 |
| MGR130 | CDR | PRT | U.S. Pat. No. 9,102,731; SEQ ID NO: 46 | 8304 |
| MGR131 | CDR | PRT | U.S. Pat. No. 9,102,731; SEQ ID NO: 57 | 8305 |
| MGR132 | CDR | PRT | U.S. Pat. No. 9,102,731; SEQ ID NO: 114 | 8306 |
| MGR133 | CDR | PRT | U.S. Pat. No. 9,102,731; SEQ ID NO: 73 | 8307 |
| MGR134 | CDR | PRT | U.S. Pat. No. 9,102,731; SEQ ID NO: 42 | 8308 |
| MGR135 | CDR | PRT | U.S. Pat. No. 9,102,731; SEQ ID NO: 62 | 8309 |
| MGR136 | CDR | PRT | U.S. Pat. No. 9,102,731; SEQ ID NO: 45 | 8310 |
| MGR137 | CDR | PRT | U.S. Pat. No. 9,102,731; SEQ ID NO: 115 | 8311 |
| MGR138 | CDR | PRT | U.S. Pat. No. 9,102,731; SEQ ID NO: 98 | 8312 |
| MGR139 | CDR | PRT | U.S. Pat. No. 9,102,731; SEQ ID NO: 128 | 8313 |
| MGR140 | CDR | PRT | U.S. Pat. No. 9,102,731; SEQ ID NO: 79 | 8314 |
| MGR141 | CDR | PRT | U.S. Pat. No. 9,102,731; SEQ ID NO: 100 | 8315 |
| MGR142 | CDR | PRT | U.S. Pat. No. 9,102,731; SEQ ID NO: 63 | 8316 |
| MGR143 | CDR | PRT | U.S. Pat. No. 9,102,731; SEQ ID NO: 97 | 8317 |
| MGR144 | CDR | PRT | U.S. Pat. No. 9,102,731; SEQ ID NO: 74 | 8318 |
| MGR145 | CDR | PRT | U.S. Pat. No. 9,102,731; SEQ ID NO: 129 | 8319 |
| MGR146 | CDR | PRT | U.S. Pat. No. 9,102,731; SEQ ID NO: 86 | 8320 |
| MGR147 | CDR | PRT | U.S. Pat. No. 9,102,731; SEQ ID NO: 101 | 8321 |
| MGR148 | CDR | PRT | U.S. Pat. No. 9,102,731; SEQ ID NO: 83 | 8322 |
| MGR149 | CDR | PRT | U.S. Pat. No. 9,102,731; SEQ ID NO: 93 | 8323 |
| MGR150 | CDR | PRT | U.S. Pat. No. 9,102,731; SEQ ID NO: 122 | 8324 |
| MGR151 | CDR | PRT | U.S. Pat. No. 9,102,731; SEQ ID NO: 104 | 8325 |
| MGR152 | CDR | PRT | U.S. Pat. No. 9,102,731; SEQ ID NO: 108 | 8326 |
| MGR153 | CDR | PRT | U.S. Pat. No. 9,102,731; SEQ ID NO: 118 | 8327 |
| MGR154 | CDR | PRT | U.S. Pat. No. 9,102,731; SEQ ID NO: 126 | 8328 |
| MGR155 | CDR | PRT | U.S. Pat. No. 9,102,731; SEQ ID NO: 132 | 8329 |
| MGR156 | CDR | PRT | U.S. Pat. No. 9,102,731; SEQ ID NO: 135 | 8330 |
| MGR157 | CDR | PRT | U.S. Pat. No. 9,102,731; SEQ ID NO: 109 | 8331 |
| MGR158 | CDR | PRT | U.S. Pat. No. 9,102,731; SEQ ID NO: 130 | 8332 |
| MGR159 | CDR | PRT | U.S. Pat. No. 9,102,731; SEQ ID NO: 111 | 8333 |
| MGR160 | CDR | PRT | U.S. Pat. No. 9,102,731; SEQ ID NO: 116 | 8334 |
| MGR161 | CDR | PRT | U.S. Pat. No. 9,102,731; SEQ ID NO: 112 | 8335 |
| MGR162 | CDR | PRT | U.S. Pat. No. 9,102,731; SEQ ID NO: 117 | 8336 |
| MGR163 | CDR | PRT | U.S. Pat. No. 9,102,731; SEQ ID NO: 120 | 8337 |
| MGR164 | CDR | PRT | U.S. Pat. No. 9,102,731; SEQ ID NO: 131 | 8338 |
| MGR165 | CDR | PRT | U.S. Pat. No. 9,102,731; SEQ ID NO: 123 | 8339 |
| MGR166 | CDR | PRT | U.S. Pat. No. 9,102,731; SEQ ID NO: 134 | 8340 |
| MGR167 | CDR | PRT | U.S. Pat. No. 9,102,731; SEQ ID NO: 127 | 8341 |
| MGR168 | CDR | PRT | U.S. Pat. No. 9,102,731; SEQ ID NO: 133 | 8342 |
| MGR169 | CDR | PRT | U.S. Pat. No. 9,102,731; SEQ ID NO: 136 | 8343 |
| MGR170 | CDR | PRT | U.S. Pat. No. 9,102,731; SEQ ID NO: 125 | 8344 |
| MGR171 | CDR | PRT | U.S. Pat. No. 9,102,731; SEQ ID NO: 121 | 8345 |
| MGR172 | CDR | PRT | U.S. Pat. No. 9,896,502; SEQ ID NO: 4 | 8346 |
| MGR173 | CDR | PRT | U.S. Pat. No. 9,896,502; SEQ ID NO: 7 | 8347 |
| MGR174 | CDR | PRT | U.S. Pat. No. 9,896,502; SEQ ID NO: 3 | 8348 |
| MGR175 | CDR | PRT | U.S. Pat. No. 9,896,502; SEQ ID NO: 6 | 8349 |
| MGR176 | CDR | PRT | U.S. Pat. No. 9,896,502; SEQ ID NO: 8 | 8350 |
| MGR177 | CDR | PRT | U.S. Pat. No. 9,896,502; SEQ ID NO: 5 | 8351 |
| MGR178 | CDR | PRT | U.S. Pat. No. 9,745,373; SEQ ID NO: 129 | 8352 |
| MGR179 | CDR | PRT | U.S. Pat. No. 9,745,373; SEQ ID NO: 126 | 8353 |
| MGR180 | CDR | PRT | U.S. Pat. No. 9,745,373; SEQ ID NO: 130 | 8354 |
| MGR181 | CDR | PRT | U.S. Pat. No. 9,745,373; SEQ ID NO: 127 | 8355 |
| MGR182 | CDR | PRT | U.S. Pat. No. 9,745,373; SEQ ID NO: 107 | 8356 |
| MGR183 | CDR | PRT | U.S. Pat. No. 9,745,373; SEQ ID NO: 137 | 8357 |
| MGR184 | CDR | PRT | U.S. Pat. No. 9,745,373; SEQ ID NO: 17 | 8358 |
| MGR185 | CDR | PRT | U.S. Pat. No. 9,745,373; SEQ ID NO: 67 | 8359 |
| MGR186 | CDR | PRT | U.S. Pat. No. 9,745,373; SEQ ID NO: 68 | 8360 |
| MGR187 | CDR | PRT | U.S. Pat. No. 9,745,373; SEQ ID NO: 108 | 8361 |
| MGR188 | CDR | PRT | U.S. Pat. No. 9,745,373; SEQ ID NO: 125 | 8362 |
| MGR189 | CDR | PRT | U.S. Pat. No. 9,745,373; SEQ ID NO: 135 | 8363 |
| MGR190 | CDR | PRT | U.S. Pat. No. 9,745,373; SEQ ID NO: 15 | 8364 |
| MGR191 | CDR | PRT | U.S. Pat. No. 9,745,373; SEQ ID NO: 65 | 8365 |
| MGR192 | CDR | PRT | U.S. Pat. No. 9,745,373; SEQ ID NO: 105 | 8366 |
| MGR193 | CDR | PRT | U.S. Pat. No. 9,745,373; SEQ ID NO: 128 | 8367 |
| MGR194 | CDR | PRT | U.S. Pat. No. 9,745,373; SEQ ID NO: 106 | 8368 |
| MGR195 | CDR | PRT | U.S. Pat. No. 9,745,373; SEQ ID NO: 138 | 8369 |
| MGR196 | CDR | PRT | U.S. Pat. No. 9,745,373; SEQ ID NO: 19 | 8370 |
| MGR197 | CDR | PRT | U.S. Pat. No. 9,745,373; SEQ ID NO: 39 | 8371 |
| MGR198 | CDR | PRT | U.S. Pat. No. 9,745,373; SEQ ID NO: 139 | 8372 |
| MGR199 | CDR | PRT | U.S. Pat. No. 9,745,373; SEQ ID NO: 109 | 8373 |
| MGR200 | CDR | PRT | U.S. Pat. No. 9,745,373; SEQ ID NO: 69 | 8374 |
| MGR201 | HC | DNA | US20150322142; SEQ ID NO: 13 | 8375 |
| MGR202 | HC | DNA | U.S. Pat. No. 9,102,731; SEQ ID NO: 252 | 8376 |
| MGR203 | HC | DNA | U.S. Pat. No. 9,102,731; SEQ ID NO: 242 | 8377 |
| MGR204 | HC | DNA | U.S. Pat. No. 9,102,731; SEQ ID NO: 256 | 8378 |
| MGR205 | HC | DNA | U.S. Pat. No. 9,102,731; SEQ ID NO: 246 | 8379 |
| MGR206 | HC | DNA | U.S. Pat. No. 9,102,731; SEQ ID NO: 258 | 8380 |
| MGR207 | HC | DNA | U.S. Pat. No. 9,102,731; SEQ ID NO: 245 | 8381 |
| MGR208 | HC | DNA | U.S. Pat. No. 9,102,731; SEQ ID NO: 253 | 8382 |
| MGR209 | HC | DNA | U.S. Pat. No. 9,102,731; SEQ ID NO: 254 | 8383 |
| MGR210 | HC | DNA | U.S. Pat. No. 9,102,731; SEQ ID NO: 244 | 8384 |
| MGR211 | HC | DNA | U.S. Pat. No. 9,102,731; SEQ ID NO: 257 | 8385 |
| MGR212 | HC | DNA | U.S. Pat. No. 9,102,731; SEQ ID NO: 248 | 8386 |
| MGR213 | HC | DNA | U.S. Pat. No. 9,102,731; SEQ ID NO: 251 | 8387 |
| MGR214 | HC | DNA | U.S. Pat. No. 9,102,731; SEQ ID NO: 243 | 8388 |
| MGR215 | HC | DNA | U.S. Pat. No. 9,102,731; SEQ ID NO: 259 | 8389 |
| MGR216 | HC | DNA | U.S. Pat. No. 9,745,373; SEQ ID NO: 204 | 8390 |
| MGR217 | HC | DNA | U.S. Pat. No. 9,745,373; SEQ ID NO: 244 | 8391 |
| MGR218 | HC | DNA | U.S. Pat. No. 9,745,373; SEQ ID NO: 224 | 8392 |
| MGR219 | HC | DNA | U.S. Pat. No. 9,745,373; SEQ ID NO: 144 | 8393 |
| MGR220 | HC | DNA | U.S. Pat. No. 9,745,373; SEQ ID NO: 173 | 8394 |
| MGR221 | HC | DNA | U.S. Pat. No. 9,745,373; SEQ ID NO: 174 | 8395 |
| MGR222 | HC | DNA | U.S. Pat. No. 9,745,373; SEQ ID NO: 264 | 8396 |
| MGR223 | HC | DNA | WO2007054809; SEQ ID NO: 9 | 8397 |
| MGR224 | HC | DNA | U.S. Pat. No. 9,745,373; SEQ ID NO: 184 | 8398 |
| MGR225 | HC | DNA | U.S. Pat. No. 9,745,373; SEQ ID NO: 194 | 8399 |
| MGR226 | HC | DNA | U.S. Pat. No. 9,745,373; SEQ ID NO: 254 | 8400 |
| MGR227 | HC | DNA | U.S. Pat. No. 9,745,373; SEQ ID NO: 234 | 8401 |
| MGR228 | HC | DNA | U.S. Pat. No. 9,745,373; SEQ ID NO: 274 | 8402 |
| MGR229 | HC | DNA | U.S. Pat. No. 9,745,373; SEQ ID NO: 154 | 8403 |
| MGR230 | HC | DNA | U.S. Pat. No. 9,745,373; SEQ ID NO: 164 | 8404 |
| MGR231 | HC | PRT | U.S. Pat. No. 9,073,991; SEQ ID NO: 32 | 8405 |
| MGR232 | HC | PRT | U.S. Pat. No. 9,073,991; SEQ ID NO: 35 | 8406 |
| MGR233 | HC | PRT | U.S. Pat. No. 9,073,991; SEQ ID NO: 33 | 8407 |
| MGR234 | HC | PRT | U.S. Pat. No. 9,073,991; SEQ ID NO: 34 | 8408 |
| MGR235 | HC | PRT | U.S. Pat. No. 9,073,991; SEQ ID NO: 36 | 8409 |
| MGR236 | HC | PRT | WO2007076336; SEQ ID NO: 40 | 8410 |
| MGR237 | HC | PRT | US20150322142; SEQ ID NO: 11 | 8411 |
| MGR238 | HC | PRT | US20150322142; SEQ ID NO: 1 | 8412 |
| MGR239 | HC | PRT | US20120294802; SEQ ID NO: 54 | 8413 |
| MGR240 | HC | PRT | US20120294802; SEQ ID NO: 44 | 8414 |
| MGR241 | HC | PRT | US20120294802; SEQ ID NO: 34 | 8415 |
| MGR242 | HC | PRT | US20120294802; SEQ ID NO: 14 | 8416 |
| MGR243 | HC | PRT | US20120294802; SEQ ID NO: 3 | 8417 |
| MGR244 | HC | PRT | US20120294802; SEQ ID NO: 4 | 8418 |
| MGR245 | HC | PRT | U.S. Pat. No. 9,102,731; SEQ ID NO: 31 | 8419 |
| MGR246 | HC | PRT | U.S. Pat. No. 9,102,731; SEQ ID NO: 37 | 8420 |
| MGR247 | HC | PRT | U.S. Pat. No. 9,102,731; SEQ ID NO: 38 | 8421 |
| MGR248 | HC | PRT | U.S. Pat. No. 9,102,731; SEQ ID NO: 35 | 8422 |
| MGR249 | HC | PRT | U.S. Pat. No. 9,102,731; SEQ ID NO: 30 | 8423 |
| MGR250 | HC | PRT | U.S. Pat. No. 9,102,731; SEQ ID NO: 40 | 8424 |
| MGR251 | HC | PRT | U.S. Pat. No. 9,102,731; SEQ ID NO: 34 | 8425 |
| MGR252 | HC | PRT | U.S. Pat. No. 9,102,731; SEQ ID NO: 39 | 8426 |
| MGR253 | HC | PRT | U.S. Pat. No. 9,102,731; SEQ ID NO: 29 | 8427 |
| MGR254 | HC | PRT | U.S. Pat. No. 9,102,731; SEQ ID NO: 33 | 8428 |
| MGR255 | HC | PRT | U.S. Pat. No. 9,102,731; SEQ ID NO: 41 | 8429 |
| MGR256 | HC | PRT | U.S. Pat. No. 9,102,731; SEQ ID NO: 36 | 8430 |
| MGR257 | HC | PRT | U.S. Pat. No. 9,102,731; SEQ ID NO: 32 | 8431 |
| MGR258 | HC | PRT | U.S. Pat. No. 9,896,502; SEQ ID NO: 11 | 8432 |
| MGR259 | HC | PRT | U.S. Pat. No. 9,745,373; SEQ ID NO: 284 | 8433 |
| MGR260 | HC | PRT | U.S. Pat. No. 9,745,373; SEQ ID NO: 43 | 8434 |
| MGR261 | HC | PRT | U.S. Pat. No. 9,745,373; SEQ ID NO: 74 | 8435 |
| MGR262 | HC | PRT | U.S. Pat. No. 9,745,373; SEQ ID NO: 114 | 8436 |
| MGR263 | HC | PRT | U.S. Pat. No. 9,745,373; SEQ ID NO: 134 | 8437 |
| MGR264 | HC | PRT | U.S. Pat. No. 9,745,373; SEQ ID NO: 94 | 8438 |
| MGR265 | HC | PRT | U.S. Pat. No. 9,745,373; SEQ ID NO: 24 | 8439 |
| MGR266 | HC | PRT | U.S. Pat. No. 9,745,373; SEQ ID NO: 14 | 8440 |
| MGR267 | HC | PRT | U.S. Pat. No. 9,745,373; SEQ ID NO: 23 | 8441 |
| MGR268 | HC | PRT | U.S. Pat. No. 9,745,373; SEQ ID NO: 64 | 8442 |
| MGR269 | HC | PRT | U.S. Pat. No. 9,745,373; SEQ ID NO: 104 | 8443 |
| MGR270 | HC | PRT | U.S. Pat. No. 9,745,373; SEQ ID NO: 33 | 8444 |
| MGR271 | HC | PRT | U.S. Pat. No. 9,745,373; SEQ ID NO: 84 | 8445 |
| MGR272 | HC | PRT | U.S. Pat. No. 9,745,373; SEQ ID NO: 3 | 8446 |
| MGR273 | HC | PRT | U.S. Pat. No. 9,745,373; SEQ ID NO: 124 | 8447 |
| MGR274 | HC | PRT | WO2007076336; SEQ ID NO: 41 | 8448 |
| MGR275 | HC | PRT | U.S. Pat. No. 9,862,771; SEQ ID NO: 35 | 8449 |
| MGR276 | HC | PRT | U.S. Pat. No. 9,862,771; SEQ ID NO: 39 | 8450 |
| MGR277 | HC | PRT | U.S. Pat. No. 9,862,771; SEQ ID NO: 29 | 8451 |
| MGR278 | HC | PRT | U.S. Pat. No. 9,862,771; SEQ ID NO: 36 | 8452 |
| MGR279 | HC | PRT | U.S. Pat. No. 9,862,771; SEQ ID NO: 32 | 8453 |
| MGR280 | LC | DNA | US20150322142; SEQ ID NO: 14 | 8454 |
| MGR281 | LC | DNA | U.S. Pat. No. 9,102,731; SEQ ID NO: 241 | 8455 |
| MGR282 | LC | DNA | U.S. Pat. No. 9,102,731; SEQ ID NO: 240 | 8456 |
| MGR283 | LC | DNA | U.S. Pat. No. 9,102,731; SEQ ID NO: 235 | 8457 |
| MGR284 | LC | DNA | U.S. Pat. No. 9,102,731; SEQ ID NO: 225 | 8458 |
| MGR285 | LC | DNA | U.S. Pat. No. 9,102,731; SEQ ID NO: 234 | 8459 |
| MGR286 | LC | DNA | U.S. Pat. No. 9,102,731; SEQ ID NO: 233 | 8460 |
| MGR287 | LC | DNA | U.S. Pat. No. 9,102,731; SEQ ID NO: 224 | 8461 |
| MGR288 | LC | DNA | U.S. Pat. No. 9,102,731; SEQ ID NO: 229 | 8462 |
| MGR289 | LC | DNA | U.S. Pat. No. 9,102,731; SEQ ID NO: 238 | 8463 |
| MGR290 | LC | DNA | U.S. Pat. No. 9,102,731; SEQ ID NO: 232 | 8464 |
| MGR291 | LC | DNA | U.S. Pat. No. 9,102,731; SEQ ID NO: 239 | 8465 |
| MGR292 | LC | DNA | U.S. Pat. No. 9,102,731; SEQ ID NO: 226 | 8466 |
| MGR293 | LC | DNA | U.S. Pat. No. 9,102,731; SEQ ID NO: 237 | 8467 |
| MGR294 | LC | DNA | U.S. Pat. No. 9,102,731; SEQ ID NO: 231 | 8468 |
| MGR295 | LC | DNA | U.S. Pat. No. 9,102,731; SEQ ID NO: 230 | 8469 |
| MGR296 | LC | DNA | U.S. Pat. No. 9,102,731; SEQ ID NO: 227 | 8470 |
| MGR297 | LC | DNA | U.S. Pat. No. 9,102,731; SEQ ID NO: 260 | 8471 |
| MGR298 | LC | DNA | U.S. Pat. No. 9,102,731; SEQ ID NO: 261 | 8472 |
| MGR299 | LC | DNA | U.S. Pat. No. 9,745,373; SEQ ID NO: 222 | 8473 |
| MGR300 | LC | DNA | U.S. Pat. No. 9,745,373; SEQ ID NO: 171 | 8474 |
| MGR301 | LC | DNA | U.S. Pat. No. 9,745,373; SEQ ID NO: 172 | 8475 |
| MGR302 | LC | DNA | U.S. Pat. No. 9,745,373; SEQ ID NO: 201 | 8476 |
| MGR303 | LC | DNA | U.S. Pat. No. 9,745,373; SEQ ID NO: 202 | 8477 |
| MGR304 | LC | DNA | U.S. Pat. No. 9,745,373; SEQ ID NO: 141 | 8478 |
| MGR305 | LC | DNA | U.S. Pat. No. 9,745,373; SEQ ID NO: 142 | 8479 |
| MGR306 | LC | DNA | U.S. Pat. No. 9,745,373; SEQ ID NO: 232 | 8480 |
| MGR307 | LC | DNA | U.S. Pat. No. 9,745,373; SEQ ID NO: 211 | 8481 |
| MGR308 | LC | DNA | U.S. Pat. No. 9,745,373; SEQ ID NO: 212 | 8482 |
| MGR309 | LC | DNA | U.S. Pat. No. 9,745,373; SEQ ID NO: 181 | 8483 |
| MGR310 | LC | DNA | U.S. Pat. No. 9,745,373; SEQ ID NO: 182 | 8484 |
| MGR311 | LC | DNA | U.S. Pat. No. 9,745,373; SEQ ID NO: 151 | 8485 |
| MGR312 | LC | DNA | U.S. Pat. No. 9,745,373; SEQ ID NO: 152 | 8486 |
| MGR313 | LC | DNA | U.S. Pat. No. 9,745,373; SEQ ID NO: 242 | 8487 |
| MGR314 | LC | DNA | WO2007076336; SEQ ID NO: 42 | 8488 |
| MGR315 | LC | DNA | WO2007054809; SEQ ID NO: 10 | 8489 |
| MGR316 | LC | DNA | U.S. Pat. No. 9,745,373; SEQ ID NO: 262 | 8490 |
| MGR317 | LC | PRT | U.S. Pat. No. 9,073,991; SEQ ID NO: 29 | 8491 |
| MGR318 | LC | PRT | U.S. Pat. No. 9,073,991; SEQ ID NO: 31 | 8492 |
| MGR319 | LC | PRT | U.S. Pat. No. 9,073,991; SEQ ID NO: 27 | 8493 |
| MGR320 | LC | PRT | U.S. Pat. No. 9,073,991; SEQ ID NO: 30 | 8494 |
| MGR321 | LC | PRT | US20150322142; SEQ ID NO: 12 | 8495 |
| MGR322 | LC | PRT | US20150322142; SEQ ID NO: 2 | 8496 |
| MGR323 | LC | PRT | US20120294802; SEQ ID NO: 42 | 8497 |
| MGR324 | LC | PRT | US20120294802; SEQ ID NO: 32 | 8498 |
| MGR325 | LC | PRT | US20120294802; SEQ ID NO: 12 | 8499 |
| MGR326 | LC | PRT | US20120294802; SEQ ID NO: 1 | 8500 |
| MGR327 | LC | PRT | US20120294802; SEQ ID NO: 2 | 8501 |
| MGR328 | LC | PRT | U.S. Pat. No. 9,102,731; SEQ ID NO: 16 | 8502 |
| MGR329 | LC | PRT | U.S. Pat. No. 9,102,731; SEQ ID NO: 19 | 8503 |
| MGR330 | LC | PRT | U.S. Pat. No. 9,102,731; SEQ ID NO: 26 | 8504 |
| MGR331 | LC | PRT | U.S. Pat. No. 9,102,731; SEQ ID NO: 14 | 8505 |
| MGR332 | LC | PRT | U.S. Pat. No. 9,102,731; SEQ ID NO: 24 | 8506 |
| MGR333 | LC | PRT | U.S. Pat. No. 9,102,731; SEQ ID NO: 18 | 8507 |
| MGR334 | LC | PRT | U.S. Pat. No. 9,102,731; SEQ ID NO: 22 | 8508 |
| MGR335 | LC | PRT | U.S. Pat. No. 9,102,731; SEQ ID NO: 23 | 8509 |
| MGR336 | LC | PRT | U.S. Pat. No. 9,102,731; SEQ ID NO: 13 | 8510 |
| MGR337 | LC | PRT | U.S. Pat. No. 9,102,731; SEQ ID NO: 20 | 8511 |
| MGR338 | LC | PRT | U.S. Pat. No. 9,102,731; SEQ ID NO: 25 | 8512 |
| MGR339 | LC | PRT | U.S. Pat. No. 9,102,731; SEQ ID NO: 17 | 8513 |
| MGR340 | LC | PRT | U.S. Pat. No. 9,102,731; SEQ ID NO: 12 | 8514 |
| MGR341 | LC | PRT | U.S. Pat. No. 9,102,731; SEQ ID NO: 21 | 8515 |
| MGR342 | LC | PRT | U.S. Pat. No. 9,102,731; SEQ ID NO: 15 | 8516 |
| MGR343 | LC | PRT | U.S. Pat. No. 9,102,731; SEQ ID NO: 27 | 8517 |
| MGR344 | LC | PRT | U.S. Pat. No. 9,102,731; SEQ ID NO: 28 | 8518 |
| MGR345 | LC | PRT | U.S. Pat. No. 9,896,502; SEQ ID NO: 12 | 8519 |
| MGR346 | LC | PRT | U.S. Pat. No. 9,745,373; SEQ ID NO: 122 | 8520 |
| MGR347 | LC | PRT | WO2007054809; SEQ ID NO: 12 | 8521 |
| MGR348 | LC | PRT | U.S. Pat. No. 9,745,373; SEQ ID NO: 132 | 8522 |
| MGR349 | LC | PRT | U.S. Pat. No. 9,745,373; SEQ ID NO: 91 | 8523 |
| MGR350 | LC | PRT | U.S. Pat. No. 9,745,373; SEQ ID NO: 12 | 8524 |
| MGR351 | LC | PRT | U.S. Pat. No. 9,745,373; SEQ ID NO: 21 | 8525 |
| MGR352 | LC | PRT | U.S. Pat. No. 9,745,373; SEQ ID NO: 42 | 8526 |
| MGR353 | LC | PRT | U.S. Pat. No. 9,745,373; SEQ ID NO: 51 | 8527 |
| MGR354 | LC | PRT | U.S. Pat. No. 9,745,373; SEQ ID NO: 72 | 8528 |
| MGR355 | LC | PRT | U.S. Pat. No. 9,745,373; SEQ ID NO: 71 | 8529 |
| MGR356 | LC | PRT | U.S. Pat. No. 9,745,373; SEQ ID NO: 112 | 8530 |
| MGR357 | LC | PRT | U.S. Pat. No. 9,745,373; SEQ ID NO: 2 | 8531 |
| MGR358 | LC | PRT | U.S. Pat. No. 9,745,373; SEQ ID NO: 1 | 8532 |
| MGR359 | LC | PRT | U.S. Pat. No. 9,745,373; SEQ ID NO: 62 | 8533 |
| MGR360 | LC | PRT | U.S. Pat. No. 9,745,373; SEQ ID NO: 61 | 8534 |
| MGR361 | LC | PRT | U.S. Pat. No. 9,745,373; SEQ ID NO: 102 | 8535 |
| MGR362 | LC | PRT | U.S. Pat. No. 9,745,373; SEQ ID NO: 82 | 8536 |
| MGR363 | LC | PRT | U.S. Pat. No. 9,745,373; SEQ ID NO: 32 | 8537 |
| MGR364 | LC | PRT | U.S. Pat. No. 9,745,373; SEQ ID NO: 31 | 8538 |
| MGR365 | LC | PRT | U.S. Pat. No. 9,745,373; SEQ ID NO: 283 | 8539 |
| MGR366 | LC | PRT | U.S. Pat. No. 9,862,771; SEQ ID NO: 22 | 8540 |
| MGR367 | LC | PRT | U.S. Pat. No. 9,862,771; SEQ ID NO: 25 | 8541 |
| MGR368 | LC | PRT | U.S. Pat. No. 9,862,771; SEQ ID NO: 17 | 8542 |
| MGR369 | LC | PRT | U.S. Pat. No. 9,862,771; SEQ ID NO: 21 | 8543 |
| MGR370 | LC | PRT | U.S. Pat. No. 9,862,771; SEQ ID NO: 15 | 8544 |
| MGR371 | VH | DNA | U.S. Pat. No. 9,102,731; SEQ ID NO: 228 | 8545 |
| MGR372 | VH | DNA | U.S. Pat. No. 9,102,731; SEQ ID NO: 212 | 8546 |
| MGR373 | VH | DNA | U.S. Pat. No. 9,102,731; SEQ ID NO: 197 | 8547 |
| MGR374 | VH | DNA | U.S. Pat. No. 9,102,731; SEQ ID NO: 198 | 8548 |
| MGR375 | VH | DNA | U.S. Pat. No. 9,102,731; SEQ ID NO: 207 | 8549 |
| MGR376 | VH | DNA | U.S. Pat. No. 9,102,731; SEQ ID NO: 208 | 8550 |
| MGR377 | VH | DNA | U.S. Pat. No. 9,102,731; SEQ ID NO: 206 | 8551 |
| MGR378 | VH | DNA | U.S. Pat. No. 9,102,731; SEQ ID NO: 210 | 8552 |
| MGR379 | VH | DNA | U.S. Pat. No. 9,102,731; SEQ ID NO: 211 | 8553 |
| MGR380 | VH | DNA | U.S. Pat. No. 9,102,731; SEQ ID NO: 196 | 8554 |
| MGR381 | VH | DNA | U.S. Pat. No. 9,102,731; SEQ ID NO: 199 | 8555 |
| MGR382 | VH | DNA | U.S. Pat. No. 9,102,731; SEQ ID NO: 200 | 8556 |
| MGR383 | VH | DNA | U.S. Pat. No. 9,102,731; SEQ ID NO: 202 | 8557 |
| MGR384 | VH | DNA | U.S. Pat. No. 9,102,731; SEQ ID NO: 205 | 8558 |
| MGR385 | VH | DNA | U.S. Pat. No. 9,102,731; SEQ ID NO: 204 | 8559 |
| MGR386 | VH | DNA | U.S. Pat. No. 9,102,731; SEQ ID NO: 209 | 8560 |
| MGR387 | VH | DNA | U.S. Pat. No. 9,102,731; SEQ ID NO: 201 | 8561 |
| MGR388 | VH | DNA | U.S. Pat. No. 9,102,731; SEQ ID NO: 203 | 8562 |
| MGR389 | VH | DNA | U.S. Pat. No. 9,745,373; SEQ ID NO: 203 | 8563 |
| MGR390 | VH | DNA | U.S. Pat. No. 9,745,373; SEQ ID NO: 243 | 8564 |
| MGR391 | VH | DNA | U.S. Pat. No. 9,745,373; SEQ ID NO: 223 | 8565 |
| MGR392 | VH | DNA | U.S. Pat. No. 9,745,373; SEQ ID NO: 263 | 8566 |
| MGR393 | VH | DNA | U.S. Pat. No. 9,745,373; SEQ ID NO: 183 | 8567 |
| MGR394 | VH | DNA | U.S. Pat. No. 9,745,373; SEQ ID NO: 253 | 8568 |
| MGR395 | VH | DNA | U.S. Pat. No. 9,745,373; SEQ ID NO: 153 | 8569 |
| MGR396 | VH | PRT | WO2007076336; SEQ ID NO: 39 | 8570 |
| MGR397 | VH | PRT | US20150322142; SEQ ID NO: 79 | 8571 |
| MGR398 | VH | PRT | US20150322142; SEQ ID NO: 59 | 8572 |
| MGR399 | VH | PRT | US20150322142; SEQ ID NO: 65 | 8573 |
| MGR400 | VH | PRT | US20150322142; SEQ ID NO: 61 | 8574 |
| MGR401 | VH | PRT | US20150322142; SEQ ID NO: 63 | 8575 |
| MGR402 | VH | PRT | US20150322142; SEQ ID NO: 67 | 8576 |
| MGR403 | VH | PRT | WO2007076336; SEQ ID NO: 35 | 8577 |
| MGR404 | VH | PRT | WO2007076336; SEQ ID NO: 37 | 8578 |
| MGR405 | VH | PRT | WO2007076336; SEQ ID NO: 36 | 8579 |
| MGR406 | VH | PRT | WO2007076336; SEQ ID NO: 38 | 8580 |
| MGR407 | VH | PRT | WO2007076336; SEQ ID NO: 34 | 8581 |
| MGR408 | VH | PRT | US20120294802; SEQ ID NO: 43 | 8582 |
| MGR409 | VH | PRT | US20120294802; SEQ ID NO: 33 | 8583 |
| MGR410 | VH | PRT | US20120294802; SEQ ID NO: 13 | 8584 |
| MGR411 | VH | PRT | U.S. Pat. No. 9,102,731; SEQ ID NO: 160 | 8585 |
| MGR412 | VH | PRT | U.S. Pat. No. 9,102,731; SEQ ID NO: 166 | 8586 |
| MGR413 | VH | PRT | U.S. Pat. No. 9,102,731; SEQ ID NO: 167 | 8587 |
| MGR414 | VH | PRT | U.S. Pat. No. 9,102,731; SEQ ID NO: 164 | 8588 |
| MGR415 | VH | PRT | U.S. Pat. No. 9,102,731; SEQ ID NO: 159 | 8589 |
| MGR416 | VH | PRT | U.S. Pat. No. 9,102,731; SEQ ID NO: 169 | 8590 |
| MGR417 | VH | PRT | U.S. Pat. No. 9,102,731; SEQ ID NO: 163 | 8591 |
| MGR418 | VH | PRT | U.S. Pat. No. 9,102,731; SEQ ID NO: 174 | 8592 |
| MGR419 | VH | PRT | U.S. Pat. No. 9,102,731; SEQ ID NO: 172 | 8593 |
| MGR420 | VH | PRT | U.S. Pat. No. 9,102,731; SEQ ID NO: 168 | 8594 |
| MGR421 | VH | PRT | U.S. Pat. No. 9,102,731; SEQ ID NO: 158 | 8595 |
| MGR422 | VH | PRT | U.S. Pat. No. 9,102,731; SEQ ID NO: 162 | 8596 |
| MGR423 | VH | PRT | U.S. Pat. No. 9,102,731; SEQ ID NO: 170 | 8597 |
| MGR424 | VH | PRT | U.S. Pat. No. 9,102,731; SEQ ID NO: 171 | 8598 |
| MGR425 | VH | PRT | U.S. Pat. No. 9,102,731; SEQ ID NO: 165 | 8599 |
| MGR426 | VH | PRT | U.S. Pat. No. 9,102,731; SEQ ID NO: 161 | 8600 |
| MGR427 | VH | PRT | U.S. Pat. No. 9,102,731; SEQ ID NO: 173 | 8601 |
| MGR428 | VH | PRT | U.S. Pat. No. 9,896,502; SEQ ID NO: 1 | 8602 |
| MGR429 | VH | PRT | U.S. Pat. No. 9,896,502; SEQ ID NO: 71 | 8603 |
| MGR430 | VH | PRT | U.S. Pat. No. 9,896,502; SEQ ID NO: 59 | 8604 |
| MGR431 | VH | PRT | U.S. Pat. No. 9,896,502; SEQ ID NO: 65 | 8605 |
| MGR432 | VH | PRT | U.S. Pat. No. 9,896,502; SEQ ID NO: 61 | 8606 |
| MGR433 | VH | PRT | U.S. Pat. No. 9,896,502; SEQ ID NO: 63 | 8607 |
| MGR434 | VH | PRT | U.S. Pat. No. 9,896,502; SEQ ID NO: 67 | 8608 |
| MGR435 | VH | PRT | U.S. Pat. No. 9,745,373; SEQ ID NO: 73 | 8609 |
| MGR436 | VH | PRT | U.S. Pat. No. 9,745,373; SEQ ID NO: 113 | 8610 |
| MGR437 | VH | PRT | U.S. Pat. No. 9,745,373; SEQ ID NO: 133 | 8611 |
| MGR438 | VH | PRT | U.S. Pat. No. 9,745,373; SEQ ID NO: 63 | 8612 |
| MGR439 | VH | PRT | U.S. Pat. No. 9,745,373; SEQ ID NO: 103 | 8613 |
| MGR440 | VH | PRT | U.S. Pat. No. 9,745,373; SEQ ID NO: 83 | 8614 |
| MGR441 | VH | PRT | U.S. Pat. No. 9,745,373; SEQ ID NO: 123 | 8615 |
| MGR442 | VH | PRT | U.S. Pat. No. 9,862,771; SEQ ID NO: 164 | 8616 |
| MGR443 | VH | PRT | U.S. Pat. No. 9,862,771; SEQ ID NO: 168 | 8617 |
| MGR444 | VH | PRT | U.S. Pat. No. 9,862,771; SEQ ID NO: 165 | 8618 |
| MGR445 | VH | PRT | U.S. Pat. No. 9,862,771; SEQ ID NO: 161 | 8619 |
| MGR446 | VI | DNA | US20150322142; SEQ ID NO: 10 | 8620 |
| MGR447 | VL | DNA | U.S. Pat. No. 9,102,731; SEQ ID NO: 177 | 8621 |
| MGR448 | VL | DNA | U.S. Pat. No. 9,102,731; SEQ ID NO: 192 | 8622 |
| MGR449 | VL | DNA | U.S. Pat. No. 9,102,731; SEQ ID NO: 193 | 8623 |
| MGR450 | VL | DNA | U.S. Pat. No. 9,102,731; SEQ ID NO: 191 | 8624 |
| MGR451 | VL | DNA | U.S. Pat. No. 9,102,731; SEQ ID NO: 194 | 8625 |
| MGR452 | VL | DNA | U.S. Pat. No. 9,102,731; SEQ ID NO: 190 | 8626 |
| MGR453 | VL | DNA | U.S. Pat. No. 9,102,731; SEQ ID NO: 186 | 8627 |
| MGR454 | VL | DNA | U.S. Pat. No. 9,102,731; SEQ ID NO: 187 | 8628 |
| MGR455 | VL | DNA | U.S. Pat. No. 9,102,731; SEQ ID NO: 189 | 8629 |
| MGR456 | VL | DNA | U.S. Pat. No. 9,102,731; SEQ ID NO: 188 | 8630 |
| MGR457 | VL | DNA | U.S. Pat. No. 9,102,731; SEQ ID NO: 184 | 8631 |
| MGR458 | VL | DNA | U.S. Pat. No. 9,102,731; SEQ ID NO: 183 | 8632 |
| MGR459 | VL | DNA | U.S. Pat. No. 9,102,731; SEQ ID NO: 182 | 8633 |
| MGR460 | VL | DNA | U.S. Pat. No. 9,102,731; SEQ ID NO: 176 | 8634 |
| MGR461 | VL | DNA | U.S. Pat. No. 9,102,731; SEQ ID NO: 175 | 8635 |
| MGR462 | VL | DNA | U.S. Pat. No. 9,102,731; SEQ ID NO: 185 | 8636 |
| MGR463 | VL | DNA | U.S. Pat. No. 9,102,731; SEQ ID NO: 181 | 8637 |
| MGR464 | VL | DNA | U.S. Pat. No. 9,102,731; SEQ ID NO: 179 | 8638 |
| MGR465 | VL | DNA | U.S. Pat. No. 9,102,731; SEQ ID NO: 180 | 8639 |
| MGR466 | VL | DNA | U.S. Pat. No. 9,102,731; SEQ ID NO: 178 | 8640 |
| MGR467 | VL | DNA | U.S. Pat. No. 9,102,731; SEQ ID NO: 195 | 8641 |
| MGR468 | VL | DNA | U.S. Pat. No. 9,745,373; SEQ ID NO: 221 | 8642 |
| MGR469 | VL | DNA | U.S. Pat. No. 9,745,373; SEQ ID NO: 231 | 8643 |
| MGR470 | VL | DNA | U.S. Pat. No. 9,745,373; SEQ ID NO: 241 | 8644 |
| MGR471 | VL | DNA | U.S. Pat. No. 9,745,373; SEQ ID NO: 261 | 8645 |
| MGR472 | VL | PRT | US20150322142; SEQ ID NO: 62 | 8646 |
| MGR473 | VL | PRT | US20150322142; SEQ ID NO: 66 | 8647 |
| MGR474 | VL | PRT | US20150322142; SEQ ID NO: 58 | 8648 |
| MGR475 | VL | PRT | US20150322142; SEQ ID NO: 64 | 8649 |
| MGR476 | VL | PRT | WO2007076336; SEQ ID NO: 29 | 8650 |
| MGR477 | VL | PRT | WO2007076336; SEQ ID NO: 28 | 8651 |
| MGR478 | VL | PRT | WO2007076336; SEQ ID NO: 33 | 8652 |
| MGR479 | VL | PRT | US20150322142; SEQ ID NO: 78 | 8653 |
| MGR480 | VL | PRT | US20120294802; SEQ ID NO: 41 | 8654 |
| MGR481 | VL | PRT | US20120294802; SEQ ID NO: 31 | 8655 |
| MGR482 | VL | PRT | US20120294802; SEQ ID NO: 11 | 8656 |
| MGR483 | VL | PRT | U.S. Pat. No. 9,102,731; SEQ ID NO: 141 | 8657 |
| MGR484 | VL | PRT | U.S. Pat. No. 9,102,731; SEQ ID NO: 144 | 8658 |
| MGR485 | VL | PRT | U.S. Pat. No. 9,102,731; SEQ ID NO: 151 | 8659 |
| MGR486 | VL | PRT | U.S. Pat. No. 9,102,731; SEQ ID NO: 139 | 8660 |
| MGR487 | VL | PRT | U.S. Pat. No. 9,102,731; SEQ ID NO: 155 | 8661 |
| MGR488 | VL | PRT | U.S. Pat. No. 9,102,731; SEQ ID NO: 149 | 8662 |
| MGR489 | VL | PRT | U.S. Pat. No. 9,102,731; SEQ ID NO: 154 | 8663 |
| MGR490 | VL | PRT | U.S. Pat. No. 9,102,731; SEQ ID NO: 143 | 8664 |
| MGR491 | VL | PRT | U.S. Pat. No. 9,102,731; SEQ ID NO: 152 | 8665 |
| MGR492 | VL | PRT | U.S. Pat. No. 9,102,731; SEQ ID NO: 153 | 8666 |
| MGR493 | VL | PRT | U.S. Pat. No. 9,102,731; SEQ ID NO: 156 | 8667 |
| MGR494 | VL | PRT | U.S. Pat. No. 9,102,731; SEQ ID NO: 147 | 8668 |
| MGR495 | VL | PRT | U.S. Pat. No. 9,102,731; SEQ ID NO: 148 | 8669 |
| MGR496 | VL | PRT | U.S. Pat. No. 9,102,731; SEQ ID NO: 138 | 8670 |
| MGR497 | VL | PRT | U.S. Pat. No. 9,102,731; SEQ ID NO: 157 | 8671 |
| MGR498 | VL | PRT | U.S. Pat. No. 9,102,731; SEQ ID NO: 145 | 8672 |
| MGR499 | VL | PRT | U.S. Pat. No. 9,102,731; SEQ ID NO: 150 | 8673 |
| MGR500 | VL | PRT | U.S. Pat. No. 9,102,731; SEQ ID NO: 137 | 8674 |
| MGR501 | VL | PRT | U.S. Pat. No. 9,102,731; SEQ ID NO: 146 | 8675 |
| MGR502 | VL | PRT | U.S. Pat. No. 9,102,731; SEQ ID NO: 140 | 8676 |
| MGR503 | VL | PRT | U.S. Pat. No. 9,896,502; SEQ ID NO: 2 | 8677 |
| MGR504 | VL | PRT | U.S. Pat. No. 9,745,373; SEQ ID NO: 121 | 8678 |
| MGR505 | VL | PRT | U.S. Pat. No. 9,745,373; SEQ ID NO: 111 | 8679 |
| MGR506 | VL | PRT | U.S. Pat. No. 9,745,373; SEQ ID NO: 101 | 8680 |
| MGR507 | VL | PRT | U.S. Pat. No. 9,745,373; SEQ ID NO: 81 | 8681 |
| MGR508 | VL | PRT | U.S. Pat. No. 9,862,771; SEQ ID NO: 147 | 8682 |
| MGR509 | VL | PRT | U.S. Pat. No. 9,862,771; SEQ ID NO: 150 | 8683 |
| MGR510 | VL | PRT | U.S. Pat. No. 9,862,771; SEQ ID NO: 142 | 8684 |
| MGR511 | VL | PRT | U.S. Pat. No. 9,862,771; SEQ ID NO: 146 | 8685 |
| MGR512 | VL | PRT | U.S. Pat. No. 9,862,771; SEQ ID NO: 140 | 8686 |
| MGR513 | VR | PRT | U.S. Pat. No. 9,896,502; SEQ ID NO: 62 | 8687 |
| MGR514 | VR | PRT | U.S. Pat. No. 9,896,502; SEQ ID NO: 66 | 8688 |
| MGR515 | VR | PRT | U.S. Pat. No. 9,896,502; SEQ ID NO: 60 | 8689 |
| MGR516 | VR | PRT | U.S. Pat. No. 9,896,502; SEQ ID NO: 64 | 8690 |
| MGR517 | HC | PRT | U.S. Pat. No. 9,102,731; SEQ ID NO: 32 | 8691 |
| MGR518 | HC | PRT | U.S. Pat. No. 9,102,731; SEQ ID NO: 34 | 8692 |
| MGR519 | HC | PRT | U.S. Pat. No. 9,102,731; SEQ ID NO: 37 | 8693 |
| MGR520 | HC | PRT | US20150322142; SEQ ID NO: 65 | 8694 |
| MGR521 | LC | PRT | U.S. Pat. No. 9,102,731; SEQ ID NO: 18 | 8695 |
| MGR522 | LC | PRT | U.S. Pat. No. 9,102,731; SEQ ID NO: 23 | 8696 |
| MGR523 | VH | PRT | U.S. Pat. No. 9,102,731; SEQ ID NO: 159 | 8697 |
| MGR524 | VH | PRT | U.S. Pat. No. 9,102,731; SEQ ID NO: 160 | 8698 |
| MGR525 | VH | PRT | U.S. Pat. No. 9,102,731; SEQ ID NO: 162 | 8699 |
| MGR526 | VH | PRT | U.S. Pat. No. 9,102,731; SEQ ID NO: 163 | 8700 |
| MGR527 | VH | PRT | U.S. Pat. No. 9,102,731; SEQ ID NO: 166 | 8701 |
| MGR528 | VH | PRT | U.S. Pat. No. 9,102,731; SEQ ID NO: 167 | 8702 |
| MGR529 | VH | PRT | U.S. Pat. No. 9,102,731; SEQ ID NO: 169 | 8703 |
| MGR530 | VH | PRT | U.S. Pat. No. 9,102,731; SEQ ID NO: 170 | 8704 |
| MGR531 | VL | PRT | U.S. Pat. No. 9,102,731; SEQ ID NO: 137 | 8705 |
| MGR532 | VL | PRT | U.S. Pat. No. 9,102,731; SEQ ID NO: 138 | 8706 |
| MGR533 | VL | PRT | U.S. Pat. No. 9,102,731; SEQ ID NO: 139 | 8707 |
| MGR534 | VL | PRT | U.S. Pat. No. 9,102,731; SEQ ID NO: 141 | 8708 |
| MGR535 | VL | PRT | U.S. Pat. No. 9,102,731; SEQ ID NO: 143 | 8709 |
| MGR536 | VL | PRT | U.S. Pat. No. 9,102,731; SEQ ID NO: 144 | 8710 |
| MGR537 | VL | PRT | U.S. Pat. No. 9,102,731; SEQ ID NO: 145 | 8711 |
| MGR538 | VL | PRT | U.S. Pat. No. 9,102,731; SEQ ID NO: 148 | 8712 |
| MGR539 | VL | PRT | U.S. Pat. No. 9,102,731; SEQ ID NO: 149 | 8713 |
| MGR540 | VL | PRT | U.S. Pat. No. 9,102,731; SEQ ID NO: 151 | 8714 |
| MGR541 | VL | PRT | U.S. Pat. No. 9,102,731; SEQ ID NO: 152 | 8715 |
| MGR542 | VL | PRT | U.S. Pat. No. 9,102,731; SEQ ID NO: 153 | 8716 |

[0922] In some embodiments, the payload region of the AAV particle comprises a nucleic acid sequence encoding a polypeptide which is an antibody, an antibody-based composition, or a fragment thereof. As a non-limiting example, the antibody may be one or more of the polypeptides listed in Table 12, or variants or fragments thereof. As another non-limiting example, the antibody may be one or more of the heavy chain sequences listed in Table 12. As a non-limiting example, the antibody may be one or more of the light chain sequences listed in Table 12, or variants or fragments thereof.

[0923] In some embodiments, the payload region of the AAV particle comprises a nucleic acid sequence encoding a polypeptide comprising a heavy chain and a light chain sequence listed in Table 12, or variants or fragments thereof. The payload region may also comprise a linker between the heavy and light chain sequences. The linker may be a sequence known in the art or described in Table 2.

[0924] In some embodiments, the payload region of the AAV particle comprises a nucleic acid sequence encoding a polypeptide comprising a heavy chain and alight chain sequence listed in Table 12, or variants or fragments thereof, where the heavy chain sequence is from a different antibody than the light chain sequence. The payload region may also comprise a linker between the heavy and light chain sequences. The linker may be a sequence known in the art or described in Table 2.

[0925] In some embodiments, the payload region comprises, in the 5 to 3′ direction, an antibody light chain sequence, a linker and a heavy chain sequence. In another embodiment, the linker is not used.

[0926] In some embodiments, the payload region comprises a nucleic acid sequence encoding, in the 5′ to 3′ direction, an antibody light chain sequence from Table 12, one or more linkers from Table 2 and a heavy chain sequence from Table 12.

[0927] In some embodiments, the payload region comprises, in the 5 to 3′ direction, an antibody heavy chain sequence, a linker region (may comprise one or more linkers) and alight chain sequence. In another embodiment, the linker is not used.

[0928] In some embodiments, the payload region comprises a nucleic acid sequence encoding, in the 5 to 3′ direction, an antibody heavy chain sequence from Table 12, one or more linkers from Table 2, and alight chain sequence from Table 12.

[0929] In some embodiments, the payload region comprises a nucleic acid sequence encoding a single heavy chain. As a non-limiting example, the heavy chain is an amino acid sequence or fragment thereof described in Table 12.

[0930] Shown in Table 12 are a listing of antibodies and their polynucleotides and/or polypeptides sequences. These sequences may be encoded by or included in the AAV particles of the present disclosure. Variants or fragments of the antibody sequences described in Table 12 may be utilized in the AAV particles of the present disclosure.

[0931] In some embodiments, the AAV particles may comprise a viral genome, wherein one or more components may be codon-optimized. Codon-optimization may be achieved by any method known to one with skill in the art such as, but not limited to, by a method according to Genescript, EMBOSS, Bioinformatics, NUS, NUS2, Geneinfinity, IDT, NUS3, GregThatcher, Insilico, Molbio, N2P, Snapgene, and/or VectorNTI. Antibody heavy and/or light chain sequences within the same viral genome may be codon-optimized according to the same or according to different methods.

[0932] In some cases, the payload region of the AAV particles may encode one or more isoforms or variants of heavy and light chain antibody domains. Such variants may be humanized or optimized antibody domains comprising one or more complementarity determining regions (CDRs) from the heavy and light chains listed in Table 12. CDRs of the antibodies encoded by the viral genomes of the present disclosure may be 50%, 60%, 70%, 80%, 90%, 95% identical to CDRs listed in or incorporated in the sequences of Table 12. Methods of determining CDRs are well known in the art and are described herein. Payload regions may encode antibody variants with one or more heavy chain variable domain (V_{H}) or light chain variable domain (V_{L}) derived from the antibody sequences in Table 12. In some cases, such variants may include bispecific antibodies. Bispecific antibodies encoded by payload regions may comprise variable domain pairs from two different antibodies.

[0933] In some embodiments, the AAV particles may comprise a heavy and a light chain of an antibody described herein and two promoters. As a non-limiting example, the AAV particles may comprise a nucleic acid sequence of a genome as described in FIG. 1 or FIG. 2 of US Patent Publication No. US20030219733, the contents of which are herein incorporated by reference in their entirety. As another non-limiting example, the AAV particles may be a dual-promoter AAV for antibody expression as described by Lewis et al. (J. of. Virology, September 2002, Vol. 76(17), p 8769-8775; the contents of which are herein incorporated by reference in their entirety).

[0934] Payload regions of the viral genomes may encode any migraine-associated antibodies, not limited to those described in Table 12, including antibodies that are known in the art and/or antibodies that are commercially available. This may include fragments of such antibodies or antibodies that have been developed to comprise one or more of such fragments [e.g., variable domains or complementarity determining regions (CDRs)].

[0935] In some embodiments, the AAV particles may have a payload region comprising any of the migraine-associated antibodies as described in International Publication Number WO2017075119, WO2017085035, WO2017106578, WO2017181031, WO2017181039, WO2017189959, WO2018039506, WO2018119246, WO2018160896, WO2018166495, WO2018167322, WO2019057992, WO2019067293, WO2015015003, WO2016125017, and WO2018206790, the contents of each of which are herein incorporated by reference in their entirety.

[0936] In some embodiments, the AAV particles may have a payload region comprising any of the migraine-associated antibodies as described in US Patent Number U.S. Ser. No. 10/000,572, the contents of which are herein incorporated by reference in their entirety.

[0937] In some embodiments, the AAV particles may have a payload region comprising any of the migraine-associated antibodies as described in US Patent Publication Number US20180327487, US20160251438, and US20160272717, the contents of each of which are herein incorporated by reference in their entirety.

[0938] In some embodiments, payloads may encode migraine-associated antibodies (or fragments thereof) taught in U.S. Pat. No. 9,896,502, the contents of which are herein incorporated by reference in their entirety. Such embodiments may include antibody TEV-48125 or Fremanezumab, or fragments thereof. In certain embodiments, the payload region encodes antibody TEV-48125 or Fremanezumab, or fragments thereof selected from SEQ ID NO: 1-79, as described in U59896502.

[0939] In some embodiments, payloads may encode migraine-associated antibodies (or fragments thereof) taught in U.S. Pat. No. 9,745,373, the contents of each of which are herein incorporated by reference in their entirety. Such embodiments may include antibody ALD403 or Eptinezumab, or fragments thereof. In certain embodiments, the payload region encodes antibody ALD403 or Eptinezumab, or fragments thereof selected from SEQ ID NO: 1-284 as described in U.S. Pat. No. 9,745,373.

[0940] In some embodiments, payloads may encode migraine-associated antibodies (or fragments thereof) taught in U.S. Pat. No. 9,102,731, the contents of each of which are herein incorporated by reference in their entirety. Such embodiments may include antibody Erenumab or Aimovig or AMG-334, or fragments thereof. In certain embodiments, the payload region encodes antibody Erenumab or Aimovig or AMG-334, or fragments thereof selected from SEQ ID NO: 12-261 as described in U.S. Pat. No. 9,102,731.

[0941] In some embodiments, payloads may encode migraine-associated antibodies (or fragments thereof) taught in International Publication Number WO2007076336, the contents of which are herein incorporated by reference in their entirety. Such embodiments may include antibody Galcanezumab, or fragments thereof. In certain embodiments, the payload region encodes antibody Galcanezumab, or fragments thereof selected from SEQ ID NO: 8-42 as described in WO2007076336.

[0942] In some embodiments, payloads may encode migraine-associated antibodies (or fragments thereof) taught in International Publication Number WO2015015003, WO2016125017, and WO20120670, the contents of each of which are herein incorporated by reference in their entirety. Such embodiments may include antibody ARGX-15, Fremanezumab or fragments thereof.

[0943] In some embodiments, payloads may encode migraine-associated antibodies (or fragments thereof) taught in US Patent Publication Number US20180327487, U.S. Ser. No. 10/000,572, US20160251438, and US20160272717, the contents of each of which are herein incorporated by reference in their entirety. Such embodiments may include antibody ARGX-115, or fragments thereof.

[0944] In some embodiments, the payload region of the AAV particle comprises one or more nucleic acid sequences encoding pain-associated antibodies, variants or fragments thereof.

[0945] In some embodiments, the payload region of the AAV particle comprises one or more nucleic acid sequences encoding one or more of the payload antibody polypeptides listed in Table 13, or variants or fragments thereof. As used herein, “antibody polynucleotide” refers to a nucleic acid sequence encoding an antibody polypeptide.

[0946] In some embodiments, the payload region of the AAV particle comprises one or more nucleic acid sequences listed in Table 13, or variants or fragments thereof.

[0947] In some embodiments, the payload region of the AAV particle comprises a nucleic acid sequence encoding a payload antibody with at least 50% identity to one or more payload antibody polypeptides listed in Table 13. The encoded antibody polypeptide may have 50%, 51%, 52%, 53%, 54%, 55%, 56%, 57%, 58%, 59%, 60%, 61%, 62%, 63%, 64%, 65%, 66%, 67%, 68%, 69%, 70%, 71%, 72%, 73%, 74%, 75%, 76%, 77%, 78%, 79%, 80%, 81%, 82%, 83%, 84%, 85%, 86%, 87%, 88%, 89%, 90%, 91%, 92%, 93%, 94%, 95%, 96%, 97%, 98%, 99%, or 100% identity to one or more of the payload antibody polypeptides listed in Table 13, or variants or fragments thereof.

[0948] In some embodiments, the full sequence of the encoded antibody polypeptide may have 50%, 51%, 52%, 53%, 54%, 55%, 56%, 57%, 58%, 59%, 60%, 61%, 62%, 63%, 64%, 65%, 66%, 67%, 68%, 69%, 70%, 71%, 72%, 73%, 74%, 75%, 76%, 77%, 78%, 79%, 80%, 81%, 82%, 83%, 84%, 85%, 86%, 87%, 88%, 89%, 90%, 91%, 92%, 93%, 94%, 95%, 96%, 97%, 98%, 99%, or 100% identity to one or more of the payload antibody polypeptides listed in Table 13, or variants or fragments thereof.

[0949] In some embodiments, the variable region sequence(s) of the encoded antibody polypeptide may have 50%, 51%, 52%, 53%, 54%, 55%, 56%, 57%, 58%, 59%, 60%, 61%, 62%, 63%, 64%, 65%, 66%, 67%, 68%, 69%, 70%, 71%, 72%, 73%, 74%, 75%, 76%, 77%, 78%, 79%, 80%, 81%, 82%,83%, 84%,85%, 86%,87%, 88%, 89%, 90%, 91%, 92%, 93%, 94%, 95%, 96%, 97%, 98%, 99%, or 100% identity to one or more of the payload antibody polypeptides listed in Table 13, or variants or fragments thereof.

[0950] In some embodiments, the heavy chain of the encoded antibody polypeptide may have 50%, 51%, 52%, 53%, 54%, 55%, 56%, 57%, 58%, 59%, 60%, 61%, 62%, 63%, 64%, 65%, 66%, 67%, 68%, 69%, 70%, 71%, 72%, 73%, 74%, 75%, 76%, 77%, 78%, 79%, 80%, 81%, 82%, 83%, 84%, 85%, 86%, 87%, 88%, 89%, 90%, 91%, 92%, 93%, 94%, 95%, 96%, 97%, 98%,99%, or 100% identity to one or more of the payload heavy chain antibody polypeptides listed in Table 13, or variants or fragments thereof.

[0951] In some embodiments, the light chain of the encoded antibody polypeptide may have 50%, 51%, 52%,53%, 54%, 55%, 56%, 57%, 58%, 59%, 60%, 61%, 62%, 63%, 64%, 65%, 66%, 67%, 68%, 69%, 70%, 71%, 72%, 73%, 74%, 75%, 76%,77%, 78%, 79%, 80%, 81%, 82%, 83%, 84%, 85%%,6, 87%,88%, 89%, 90%,91%, 92%, 93%,94%,95%, 96%,97%,98%, 99%, or 100% identity to one or more of the payload light chain antibody polypeptides listed in Table 13, or variants or fragments thereof.

[0952] In some embodiments, the CDR region of the encoded antibody polypeptide may have 50%, 51%, 52%, 53%, 54%, 55%, 56%, 57%, 58%, 59%, 60%, 61%,62%, 63%,64%, 65%, 66%, 67%, 68%, 69%, 70%, 71%, 72%, 73%, 74%, 75%, 76%, 77%, 78%, 79%, 80%, 81%, 82%, 83%, 84%, 85%, 86%, 87%, 88%, 89%, 90%, 91%, 92%, 93%, 94%, 95%, 96%, 97%, 98%, 99%, or 100% identity to the CDRs of one or more of the payload antibody polypeptides listed in Table 13, or variants or fragments thereof.

[0953] In some embodiments, the payload antibody has 90% identity to one or more of the antibody polypeptides listed in Table 13, or variants or fragments thereof.

[0954] In some embodiments, the payload antibody has 91% identity to one or more of the antibody polypeptides listed in Table 13, or variants or fragments thereof.

[0955] In some embodiments, the payload antibody has 92% identity to one or more of the antibody polypeptides listed in Table 13, or variants or fragments thereof.

[0956] In some embodiments, the payload antibody has 93% identity to one or more of the antibody polypeptides listed in Table 13, or variants or fragments thereof.

[0957] In some embodiments, the payload antibody has 94% identity to one or more of the antibody polypeptides listed in Table 13, or variants or fragments thereof.

[0958] In some embodiments, the payload antibody has 95% identity to one or more of the antibody polypeptides listed in Table 13, or variants or fragments thereof.

[0959] In some embodiments, the payload antibody has 96% identity to one or more of the antibody polypeptides listed in Table 13, or variants or fragments thereof.

[0960] In some embodiments, the payload antibody has 97% identity to one or more of the antibody polypeptides listed in Table 13, or variants or fragments thereof.

[0961] In some embodiments, the payload antibody has 98% identity to one or more of the antibody polypeptides listed in Table 13, or variants or fragments thereof.

[0962] In some embodiments, the payload antibody has 99% identity to one or more of the antibody polypeptides listed in Table 13, or variants or fragments thereof.

[0963] In some embodiments, the payload antibody has 100% identity to one or more of the antibody polypeptides listed in Table 13, or variants or fragments thereof.

[0964] In some embodiments, the payload region of the AAV particle comprises a nucleic acid sequence with at least 50% identity to one or more nucleic acid sequences listed in Table 13, or variants or fragments thereof. The payload nucleic acid sequence may have 50%, 51%, 52%, 53%, 54%, 55%, 56% 57% 58%, 59%, 60%, 61%, 62%, 63%, 64%, 65%, 66%, 67%, 68%, 69%, 70%, 71%, 72%, 73%, 74%, 75%, 76%, 77%, 78%, 79%, 80%, 81%, 82%, 83%, 84%, 85%, 86%, 87%, 88%, 89%, 90%, 91%, 92%, 93%, 94%, 95%, 96%, 97%, 98%, 99%, or 100% identity to one or more nucleic acid sequences listed in Table 13, or variants or fragments thereof.

[0965] In some embodiments, the payload nucleic acid sequence has 90% identity to one or more of the nucleic acid sequences listed in Table 13, or variants or fragments thereof.

[0966] In some embodiments, the payload nucleic acid sequence has 91% identity to one or more of the nucleic acid sequences listed in Table 13, or variants or fragments thereof.

[0967] In some embodiments, the payload nucleic acid sequence has 92% identity to one or more of the nucleic acid sequences listed in Table 13, or variants or fragments thereof.

[0968] In some embodiments, the payload nucleic acid sequence has 93% identity to one or more of the nucleic acid sequences listed in Table 13, or variants or fragments thereof.

[0969] In some embodiments, the payload nucleic acid sequence has 94% identity to one or more of the nucleic acid sequences listed in Table 13, or variants or fragments thereof.

[0970] In some embodiments, the payload nucleic acid sequence has 95% identity to one or more of the nucleic acid sequences listed in Table 13, or variants or fragments thereof.

[0971] In some embodiments, the payload nucleic acid sequence has 96% identity to one or more of the nucleic acid sequences listed in Table 13, or variants or fragments thereof.

[0972] In some embodiments, the payload nucleic acid sequence has 97% identity to one or more of the nucleic acid sequences listed in Table 13, or variants or fragments thereof.

[0973] In some embodiments, the payload nucleic acid sequence has 98% identity to one or more of the nucleic acid sequences listed in Table 13, or variants or fragments thereof.

[0974] In some embodiments, the payload nucleic acid sequence has 99% identity to one or more of the nucleic acid sequences listed in Table 13, or variants or fragments thereof.

[0975] In some embodiments, the payload nucleic acid sequence has 100% identity to one or more of the nucleic acid sequences listed in Table 13, or variants or fragments thereof.

[0976] In some embodiments, the payload antibody may be variants of any of the antibody polypeptides listed in Table 13, that exclude one or more amino acids designated as “X” or “x” in the described polypeptide sequence, wherein X may represent any amino acid. In some embodiments, the payload nucleic acid sequence may be variants of any of the nucleic acid sequences listed in Table 13, that exclude one or more nucleic acids designated as “n” or “N” in the described nucleic acid sequence, wherein n may represent any nucleic acid.

TABLE 13
Pain antibodies

| | | Type | | SEQ |
|---|---|---|---|---|
| Ab ID | Component | (PRT/DNA) | Reference | ID NO |
| PN1 | CDR | DNA | US20180142038A1; SEQ ID NO: 14 | 8717 |
| PN2 | CDR | DNA | US20180142038A1; SEQ ID NO: 198 | 8718 |
| PN3 | CDR | DNA | US20180142038A1; SEQ ID NO: 174 | 8719 |
| PN4 | CDR | DNA | US20180142038A1; SEQ ID NO: 134 | 8729 |
| PN5 | CDR | DNA | U.S. 10/202,450; SEQ ID NO: 17 | 8721 |
| PN6 | CDR | DNA | U.S. 10/202,450; SEQ ID NO: 15 | 8722 |
| PN7 | CDR | DNA | US20180142038A1; SEQ ID NO: 158 | 8723 |
| PN8 | CDR | DNA | US20180142038A1; SEQ ID NO: 118 | 8724 |
| PN9 | CDR | DNA | US20180142038A1; SEQ ID NO: 38 | 8725 |
| PN10 | CDR | DNA | US20160244743A1; SEQ ID NO: 13 | 8726 |
| PN11 | CDR | DNA | US20160244743A1; SEQ ID NO: 3 | 8727 |
| PN12 | CDR | DNA | US20160244743A1; SEQ ID NO: 11 | 8728 |
| PN13 | CDR | DNA | US20160244743A1; SEQ ID NO: 14 | 8729 |
| PN14 | CDR | DNA | US20160244743A1; SEQ ID NO: 8 | 8730 |
| PN15 | CDR | DNA | US20160244743A1; SEQ ID NO: 2 | 8731 |
| PN16 | CDR | DNA | US20160244743A1; SEQ ID NO: 6 | 8732 |
| PN17 | CDR | DNA | US20160244743A1; SEQ ID NO: 10 | 8733 |
| PN18 | CDR | DNA | US20160244743A1; SEQ ID NO: 5 | 8734 |
| PN19 | CDR | DNA | US20160244743A1; SEQ ID NO: 9 | 8735 |
| PN20 | CDR | DNA | US20160244743A1; SEQ ID NO: 12 | 8736 |
| PN21 | CDR | DNA | US20160244743A1; SEQ ID NO: 7 | 8737 |
| PN22 | CDR | DNA | US20160244743A1; SEQ ID NO: 4 | 8738 |
| PN23 | CDR | DNA | U.S. Pat. No. 8,986,694; SEQ ID NO: 112 | 8739 |
| PN24 | CDR | DNA | US20180142038A1; SEQ ID NO: 194 | 8740 |
| PN25 | CDR | DNA | US20180142038A1; SEQ ID NO: 34 | 8741 |
| PN26 | CDR | DNA | US20180142038A1; SEQ ID NO: 78 | 8742 |
| PN27 | CDR | DNA | US20180142038A1; SEQ ID NO: 154 | 8743 |
| PN28 | CDR | DNA | US20180142038A1; SEQ ID NO: 74 | 8744 |
| PN29 | CDR | DNA | US20180142038A1; SEQ ID NO: 114 | 8745 |
| PN30 | CDR | DNA | US20160244743A1; SEQ ID NO: 1 | 8746 |
| PN31 | CDR | DNA | US20180142038A1; SEQ ID NO: 76 | 8747 |
| PN32 | CDR | DNA | US20180142038A1; SEQ ID NO: 116 | 8748 |
| PN33 | CDR | DNA | US20180142038A1; SEQ ID NO: 196 | 8749 |
| PN34 | CDR | DNA | US20180142038A1; SEQ ID NO: 98 | 8750 |
| PN35 | CDR | DNA | US20180142038A1; SEQ ID NO: 18 | 8751 |
| PN36 | CDR | DNA | U.S. 10/202,450; SEQ ID NO: 18 | 8752 |
| PN37 | CDR | DNA | U.S. Pat. No. 8,986,694; SEQ ID NO: 39 | 8753 |
| PN38 | CDR | DNA | US20160244743A1; SEQ ID NO: 16 | 8754 |
| PN39 | CDR | DNA | US20160244743A1; SEQ ID NO: 17 | 8755 |
| PN40 | CDR | DNA | US20180142038A1; SEQ ID NO: 54 | 8756 |
| PN41 | CDR | DNA | U.S. 10/202,450; SEQ ID NO: 13 | 8757 |
| PN42 | CDR | DNA | US20180142038A1; SEQ ID NO: 178 | 8758 |
| PN43 | CDR | DNA | US20160244743A1; SEQ ID NO: 15 | 8759 |
| PN44 | CDR | DNA | US20180142038A1; SEQ ID NO: 36 | 8760 |
| PN45 | CDR | DNA | US20180142038A1; SEQ ID NO: 156 | 8761 |
| PN46 | CDR | DNA | US20180142038A1; SEQ ID NO: 138 | 8762 |
| PN47 | CDR | DNA | US20180142038A1; SEQ ID NO: 96 | 8763 |
| PN48 | CDR | DNA | US20180142038A1; SEQ ID NO: 16 | 8764 |
| PN49 | CDR | DNA | US20180142038A1; SEQ ID NO: 176 | 8765 |
| PN50 | CDR | DNA | U.S. 10/202,450; SEQ ID NO: 14 | 8766 |
| PN51 | CDR | DNA | US20180142038A1; SEQ ID NO: 136 | 8767 |
| PN52 | CDR | DNA | US20180142038A1; SEQ ID NO: 56 | 8768 |
| PN53 | CDR | DNA | U.S. 10/202,450; SEQ ID NO: 19 | 8769 |
| PN54 | CDR | DNA | US20160244743A1; SEQ ID NO: 18 | 8770 |
| PN55 | CDR | PRT | U.S. Pat. No. 8,926,977; SEQ ID NO: 27 | 8771 |
| PN56 | CDR | PRT | U.S. Pat. No. 8,926,977; SEQ ID NO: 45 | 8772 |
| PN57 | CDR | PRT | U.S. Pat. No. 8,926,977; SEQ ID NO: 9 | 8773 |
| PN58 | CDR | PRT | U.S. Pat. No. 8,926,977; SEQ ID NO: 48 | 8774 |
| PN59 | CDR | PRT | U.S. Pat. No. 8,926,977; SEQ ID NO: 18 | 8775 |
| PN60 | CDR | PRT | U.S. Pat. No. 8,926,977; SEQ ID NO: 54 | 8776 |
| PN61 | CDR | PRT | U.S. Pat. No. 8,926,977; SEQ ID NO: 36 | 8777 |
| PN62 | CDR | PRT | U.S. Pat. No. 8,926,977; SEQ ID NO: 26 | 8778 |
| PN63 | CDR | PRT | U.S. Pat. No. 8,926,977; SEQ ID NO: 16 | 8779 |
| PN64 | CDR | PRT | U.S. Pat. No. 8,926,977; SEQ ID NO: 10 | 8780 |
| PN65 | CDR | PRT | U.S. Pat. No. 8,926,977; SEQ ID NO: 59 | 8781 |
| PN66 | CDR | PRT | U.S. Pat. No. 8,926,977; SEQ ID NO: 6 | 8782 |
| PN67 | CDR | PRT | U.S. Pat. No. 8,926,977; SEQ ID NO: 24 | 8783 |
| PN68 | CDR | PRT | U.S. Pat. No. 8,926,977; SEQ ID NO: 12 | 8784 |
| PN69 | CDR | PRT | U.S. Pat. No. 8,926,977; SEQ ID NO: 42 | 8785 |
| PN70 | CDR | PRT | U.S. Pat. No. 8,926,977; SEQ ID NO: 60 | 8786 |
| PN71 | CDR | PRT | U.S. Pat. No. 8,926,977; SEQ ID NO: 5 | 8787 |
| PN72 | CDR | PRT | U.S. Pat. No. 8,926,977; SEQ ID NO: 23 | 8788 |
| PN73 | CDR | PRT | U.S. Pat. No. 8,926,977; SEQ ID NO: 11 | 8789 |
| PN74 | CDR | PRT | U.S. Pat. No. 8,926,977; SEQ ID NO: 29 | 8790 |
| PN75 | CDR | PRT | U.S. Pat. No. 8,926,977; SEQ ID NO: 52 | 8791 |
| PN76 | CDR | PRT | U.S. Pat. No. 8,926,977; SEQ ID NO: 22 | 8792 |
| PN77 | CDR | PRT | U.S. Pat. No. 8,926,977; SEQ ID NO: 39 | 8793 |
| PN78 | CDR | PRT | U.S. Pat. No. 8,926,977; SEQ ID NO: 3 | 8794 |
| PN79 | CDR | PRT | U.S. Pat. No. 8,926,977; SEQ ID NO: 30 | 8795 |
| PN80 | CDR | PRT | U.S. Pat. No. 8,926,977; SEQ ID NO: 35 | 8796 |
| PN81 | CDR | PRT | U.S. Pat. No. 8,926,977; SEQ ID NO: 46 | 8797 |
| PN82 | CDR | PRT | U.S. Pat. No. 8,926,977; SEQ ID NO: 58 | 8798 |
| PN83 | CDR | PRT | U.S. Pat. No. 8,926,977; SEQ ID NO: 31 | 8799 |
| PN84 | CDR | PRT | U.S. Pat. No. 8,926,977; SEQ ID NO: 49 | 8800 |
| PN85 | CDR | PRT | U.S. Pat. No. 8,926,977; SEQ ID NO: 37 | 8801 |
| PN86 | CDR | PRT | U.S. Pat. No. 8,926,977; SEQ ID NO: 57 | 8802 |
| PN87 | CDR | PRT | U.S. Pat. No. 8,926,977; SEQ ID NO: 51 | 8803 |
| PN88 | CDR | PRT | U.S. Pat. No. 8,926,977; SEQ ID NO: 33 | 8804 |
| PN89 | CDR | PRT | U.S. Pat. No. 8,926,977; SEQ ID NO: 43 | 8805 |
| PN90 | CDR | PRT | U.S. Pat. No. 8,926,977; SEQ ID NO: 55 | 8806 |
| PN91 | CDR | PRT | U.S. Pat. No. 8,926,977; SEQ ID NO: 25 | 8807 |
| PN92 | CDR | PRT | U.S. Pat. No. 8,926,977; SEQ ID NO: 7 | 8808 |
| PN93 | CDR | PRT | U.S. Pat. No. 8,926,977; SEQ ID NO: 19 | 8809 |
| PN94 | CDR | PRT | U.S. Pat. No. 8,926,977; SEQ ID NO: 13 | 8810 |
| PN95 | CDR | PRT | U.S. Pat. No. 8,926,977; SEQ ID NO: 1 | 8811 |
| PN96 | CDR | PRT | U.S. Pat. No. 8,926,977; SEQ ID NO: 8 | 8812 |
| PN97 | CDR | PRT | U.S. Pat. No. 8,926,977; SEQ ID NO: 14 | 8813 |
| PN98 | CDR | PRT | U.S. Pat. No. 8,926,977; SEQ ID NO: 50 | 8814 |
| PN99 | CDR | PRT | U.S. Pat. No. 8,926,977; SEQ ID NO: 47 | 8815 |
| PN100 | CDR | PRT | U.S. Pat. No. 8,926,977; SEQ ID NO: 53 | 8816 |
| PN101 | CDR | PRT | U.S. Pat. No. 8,926,977; SEQ ID NO: 34 | 8817 |
| PN102 | CDR | PRT | U.S. Pat. No. 8,926,977; SEQ ID NO: 17 | 8818 |
| PN103 | CDR | PRT | U.S. Pat. No. 8,926,977; SEQ ID NO: 40 | 8819 |
| PN104 | CDR | PRT | U.S. Pat. No. 8,926,977; SEQ ID NO: 28 | 8820 |
| PN105 | CDR | PRT | U.S. Pat. No. 8,926,977; SEQ ID NO: 15 | 8821 |
| PN106 | CDR | PRT | U.S. Pat. No. 8,926,977; SEQ ID NO: 21 | 8822 |
| PN107 | CDR | PRT | U.S. Pat. No. 8,926,977; SEQ ID NO: 41 | 8823 |
| PN108 | CDR | PRT | U.S. Pat. No. 8,926,977; SEQ ID NO: 2 | 8824 |
| PN109 | CDR | PRT | U.S. 10/112,996; SEQ ID NO: 8 | 8825 |
| PN110 | CDR | PRT | US20170306013A1; SEQ ID NO: 486 | 8826 |
| PN111 | CDR | PRT | US20160207996A1; SEQ ID NO: 181 | 8827 |
| PN112 | CDR | PRT | US20160207996A1; SEQ ID NO: 65 | 8828 |
| PN113 | CDR | PRT | US20160207996A1; SEQ ID NO: 146 | 8829 |
| PN114 | CDR | PRT | US20160207996A1; SEQ ID NO: 508 | 8830 |
| PN115 | CDR | PRT | US20160207996A1; SEQ ID NO: 537 | 8831 |
| PN116 | CDR | PRT | US20160207996A1; SEQ ID NO: 52 | 8832 |
| PN117 | CDR | PRT | U.S. 10/112,996; SEQ ID NO: 33 | 8833 |
| PN118 | CDR | PRT | US20160207996A1; SEQ ID NO: 119 | 8834 |
| PN119 | CDR | PRT | US20160207996A1; SEQ ID NO: 482 | 8835 |
| PN120 | CDR | PRT | US20160207996A1; SEQ ID NO: 484 | 8836 |
| PN121 | CDR | PRT | US20160207996A1; SEQ ID NO: 485 | 8837 |
| PN122 | CDR | PRT | US20160207996A1; SEQ ID NO: 16 | 8838 |
| PN123 | CDR | PRT | US20160207996A1; SEQ ID NO: 17 | 8839 |
| PN124 | CDR | PRT | US20170306013A1; SEQ ID NO: 403 | 8840 |
| PN125 | CDR | PRT | US20160207996A1; SEQ ID NO: 206 | 8841 |
| PN126 | CDR | PRT | US20160207996A1; SEQ ID NO: 481 | 8842 |
| PN127 | CDR | PRT | US20160207996A1; SEQ ID NO: 32 | 8843 |
| PN128 | CDR | PRT | US20160207996A1; SEQ ID NO: 569 | 8844 |
| PN129 | CDR | PRT | US20160207996A1; SEQ ID NO: 215 | 8845 |
| PN130 | CDR | PRT | US20160207996A1; SEQ ID NO: 565 | 8846 |
| PN131 | CDR | PRT | US20160207996A1; SEQ ID NO: 214 | 8847 |
| PN132 | CDR | PRT | US20160207996A1; SEQ ID NO: 300 | 8848 |
| PN133 | CDR | PRT | US20160207996A1; SEQ ID NO: 567 | 8849 |
| PN134 | CDR | PRT | US20160207996A1; SEQ ID NO: 207 | 8850 |
| PN135 | CDR | PRT | US20160207996A1; SEQ ID NO: 210 | 8851 |
| PN136 | CDR | PRT | US20160207996A1; SEQ ID NO: 212 | 8852 |
| PN137 | CDR | PRT | US20160207996A1; SEQ ID NO: 211 | 8853 |
| PN138 | CDR | PRT | US20160207996A1; SEQ ID NO: 208 | 8854 |
| PN139 | CDR | PRT | US20160207996A1; SEQ ID NO: 570 | 8855 |
| PN140 | CDR | PRT | US20160207996A1; SEQ ID NO: 568 | 8856 |
| PN141 | CDR | PRT | US20170306013A1; SEQ ID NO: 387 | 8857 |
| PN142 | CDR | PRT | US20170306013A1; SEQ ID NO: 435 | 8858 |
| PN143 | CDR | PRT | US20170306013A1; SEQ ID NO: 355 | 8859 |
| PN144 | CDR | PRT | US20170306013A1; SEQ ID NO: 339 | 8860 |
| PN145 | CDR | PRT | US20160207996A1; SEQ ID NO: 575 | 8861 |
| PN146 | CDR | PRT | US20160207996A1; SEQ ID NO: 574 | 8862 |
| PN147 | CDR | PRT | US20160207996A1; SEQ ID NO: 573 | 8863 |
| PN148 | CDR | PRT | U.S. 10/112,996; SEQ ID NO: 77 | 8864 |
| PN149 | CDR | PRT | US20180142038A1; SEQ ID NO: 46 | 8865 |
| PN150 | CDR | PRT | US20180142038A1; SEQ ID NO: 126 | 8866 |
| PN151 | CDR | PRT | US20180142038A1; SEQ ID NO: 166 | 8867 |
| PN152 | CDR | PRT | US20180142038A1; SEQ ID NO: 6 | 8868 |
| PN153 | CDR | PRT | US20180142038A1; SEQ ID NO: 86 | 8869 |
| PN154 | CDR | PRT | US20140227267A1; SEQ ID NO: 76 | 8870 |
| PN155 | CDR | PRT | US20140227267A1; SEQ ID NO: 68 | 8871 |
| PN156 | CDR | PRT | US20140227267A1; SEQ ID NO: 77 | 8872 |
| PN157 | CDR | PRT | US20140227267A1; SEQ ID NO: 78 | 8873 |
| PN158 | CDR | PRT | US20140227267A1; SEQ ID NO: 80 | 8874 |
| PN159 | CDR | PRT | US20140227267A1; SEQ ID NO: 65 | 8875 |
| PN160 | CDR | PRT | US20140227267A1; SEQ ID NO: 81 | 8876 |
| PN161 | CDR | PRT | US20140227267A1; SEQ ID NO: 99 | 8877 |
| PN162 | CDR | PRT | US20140227267A1; SEQ ID NO: 70 | 8878 |
| PN163 | CDR | PRT | US20140227267A1; SEQ ID NO: 62 | 8879 |
| PN164 | CDR | PRT | US20140227267A1; SEQ ID NO: 100 | 8880 |
| PN165 | CDR | PRT | US20140227267A1; SEQ ID NO: 66 | 8881 |
| PN166 | CDR | PRT | US20140227267A1; SEQ ID NO: 64 | 8882 |
| PN167 | CDR | PRT | US20140227267A1; SEQ ID NO: 82 | 8883 |
| PN168 | CDR | PRT | US20140227267A1; SEQ ID NO: 72 | 8884 |
| PN169 | CDR | PRT | US20140227267A1; SEQ ID NO: 101 | 8885 |
| PN170 | CDR | PRT | US20140227267A1; SEQ ID NO: 83 | 8886 |
| PN171 | CDR | PRT | US20140227267A1; SEQ ID NO: 84 | 8887 |
| PN172 | CDR | PRT | US20140227267A1; SEQ ID NO: 56 | 8888 |
| PN173 | CDR | PRT | US20140227267A1; SEQ ID NO: 55 | 8889 |
| PN174 | CDR | PRT | US20140227267A1; SEQ ID NO: 53 | 8890 |
| PN175 | CDR | PRT | US20140227267A1; SEQ ID NO: 89 | 8891 |
| PN176 | CDR | PRT | US20140227267A1; SEQ ID NO: 73 | 8892 |
| PN177 | CDR | PRT | US20140227267A1; SEQ ID NO: 48 | 8893 |
| PN178 | CDR | PRT | US20140227267A1; SEQ ID NO: 71 | 8894 |
| PN179 | CDR | PRT | US20140227267A1; SEQ ID NO: 59 | 8895 |
| PN180 | CDR | PRT | US20140227267A1; SEQ ID NO: 60 | 8896 |
| PN181 | CDR | PRT | US20140227267A1; SEQ ID NO: 97 | 8897 |
| PN182 | CDR | PRT | US20140227267A1; SEQ ID NO: 102 | 8898 |
| PN183 | CDR | PRT | US20140227267A1; SEQ ID NO: 96 | 8899 |
| PN184 | CDR | PRT | US20140227267A1; SEQ ID NO: 92 | 8900 |
| PN185 | CDR | PRT | US20140227267A1; SEQ ID NO: 58 | 8901 |
| PN186 | CDR | PRT | US20140227267A1; SEQ ID NO: 95 | 8902 |
| PN187 | CDR | PRT | US20140227267A1; SEQ ID NO: 63 | 8903 |
| PN188 | CDR | PRT | US20140227267A1; SEQ ID NO: 87 | 8904 |
| PN189 | CDR | PRT | US20140227267A1; SEQ ID NO: 52 | 8905 |
| PN190 | CDR | PRT | US20140227267A1; SEQ ID NO: 49 | 8906 |
| PN191 | CDR | PRT | US20140227267A1; SEQ ID NO: 79 | 8907 |
| PN192 | CDR | PRT | US20140227267A1; SEQ ID NO: 98 | 8908 |
| PN193 | CDR | PRT | US20140227267A1; SEQ ID NO: 61 | 8909 |
| PN194 | CDR | PRT | US20140227267A1; SEQ ID NO: 94 | 8910 |
| PN195 | CDR | PRT | US20140227267A1; SEQ ID NO: 54 | 8911 |
| PN196 | CDR | PRT | US20140227267A1; SEQ ID NO: 50 | 8912 |
| PN197 | CDR | PRT | US20140227267A1; SEQ ID NO: 69 | 8913 |
| PN198 | CDR | PRT | US20140227267A1; SEQ ID NO: 93 | 8914 |
| PN199 | CDR | PRT | US20140227267A1; SEQ ID NO: 51 | 8915 |
| PN200 | CDR | PRT | US20140227267A1; SEQ ID NO: 85 | 8916 |
| PN201 | CDR | PRT | US20140227267A1; SEQ ID NO: 90 | 8917 |
| PN202 | CDR | PRT | US20140227267A1; SEQ ID NO: 86 | 8918 |
| PN203 | CDR | PRT | US20140227267A1; SEQ ID NO: 91 | 8919 |
| PN204 | CDR | PRT | US20140227267A1; SEQ ID NO: 57 | 8920 |
| PN205 | CDR | PRT | US20140227267A1; SEQ ID NO: 74 | 8921 |
| PN206 | CDR | PRT | US20140227267A1; SEQ ID NO: 75 | 8922 |
| PN207 | CDR | PRT | US20140227267A1; SEQ ID NO: 88 | 8923 |
| PN208 | CDR | PRT | US20140227267A1; SEQ ID NO: 67 | 8924 |
| PN209 | CDR | PRT | US20160207996A1; SEQ ID NO: 502 | 8925 |
| PN210 | CDR | PRT | US20170306013A1; SEQ ID NO: 386 | 8926 |
| PN211 | CDR | PRT | US20160207996A1; SEQ ID NO: 500 | 8927 |
| PN212 | CDR | PRT | US20160207996A1; SEQ ID NO: 128 | 8928 |
| PN213 | CDR | PRT | US20160207996A1; SEQ ID NO: 289 | 8929 |
| PN214 | CDR | PRT | US20160207996A1; SEQ ID NO: 143 | 8930 |
| PN215 | CDR | PRT | US20160207996A1; SEQ ID NO: 34 | 8931 |
| PN216 | CDR | PRT | US20170306013A1; SEQ ID NO: 334 | 8932 |
| PN217 | CDR | PRT | US20170306013A1; SEQ ID NO: 446 | 8933 |
| PN218 | CDR | PRT | US20160207996A1; SEQ ID NO: 463 | 8934 |
| PN219 | CDR | PRT | US20160207996A1; SEQ ID NO: 102 | 8935 |
| PN220 | CDR | PRT | US20160207996A1; SEQ ID NO: 186 | 8936 |
| PN221 | CDR | PRT | U.S. 10/202,450; SEQ ID NO: 10 | 8937 |
| PN222 | CDR | PRT | US20160207996A1; SEQ ID NO: 293 | 8938 |
| PN223 | CDR | PRT | US20170306013A1; SEQ ID NO: 480 | 8939 |
| PN224 | CDR | PRT | US20180142038A1; SEQ ID NO: 48 | 8940 |
| PN225 | CDR | PRT | US20160207996A1; SEQ ID NO: 188 | 8941 |
| PN226 | CDR | PRT | US20160207996A1; SEQ ID NO: 553 | 8942 |
| PN227 | CDR | PRT | U.S. 10/112,996; SEQ ID NO: 62 | 8943 |
| PN228 | CDR | PRT | US20180251740A1; SEQ ID NO: 37 | 8944 |
| PN229 | CDR | PRT | US20160207996A1; SEQ ID NO: 480 | 8945 |
| PN230 | CDR | PRT | U.S. 10/112,996; SEQ ID NO: 35 | 8946 |
| PN231 | CDR | PRT | U.S. 10/112,996; SEQ ID NO: 24 | 8947 |
| PN232 | CDR | PRT | US20160207996A1; SEQ ID NO: 505 | 8948 |
| PN233 | CDR | PRT | US20160207996A1; SEQ ID NO: 109 | 8949 |
| PN234 | CDR | PRT | U.S. 10/112,996; SEQ ID NO: 68 | 8950 |
| PN235 | CDR | PRT | U.S. 10/112,996; SEQ ID NO: 14 | 8951 |
| PN236 | CDR | PRT | US20170306013A1; SEQ ID NO: 434 | 8952 |
| PN237 | CDR | PRT | US20180142038A1; SEQ ID NO: 44 | 8953 |
| PN238 | CDR | PRT | US20160207996A1; SEQ ID NO: 504 | 8954 |
| PN239 | CDR | PRT | U.S. 10/112,996; SEQ ID NO: 20 | 8955 |
| PN240 | CDR | PRT | US20160207996A1; SEQ ID NO: 82 | 8956 |
| PN241 | CDR | PRT | U.S. 10/112,996; SEQ ID NO: 72 | 8957 |
| PN242 | CDR | PRT | US20160207996A1; SEQ ID NO: 548 | 8958 |
| PN243 | CDR | PRT | US20160207996A1; SEQ ID NO: 551 | 8959 |
| PN244 | CDR | PRT | US20160207996A1; SEQ ID NO: 145 | 8960 |
| PN245 | CDR | PRT | U.S. 10/112,996; SEQ ID NO: 60 | 8961 |
| PN246 | CDR | PRT | U.S. 10/202,450; SEQ ID NO: 5 | 8962 |
| PN247 | CDR | PRT | US20170306013A1; SEQ ID NO: 431 | 8963 |
| PN248 | CDR | PRT | US20170306013A1; SEQ ID NO: 354 | 8964 |
| PN249 | CDR | PRT | US20170306013A1; SEQ ID NO: 338 | 8965 |
| PN250 | CDR | PRT | US20160207996A1; SEQ ID NO: 53 | 8966 |
| PN251 | CDR | PRT | US20160207996A1; SEQ ID NO: 538 | 8967 |
| PN252 | CDR | PRT | U.S. 10/112,996; SEQ ID NO: 15 | 8968 |
| PN253 | CDR | PRT | US20170306013A1; SEQ ID NO: 402 | 8969 |
| PN254 | CDR | PRT | US20160207996A1; SEQ ID NO: 51 | 8970 |
| PN255 | CDR | PRT | U.S. 10/112,996; SEQ ID NO: 18 | 8971 |
| PN256 | CDR | PRT | US20170306013A1; SEQ ID NO: 479 | 8972 |
| PN257 | CDR | PRT | US20160207996A1; SEQ ID NO: 161 | 8973 |
| PN258 | CDR | PRT | US20160207996A1; SEQ ID NO: 31 | 8974 |
| PN259 | CDR | PRT | US20180142038A1; SEQ ID NO: 168 | 8975 |
| PN260 | CDR | PRT | US20160207996A1; SEQ ID NO: 144 | 8976 |
| PN261 | CDR | PRT | US20160207996A1; SEQ ID NO: 142 | 8977 |
| PN262 | CDR | PRT | US20180251740A1; SEQ ID NO: 39 | 8978 |
| PN263 | CDR | PRT | US20180251740A1; SEQ ID NO: 40 | 8979 |
| PN264 | CDR | PRT | US20160207996A1; SEQ ID NO: 33 | 8980 |
| PN265 | CDR | PRT | US20160207996A1; SEQ ID NO: 163 | 8981 |
| PN266 | CDR | PRT | US20160207996A1; SEQ ID NO: 552 | 8982 |
| PN267 | CDR | PRT | US20160207996A1; SEQ ID NO: 29 | 8983 |
| PN268 | CDR | PRT | US20160207996A1; SEQ ID NO: 28 | 8984 |
| PN269 | CDR | PRT | US20160207996A1; SEQ ID NO: 149 | 8985 |
| PN270 | CDR | PRT | US20160207996A1; SEQ ID NO: 483 | 8986 |
| PN271 | CDR | PRT | US20160207996A1; SEQ ID NO: 147 | 8987 |
| PN272 | CDR | PRT | US20160207996A1; SEQ ID NO: 555 | 8988 |
| PN273 | CDR | PRT | US20170306013A1; SEQ ID NO: 383 | 8989 |
| PN274 | CDR | PRT | U.S. 10/112,996; SEQ ID NO: 6 | 8990 |
| PN275 | CDR | PRT | US20170306013A1; SEQ ID NO: 335 | 8991 |
| PN276 | CDR | PRT | US20170306013A1; SEQ ID NO: 415 | 8992 |
| PN277 | CDR | PRT | US20160207996A1; SEQ ID NO: 107 | 8993 |
| PN278 | CDR | PRT | US20170306013A1; SEQ ID NO: 482 | 8994 |
| PN279 | CDR | PRT | US20160207996A1; SEQ ID NO: 62 | 8995 |
| PN280 | CDR | PRT | US20160207996A1; SEQ ID NO: 509 | 8996 |
| PN281 | CDR | PRT | U.S. 10/112,996; SEQ ID NO: 23 | 8997 |
| PN282 | CDR | PRT | U.S. 10/112,996; SEQ ID NO: 17 | 8998 |
| PN283 | CDR | PRT | US20160207996A1; SEQ ID NO: 120 | 8999 |
| PN284 | CDR | PRT | US20170306013A1; SEQ ID NO: 337 | 9000 |
| PN285 | CDR | PRT | U.S. 10/112,996; SEQ ID NO: 59 | 9001 |
| PN286 | CDR | PRT | U.S. 10/112,996; SEQ ID NO: 71 | 9002 |
| PN287 | CDR | PRT | U.S. 10/112,996; SEQ ID NO: 65 | 9003 |
| PN288 | CDR | PRT | US20170306013A1; SEQ ID NO: 401 | 9004 |
| PN289 | CDR | PRT | US20170306013A1; SEQ ID NO: 417 | 9005 |
| PN290 | CDR | PRT | US20170306013A1; SEQ ID NO: 433 | 9006 |
| PN291 | CDR | PRT | U.S. 10/202,450; SEQ ID NO: 9 | 9007 |
| PN292 | CDR | PRT | US20170306013A1; SEQ ID NO: 385 | 9008 |
| PN293 | CDR | PRT | US20170306013A1; SEQ ID NO: 481 | 9009 |
| PN294 | CDR | PRT | US20160207996A1; SEQ ID NO: 168 | 9010 |
| PN295 | CDR | PRT | US20160207996A1; SEQ ID NO: 172 | 9011 |
| PN296 | CDR | PRT | US20160207996A1; SEQ ID NO: 167 | 9012 |
| PN297 | CDR | PRT | US20160207996A1; SEQ ID NO: 164 | 9013 |
| PN298 | CDR | PRT | US20160207996A1; SEQ ID NO: 165 | 9014 |
| PN299 | CDR | PRT | US20160207996A1; SEQ ID NO: 531 | 9015 |
| PN300 | CDR | PRT | US20160207996A1; SEQ ID NO: 534 | 9016 |
| PN301 | CDR | PRT | US20160207996A1; SEQ ID NO: 533 | 9017 |
| PN302 | CDR | PRT | U.S. 10/112,996; SEQ ID NO: 32 | 9018 |
| PN303 | CDR | PRT | U.S. 10/112,996; SEQ ID NO: 2 | 9019 |
| PN304 | CDR | PRT | US20160207996A1; SEQ ID NO: 67 | 9020 |
| PN305 | CDR | PRT | US20160207996A1; SEQ ID NO: 54 | 9021 |
| PN306 | CDR | PRT | US20160207996A1; SEQ ID NO: 47 | 9022 |
| PN307 | CDR | PRT | US20160207996A1; SEQ ID NO: 48 | 9023 |
| PN308 | CDR | PRT | US20160207996A1; SEQ ID NO: 46 | 9024 |
| PN309 | CDR | PRT | US20160207996A1; SEQ ID NO: 530 | 9025 |
| PN310 | CDR | PRT | US20160207996A1; SEQ ID NO: 169 | 9026 |
| PN311 | CDR | PRT | US20160207996A1; SEQ ID NO: 170 | 9027 |
| PN312 | CDR | PRT | US20170306013A1; SEQ ID NO: 406 | 9028 |
| PN313 | CDR | PRT | US20170306013A1; SEQ ID NO: 502 | 9029 |
| PN314 | CDR | PRT | US20160207996A1; SEQ ID NO: 457 | 9030 |
| PN315 | CDR | PRT | US20180142038A1; SEQ ID NO: 106 | 9031 |
| PN316 | CDR | PRT | US20180142038A1; SEQ ID NO: 66 | 9032 |
| PN317 | CDR | PRT | US20180142038A1; SEQ ID NO: 186 | 9033 |
| PN318 | CDR | PRT | U.S. 10/112,996; SEQ ID NO: 21 | 9034 |
| PN319 | CDR | PRT | U.S. 10/112,996; SEQ ID NO: 27 | 9035 |
| PN320 | CDR | PRT | US20170306013A1; SEQ ID NO: 534 | 9036 |
| PN321 | CDR | PRT | US20170306013A1; SEQ ID NO: 374 | 9037 |
| PN322 | CDR | PRT | US20160207996A1; SEQ ID NO: 477 | 9038 |
| PN323 | CDR | PRT | US20160207996A1; SEQ ID NO: 462 | 9039 |
| PN324 | CDR | PRT | US20170306013A1; SEQ ID NO: 504 | 9040 |
| PN325 | CDR | PRT | U.S. 10/202,450; SEQ ID NO: 11 | 9041 |
| PN326 | CDR | PRT | US20170306013A1; SEQ ID NO: 376 | 9042 |
| PN327 | CDR | PRT | US20170306013A1; SEQ ID NO: 344 | 9043 |
| PN328 | CDR | PRT | US20170306013A1; SEQ ID NO: 408 | 9044 |
| PN329 | CDR | PRT | US20170306013A1; SEQ ID NO: 552 | 9045 |
| PN330 | CDR | PRT | US20160207996A1; SEQ ID NO: 511 | 9046 |
| PN331 | CDR | PRT | US20160207996A1; SEQ ID NO: 455 | 9047 |
| PN332 | CDR | PRT | U.S. 10/112,996; SEQ ID NO: 29 | 9048 |
| PN333 | CDR | PRT | US20160207996A1; SEQ ID NO: 100 | 9049 |
| PN334 | CDR | PRT | U.S. Pat. No. 8,986,694; SEQ ID NO: 115 | 9050 |
| PN335 | CDR | PRT | US20160207996A1; SEQ ID NO: 12 | 9051 |
| PN336 | CDR | PRT | US20180142038A1; SEQ ID NO: 4 | 9052 |
| PN337 | CDR | PRT | US20160207996A1; SEQ ID NO: 465 | 9053 |
| PN338 | CDR | PRT | US20160207996A1; SEQ ID NO: 458 | 9054 |
| PN339 | CDR | PRT | US20160207996A1; SEQ ID NO: 11 | 9055 |
| PN340 | CDR | PRT | US20160207996A1; SEQ ID NO: 13 | 9056 |
| PN341 | CDR | PRT | US20160207996A1; SEQ ID NO: 506 | 9057 |
| PN342 | CDR | PRT | US20180142038A1; SEQ ID NO: 184 | 9058 |
| PN343 | CDR | PRT | U.S. 10/112,996; SEQ ID NO: 1 | 9059 |
| PN344 | CDR | PRT | U.S. 10/112,996; SEQ ID NO: 7 | 9060 |
| PN345 | CDR | PRT | U.S. 10/112,996; SEQ ID NO: 31 | 9061 |
| PN346 | CDR | PRT | US20180142038A1; SEQ ID NO: 24 | 9062 |
| PN347 | CDR | PRT | US20160207996A1; SEQ ID NO: 162 | 9063 |
| PN348 | CDR | PRT | U.S. 10/112,996; SEQ ID NO: 55 | 9064 |
| PN349 | CDR | PRT | U.S. 10/112,996; SEQ ID NO: 19 | 9065 |
| PN350 | CDR | PRT | U.S. 10/112,996; SEQ ID NO: 73 | 9066 |
| PN351 | CDR | PRT | US20160207996A1; SEQ ID NO: 213 | 9067 |
| PN352 | CDR | PRT | U.S. 10/202,450; SEQ ID NO: 7 | 9068 |
| PN353 | CDR | PRT | US20170306013A1; SEQ ID NO: 389 | 9069 |
| PN354 | CDR | PRT | US20170306013A1; SEQ ID NO: 421 | 9070 |
| PN355 | CDR | PRT | US20180142038A1; SEQ ID NO: 28 | 9071 |
| PN356 | CDR | PRT | US20180142038A1; SEQ ID NO: 108 | 9072 |
| PN357 | CDR | PRT | US20180142038A1; SEQ ID NO: 68 | 9073 |
| PN358 | CDR | PRT | U.S. 10/112,996; SEQ ID NO: 63 | 9074 |
| PN359 | CDR | PRT | U.S. 10/112,996; SEQ ID NO: 69 | 9075 |
| PN360 | CDR | PRT | U.S. 10/112,996; SEQ ID NO: 57 | 9076 |
| PN361 | CDR | PRT | US20160207996A1; SEQ ID NO: 166 | 9077 |
| PN362 | CDR | PRT | US20160207996A1; SEQ ID NO: 535 | 9078 |
| PN363 | CDR | PRT | US20170306013A1; SEQ ID NO: 485 | 9079 |
| PN364 | CDR | PRT | US20180142038A1; SEQ ID NO: 148 | 9080 |
| PN365 | CDR | PRT | US20160207996A1; SEQ ID NO: 49 | 9081 |
| PN366 | CDR | PRT | US20160207996A1; SEQ ID NO: 50 | 9082 |
| PN367 | CDR | PRT | US20160207996A1; SEQ ID NO: 564 | 9083 |
| PN368 | CDR | PRT | US20160207996A1; SEQ ID NO: 77 | 9084 |
| PN369 | CDR | PRT | US20160207996A1; SEQ ID NO: 78 | 9085 |
| PN370 | CDR | PRT | U.S. 10/112,996; SEQ ID NO: 3 | 9086 |
| PN371 | CDR | PRT | US20160207996A1; SEQ ID NO: 84 | 9087 |
| PN372 | CDR | PRT | U.S. 10/112,996; SEQ ID NO: 9 | 9088 |
| PN373 | CDR | PRT | U.S. Pat. No. 8,986,694; SEQ ID NO: 113 | 9089 |
| PN374 | CDR | PRT | US20160207996A1; SEQ ID NO: 563 | 9090 |
| PN375 | CDR | PRT | US20170306013A1; SEQ ID NO: 488 | 9091 |
| PN376 | CDR | PRT | US20170306013A1; SEQ ID NO: 392 | 9092 |
| PN377 | CDR | PRT | US20160207996A1; SEQ ID NO: 205 | 9093 |
| PN378 | CDR | PRT | US20160207996A1; SEQ ID NO: 80 | 9094 |
| PN379 | CDR | PRT | US20160207996A1; SEQ ID NO: 571 | 9095 |
| PN380 | CDR | PRT | US20160207996A1; SEQ ID NO: 79 | 9096 |
| PN381 | CDR | PRT | US20170306013A1; SEQ ID NO: 501 | 9097 |
| PN382 | CDR | PRT | US20170306013A1; SEQ ID NO: 469 | 9098 |
| PN383 | CDR | PRT | US20170306013A1; SEQ ID NO: 341 | 9099 |
| PN384 | CDR | PRT | US20170306013A1; SEQ ID NO: 373 | 9100 |
| PN385 | CDR | PRT | US20170306013A1; SEQ ID NO: 405 | 9101 |
| PN386 | CDR | PRT | US20170306013A1; SEQ ID NO: 437 | 9102 |
| PN387 | CDR | PRT | US20160207996A1; SEQ ID NO: 566 | 9103 |
| PN388 | CDR | PRT | US20160207996A1; SEQ ID NO: 209 | 9104 |
| PN389 | CDR | PRT | U.S. 10/112,996; SEQ ID NO: 13 | 9105 |
| PN390 | CDR | PRT | US20180142038A1; SEQ ID NO: 64 | 9106 |
| PN391 | CDR | PRT | US20180142038A1; SEQ ID NO: 104 | 9107 |
| PN392 | CDR | PRT | US20180142038A1; SEQ ID NO: 144 | 9108 |
| PN393 | CDR | PRT | U.S. 10/112,996; SEQ ID NO: 25 | 9109 |
| PN394 | CDR | PRT | US20160207996A1; SEQ ID NO: 576 | 9110 |
| PN395 | CDR | PRT | U.S. 10/112,996; SEQ ID NO: 75 | 9111 |
| PN396 | CDR | PRT | US20160207996A1; SEQ ID NO: 192 | 9112 |
| PN397 | CDR | PRT | US20160207996A1; SEQ ID NO: 189 | 9113 |
| PN398 | CDR | PRT | US20160207996A1; SEQ ID NO: 187 | 9114 |
| PN399 | CDR | PRT | US20160207996A1; SEQ ID NO: 550 | 9115 |
| PN400 | CDR | PRT | US20160207996A1; SEQ ID NO: 549 | 9116 |
| PN401 | CDR | PRT | US20160207996A1; SEQ ID NO: 191 | 9117 |
| PN402 | CDR | PRT | US20160207996A1; SEQ ID NO: 185 | 9118 |
| PN403 | CDR | PRT | US20160207996A1; SEQ ID NO: 81 | 9119 |
| PN404 | CDR | PRT | US20160207996A1; SEQ ID NO: 204 | 9120 |
| PN405 | CDR | PRT | US20160207996A1; SEQ ID NO: 83 | 9121 |
| PN406 | CDR | PRT | US20170306013A1; SEQ ID NO: 388 | 9122 |
| PN407 | CDR | PRT | US20170306013A1; SEQ ID NO: 420 | 9123 |
| PN408 | CDR | PRT | US20170306013A1; SEQ ID NO: 484 | 9124 |
| PN409 | CDR | PRT | US20160207996A1; SEQ ID NO: 64 | 9125 |
| PN410 | CDR | PRT | US20180251740A1; SEQ ID NO: 35 | 9126 |
| PN411 | CDR | PRT | US20170306013A1; SEQ ID NO: 399 | 9127 |
| PN412 | CDR | PRT | US20160207996A1; SEQ ID NO: 532 | 9128 |
| PN413 | CDR | PRT | US20160207996A1; SEQ ID NO: 501 | 9129 |
| PN414 | CDR | PRT | US20160207996A1; SEQ ID NO: 124 | 9130 |
| PN415 | CDR | PRT | US20160207996A1; SEQ ID NO: 126 | 9131 |
| PN416 | CDR | PRT | US20160207996A1; SEQ ID NO: 127 | 9132 |
| PN417 | CDR | PRT | US20160207996A1; SEQ ID NO: 473 | 9133 |
| PN418 | CDR | PRT | US20160207996A1; SEQ ID NO: 122 | 9134 |
| PN419 | CDR | PRT | US20160207996A1; SEQ ID NO: 121 | 9135 |
| PN420 | CDR | PRT | US20160207996A1; SEQ ID NO: 123 | 9136 |
| PN421 | CDR | PRT | US20160207996A1; SEQ ID NO: 475 | 9137 |
| PN422 | CDR | PRT | US20160207996A1; SEQ ID NO: 476 | 9138 |
| PN423 | CDR | PRT | US20170306013A1; SEQ ID NO: 416 | 9139 |
| PN424 | CDR | PRT | US20170306013A1; SEQ ID NO: 438 | 9140 |
| PN425 | CDR | PRT | US20170306013A1; SEQ ID NO: 384 | 9141 |
| PN426 | CDR | PRT | US20160207996A1; SEQ ID NO: 474 | 9142 |
| PN427 | CDR | PRT | U.S. 10/112,996; SEQ ID NO: 22 | 9143 |
| PN428 | CDR | PRT | U.S. 10/112,996; SEQ ID NO: 4 | 9144 |
| PN429 | CDR | PRT | US20160207996A1; SEQ ID NO: 30 | 9145 |
| PN430 | CDR | PRT | US20170306013A1; SEQ ID NO: 500 | 9146 |
| PN431 | CDR | PRT | US20170306013A1; SEQ ID NO: 468 | 9147 |
| PN432 | CDR | PRT | US20170306013A1; SEQ ID NO: 340 | 9148 |
| PN433 | CDR | PRT | US20170306013A1; SEQ ID NO: 372 | 9149 |
| PN434 | CDR | PRT | US20170306013A1; SEQ ID NO: 404 | 9150 |
| PN435 | CDR | PRT | US20170306013A1; SEQ ID NO: 436 | 9151 |
| PN436 | CDR | PRT | US20170306013A1; SEQ ID NO: 548 | 9152 |
| PN437 | CDR | PRT | US20160207996A1; SEQ ID NO: 461 | 9153 |
| PN438 | CDR | PRT | US20160207996A1; SEQ ID NO: 184 | 9154 |
| PN439 | CDR | PRT | US20160207996A1; SEQ ID NO: 453 | 9155 |
| PN440 | CDR | PRT | US20160207996A1; SEQ ID NO: 182 | 9156 |
| PN441 | CDR | PRT | US20160207996A1; SEQ ID NO: 108 | 9157 |
| PN442 | CDR | PRT | US20160207996A1; SEQ ID NO: 103 | 9158 |
| PN443 | CDR | PRT | US20180142038A1; SEQ ID NO: 128 | 9159 |
| PN444 | CDR | PRT | US20160207996A1; SEQ ID NO: 510 | 9160 |
| PN445 | CDR | PRT | US20160207996A1; SEQ ID NO: 452 | 9161 |
| PN446 | CDR | PRT | U.S. 10/112,996; SEQ ID NO: 36 | 9162 |
| PN447 | CDR | PRT | US20180142038A1; SEQ ID NO: 124 | 9163 |
| PN448 | CDR | PRT | US20160207996A1; SEQ ID NO: 478 | 9164 |
| PN449 | CDR | PRT | US20170306013A1; SEQ ID NO: 432 | 9165 |
| PN450 | CDR | PRT | US20160207996A1; SEQ ID NO: 507 | 9166 |
| PN451 | CDR | PRT | US20160207996A1; SEQ ID NO: 105 | 9167 |
| PN452 | CDR | PRT | US20170306013A1; SEQ ID NO: 478 | 9168 |
| PN453 | CDR | PRT | US20160207996A1; SEQ ID NO: 572 | 9169 |
| PN454 | CDR | PRT | US20160207996A1; SEQ ID NO: 104 | 9170 |
| PN455 | CDR | PRT | US20160207996A1; SEQ ID NO: 456 | 9171 |
| PN456 | CDR | PRT | U.S. 10/112,996; SEQ ID NO: 76 | 9172 |
| PN457 | CDR | PRT | US20160207996A1; SEQ ID NO: 66 | 9173 |
| PN458 | CDR | PRT | U.S. 10/112,996; SEQ ID NO: 34 | 9174 |
| PN459 | CDR | PRT | US20160207996A1; SEQ ID NO: 464 | 9175 |
| PN460 | CDR | PRT | US20160207996A1; SEQ ID NO: 8 | 9176 |
| PN461 | CDR | PRT | US20180142038A1; SEQ ID NO: 188 | 9177 |
| PN462 | CDR | PRT | US20170306013A1; SEQ ID NO: 382 | 9178 |
| PN463 | CDR | PRT | US20160207996A1; SEQ ID NO: 536 | 9179 |
| PN464 | CDR | PRT | US20160207996A1; SEQ ID NO: 148 | 9180 |
| PN465 | CDR | PRT | US20170306013A1; SEQ ID NO: 398 | 9181 |
| PN466 | CDR | PRT | US20160207996A1; SEQ ID NO: 10 | 9182 |
| PN467 | CDR | PRT | US20160207996A1; SEQ ID NO: 101 | 9183 |
| PN468 | CDR | PRT | US20160207996A1; SEQ ID NO: 183 | 9184 |
| PN469 | CDR | PRT | US20160207996A1; SEQ ID NO: 472 | 9185 |
| PN470 | CDR | PRT | US20160207996A1; SEQ ID NO: 460 | 9186 |
| PN471 | CDR | PRT | US20170306013A1; SEQ ID NO: 414 | 9187 |
| PN472 | CDR | PRT | US20170306013A1; SEQ ID NO: 430 | 9188 |
| PN473 | CDR | PRT | US20160207996A1; SEQ ID NO: 512 | 9189 |
| PN474 | CDR | PRT | US20160207996A1; SEQ ID NO: 18 | 9190 |
| PN475 | CDR | PRT | US20160207996A1; SEQ ID NO: 19 | 9191 |
| PN476 | CDR | PRT | US20160207996A1; SEQ ID NO: 21 | 9192 |
| PN477 | CDR | PRT | US20160207996A1; SEQ ID NO: 20 | 9193 |
| PN478 | CDR | PRT | US20160207996A1; SEQ ID NO: 291 | 9194 |
| PN479 | CDR | PRT | US20170306013A1; SEQ ID NO: 400 | 9195 |
| PN480 | CDR | PRT | US20160207996A1; SEQ ID NO: 141 | 9196 |
| PN481 | CDR | PRT | U.S. 10/112,996; SEQ ID NO: 78 | 9197 |
| PN482 | CDR | PRT | US20170306013A1; SEQ ID NO: 483 | 9198 |
| PN483 | CDR | PRT | US20170306013A1; SEQ ID NO: 352 | 9199 |
| PN484 | CDR | PRT | US20170306013A1; SEQ ID NO: 592 | 9200 |
| PN485 | CDR | PRT | US20170306013A1; SEQ ID NO: 336 | 9201 |
| PN486 | CDR | PRT | U.S. 10/202,450; SEQ ID NO: 6 | 9202 |
| PN487 | CDR | PRT | US20160207996A1; SEQ ID NO: 503 | 9203 |
| PN488 | CDR | PRT | US20160207996A1; SEQ ID NO: 63 | 9204 |
| PN489 | CDR | PRT | US20160207996A1; SEQ ID NO: 547 | 9205 |
| PN490 | CDR | PRT | U.S. 10/112,996; SEQ ID NO: 5 | 9206 |
| PN491 | CDR | PRT | U.S. 10/112,996; SEQ ID NO: 11 | 9207 |
| PN492 | CDR | PRT | US20180142038A1; SEQ ID NO: 26 | 9208 |
| PN493 | CDR | PRT | U.S. 10/112,996; SEQ ID NO: 30 | 9209 |
| PN494 | CDR | PRT | U.S. 10/112,996; SEQ ID NO: 16 | 9210 |
| PN495 | CR | PRT | US20180251740A1; SEQ ID NO: 29 | 9211 |
| PN496 | CR | PRT | US20180251740A1; SEQ ID NO: 30 | 9212 |
| PN497 | CR | PRT | US20180251740A1; SEQ ID NO: 31 | 9213 |
| PN498 | Fc | PRT | US20140227267A1; SEQ ID NO: 26 | 9214 |
| PN499 | Fc | PRT | US20140227267A1; SEQ ID NO: 25 | 9215 |
| PN500 | Fc | PRT | US20140227267A1; SEQ ID NO: 33 | 9216 |
| PN501 | Fc | PRT | US20140227267A1; SEQ ID NO: 29 | 9217 |
| PN502 | Fc | PRT | US20140227267A1; SEQ ID NO: 31 | 9218 |
| PN503 | Fc | PRT | US20140227267A1; SEQ ID NO: 27 | 9219 |
| PN504 | Fc | PRT | US20140227267A1; SEQ ID NO: 21 | 9220 |
| PN505 | Fc | PRT | US20140227267A1; SEQ ID NO: 18 | 9221 |
| PN506 | Fc | PRT | US20140227267A1; SEQ ID NO: 20 | 9222 |
| PN507 | Fc | PRT | US20140227267A1; SEQ ID NO: 19 | 9223 |
| PN508 | Fc | PRT | US20140227267A1; SEQ ID NO: 32 | 9224 |
| PN509 | Fc | PRT | US20140227267A1; SEQ ID NO: 28 | 9225 |
| PN510 | Fc | PRT | US20140227267A1; SEQ ID NO: 30 | 9226 |
| PN511 | Fc | PRT | US20140227267A1; SEQ ID NO: 37 | 9227 |
| PN512 | Fc | PRT | US20140227267A1; SEQ ID NO: 36 | 9228 |
| PN513 | Fc | PRT | US20140227267A1; SEQ ID NO: 35 | 9229 |
| PN514 | Fc | PRT | US20140227267A1; SEQ ID NO: 34 | 9230 |
| PN515 | Fc | PRT | US20140227267A1; SEQ ID NO: 46 | 9231 |
| PN516 | Fc | PRT | US20140227267A1; SEQ ID NO: 47 | 9232 |
| PN517 | Fc | PRT | US20140227267A1; SEQ ID NO: 38 | 9233 |
| PN518 | Fc | PRT | US20140227267A1; SEQ ID NO: 39 | 9234 |
| PN519 | Fc | PRT | US20140227267A1; SEQ ID NO: 40 | 9235 |
| PN520 | Fc | PRT | US20140227267A1; SEQ ID NO: 41 | 9236 |
| PN521 | FR | DNA | U.S. Pat. No. 8,992,927; SEQ ID NO: 114 | 9237 |
| PN522 | FR | DNA | US20180142038A1; SEQ ID NO: 193 | 9238 |
| PN523 | FR | DNA | US20180142038A1; SEQ ID NO: 73 | 9239 |
| PN524 | FR | DNA | US20180142038A1; SEQ ID NO: 173 | 9240 |
| PN525 | FR | DNA | US20180142038A1; SEQ ID NO: 13 | 9241 |
| PN526 | FR | DNA | US20180142038A1; SEQ ID NO: 113 | 9242 |
| PN527 | FR | DNA | US20180142038A1; SEQ ID NO: 133 | 9243 |
| PN528 | FR | DNA | US20180142038A1; SEQ ID NO: 53 | 9244 |
| PN529 | FR | DNA | US20180142038A1; SEQ ID NO: 93 | 9245 |
| PN530 | FR | DNA | US20180142038A1; SEQ ID NO: 17 | 9246 |
| PN531 | FR | DNA | US20180142038A1; SEQ ID NO: 137 | 9247 |
| PN532 | FR | DNA | US20180142038A1; SEQ ID NO: 177 | 9248 |
| PN533 | FR | DNA | US20180142038A1; SEQ ID NO: 97 | 9249 |
| PN534 | FR | DNA | US20180142038A1; SEQ ID NO: 57 | 9250 |
| PN535 | FR | DNA | US20180142038A1; SEQ ID NO: 153 | 9251 |
| PN536 | FR | DNA | US20180142038A1; SEQ ID NO: 33 | 9252 |
| PN537 | FR | DNA | U.S. Pat. No. 8,992,927; SEQ ID NO: 110 | 9253 |
| PN538 | FR | DNA | US20180142038A1; SEQ ID NO: 77 | 9254 |
| PN539 | FR | DNA | US20180142038A1; SEQ ID NO: 37 | 9255 |
| PN540 | FR | DNA | US20180142038A1; SEQ ID NO: 197 | 9256 |
| PN541 | FR | DNA | US20180142038A1; SEQ ID NO: 117 | 9257 |
| PN542 | FR | DNA | US20180142038A1; SEQ ID NO: 157 | 9258 |
| PN543 | FR | DNA | US20180142038A1; SEQ ID NO: 139 | 9259 |
| PN544 | FR | DNA | US20180142038A1; SEQ ID NO: 19 | 9260 |
| PN545 | FR | DNA | US20180142038A1; SEQ ID NO: 179 | 9261 |
| PN546 | FR | DNA | US20180142038A1; SEQ ID NO: 59 | 9262 |
| PN547 | FR | DNA | US20180142038A1; SEQ ID NO: 175 | 9263 |
| PN548 | FR | DNA | US20180142038A1; SEQ ID NO: 55 | 9264 |
| PN549 | FR | DNA | US20180142038A1; SEQ ID NO: 135 | 9265 |
| PN550 | FR | DNA | US20180142038A1; SEQ ID NO: 15 | 9266 |
| PN551 | FR | DNA | US20180142038A1; SEQ ID NO: 95 | 9267 |
| PN552 | FR | DNA | US20180142038A1; SEQ ID NO: 155 | 9268 |
| PN553 | FR | DNA | US20180142038A1; SEQ ID NO: 115 | 9269 |
| PN554 | FR | DNA | US20180142038A1; SEQ ID NO: 195 | 9270 |
| PN555 | FR | DNA | US20180142038A1; SEQ ID NO: 119 | 9271 |
| PN556 | FR | PRT | US20160207996A1; SEQ ID NO: 158 | 9272 |
| PN557 | FR | PRT | US20160207996A1; SEQ ID NO: 159 | 9273 |
| PN558 | FR | PRT | US20160207996A1; SEQ ID NO: 156 | 9274 |
| PN559 | FR | PRT | US20160207996A1; SEQ ID NO: 160 | 9275 |
| PN560 | FR | PRT | US20160207996A1; SEQ ID NO: 154 | 9276 |
| PN561 | FR | PRT | US20160207996A1; SEQ ID NO: 45 | 9277 |
| PN562 | FR | PRT | US20160207996A1; SEQ ID NO: 38 | 9278 |
| PN563 | FR | PRT | US20160207996A1; SEQ ID NO: 39 | 9279 |
| PN564 | FR | PRT | US20160207996A1; SEQ ID NO: 518 | 9280 |
| PN565 | FR | PRT | US20160207996A1; SEQ ID NO: 37 | 9281 |
| PN566 | FR | PRT | US20160207996A1; SEQ ID NO: 523 | 9282 |
| PN567 | FR | PRT | US20180142038A1; SEQ ID NO: 23 | 9283 |
| PN568 | FR | PRT | US20180142038A1; SEQ ID NO: 143 | 9284 |
| PN569 | FR | PRT | US20160207996A1; SEQ ID NO: 520 | 9285 |
| PN570 | FR | PRT | US20160207996A1; SEQ ID NO: 519 | 9286 |
| PN571 | FR | PRT | US20160207996A1; SEQ ID NO: 522 | 9287 |
| PN572 | FR | PRT | U.S. Pat. No. 9,908,942; SEQ ID NO: 3 | 9288 |
| PN573 | FR | PRT | U.S. Pat. No. 9,908,941; SEQ ID NO: 2 | 9289 |
| PN574 | FR | PRT | U.S. Pat. No. 9,908,947; SEQ ID NO: 9 | 9290 |
| PN575 | FR | PRT | U.S. Pat. No. 9,908,944; SEQ ID NO: 5 | 9291 |
| PN576 | FR | PRT | U.S. Pat. No. 9,908,946; SEQ ID NO: 7 | 9292 |
| PN577 | FR | PRT | US20160207996A1; SEQ ID NO: 451 | 9293 |
| PN578 | FR | PRT | US20160207996A1; SEQ ID NO: 449 | 9294 |
| PN579 | FR | PRT | US20160207996A1; SEQ ID NO: 447 | 9295 |
| PN580 | FR | PRT | US20160207996A1; SEQ ID NO: 3 | 9296 |
| PN581 | FR | PRT | US20160207996A1; SEQ ID NO: 90 | 9297 |
| PN582 | FR | PRT | US20160207996A1; SEQ ID NO: 6 | 9298 |
| PN583 | FR | PRT | US20160207996A1; SEQ ID NO: 442 | 9299 |
| PN584 | FR | PRT | U.S. Pat. No. 9,908,940; SEQ ID NO: 1 | 9300 |
| PN585 | FR | PRT | U.S. Pat. No. 9,908,943; SEQ ID NO: 4 | 9301 |
| PN586 | FR | PRT | U.S. Pat. No. 9,908,945; SEQ ID NO: 6 | 9302 |
| PN587 | FR | PRT | US20160207996A1; SEQ ID NO: 7 | 9303 |
| PN588 | FR | PRT | US20160207996A1; SEQ ID NO: 91 | 9304 |
| PN589 | FR | PRT | US20160207996A1; SEQ ID NO: 98 | 9305 |
| PN590 | FR | PRT | US20160207996A1; SEQ ID NO: 443 | 9306 |
| PN591 | FR | PRT | US20160207996A1; SEQ ID NO: 92 | 9307 |
| PN592 | FR | PRT | US20160207996A1; SEQ ID NO: 94 | 9308 |
| PN593 | FR | PRT | US20160207996A1; SEQ ID NO: 97 | 9309 |
| PN594 | FR | PRT | US20160207996A1; SEQ ID NO: 93 | 9310 |
| PN595 | FR | PRT | US20160207996A1; SEQ ID NO: 444 | 9311 |
| PN596 | FR | PRT | US20160207996A1; SEQ ID NO: 446 | 9312 |
| PN597 | FR | PRT | US20160207996A1; SEQ ID NO: 445 | 9313 |
| PN598 | FR | PRT | US20160207996A1; SEQ ID NO: 2 | 9314 |
| PN599 | FR | PRT | US20160207996A1; SEQ ID NO: 220 | 9315 |
| PN600 | FR | PRT | US20160207996A1; SEQ ID NO: 288 | 9316 |
| PN601 | FR | PRT | US20160207996A1; SEQ ID NO: 89 | 9317 |
| PN602 | FR | PRT | US20180142038A1; SEQ ID NO: 109 | 9318 |
| PN603 | FR | PRT | US20160207996A1; SEQ ID NO: 582 | 9319 |
| PN604 | FR | PRT | US20160207996A1; SEQ ID NO: 216 | 9320 |
| PN605 | FR | PRT | US20160207996A1; SEQ ID NO: 217 | 9321 |
| PN606 | FR | PRT | US20160207996A1; SEQ ID NO: 578 | 9322 |
| PN607 | FR | PRT | US20160207996A1; SEQ ID NO: 577 | 9323 |
| PN608 | FR | PRT | US20160207996A1; SEQ ID NO: 85 | 9324 |
| PN609 | FR | PRT | US20160207996A1; SEQ ID NO: 580 | 9325 |
| PN610 | FR | PRT | US20160207996A1; SEQ ID NO: 579 | 9326 |
| PN611 | FR | PRT | US20160207996A1; SEQ ID NO: 74 | 9327 |
| PN612 | FR | PRT | US20160207996A1; SEQ ID NO: 69 | 9328 |
| PN613 | FR | PRT | US20160207996A1; SEQ ID NO: 71 | 9329 |
| PN614 | FR | PRT | US20160207996A1; SEQ ID NO: 560 | 9330 |
| PN615 | FR | PRT | US20160207996A1; SEQ ID NO: 73 | 9331 |
| PN616 | FR | PRT | US20160207996A1; SEQ ID NO: 75 | 9332 |
| PN617 | FR | PRT | US20160207996A1; SEQ ID NO: 557 | 9333 |
| PN618 | FR | PRT | US20160207996A1; SEQ ID NO: 198 | 9334 |
| PN619 | FR | PRT | US20160207996A1; SEQ ID NO: 72 | 9335 |
| PN620 | FR | PRT | US20160207996A1; SEQ ID NO: 562 | 9336 |
| PN621 | FR | PRT | US20160207996A1; SEQ ID NO: 70 | 9337 |
| PN622 | FR | PRT | US20160207996A1; SEQ ID NO: 76 | 9338 |
| PN623 | FR | PRT | US20160207996A1; SEQ ID NO: 556 | 9339 |
| PN624 | FR | PRT | US20160207996A1; SEQ ID NO: 561 | 9340 |
| PN625 | FR | PRT | US20160207996A1; SEQ ID NO: 203 | 9341 |
| PN626 | FR | PRT | US20160207996A1; SEQ ID NO: 202 | 9342 |
| PN627 | FR | PRT | US20160207996A1; SEQ ID NO: 199 | 9343 |
| PN628 | FR | PRT | US20160207996A1; SEQ ID NO: 201 | 9344 |
| PN629 | FR | PRT | US20160207996A1; SEQ ID NO: 558 | 9345 |
| PN630 | FR | PRT | US20160207996A1; SEQ ID NO: 196 | 9346 |
| PN631 | FR | PRT | US20160207996A1; SEQ ID NO: 200 | 9347 |
| PN632 | FR | PRT | US20160207996A1; SEQ ID NO: 197 | 9348 |
| PN633 | FR | PRT | US20160207996A1; SEQ ID NO: 559 | 9349 |
| PN634 | FR | PRT | US20180142038A1; SEQ ID NO: 27 | 9350 |
| PN635 | FR | PRT | US20180142038A1; SEQ ID NO: 67 | 9351 |
| PN636 | FR | PRT | US20180142038A1; SEQ ID NO: 187 | 9352 |
| PN637 | FR | PRT | US20160207996A1; SEQ ID NO: 194 | 9353 |
| PN638 | FR | PRT | US20160207996A1; SEQ ID NO: 195 | 9354 |
| PN639 | FR | PRT | US20180142038A1; SEQ ID NO: 107 | 9355 |
| PN640 | FR | PRT | US20180142038A1; SEQ ID NO: 147 | 9356 |
| PN641 | FR | PRT | US20160207996A1; SEQ ID NO: 493 | 9357 |
| PN642 | FR | PRT | U.S. Pat. No. 8,992,927; SEQ ID NO: 111 | 9358 |
| PN643 | FR | PRT | US20160207996A1; SEQ ID NO: 528 | 9359 |
| PN644 | FR | PRT | US20160207996A1; SEQ ID NO: 41 | 9360 |
| PN645 | FR | PRT | US20180142038A1; SEQ ID NO: 183 | 9361 |
| PN646 | FR | PRT | US20160207996A1; SEQ ID NO: 525 | 9362 |
| PN647 | FR | PRT | US20160207996A1; SEQ ID NO: 529 | 9363 |
| PN648 | FR | PRT | US20160207996A1; SEQ ID NO: 40 | 9364 |
| PN649 | FR | PRT | US20160207996A1; SEQ ID NO: 43 | 9365 |
| PN650 | FR | PRT | US20180142038A1; SEQ ID NO: 3 | 9366 |
| PN651 | FR | PRT | US20160207996A1; SEQ ID NO: 4 | 9367 |
| PN652 | FR | PRT | US20160207996A1; SEQ ID NO: 99 | 9368 |
| PN653 | FR | PRT | US20160207996A1; SEQ ID NO: 157 | 9369 |
| PN654 | FR | PRT | US20180142038A1; SEQ ID NO: 163 | 9370 |
| PN655 | FR | PRT | US20180142038A1; SEQ ID NO: 123 | 9371 |
| PN656 | FR | PRT | US20180142038A1; SEQ ID NO: 43 | 9372 |
| PN657 | FR | PRT | US20180142038A1; SEQ ID NO: 83 | 9373 |
| PN658 | FR | PRT | US20160207996A1; SEQ ID NO: 155 | 9374 |
| PN659 | FR | PRT | US20180142038A1; SEQ ID NO: 63 | 9375 |
| PN660 | FR | PRT | US20180142038A1; SEQ ID NO: 103 | 9376 |
| PN661 | FR | PRT | US20160207996A1; SEQ ID NO: 448 | 9377 |
| PN662 | FR | PRT | US20160207996A1; SEQ ID NO: 5 | 9378 |
| PN663 | FR | PRT | US20160207996A1; SEQ ID NO: 450 | 9379 |
| PN664 | FR | PRT | US20160207996A1; SEQ ID NO: 1 | 9380 |
| PN665 | FR | PRT | US20160207996A1; SEQ ID NO: 219 | 9381 |
| PN666 | FR | PRT | US20160207996A1; SEQ ID NO: 218 | 9382 |
| PN667 | FR | PRT | US20180142038A1; SEQ ID NO: 47 | 9383 |
| PN668 | FR | PRT | US20180142038A1; SEQ ID NO: 87 | 9384 |
| PN669 | FR | PRT | US20180142038A1; SEQ ID NO: 127 | 9385 |
| PN670 | FR | PRT | US20180142038A1; SEQ ID NO: 167 | 9386 |
| PN671 | FR | PRT | US20160207996A1; SEQ ID NO: 494 | 9387 |
| PN672 | FR | PRT | US20160207996A1; SEQ ID NO: 499 | 9388 |
| PN673 | FR | PRT | US20160207996A1; SEQ ID NO: 22 | 9389 |
| PN674 | FR | PRT | US20160207996A1; SEQ ID NO: 498 | 9390 |
| PN675 | FR | PRT | US20160207996A1; SEQ ID NO: 23 | 9391 |
| PN676 | FR | PRT | US20160207996A1; SEQ ID NO: 27 | 9392 |
| PN677 | FR | PRT | US20160207996A1; SEQ ID NO: 486 | 9393 |
| PN678 | FR | PRT | US20160207996A1; SEQ ID NO: 497 | 9394 |
| PN679 | FR | PRT | US20160207996A1; SEQ ID NO: 139 | 9395 |
| PN680 | FR | PRT | US20160207996A1; SEQ ID NO: 193 | 9396 |
| PN681 | FR | PRT | US20180142038A1; SEQ ID NO: 7 | 9397 |
| PN682 | FR | PRT | US20160207996A1; SEQ ID NO: 24 | 9398 |
| PN683 | FR | PRT | US20160207996A1; SEQ ID NO: 496 | 9399 |
| PN684 | FR | PRT | US20160207996A1; SEQ ID NO: 26 | 9400 |
| PN685 | FR | PRT | US20160207996A1; SEQ ID NO: 25 | 9401 |
| PN686 | FR | PRT | US20160207996A1; SEQ ID NO: 131 | 9402 |
| PN687 | FR | PRT | US20160207996A1; SEQ ID NO: 130 | 9403 |
| PN688 | FR | PRT | US20160207996A1; SEQ ID NO: 292 | 9404 |
| PN689 | FR | PRT | US20160207996A1; SEQ ID NO: 492 | 9405 |
| PN690 | FR | PRT | US20160207996A1; SEQ ID NO: 135 | 9406 |
| PN691 | FR | PRT | US20160207996A1; SEQ ID NO: 488 | 9407 |
| PN692 | FR | PRT | US20160207996A1; SEQ ID NO: 487 | 9408 |
| PN693 | FR | PRT | US20160207996A1; SEQ ID NO: 133 | 9409 |
| PN694 | FR | PRT | US20160207996A1; SEQ ID NO: 490 | 9410 |
| PN695 | FR | PRT | US20160207996A1; SEQ ID NO: 138 | 9411 |
| PN696 | FR | PRT | US20160207996A1; SEQ ID NO: 132 | 9412 |
| PN697 | FR | PRT | US20160207996A1; SEQ ID NO: 491 | 9413 |
| PN698 | FR | PRT | US20160207996A1; SEQ ID NO: 489 | 9414 |
| PN699 | FR | PRT | US20160207996A1; SEQ ID NO: 137 | 9415 |
| PN700 | FR | PRT | US20160207996A1; SEQ ID NO: 134 | 9416 |
| PN701 | FR | PRT | US20160207996A1; SEQ ID NO: 136 | 9417 |
| PN702 | FR | PRT | US20160207996A1; SEQ ID NO: 527 | 9418 |
| PN703 | FR | PRT | US20160207996A1; SEQ ID NO: 521 | 9419 |
| PN704 | FR | PRT | US20160207996A1; SEQ ID NO: 526 | 9420 |
| PN705 | FR | PRT | US20160207996A1; SEQ ID NO: 44 | 9421 |
| PN706 | FR | PRT | US20160207996A1; SEQ ID NO: 42 | 9422 |
| PN707 | FR | PRT | US20160207996A1; SEQ ID NO: 153 | 9423 |
| PN708 | FR | PRT | US20160207996A1; SEQ ID NO: 524 | 9424 |
| PN709 | FR | PRT | US20180142038A1; SEQ ID NO: 185 | 9425 |
| PN710 | FR | PRT | US20160207996A1; SEQ ID NO: 544 | 9426 |
| PN711 | FR | PRT | US20160207996A1; SEQ ID NO: 515 | 9427 |
| PN712 | FR | PRT | US20160207996A1; SEQ ID NO: 150 | 9428 |
| PN713 | FR | PRT | US20180142038A1; SEQ ID NO: 49 | 9429 |
| PN714 | FR | PRT | US20160207996A1; SEQ ID NO: 151 | 9430 |
| PN715 | FR | PRT | US20160207996A1; SEQ ID NO: 152 | 9431 |
| PN716 | FR | PRT | US20160207996A1; SEQ ID NO: 514 | 9432 |
| PN717 | FR | PRT | US20160207996A1; SEQ ID NO: 36 | 9433 |
| PN718 | FR | PRT | US20160207996A1; SEQ ID NO: 110 | 9434 |
| PN719 | FR | PRT | US20160207996A1; SEQ ID NO: 542 | 9435 |
| PN720 | FR | PRT | US20160207996A1; SEQ ID NO: 541 | 9436 |
| PN721 | FR | PRT | US20160207996A1; SEQ ID NO: 177 | 9437 |
| PN722 | FR | PRT | US20160207996A1; SEQ ID NO: 179 | 9438 |
| PN723 | FR | PRT | US20160207996A1; SEQ ID NO: 176 | 9439 |
| PN724 | FR | PRT | US20160207996A1; SEQ ID NO: 468 | 9440 |
| PN725 | FR | PRT | US20160207996A1; SEQ ID NO: 180 | 9441 |
| PN726 | FR | PRT | US20160207996A1; SEQ ID NO: 113 | 9442 |
| PN727 | FR | PRT | US20160207996A1; SEQ ID NO: 112 | 9443 |
| PN728 | FR | PRT | US20180142038A1; SEQ ID NO: 125 | 9444 |
| PN729 | FR | PRT | US20160207996A1; SEQ ID NO: 471 | 9445 |
| PN730 | FR | PRT | US20160207996A1; SEQ ID NO: 469 | 9446 |
| PN731 | FR | PRT | US20180142038A1; SEQ ID NO: 5 | 9447 |
| PN732 | FR | PRT | US20180142038A1; SEQ ID NO: 165 | 9448 |
| PN733 | FR | PRT | US20160207996A1; SEQ ID NO: 470 | 9449 |
| PN734 | FR | PRT | US20160207996A1; SEQ ID NO: 466 | 9450 |
| PN735 | FR | PRT | US20160207996A1; SEQ ID NO: 115 | 9451 |
| PN736 | FR | PRT | US20160207996A1; SEQ ID NO: 467 | 9452 |
| PN737 | FR | PRT | US20160207996A1; SEQ ID NO: 58 | 9453 |
| PN738 | FR | PRT | US20160207996A1; SEQ ID NO: 174 | 9454 |
| PN739 | FR | PRT | US20160207996A1; SEQ ID NO: 543 | 9455 |
| PN740 | FR | PRT | US20160207996A1; SEQ ID NO: 178 | 9456 |
| PN741 | FR | PRT | US20160207996A1; SEQ ID NO: 540 | 9457 |
| PN742 | FR | PRT | US20180142038A1; SEQ ID NO: 145 | 9458 |
| PN743 | FR | PRT | US20160207996A1; SEQ ID NO: 60 | 9459 |
| PN744 | FR | PRT | US20160207996A1; SEQ ID NO: 173 | 9460 |
| PN745 | FR | PRT | US20160207996A1; SEQ ID NO: 546 | 9461 |
| PN746 | FR | PRT | US20160207996A1; SEQ ID NO: 59 | 9462 |
| PN747 | FR | PRT | US20160207996A1; SEQ ID NO: 545 | 9463 |
| PN748 | FR | PRT | US20160207996A1; SEQ ID NO: 56 | 9464 |
| PN749 | FR | PRT | US20160207996A1; SEQ ID NO: 57 | 9465 |
| PN750 | FR | PRT | US20160207996A1; SEQ ID NO: 61 | 9466 |
| PN751 | FR | PRT | US20160207996A1; SEQ ID NO: 539 | 9467 |
| PN752 | FR | PRT | US20160207996A1; SEQ ID NO: 55 | 9468 |
| PN753 | FR | PRT | US20160207996A1; SEQ ID NO: 175 | 9469 |
| PN754 | Full antibody | DNA | US20140227267A1; SEQ ID NO: 3 | 9470 |
| PN755 | Full antibody | DNA | US20140227267A1; SEQ ID NO: 4 | 9471 |
| PN756 | Full antibody | DNA | US20140227267A1; SEQ ID NO: 5 | 9472 |
| PN757 | Full antibody | DNA | US20140227267A1; SEQ ID NO: 6 | 9473 |
| PN758 | Full antibody | DNA | US20140227267A1; SEQ ID NO: 7 | 9474 |
| PN759 | Full antibody | PRT | US20140227267A1; SEQ ID NO: 11 | 9475 |
| PN760 | Full antibody | PRT | US20140227267A1; SEQ ID NO: 10 | 9476 |
| PN761 | Full antibody | PRT | US20140227267A1; SEQ ID NO: 13 | 9477 |
| PN762 | Full antibody | PRT | US20140227267A1; SEQ ID NO: 12 | 9478 |
| PN763 | Full antibody | PRT | US20140227267A1; SEQ ID NO: 14 | 9479 |
| PN764 | HC | DNA | U.S. Pat. No. 8,926,977; SEQ ID NO: 98 | 9480 |
| PN765 | HC | DNA | U.S. Pat. No. 8,926,977; SEQ ID NO: 82 | 9481 |
| PN766 | HC | DNA | U.S. Pat. No. 8,926,977; SEQ ID NO: 74 | 9482 |
| PN767 | HC | DNA | U.S. Pat. No. 8,926,977; SEQ ID NO: 66 | 9483 |
| PN768 | HC | DNA | U.S. Pat. No. 8,926,977; SEQ ID NO: 70 | 9484 |
| PN769 | HC | DNA | U.S. Pat. No. 8,926,977; SEQ ID NO: 90 | 9485 |
| PN770 | HC | DNA | U.S. Pat. No. 8,926,977; SEQ ID NO: 94 | 9486 |
| PN771 | HC | DNA | U.S. Pat. No. 8,926,977; SEQ ID NO: 62 | 9487 |
| PN772 | HC | DNA | U.S. Pat. No. 8,926,977; SEQ ID NO: 78 | 9488 |
| PN773 | HC | DNA | U.S. Pat. No. 8,926,977; SEQ ID NO: 86 | 9489 |
| PN774 | HC | DNA | U.S. Pat. No. 8,986,694; SEQ ID NO: 90 | 9490 |
| PN775 | HC | DNA | US20180142038A1; SEQ ID NO: 171 | 9491 |
| PN776 | HC | DNA | U.S. 10/112,996; SEQ ID NO: 170 | 9492 |
| PN777 | HC | DNA | US20180142038A1; SEQ ID NO: 11 | 9493 |
| PN778 | HC | DNA | US20170306013A1; SEQ ID NO: 458 | 9494 |
| PN779 | HC | DNA | US20140227267A1; SEQ ID NO: 2 | 9495 |
| PN780 | HC | DNA | US20170306013A1; SEQ ID NO: 490 | 9496 |
| PN781 | HC | DNA | US20170306013A1; SEQ ID NO: 346 | 9497 |
| PN782 | HC | DNA | US20170306013A1; SEQ ID NO: 362 | 9498 |
| PN783 | HC | DNA | US20170306013A1; SEQ ID NO: 586 | 9499 |
| PN784 | HC | DNA | US20170306013A1; SEQ ID NO: 538 | 9500 |
| PN785 | HC | DNA | US20170306013A1; SEQ ID NO: 554 | 9501 |
| PN786 | HC | DNA | US20170306013A1; SEQ ID NO: 442 | 9502 |
| PN787 | HC | DNA | US20170306013A1; SEQ ID NO: 506 | 9503 |
| PN788 | HC | DNA | US20170306013A1; SEQ ID NO: 474 | 9504 |
| PN789 | HC | DNA | U.S. Pat. No. 8,986,694; SEQ ID NO: 47 | 9505 |
| PN790 | HC | DNA | US20170306013A1; SEQ ID NO: 378 | 9506 |
| PN791 | HC | DNA | U.S. Pat. No. 8,986,694; SEQ ID NO: 45 | 9507 |
| PN792 | HC | DNA | US20170306013A1; SEQ ID NO: 410 | 9508 |
| PN793 | HC | DNA | U.S. 10/112,996; SEQ ID NO: 142 | 9509 |
| PN794 | HC | DNA | U.S. 10/112,996; SEQ ID NO: 162 | 9510 |
| PN795 | HC | DNA | U.S. 10/112,996; SEQ ID NO: 158 | 9511 |
| PN796 | HC | DNA | U.S. 10/112,996; SEQ ID NO: 138 | 9512 |
| PN797 | HC | DNA | U.S. 10/112,996; SEQ ID NO: 166 | 9513 |
| PN798 | HC | DNA | U.S. 10/112,996; SEQ ID NO: 122 | 9514 |
| PN799 | HC | DNA | U.S. 10/112,996; SEQ ID NO: 130 | 9515 |
| PN800 | HC | DNA | U.S. 10/112,996; SEQ ID NO: 126 | 9516 |
| PN801 | HC | DNA | U.S. 10/112,996; SEQ ID NO: 134 | 9517 |
| PN802 | HC | DNA | US20180142038A1; SEQ ID NO: 131 | 9518 |
| PN803 | HC | DNA | US20180142038A1; SEQ ID NO: 51 | 9519 |
| PN804 | HC | DNA | US20180142038A1; SEQ ID NO: 91 | 9520 |
| PN805 | HC | DNA | U.S. Pat. No. 8,986,694; SEQ ID NO: 84 | 9521 |
| PN806 | HC | DNA | US20170306013A1; SEQ ID NO: 394 | 9522 |
| PN807 | HC | DNA | US20170306013A1; SEQ ID NO: 426 | 9523 |
| PN808 | HC | DNA | U.S. Pat. No. 8,986,694; SEQ ID NO: 86 | 9524 |
| PN809 | HC | DNA | US20180142038A1; SEQ ID NO: 202 | 9525 |
| PN810 | HC | DNA | U.S. Pat. No. 8,986,694; SEQ ID NO: 41 | 9526 |
| PN811 | HC | DNA | U.S. Pat. No. 8,986,694; SEQ ID NO: 43 | 9527 |
| PN812 | HC | DNA | US20180142038A1; SEQ ID NO: 100 | 9528 |
| PN813 | HC | DNA | U.S. Pat. No. 8,986,694; SEQ ID NO: 88 | 9529 |
| PN814 | HC | PRT | U.S. Pat. No. 8,926,977; SEQ ID NO: 100 | 9530 |
| PN815 | HC | PRT | U.S. Pat. No. 8,926,977; SEQ ID NO: 76 | 9531 |
| PN816 | HC | PRT | U.S. Pat. No. 8,926,977; SEQ ID NO: 84 | 9532 |
| PN817 | HC | PRT | U.S. Pat. No. 8,926,977; SEQ ID NO: 68 | 9533 |
| PN818 | HC | PRT | U.S. Pat. No. 8,926,977; SEQ ID NO: 72 | 9534 |
| PN819 | HC | PRT | U.S. Pat. No. 8,926,977; SEQ ID NO: 92 | 9535 |
| PN820 | HC | PRT | U.S. Pat. No. 8,926,977; SEQ ID NO: 96 | 9536 |
| PN821 | HC | PRT | U.S. Pat. No. 8,926,977; SEQ ID NO: 64 | 9537 |
| PN822 | HC | PRT | U.S. Pat. No. 8,926,977; SEQ ID NO: 88 | 9538 |
| PN823 | HC | PRT | U.S. Pat. No. 8,926,977; SEQ ID NO: 80 | 9539 |
| PN824 | HC | PRT | US20170306013A1; SEQ ID NO: 330 | 9540 |
| PN825 | HC | PRT | U.S. Pat. No. 8,986,694; SEQ ID NO: 65 | 9541 |
| PN826 | HC | PRT | US20170306013A1; SEQ ID NO: 602 | 9542 |
| PN827 | HC | PRT | U.S. Pat. No. 8,992,927; SEQ ID NO: 73 | 9543 |
| PN828 | HC | PRT | US20180142038A1; SEQ ID NO: 201 | 9544 |
| PN829 | HC | PRT | U.S. Pat. No. 8,986,694; SEQ ID NO: 61 | 9545 |
| PN830 | HC | PRT | U.S. Pat. No. 8,986,694; SEQ ID NO: 89 | 9546 |
| PN831 | HC | PRT | US20170306013A1; SEQ ID NO: 395 | 9547 |
| PN832 | HC | PRT | U.S. Pat. No. 8,992,927; SEQ ID NO: 71 | 9548 |
| PN833 | HC | PRT | US20170306013A1; SEQ ID NO: 427 | 9549 |
| PN834 | HC | PRT | U.S. Pat. No. 8,986,694; SEQ ID NO: 106 | 9550 |
| PN835 | HC | PRT | U.S. Pat. No. 8,986,694; SEQ ID NO: 85 | 9551 |
| PN836 | HC | PRT | U.S. Pat. No. 8,986,694; SEQ ID NO: 104 | 9552 |
| PN837 | HC | PRT | US20180142038A1; SEQ ID NO: 10 | 9553 |
| PN838 | HC | PRT | U.S. 10/112,996; SEQ ID NO: 172 | 9554 |
| PN839 | HC | PRT | US20180142038A1; SEQ ID NO: 1 | 9555 |
| PN840 | HC | PRT | US20180142038A1; SEQ ID NO: 161 | 9556 |
| PN841 | HC | PRT | US20180142038A1; SEQ ID NO: 121 | 9557 |
| PN842 | HC | PRT | US20180142038A1; SEQ ID NO: 41 | 9558 |
| PN843 | HC | PRT | US20180142038A1; SEQ ID NO: 81 | 9559 |
| PN844 | HC | PRT | U.S. 10/112,996; SEQ ID NO: 164 | 9560 |
| PN845 | HC | PRT | U.S. 10/112,996; SEQ ID NO: 160 | 9561 |
| PN846 | HC | PRT | U.S. 10/112,996; SEQ ID NO: 140 | 9562 |
| PN847 | HC | PRT | U.S. 10/112,996; SEQ ID NO: 136 | 9563 |
| PN848 | HC | PRT | U.S. 10/112,996; SEQ ID NO: 128 | 9564 |
| PN849 | HC | PRT | U.S. 10/112,996; SEQ ID NO: 168 | 9565 |
| PN850 | HC | PRT | U.S. 10/112,996; SEQ ID NO: 132 | 9566 |
| PN851 | HC | PRT | U.S. 10/112,996; SEQ ID NO: 124 | 9567 |
| PN852 | HC | PRT | U.S. 10/112,996; SEQ ID NO: 144 | 9568 |
| PN853 | HC | PRT | US20170306013A1; SEQ ID NO: 507 | 9569 |
| PN854 | HC | PRT | US20170306013A1; SEQ ID NO: 475 | 9570 |
| PN855 | HC | PRT | U.S. 10/072,076; SEQ ID NO: 864 | 9571 |
| PN856 | HC | PRT | US20140227267A1; SEQ ID NO: 9 | 9572 |
| PN857 | HC | PRT | US20170306013A1; SEQ ID NO: 379 | 9573 |
| PN858 | HC | PRT | US20170306013A1; SEQ ID NO: 459 | 9574 |
| PN859 | HC | PRT | US20170306013A1; SEQ ID NO: 347 | 9575 |
| PN860 | HC | PRT | US20170306013A1; SEQ ID NO: 587 | 9576 |
| PN861 | HC | PRT | US20170306013A1; SEQ ID NO: 331 | 9577 |
| PN862 | HC | PRT | US20170306013A1; SEQ ID NO: 363 | 9578 |
| PN863 | HC | PRT | US20170306013A1; SEQ ID NO: 555 | 9579 |
| PN864 | HC | PRT | US20170306013A1; SEQ ID NO: 443 | 9580 |
| PN865 | HC | PRT | US20170306013A1; SEQ ID NO: 411 | 9581 |
| PN866 | HC | PRT | US20170306013A1; SEQ ID NO: 491 | 9582 |
| PN867 | HC | PRT | U.S. Pat. No. 8,992,927; SEQ ID NO: 60 | 9583 |
| PN868 | HC | PRT | U.S. Pat. No. 8,986,694; SEQ ID NO: 91 | 9584 |
| PN869 | LC | DNA | U.S. Pat. No. 8,926,977; SEQ ID NO: 81 | 9585 |
| PN870 | LC | DNA | U.S. Pat. No. 8,926,977; SEQ ID NO: 89 | 9586 |
| PN871 | LC | DNA | U.S. Pat. No. 8,926,977; SEQ ID NO: 61 | 9587 |
| PN872 | LC | DNA | U.S. Pat. No. 8,926,977; SEQ ID NO: 69 | 9588 |
| PN873 | LC | DNA | U.S. Pat. No. 8,926,977; SEQ ID NO: 73 | 9589 |
| PN874 | LC | DNA | U.S. Pat. No. 8,926,977; SEQ ID NO: 85 | 9590 |
| PN875 | LC | DNA | U.S. Pat. No. 8,926,977; SEQ ID NO: 77 | 9591 |
| PN876 | LC | DNA | U.S. Pat. No. 8,926,977; SEQ ID NO: 93 | 9592 |
| PN877 | LC | DNA | U.S. Pat. No. 8,926,977; SEQ ID NO: 97 | 9593 |
| PN878 | LC | DNA | U.S. Pat. No. 8,926,977; SEQ ID NO: 65 | 9594 |
| PN879 | LC | DNA | US20180142038A1; SEQ ID NO: 191 | 9595 |
| PN880 | LC | DNA | U.S. Pat. No. 8,986,694; SEQ ID NO: 55 | 9596 |
| PN881 | LC | DNA | U.S. Pat. No. 8,986,694; SEQ ID NO: 53 | 9597 |
| PN882 | LC | DNA | US20180142038A1; SEQ ID NO: 71 | 9598 |
| PN883 | LC | DNA | US20140227267A1; SEQ ID NO: 1 | 9599 |
| PN884 | LC | DNA | US20180142038A1; SEQ ID NO: 111 | 9600 |
| PN885 | LC | DNA | U.S. Pat. No. 8,986,694; SEQ ID NO: 94 | 9601 |
| PN886 | LC | DNA | U.S. Pat. No. 8,986,694; SEQ ID NO: 49 | 9602 |
| PN887 | LC | DNA | US20180142038A1; SEQ ID NO: 120 | 9603 |
| PN888 | LC | DNA | US20180142038A1; SEQ ID NO: 204 | 9604 |
| PN889 | LC | DNA | U.S. Pat. No. 8,986,694; SEQ ID NO: 98 | 9605 |
| PN890 | LC | DNA | US20170306013A1; SEQ ID NO: 476 | 9606 |
| PN891 | LC | DNA | US20170306013A1; SEQ ID NO: 412 | 9607 |
| PN892 | LC | DNA | US20170306013A1; SEQ ID NO: 380 | 9608 |
| PN893 | LC | DNA | U.S. Pat. No. 8,986,694; SEQ ID NO: 96 | 9609 |
| PN894 | LC | DNA | U.S. 10/112,996; SEQ ID NO: 133 | 9610 |
| PN895 | LC | DNA | US20180142038A1; SEQ ID NO: 151 | 9611 |
| PN896 | LC | DNA | US20180142038A1; SEQ ID NO: 31 | 9612 |
| PN897 | LC | DNA | US20170306013A1; SEQ ID NO: 492 | 9613 |
| PN898 | LC | DNA | US20170306013A1; SEQ ID NO: 428 | 9614 |
| PN899 | LC | DNA | US20170306013A1; SEQ ID NO: 364 | 9615 |
| PN900 | LC | DNA | US20170306013A1; SEQ ID NO: 348 | 9616 |
| PN901 | LC | DNA | US20170306013A1; SEQ ID NO: 556 | 9617 |
| PN902 | LC | DNA | US20170306013A1; SEQ ID NO: 588 | 9618 |
| PN903 | LC | DNA | US20170306013A1; SEQ ID NO: 460 | 9619 |
| PN904 | LC | DNA | US20170306013A1; SEQ ID NO: 524 | 9620 |
| PN905 | LC | DNA | US20170306013A1; SEQ ID NO: 444 | 9621 |
| PN906 | LC | DNA | US20170306013A1; SEQ ID NO: 540 | 9622 |
| PN907 | LC | DNA | US20170306013A1; SEQ ID NO: 396 | 9623 |
| PN908 | LC | DNA | U.S. 10/112,996; SEQ ID NO: 137 | 9624 |
| PN909 | LC | DNA | U.S. 10/112,996; SEQ ID NO: 141 | 9625 |
| PN910 | LC | DNA | U.S. 10/112,996; SEQ ID NO: 161 | 9626 |
| PN911 | LC | DNA | U.S. 10/112,996; SEQ ID NO: 157 | 9627 |
| PN912 | LC | DNA | U.S. 10/112,996; SEQ ID NO: 165 | 9628 |
| PN913 | LC | DNA | U.S. 10/112,996; SEQ ID NO: 129 | 9629 |
| PN914 | LC | DNA | U.S. 10/112,996; SEQ ID NO: 125 | 9630 |
| PN915 | LC | DNA | U.S. 10/112,996; SEQ ID NO: 121 | 9631 |
| PN916 | LC | DNA | U.S. 10/112,996; SEQ ID NO: 169 | 9632 |
| PN917 | LC | DNA | U.S. Pat. No. 8,986,694; SEQ ID NO: 102 | 9633 |
| PN918 | LC | DNA | U.S. Pat. No. 8,986,694; SEQ ID NO: 51 | 9634 |
| PN919 | LC | DNA | U.S. Pat. No. 8,986,694; SEQ ID NO: 100 | 9635 |
| PN920 | LC | DNA | U.S. Pat. No. 8,986,694; SEQ ID NO: 59 | 9636 |
| PN921 | LC | PRT | U.S. Pat. No. 8,926,977; SEQ ID NO: 79 | 9637 |
| PN922 | LC | PRT | U.S. Pat. No. 8,926,977; SEQ ID NO: 71 | 9638 |
| PN923 | LC | PRT | U.S. Pat. No. 8,926,977; SEQ ID NO: 63 | 9639 |
| PN924 | LC | PRT | U.S. Pat. No. 8,926,977; SEQ ID NO: 75 | 9640 |
| PN925 | LC | PRT | U.S. Pat. No. 8,926,977; SEQ ID NO: 87 | 9641 |
| PN926 | LC | PRT | U.S. Pat. No. 8,926,977; SEQ ID NO: 99 | 9642 |
| PN927 | LC | PRT | U.S. Pat. No. 8,926,977; SEQ ID NO: 91 | 9643 |
| PN928 | LC | PRT | U.S. Pat. No. 8,926,977; SEQ ID NO: 67 | 9644 |
| PN929 | LC | PRT | U.S. Pat. No. 8,926,977; SEQ ID NO: 95 | 9645 |
| PN930 | LC | PRT | U.S. Pat. No. 8,926,977; SEQ ID NO: 83 | 9646 |
| PN931 | LC | PRT | U.S. 10/112,996; SEQ ID NO: 139 | 9647 |
| PN932 | LC | PRT | U.S. 10/112,996; SEQ ID NO: 143 | 9648 |
| PN933 | LC | PRT | U.S. 10/112,996; SEQ ID NO: 171 | 9649 |
| PN934 | LC | PRT | U.S. 10/112,996; SEQ ID NO: 131 | 9650 |
| PN935 | LC | PRT | U.S. 10/112,996; SEQ ID NO: 159 | 9651 |
| PN936 | LC | PRT | U.S. 10/112,996; SEQ ID NO: 167 | 9652 |
| PN937 | LC | PRT | U.S. 10/112,996; SEQ ID NO: 163 | 9653 |
| PN938 | LC | PRT | U.S. 10/112,996; SEQ ID NO: 123 | 9654 |
| PN939 | LC | PRT | U.S. 10/112,996; SEQ ID NO: 127 | 9655 |
| PN940 | LC | PRT | U.S. 10/072,076; SEQ ID NO: 866 | 9656 |
| PN941 | LC | PRT | US20170306013A1; SEQ ID NO: 477 | 9657 |
| PN942 | LC | PRT | US20170306013A1; SEQ ID NO: 413 | 9658 |
| PN943 | LC | PRT | US20170306013A1; SEQ ID NO: 381 | 9659 |
| PN944 | LC | PRT | U.S. Pat. No. 8,986,694; SEQ ID NO: 97 | 9660 |
| PN945 | LC | PRT | U.S. Pat. No. 8,986,694; SEQ ID NO: 105 | 9661 |
| PN946 | LC | PRT | US20170306013A1; SEQ ID NO: 525 | 9662 |
| PN947 | LC | PRT | US20170306013A1; SEQ ID NO: 493 | 9663 |
| PN948 | LC | PRT | US20170306013A1; SEQ ID NO: 461 | 9664 |
| PN949 | LC | PRT | US20170306013A1; SEQ ID NO: 589 | 9665 |
| PN950 | LC | PRT | US20170306013A1; SEQ ID NO: 333 | 9666 |
| PN951 | LC | PRT | US20170306013A1; SEQ ID NO: 365 | 9667 |
| PN952 | LC | PRT | US20170306013A1; SEQ ID NO: 445 | 9668 |
| PN953 | LC | PRT | US20170306013A1; SEQ ID NO: 429 | 9669 |
| PN954 | LC | PRT | U.S. 10/112,996; SEQ ID NO: 135 | 9670 |
| PN955 | LC | PRT | US20120263727A1; SEQ ID NO: 15 | 9671 |
| PN956 | LC | PRT | US20180142038A1; SEQ ID NO: 21 | 9672 |
| PN957 | LC | PRT | US20180142038A1; SEQ ID NO: 141 | 9673 |
| PN958 | LC | PRT | US20170306013A1; SEQ ID NO: 397 | 9674 |
| PN959 | LC | PRT | US20170306013A1; SEQ ID NO: 541 | 9675 |
| PN960 | LC | PRT | U.S. Pat. No. 8,986,694; SEQ ID NO: 107 | 9676 |
| PN961 | LC | PRT | U.S. Pat. No. 8,986,694; SEQ ID NO: 52 | 9677 |
| PN962 | LC | PRT | US20180142038A1; SEQ ID NO: 181 | 9678 |
| PN963 | LC | PRT | U.S. Pat. No. 8,992,927; SEQ ID NO: 103 | 9679 |
| PN964 | LC | PRT | US20180251740A1; SEQ ID NO: 20 | 9680 |
| PN965 | LC | PRT | US20180251740A1; SEQ ID NO: 21 | 9681 |
| PN966 | LC | PRT | US20180251740A1; SEQ ID NO: 24 | 9682 |
| PN967 | LC | PRT | US20180251740A1; SEQ ID NO: 26 | 9683 |
| PN968 | LC | PRT | US20180251740A1; SEQ ID NO: 27 | 9684 |
| PN969 | LC | PRT | US20180251740A1; SEQ ID NO: 28 | 9685 |
| PN970 | LC | PRT | US20180251740A1; SEQ ID NO: 22 | 9686 |
| PN971 | LC | PRT | US20180251740A1; SEQ ID NO: 25 | 9687 |
| PN972 | LC | PRT | U.S. Pat. No. 8,986,694; SEQ ID NO: 95 | 9688 |
| PN973 | LC | PRT | US20140227267A1; SEQ ID NO: 8 | 9689 |
| PN974 | LC | PRT | US20180142038A1; SEQ ID NO: 61 | 9690 |
| PN975 | LC | PRT | US20180142038A1; SEQ ID NO: 101 | 9691 |
| PN976 | LC | PRT | US20180142038A1; SEQ ID NO: 110 | 9692 |
| PN977 | LC | PRT | US20180142038A1; SEQ ID NO: 203 | 9693 |
| PN978 | ScFv | PRT | US20160207996A1; SEQ ID NO: 411 | 9694 |
| PN979 | ScFv | PRT | US20160207996A1; SEQ ID NO: 427 | 9695 |
| PN980 | ScFv | PRT | US20160207996A1; SEQ ID NO: 352 | 9696 |
| PN981 | ScFv | PRT | US20160207996A1; SEQ ID NO: 335 | 9697 |
| PN982 | ScFv | PRT | US20160207996A1; SEQ ID NO: 426 | 9698 |
| PN983 | ScFv | PRT | US20160207996A1; SEQ ID NO: 438 | 9699 |
| PN984 | ScFv | PRT | US20160207996A1; SEQ ID NO: 344 | 9700 |
| PN985 | ScFv | PRT | US20160207996A1; SEQ ID NO: 383 | 9701 |
| PN986 | ScFv | PRT | US20160207996A1; SEQ ID NO: 421 | 9702 |
| PN987 | ScFv | PRT | US20160207996A1; SEQ ID NO: 336 | 9703 |
| PN988 | ScFv | PRT | US20160207996A1; SEQ ID NO: 393 | 9704 |
| PN989 | ScFv | PRT | US20160207996A1; SEQ ID NO: 349 | 9705 |
| PN990 | ScFv | PRT | US20160207996A1; SEQ ID NO: 388 | 9706 |
| PN991 | ScFv | PRT | US20160207996A1; SEQ ID NO: 429 | 9707 |
| PN992 | ScFv | PRT | US20160207996A1; SEQ ID NO: 338 | 9708 |
| PN993 | ScFv | PRT | US20160207996A1; SEQ ID NO: 337 | 9709 |
| PN994 | ScFv | PRT | US20160207996A1; SEQ ID NO: 342 | 9719 |
| PN995 | ScFv | PRT | US20160207996A1; SEQ ID NO: 343 | 9711 |
| PN996 | ScFv | PRT | US20160207996A1; SEQ ID NO: 428 | 9712 |
| PN997 | ScFv | PRT | US20160207996A1; SEQ ID NO: 340 | 9713 |
| PN998 | ScFv | PRT | US20160207996A1; SEQ ID NO: 345 | 9714 |
| PN999 | ScFv | PRT | US20160207996A1; SEQ ID NO: 341 | 9715 |
| PN1000 | ScFv | PRT | US20160207996A1; SEQ ID NO: 415 | 9716 |
| PN1001 | ScFv | PRT | US20160207996A1; SEQ ID NO: 414 | 9717 |
| PN1002 | ScFv | PRT | US20160207996A1; SEQ ID NO: 412 | 9718 |
| PN1003 | ScFv | PRT | US20160207996A1; SEQ ID NO: 416 | 9719 |
| PN1004 | ScFv | PRT | US20160207996A1; SEQ ID NO: 420 | 9720 |
| PN1005 | ScFv | PRT | US20160207996A1; SEQ ID NO: 422 | 9721 |
| PN1006 | ScFv | PRT | US20160207996A1; SEQ ID NO: 425 | 9722 |
| PN1007 | ScFv | PRT | US20160207996A1; SEQ ID NO: 378 | 9723 |
| PN1008 | ScFv | PRT | US20160207996A1; SEQ ID NO: 407 | 9724 |
| PN1009 | ScFv | PRT | US20160207996A1; SEQ ID NO: 373 | 9725 |
| PN1010 | ScFv | PRT | US20160207996A1; SEQ ID NO: 372 | 9726 |
| PN1011 | ScFv | PRT | US20160207996A1; SEQ ID NO: 424 | 9727 |
| PN1012 | ScFv | PRT | US20160207996A1; SEQ ID NO: 423 | 9728 |
| PN1013 | ScFv | PRT | US20160207996A1; SEQ ID NO: 370 | 9729 |
| PN1014 | ScFv | PRT | US20160207996A1; SEQ ID NO: 371 | 9730 |
| PN1015 | ScFv | PRT | US20160207996A1; SEQ ID NO: 374 | 9731 |
| PN1016 | ScFv | PRT | US20160207996A1; SEQ ID NO: 375 | 9732 |
| PN1017 | ScFv | PRT | US20160207996A1; SEQ ID NO: 410 | 9733 |
| PN1018 | ScFv | PRT | US20160207996A1; SEQ ID NO: 350 | 9734 |
| PN1019 | ScFv | PRT | US20160207996A1; SEQ ID NO: 329 | 9735 |
| PN1020 | ScFv | PRT | US20160207996A1; SEQ ID NO: 439 | 9736 |
| PN1021 | ScFv | PRT | US20160207996A1; SEQ ID NO: 434 | 9737 |
| PN1022 | ScFv | PRT | US20160207996A1; SEQ ID NO: 382 | 9738 |
| PN1023 | ScFv | PRT | US20160207996A1; SEQ ID NO: 413 | 9739 |
| PN1024 | ScFv | PRT | US20160207996A1; SEQ ID NO: 354 | 9740 |
| PN1025 | ScFv | PRT | US20160207996A1; SEQ ID NO: 333 | 9741 |
| PN1026 | ScFv | PRT | US20160207996A1; SEQ ID NO: 440 | 9742 |
| PN1027 | ScFv | PRT | US20160207996A1; SEQ ID NO: 351 | 9743 |
| PN1028 | ScFv | PRT | US20160207996A1; SEQ ID NO: 385 | 9744 |
| PN1029 | ScFv | PRT | US20160207996A1; SEQ ID NO: 384 | 9745 |
| PN1030 | ScFv | PRT | US20160207996A1; SEQ ID NO: 391 | 9746 |
| PN1031 | ScFv | PRT | US20160207996A1; SEQ ID NO: 332 | 9747 |
| PN1032 | ScFv | PRT | US20160207996A1; SEQ ID NO: 376 | 9748 |
| PN1033 | ScFv | PRT | US20160207996A1; SEQ ID NO: 401 | 9749 |
| PN1034 | ScFv | PRT | US20160207996A1; SEQ ID NO: 377 | 9750 |
| PN1035 | ScFv | PRT | US20160207996A1; SEQ ID NO: 369 | 9751 |
| PN1036 | ScFv | PRT | US20160207996A1; SEQ ID NO: 409 | 9752 |
| PN1037 | ScFv | PRT | US20160207996A1; SEQ ID NO: 389 | 9753 |
| PN1038 | ScFv | PRT | US20160207996A1; SEQ ID NO: 347 | 9754 |
| PN1039 | ScFv | PRT | US20160207996A1; SEQ ID NO: 392 | 9755 |
| PN1040 | ScFv | PRT | US20160207996A1; SEQ ID NO: 346 | 9756 |
| PN1041 | ScFv | PRT | US20160207996A1; SEQ ID NO: 441 | 9757 |
| PN1042 | ScFv | PRT | US20160207996A1; SEQ ID NO: 435 | 9758 |
| PN1043 | ScFv | PRT | US20160207996A1; SEQ ID NO: 432 | 9759 |
| PN1044 | ScFv | PRT | US20160207996A1; SEQ ID NO: 436 | 9760 |
| PN1045 | ScFv | PRT | US20160207996A1; SEQ ID NO: 387 | 9761 |
| PN1046 | ScFv | PRT | US20160207996A1; SEQ ID NO: 386 | 9762 |
| PN1047 | ScFv | PRT | US20160207996A1; SEQ ID NO: 353 | 9763 |
| PN1048 | ScFv | PRT | US20160207996A1; SEQ ID NO: 348 | 9764 |
| PN1049 | ScFv | PRT | US20160207996A1; SEQ ID NO: 334 | 9765 |
| PN1050 | ScFv | PRT | US20160207996A1; SEQ ID NO: 331 | 9766 |
| PN1051 | ScFv | PRT | US20160207996A1; SEQ ID NO: 390 | 9767 |
| PN1052 | ScFv | PRT | US20160207996A1; SEQ ID NO: 339 | 9768 |
| PN1053 | ScFv | PRT | US20160207996A1; SEQ ID NO: 330 | 9769 |
| PN1054 | ScFv | PRT | US20160207996A1; SEQ ID NO: 418 | 9770 |
| PN1055 | ScFv | PRT | US20160207996A1; SEQ ID NO: 417 | 9771 |
| PN1056 | ScFv | PRT | US20160207996A1; SEQ ID NO: 419 | 9772 |
| PN1057 | ScFv | PRT | US20160207996A1; SEQ ID NO: 379 | 9773 |
| PN1058 | ScFv | PRT | US20160207996A1; SEQ ID NO: 395 | 9774 |
| PN1059 | ScFv | PRT | US20160207996A1; SEQ ID NO: 402 | 9775 |
| PN1060 | ScFv | PRT | US20160207996A1; SEQ ID NO: 406 | 9776 |
| PN1061 | ScFv | PRT | US20160207996A1; SEQ ID NO: 399 | 9777 |
| PN1062 | ScFv | PRT | US20160207996A1; SEQ ID NO: 403 | 9778 |
| PN1063 | ScFv | PRT | US20160207996A1; SEQ ID NO: 404 | 9779 |
| PN1064 | ScFv | PRT | US20160207996A1; SEQ ID NO: 405 | 9780 |
| PN1065 | ScFv | PRT | US20160207996A1; SEQ ID NO: 398 | 9781 |
| PN1066 | ScFv | PRT | US20160207996A1; SEQ ID NO: 396 | 9782 |
| PN1067 | ScFv | PRT | US20160207996A1; SEQ ID NO: 400 | 9783 |
| PN1068 | ScFv | PRT | US20160207996A1; SEQ ID NO: 363 | 9784 |
| PN1069 | ScFv | PRT | US20160207996A1; SEQ ID NO: 361 | 9785 |
| PN1070 | ScFv | PRT | US20160207996A1; SEQ ID NO: 368 | 9786 |
| PN1071 | ScFv | PRT | US20160207996A1; SEQ ID NO: 381 | 9787 |
| PN1072 | ScFv | PRT | US20160207996A1; SEQ ID NO: 408 | 9788 |
| PN1073 | ScFv | PRT | US20160207996A1; SEQ ID NO: 365 | 9789 |
| PN1074 | ScFv | PRT | US20160207996A1; SEQ ID NO: 394 | 9790 |
| PN1075 | ScFv | PRT | US20160207996A1; SEQ ID NO: 366 | 9791 |
| PN1076 | ScFv | PRT | US20160207996A1; SEQ ID NO: 364 | 9792 |
| PN1077 | ScFv | PRT | US20160207996A1; SEQ ID NO: 397 | 9793 |
| PN1078 | ScFv | PRT | US20160207996A1; SEQ ID NO: 367 | 9794 |
| PN1079 | ScFv | PRT | US20160207996A1; SEQ ID NO: 358 | 9795 |
| PN1080 | ScFv | PRT | US20160207996A1; SEQ ID NO: 362 | 9796 |
| PN1081 | ScFv | PRT | US20160207996A1; SEQ ID NO: 359 | 9797 |
| PN1082 | ScFv | PRT | US20160207996A1; SEQ ID NO: 355 | 9798 |
| PN1083 | ScFv | PRT | US20160207996A1; SEQ ID NO: 357 | 9799 |
| PN1084 | ScFv | PRT | US20160207996A1; SEQ ID NO: 356 | 9800 |
| PN1085 | ScFv | PRT | US20160207996A1; SEQ ID NO: 360 | 9801 |
| PN1086 | ScFv | PRT | US20160207996A1; SEQ ID NO: 380 | 9802 |
| PN1087 | VH | DNA | U.S. 10/072,076; SEQ ID NO: 121 | 9803 |
| PN1088 | VH | DNA | U.S. 10/072,076; SEQ ID NO: 441 | 9804 |
| PN1089 | VH | DNA | U.S. 10/072,076; SEQ ID NO: 431 | 9805 |
| PN1090 | VH | DNA | U.S. Pat. No. 8,986,694; SEQ ID NO: 79 | 9806 |
| PN1091 | VH | DNA | U.S. 10/202,450; SEQ ID NO: 12 | 9807 |
| PN1092 | VH | DNA | U.S. Pat. No. 8,986,694; SEQ ID NO: 76 | 9808 |
| PN1093 | VH | DNA | U.S. 10/072,076; SEQ ID NO: 137 | 9809 |
| PN1094 | VH | DNA | U.S. 10/072,076; SEQ ID NO: 237 | 9810 |
| PN1095 | VH | DNA | U.S. 10/072,076; SEQ ID NO: 509 | 9811 |
| PN1096 | VH | DNA | U.S. 10/072,076; SEQ ID NO: 325 | 9812 |
| PN1097 | VH | DNA | U.S. 10/072,076; SEQ ID NO: 133 | 9813 |
| PN1098 | VH | DNA | U.S. 10/072,076; SEQ ID NO: 457 | 9814 |
| PN1099 | VH | DNA | US20180142038A1; SEQ ID NO: 172 | 9815 |
| PN1100 | VH | DNA | U.S. 10/072,076; SEQ ID NO: 704 | 9816 |
| PN1101 | VH | DNA | US20180142038A1; SEQ ID NO: 12 | 9817 |
| PN1102 | VH | DNA | U.S. 10/072,076; SEQ ID NO: 69 | 9818 |
| PN1103 | VH | DNA | U.S. 10/072,076; SEQ ID NO: 863 | 9819 |
| PN1104 | VH | DNA | U.S. 10/072,076; SEQ ID NO: 65 | 9820 |
| PN1105 | VH | DNA | U.S. 10/072,076; SEQ ID NO: 867 | 9821 |
| PN1106 | VH | DNA | U.S. 10/072,076; SEQ ID NO: 742 | 9822 |
| PN1107 | VH | DNA | U.S. 10/072,076; SEQ ID NO: 5 | 9823 |
| PN1108 | VH | DNA | U.S. 10/072,076; SEQ ID NO: 700 | 9824 |
| PN1109 | VH | DNA | U.S. 10/072,076; SEQ ID NO: 313 | 9825 |
| PN1110 | VH | DNA | U.S. 10/072,076; SEQ ID NO: 696 | 9826 |
| PN1111 | VH | DNA | U.S. 10/072,076; SEQ ID NO: 535 | 9827 |
| PN1112 | VH | DNA | U.S. 10/072,076; SEQ ID NO: 381 | 9828 |
| PN1113 | VH | DNA | U.S. 10/072,076; SEQ ID NO: 297 | 9829 |
| PN1114 | VH | DNA | U.S. 10/072,076; SEQ ID NO: 389 | 9830 |
| PN1115 | VH | DNA | U.S. 10/072,076; SEQ ID NO: 501 | 9831 |
| PN1116 | VH | DNA | U.S. 10/072,076; SEQ ID NO: 469 | 9832 |
| PN1117 | VH | DNA | U.S. 10/072,076; SEQ ID NO: 349 | 9833 |
| PN1118 | VH | DNA | U.S. 10/072,076; SEQ ID NO: 453 | 9834 |
| PN1119 | VH | DNA | U.S. 10/072,076; SEQ ID NO: 117 | 9835 |
| PN1120 | VH | DNA | U.S. 10/072,076; SEQ ID NO: 473 | 9836 |
| PN1121 | VH | DNA | U.S. 10/072,076; SEQ ID NO: 513 | 9837 |
| PN1122 | VH | DNA | U.S. 10/072,076; SEQ ID NO: 241 | 9838 |
| PN1123 | VH | DNA | U.S. 10/072,076; SEQ ID NO: 491 | 9839 |
| PN1124 | VH | DNA | U.S. 10/072,076; SEQ ID NO: 543 | 9840 |
| PN1125 | VH | DNA | U.S. 10/072,076; SEQ ID NO: 487 | 9841 |
| PN1126 | VH | DNA | U.S. 10/072,076; SEQ ID NO: 481 | 9842 |
| PN1127 | VH | DNA | U.S. 10/072,076; SEQ ID NO: 285 | 9843 |
| PN1128 | VH | DNA | U.S. 10/072,076; SEQ ID NO: 53 | 9844 |
| PN1129 | VH | DNA | U.S. 10/072,076; SEQ ID NO: 189 | 9845 |
| PN1130 | VH | DNA | U.S. 10/072,076; SEQ ID NO: 421 | 9846 |
| PN1131 | VH | DNA | U.S. 10/072,076; SEQ ID NO: 253 | 9847 |
| PN1132 | VH | DNA | U.S. 10/072,076; SEQ ID NO: 269 | 9848 |
| PN1133 | VH | DNA | U.S. 10/072,076; SEQ ID NO: 525 | 9849 |
| PN1134 | VH | DNA | U.S. 10/072,076; SEQ ID NO: 185 | 9850 |
| PN1135 | VH | DNA | U.S. 10/072,076; SEQ ID NO: 459 | 9851 |
| PN1136 | VH | DNA | U.S. 10/072,076; SEQ ID NO: 425 | 9852 |
| PN1137 | VH | DNA | U.S. 10/072,076; SEQ ID NO: 439 | 9853 |
| PN1138 | VH | DNA | U.S. 10/072,076; SEQ ID NO: 289 | 9854 |
| PN1139 | VH | DNA | U.S. 10/072,076; SEQ ID NO: 45 | 9855 |
| PN1140 | VH | DNA | U.S. 10/072,076; SEQ ID NO: 455 | 9856 |
| PN1141 | VH | DNA | U.S. 10/072,076; SEQ ID NO: 265 | 9857 |
| PN1142 | VH | DNA | U.S. 10/072,076; SEQ ID NO: 33 | 9858 |
| PN1143 | VH | DNA | U.S. 10/072,076; SEQ ID NO: 529 | 9859 |
| PN1144 | VH | DNA | U.S. 10/072,076; SEQ ID NO: 523 | 9860 |
| PN1145 | VH | DNA | U.S. 10/072,076; SEQ ID NO: 417 | 9861 |
| PN1146 | VH | DNA | U.S. 10/072,076; SEQ ID NO: 353 | 9862 |
| PN1147 | VH | DNA | U.S. 10/072,076; SEQ ID NO: 341 | 9863 |
| PN1148 | VH | DNA | U.S. 10/072,076; SEQ ID NO: 369 | 9864 |
| PN1149 | VH | DNA | U.S. 10/072,076; SEQ ID NO: 433 | 9865 |
| PN1150 | VH | DNA | U.S. 10/072,076; SEQ ID NO: 429 | 9866 |
| PN1151 | VH | DNA | U.S. 10/072,076; SEQ ID NO: 309 | 9867 |
| PN1152 | VH | DNA | U.S. 10/072,076; SEQ ID NO: 321 | 9868 |
| PN1153 | VH | DNA | U.S. 10/072,076; SEQ ID NO: 317 | 9869 |
| PN1154 | VH | DNA | U.S. 10/072,076; SEQ ID NO: 451 | 9870 |
| PN1155 | VH | DNA | U.S. 10/072,076; SEQ ID NO: 471 | 9871 |
| PN1156 | VH | DNA | U.S. 10/072,076; SEQ ID NO: 475 | 9872 |
| PN1157 | VH | DNA | U.S. 10/072,076; SEQ ID NO: 427 | 9873 |
| PN1158 | VH | DNA | U.S. 10/072,076; SEQ ID NO: 333 | 9874 |
| PN1159 | VH | DNA | U.S. 10/072,076; SEQ ID NO: 393 | 9875 |
| PN1160 | VH | DNA | U.S. 10/072,076; SEQ ID NO: 357 | 9876 |
| PN1161 | VH | DNA | U.S. 10/072,076; SEQ ID NO: 385 | 9877 |
| PN1162 | VH | DNA | U.S. 10/072,076; SEQ ID NO: 467 | 9878 |
| PN1163 | VH | DNA | U.S. 10/072,076; SEQ ID NO: 293 | 9879 |
| PN1164 | VH | DNA | U.S. 10/072,076; SEQ ID NO: 539 | 9880 |
| PN1165 | VH | DNA | U.S. 10/072,076; SEQ ID NO: 21 | 9881 |
| PN1166 | VH | DNA | U.S. 10/072,076; SEQ ID NO: 261 | 9882 |
| PN1167 | VH | DNA | U.S. 10/072,076; SEQ ID NO: 29 | 9883 |
| PN1168 | VH | DNA | U.S. 10/072,076; SEQ ID NO: 465 | 9884 |
| PN1169 | VH | DNA | U.S. 10/072,076; SEQ ID NO: 477 | 9885 |
| PN1170 | VH | DNA | U.S. 10/072,076; SEQ ID NO: 377 | 9886 |
| PN1171 | VH | DNA | U.S. 10/072,076; SEQ ID NO: 209 | 9887 |
| PN1172 | VH | DNA | U.S. 10/072,076; SEQ ID NO: 503 | 9888 |
| PN1173 | VH | DNA | U.S. 10/072,076; SEQ ID NO: 85 | 9889 |
| PN1174 | VH | DNA | U.S. 10/072,076; SEQ ID NO: 229 | 9890 |
| PN1175 | VH | DNA | U.S. 10/072,076; SEQ ID NO: 493 | 9891 |
| PN1176 | VH | DNA | U.S. 10/072,076; SEQ ID NO: 13 | 9892 |
| PN1177 | VH | DNA | U.S. 10/072,076; SEQ ID NO: 461 | 9893 |
| PN1178 | VH | DNA | U.S. 10/072,076; SEQ ID NO: 517 | 9894 |
| PN1179 | VH | DNA | U.S. 10/072,076; SEQ ID NO: 205 | 9895 |
| PN1180 | VH | DNA | U.S. 10/072,076; SEQ ID NO: 193 | 9896 |
| PN1181 | VH | DNA | U.S. 10/072,076; SEQ ID NO: 758 | 9897 |
| PN1182 | VH | DNA | U.S. 10/072,076; SEQ ID NO: 301 | 9898 |
| PN1183 | VH | DNA | U.S. 10/072,076; SEQ ID NO: 57 | 9899 |
| PN1184 | VH | DNA | U.S. 10/072,076; SEQ ID NO: 519 | 9900 |
| PN1185 | VH | DNA | U.S. 10/072,076; SEQ ID NO: 485 | 9901 |
| PN1186 | VH | DNA | U.S. 10/072,076; SEQ ID NO: 499 | 9902 |
| PN1187 | VH | DNA | U.S. 10/072,076; SEQ ID NO: 249 | 9903 |
| PN1188 | VH | DNA | U.S. 10/072,076; SEQ ID NO: 49 | 9904 |
| PN1189 | VH | DNA | U.S. 10/072,076; SEQ ID NO: 489 | 9905 |
| PN1190 | VH | DNA | U.S. 10/072,076; SEQ ID NO: 479 | 9906 |
| PN1191 | VH | DNA | U.S. 10/072,076; SEQ ID NO: 273 | 9907 |
| PN1192 | VH | DNA | U.S. 10/072,076; SEQ ID NO: 145 | 9908 |
| PN1193 | VH | DNA | U.S. 10/072,076; SEQ ID NO: 721 | 9909 |
| PN1194 | VH | DNA | U.S. 10/072,076; SEQ ID NO: 871 | 9910 |
| PN1195 | VH | DNA | U.S. 10/072,076; SEQ ID NO: 177 | 9911 |
| PN1196 | VH | DNA | U.S. 10/072,076; SEQ ID NO: 213 | 9912 |
| PN1197 | VH | DNA | U.S. 10/072,076; SEQ ID NO: 515 | 9913 |
| PN1198 | VH | DNA | U.S. 10/072,076; SEQ ID NO: 97 | 9914 |
| PN1199 | VH | DNA | U.S. 10/072,076; SEQ ID NO: 329 | 9915 |
| PN1200 | VH | DNA | U.S. 10/072,076; SEQ ID NO: 533 | 9916 |
| PN1201 | VH | DNA | U.S. 10/072,076; SEQ ID NO: 541 | 9917 |
| PN1202 | VH | DNA | U.S. 10/072,076; SEQ ID NO: 73 | 9918 |
| PN1203 | VH | DNA | U.S. 10/072,076; SEQ ID NO: 435 | 9919 |
| PN1204 | VH | DNA | U.S. 10/072,076; SEQ ID NO: 141 | 9920 |
| PN1205 | VH | DNA | U.S. 10/072,076; SEQ ID NO: 113 | 9921 |
| PN1206 | VH | DNA | U.S. 10/072,076; SEQ ID NO: 305 | 9922 |
| PN1207 | VH | DNA | U.S. 10/072,076; SEQ ID NO: 157 | 9923 |
| PN1208 | VH | DNA | U.S. 10/072,076; SEQ ID NO: 165 | 9924 |
| PN1209 | VH | DNA | U.S. 10/072,076; SEQ ID NO: 125 | 9925 |
| PN1210 | VH | DNA | U.S. 10/072,076; SEQ ID NO: 161 | 9926 |
| PN1211 | VH | DNA | U.S. 10/072,076; SEQ ID NO: 93 | 9927 |
| PN1212 | VH | DNA | U.S. 10/072,076; SEQ ID NO: 497 | 9928 |
| PN1213 | VH | DNA | U.S. 10/072,076; SEQ ID NO: 365 | 9929 |
| PN1214 | VH | DNA | U.S. 10/072,076; SEQ ID NO: 726 | 9930 |
| PN1215 | VH | DNA | U.S. 10/072,076; SEQ ID NO: 17 | 9931 |
| PN1216 | VH | DNA | U.S. 10/072,076; SEQ ID NO: 1 | 9932 |
| PN1217 | VH | DNA | US20180142038A1; SEQ ID NO: 132 | 9933 |
| PN1218 | VH | DNA | US20180142038A1; SEQ ID NO: 52 | 9934 |
| PN1219 | VH | DNA | US20180142038A1; SEQ ID NO: 92 | 9935 |
| PN1220 | VH | DNA | U.S. 10/072,076; SEQ ID NO: 337 | 9936 |
| PN1221 | VH | DNA | U.S. 10/072,076; SEQ ID NO: 413 | 9937 |
| PN1222 | VH | DNA | U.S. 10/072,076; SEQ ID NO: 109 | 9938 |
| PN1223 | VH | DNA | U.S. 10/072,076; SEQ ID NO: 25 | 9939 |
| PN1224 | VH | DNA | US20160207996A1; SEQ ID NO: 309 | 9940 |
| PN1225 | VH | DNA | US20160207996A1; SEQ ID NO: 307 | 9941 |
| PN1226 | VH | DNA | U.S. 10/072,076; SEQ ID NO: 105 | 9942 |
| PN1227 | VH | DNA | U.S. 10/072,076; SEQ ID NO: 81 | 9943 |
| PN1228 | VH | DNA | U.S. 10/072,076; SEQ ID NO: 41 | 9944 |
| PN1229 | VH | DNA | U.S. 10/072,076; SEQ ID NO: 225 | 9945 |
| PN1230 | VH | DNA | U.S. 10/072,076; SEQ ID NO: 233 | 9946 |
| PN1231 | VH | DNA | U.S. 10/072,076; SEQ ID NO: 277 | 9947 |
| PN1232 | VH | DNA | U.S. 10/072,076; SEQ ID NO: 37 | 9948 |
| PN1233 | VH | DNA | U.S. 10/072,076; SEQ ID NO: 245 | 9949 |
| PN1234 | VH | DNA | U.S. 10/072,076; SEQ ID NO: 521 | 9950 |
| PN1235 | VH | DNA | U.S. 10/072,076; SEQ ID NO: 153 | 9951 |
| PN1236 | VH | DNA | U.S. 10/072,076; SEQ ID NO: 197 | 9952 |
| PN1237 | VH | DNA | U.S. 10/072,076; SEQ ID NO: 221 | 9953 |
| PN1238 | VH | DNA | U.S. 10/072,076; SEQ ID NO: 397 | 9954 |
| PN1239 | VH | DNA | U.S. 10/072,076; SEQ ID NO: 545 | 9955 |
| PN1240 | VH | DNA | U.S. 10/072,076; SEQ ID NO: 77 | 9956 |
| PN1241 | VH | DNA | U.S. 10/072,076; SEQ ID NO: 61 | 9957 |
| PN1242 | VH | DNA | U.S. 10/072,076; SEQ ID NO: 443 | 9958 |
| PN1243 | VH | DNA | U.S. 10/072,076; SEQ ID NO: 257 | 9959 |
| PN1244 | VH | DNA | U.S. 10/072,076; SEQ ID NO: 531 | 9960 |
| PN1245 | VH | DNA | U.S. 10/072,076; SEQ ID NO: 445 | 9961 |
| PN1246 | VH | DNA | U.S. 10/072,076; SEQ ID NO: 345 | 9962 |
| PN1247 | VH | DNA | U.S. 10/072,076; SEQ ID NO: 401 | 9963 |
| PN1248 | VH | DNA | U.S. 10/072,076; SEQ ID NO: 409 | 9964 |
| PN1249 | VH | DNA | U.S. 10/072,076; SEQ ID NO: 495 | 9965 |
| PN1250 | VH | DNA | U.S. 10/072,076; SEQ ID NO: 405 | 9966 |
| PN1251 | VH | DNA | U.S. 10/072,076; SEQ ID NO: 463 | 9967 |
| PN1252 | VH | DNA | U.S. 10/072,076; SEQ ID NO: 101 | 9968 |
| PN1253 | VH | DNA | U.S. 10/072,076; SEQ ID NO: 790 | 9969 |
| PN1254 | VH | DNA | U.S. 10/072,076; SEQ ID NO: 281 | 9970 |
| PN1255 | VH | DNA | U.S. 10/072,076; SEQ ID NO: 217 | 9971 |
| PN1256 | VH | DNA | U.S. 10/072,076; SEQ ID NO: 527 | 9972 |
| PN1257 | VH | DNA | U.S. 10/072,076; SEQ ID NO: 201 | 9973 |
| PN1258 | VH | DNA | U.S. 10/072,076; SEQ ID NO: 507 | 9974 |
| PN1259 | VH | DNA | U.S. 10/072,076; SEQ ID NO: 859 | 9975 |
| PN1260 | VH | DNA | U.S. 10/072,076; SEQ ID NO: 692 | 9976 |
| PN1261 | VH | DNA | U.S. 10/072,076; SEQ ID NO: 537 | 9977 |
| PN1262 | VH | DNA | U.S. 10/072,076; SEQ ID NO: 684 | 9978 |
| PN1263 | VH | DNA | U.S. 10/072,076; SEQ ID NO: 449 | 9979 |
| PN1264 | VH | DNA | U.S. 10/072,076; SEQ ID NO: 149 | 9980 |
| PN1265 | VH | DNA | U.S. 10/072,076; SEQ ID NO: 129 | 9981 |
| PN1266 | VH | DNA | U.S. 10/072,076; SEQ ID NO: 89 | 9982 |
| PN1267 | VH | DNA | U.S. 10/072,076; SEQ ID NO: 361 | 9983 |
| PN1268 | VH | DNA | U.S. 10/072,076; SEQ ID NO: 505 | 9984 |
| PN1269 | VH | DNA | U.S. 10/072,076; SEQ ID NO: 511 | 9985 |
| PN1270 | VH | DNA | US20160207996A1; SEQ ID NO: 305 | 9986 |
| PN1271 | VH | DNA | U.S. Pat. No. 8,986,694; SEQ ID NO: 74 | 9987 |
| PN1272 | VH | DNA | U.S. 10/072,076; SEQ ID NO: 792 | 9988 |
| PN1273 | VH | PRT | US20160207996A1; SEQ ID NO: 603 | 9989 |
| PN1274 | VH | PRT | US20160207996A1; SEQ ID NO: 604 | 9990 |
| PN1275 | VH | PRT | U.S. Pat. No. 8,986,694; SEQ ID NO: 72 | 9991 |
| PN1276 | VH | PRT | US20160207996A1; SEQ ID NO: 597 | 9992 |
| PN1277 | VH | PRT | US20160207996A1; SEQ ID NO: 602 | 9993 |
| PN1278 | VH | PRT | US20160207996A1; SEQ ID NO: 599 | 9994 |
| PN1279 | VH | PRT | US20160207996A1; SEQ ID NO: 598 | 9995 |
| PN1280 | VH | PRT | US20160207996A1; SEQ ID NO: 601 | 9996 |
| PN1281 | VH | PRT | US20160207996A1; SEQ ID NO: 596 | 9997 |
| PN1282 | VH | PRT | US20160207996A1; SEQ ID NO: 594 | 9998 |
| PN1283 | VH | PRT | U.S. 10/072,076; SEQ ID NO: 512 | 9999 |
| PN1284 | VH | PRT | US20160207996A1; SEQ ID NO: 592 | 10000 |
| PN1285 | VH | PRT | US20160207996A1; SEQ ID NO: 221 | 10001 |
| PN1286 | VH | PRT | US20160207996A1; SEQ ID NO: 237 | 10002 |
| PN1287 | VH | PRT | US20160207996A1; SEQ ID NO: 225 | 10003 |
| PN1288 | VH | PRT | US20160207996A1; SEQ ID NO: 583 | 10004 |
| PN1289 | VH | PRT | U.S. Pat. No. 8,986,694; SEQ ID NO: 69 | 10005 |
| PN1290 | VH | PRT | U.S. 10/072,076; SEQ ID NO: 362 | 10006 |
| PN1291 | VH | PRT | U.S. 10/072,076; SEQ ID NO: 791 | 10007 |
| PN1292 | VH | PRT | U.S. 10/072,076; SEQ ID NO: 90 | 10008 |
| PN1293 | VH | PRT | U.S. 10/072,076; SEQ ID NO: 130 | 10009 |
| PN1294 | VH | PRT | U.S. 10/072,076; SEQ ID NO: 450 | 10010 |
| PN1295 | VH | PRT | US20160207996A1; SEQ ID NO: 246 | 10011 |
| PN1296 | VH | PRT | U.S. 10/072,076; SEQ ID NO: 26 | 10012 |
| PN1297 | VH | PRT | U.S. 10/072,076; SEQ ID NO: 693 | 10013 |
| PN1298 | VH | PRT | U.S. 10/072,076; SEQ ID NO: 538 | 10014 |
| PN1299 | VH | PRT | U.S. 10/072,076; SEQ ID NO: 685 | 10015 |
| PN1300 | VH | PRT | US20160207996A1; SEQ ID NO: 591 | 10016 |
| PN1301 | VH | PRT | U.S. 10/072,076; SEQ ID NO: 860 | 10017 |
| PN1302 | VH | PRT | US20160207996A1; SEQ ID NO: 226 | 10018 |
| PN1303 | VH | PRT | U.S. 10/072,076; SEQ ID NO: 282 | 10019 |
| PN1304 | VH | PRT | U.S. 10/072,076; SEQ ID NO: 506 | 10020 |
| PN1305 | VH | PRT | U.S. 10/072,076; SEQ ID NO: 508 | 10021 |
| PN1306 | VH | PRT | U.S. 10/072,076; SEQ ID NO: 202 | 10022 |
| PN1307 | VH | PRT | U.S. 10/072,076; SEQ ID NO: 528 | 10023 |
| PN1308 | VH | PRT | U.S. 10/072,076; SEQ ID NO: 218 | 10024 |
| PN1309 | VH | PRT | U.S. 10/072,076; SEQ ID NO: 110 | 10025 |
| PN1310 | VH | PRT | U.S. 10/072,076; SEQ ID NO: 102 | 10026 |
| PN1311 | VH | PRT | US20160207996A1; SEQ ID NO: 238 | 10027 |
| PN1312 | VH | PRT | US20160207996A1; SEQ ID NO: 245 | 10028 |
| PN1313 | VH | PRT | US20160207996A1; SEQ ID NO: 588 | 10029 |
| PN1314 | VH | PRT | US20160207996A1; SEQ ID NO: 584 | 10030 |
| PN1315 | VH | PRT | US20160207996A1; SEQ ID NO: 585 | 10031 |
| PN1316 | VH | PRT | US20160207996A1; SEQ ID NO: 587 | 10032 |
| PN1317 | VH | PRT | US20160207996A1; SEQ ID NO: 239 | 10033 |
| PN1318 | VH | PRT | US20160207996A1; SEQ ID NO: 241 | 10034 |
| PN1319 | VH | PRT | US20160207996A1; SEQ ID NO: 244 | 10035 |
| PN1320 | VH | PRT | US20160207996A1; SEQ ID NO: 240 | 10036 |
| PN1321 | VH | PRT | US20160207996A1; SEQ ID NO: 242 | 10037 |
| PN1322 | VH | PRT | US20160207996A1; SEQ ID NO: 586 | 10038 |
| PN1323 | VH | PRT | US20160207996A1; SEQ ID NO: 590 | 10039 |
| PN1324 | VH | PRT | US20160207996A1; SEQ ID NO: 589 | 10040 |
| PN1325 | VH | PRT | U.S. 10/072,076; SEQ ID NO: 546 | 10041 |
| PN1326 | VH | PRT | U.S. 10/072,076; SEQ ID NO: 410 | 10042 |
| PN1327 | VH | PRT | U.S. 10/072,076; SEQ ID NO: 496 | 10043 |
| PN1328 | VH | PRT | U.S. 10/072,076; SEQ ID NO: 398 | 10044 |
| PN1329 | VH | PRT | U.S. 10/072,076; SEQ ID NO: 464 | 10045 |
| PN1330 | VH | PRT | U.S. 10/072,076; SEQ ID NO: 414 | 10046 |
| PN1331 | VH | PRT | U.S. 10/072,076; SEQ ID NO: 402 | 10047 |
| PN1332 | VH | PRT | U.S. 10/072,076; SEQ ID NO: 222 | 10048 |
| PN1333 | VH | PRT | U.S. 10/072,076; SEQ ID NO: 346 | 10049 |
| PN1334 | VH | PRT | U.S. 10/072,076; SEQ ID NO: 446 | 10050 |
| PN1335 | VH | PRT | U.S. 10/072,076; SEQ ID NO: 444 | 10051 |
| PN1336 | VH | PRT | U.S. 10/072,076; SEQ ID NO: 258 | 10052 |
| PN1337 | VH | PRT | U.S. 10/072,076; SEQ ID NO: 338 | 10053 |
| PN1338 | VH | PRT | U.S. 10/072,076; SEQ ID NO: 532 | 10054 |
| PN1339 | VH | PRT | U.S. 10/072,076; SEQ ID NO: 406 | 10055 |
| PN1340 | VH | PRT | U.S. 10/072,076; SEQ ID NO: 78 | 10056 |
| PN1341 | VH | PRT | U.S. 10/072,076; SEQ ID NO: 62 | 10057 |
| PN1342 | VH | PRT | U.S. 10/072,076; SEQ ID NO: 522 | 10058 |
| PN1343 | VH | PRT | U.S. 10/072,076; SEQ ID NO: 226 | 10059 |
| PN1344 | VH | PRT | U.S. 10/072,076; SEQ ID NO: 234 | 10060 |
| PN1345 | VH | PRT | U.S. 10/072,076; SEQ ID NO: 246 | 10061 |
| PN1346 | VH | PRT | U.S. 10/072,076; SEQ ID NO: 38 | 10062 |
| PN1347 | VH | PRT | U.S. 10/072,076; SEQ ID NO: 278 | 10063 |
| PN1348 | VH | PRT | U.S. 10/072,076; SEQ ID NO: 154 | 10064 |
| PN1349 | VH | PRT | U.S. 10/072,076; SEQ ID NO: 198 | 10065 |
| PN1350 | VH | PRT | U.S. 10/072,076; SEQ ID NO: 42 | 10066 |
| PN1351 | VH | PRT | U.S. 10/072,076; SEQ ID NO: 82 | 10067 |
| PN1352 | VH | PRT | U.S. 10/072,076; SEQ ID NO: 106 | 10068 |
| PN1353 | VH | PRT | US20160207996A1; SEQ ID NO: 302 | 10069 |
| PN1354 | VH | PRT | US20160207996A1; SEQ ID NO: 236 | 10070 |
| PN1355 | VH | PRT | US20160207996A1; SEQ ID NO: 609 | 10071 |
| PN1356 | VH | PRT | U.S. 10/072,076; SEQ ID NO: 432 | 10072 |
| PN1357 | VH | PRT | U.S. 10/072,076; SEQ ID NO: 442 | 10073 |
| PN1358 | VH | PRT | U.S. 10/072,076; SEQ ID NO: 122 | 10074 |
| PN1359 | VH | PRT | U.S. 10/202,450; SEQ ID NO: 4 | 10075 |
| PN1360 | VH | PRT | U.S. Pat. No. 8,986,694; SEQ ID NO: 67 | 10076 |
| PN1361 | VH | PRT | U.S. Pat. No. 8,986,694; SEQ ID NO: 78 | 10077 |
| PN1362 | VH | PRT | US20160207996A1; SEQ ID NO: 606 | 10078 |
| PN1363 | VH | PRT | US20160207996A1; SEQ ID NO: 610 | 10079 |
| PN1364 | VH | PRT | US20180142038A1; SEQ ID NO: 2 | 10080 |
| PN1365 | VH | PRT | U.S. 10/072,076; SEQ ID NO: 705 | 10081 |
| PN1366 | VH | PRT | US20160207996A1; SEQ ID NO: 222 | 10082 |
| PN1367 | VH | PRT | US20160207996A1; SEQ ID NO: 247 | 10083 |
| PN1368 | VH | PRT | US20180142038A1; SEQ ID NO: 162 | 10084 |
| PN1369 | VH | PRT | US20180142038A1; SEQ ID NO: 122 | 10085 |
| PN1370 | VH | PRT | US20180142038A1; SEQ ID NO: 42 | 10086 |
| PN1371 | VH | PRT | US20180142038A1; SEQ ID NO: 82 | 10087 |
| PN1372 | VH | PRT | U.S. 10/072,076; SEQ ID NO: 382 | 10088 |
| PN1373 | VH | PRT | U.S. 10/072,076; SEQ ID NO: 536 | 10089 |
| PN1374 | VH | PRT | US20160207996A1; SEQ ID NO: 593 | 10090 |
| PN1375 | VH | PRT | US20160207996A1; SEQ ID NO: 224 | 10091 |
| PN1376 | VH | PRT | US20160207996A1; SEQ ID NO: 223 | 10092 |
| PN1377 | VH | PRT | U.S. 10/072,076; SEQ ID NO: 66 | 10093 |
| PN1378 | VH | PRT | U.S. 10/072,076; SEQ ID NO: 701 | 10094 |
| PN1379 | VH | PRT | U.S. 10/072,076; SEQ ID NO: 314 | 10095 |
| PN1380 | VH | PRT | U.S. 10/072,076; SEQ ID NO: 70 | 10096 |
| PN1381 | VH | PRT | U.S. 10/072,076; SEQ ID NO: 466 | 10097 |
| PN1382 | VH | PRT | U.S. 10/072,076; SEQ ID NO: 30 | 10098 |
| PN1383 | VH | PRT | U.S. 10/072,076; SEQ ID NO: 478 | 10099 |
| PN1384 | VH | PRT | U.S. 10/072,076; SEQ ID NO: 378 | 10100 |
| PN1385 | VH | PRT | U.S. 10/072,076; SEQ ID NO: 134 | 10101 |
| PN1386 | VH | PRT | U.S. 10/072,076; SEQ ID NO: 366 | 10102 |
| PN1387 | VH | PRT | U.S. 10/072,076; SEQ ID NO: 498 | 10103 |
| PN1388 | VH | PRT | U.S. 10/072,076; SEQ ID NO: 94 | 10104 |
| PN1389 | VH | PRT | U.S. 10/072,076; SEQ ID NO: 166 | 10105 |
| PN1390 | VH | PRT | U.S. 10/072,076; SEQ ID NO: 158 | 10106 |
| PN1391 | VH | PRT | U.S. 10/072,076; SEQ ID NO: 162 | 10107 |
| PN1392 | VH | PRT | U.S. 10/072,076; SEQ ID NO: 126 | 10108 |
| PN1393 | VH | PRT | US20160207996A1; SEQ ID NO: 595 | 10109 |
| PN1394 | VH | PRT | U.S. 10/072,076; SEQ ID NO: 330 | 10110 |
| PN1395 | VH | PRT | U.S. 10/072,076; SEQ ID NO: 458 | 10111 |
| PN1396 | VH | PRT | U.S. 10/072,076; SEQ ID NO: 142 | 10112 |
| PN1397 | VH | PRT | U.S. 10/072,076; SEQ ID NO: 436 | 10113 |
| PN1398 | VH | PRT | U.S. 10/072,076; SEQ ID NO: 114 | 10114 |
| PN1399 | VH | PRT | U.S. 10/072,076; SEQ ID NO: 98 | 10115 |
| PN1400 | VH | PRT | U.S. 10/072,076; SEQ ID NO: 306 | 10116 |
| PN1401 | VH | PRT | U.S. 10/072,076; SEQ ID NO: 534 | 10117 |
| PN1402 | VH | PRT | U.S. 10/072,076; SEQ ID NO: 542 | 10118 |
| PN1403 | VH | PRT | U.S. 10/072,076; SEQ ID NO: 74 | 10119 |
| PN1404 | VH | PRT | U.S. 10/072,076; SEQ ID NO: 743 | 10120 |
| PN1405 | VH | PRT | U.S. 10/072,076; SEQ ID NO: 516 | 10121 |
| PN1406 | VH | PRT | U.S. 10/072,076; SEQ ID NO: 504 | 10122 |
| PN1407 | VH | PRT | U.S. 10/072,076; SEQ ID NO: 146 | 10123 |
| PN1408 | VH | PRT | U.S. 10/072,076; SEQ ID NO: 274 | 10124 |
| PN1409 | VH | PRT | U.S. 10/072,076; SEQ ID NO: 494 | 10125 |
| PN1410 | VH | PRT | U.S. 10/072,076; SEQ ID NO: 230 | 10126 |
| PN1411 | VH | PRT | U.S. 10/072,076; SEQ ID NO: 490 | 10127 |
| PN1412 | VH | PRT | U.S. 10/072,076; SEQ ID NO: 722 | 10128 |
| PN1413 | VH | PRT | U.S. 10/072,076; SEQ ID NO: 14 | 10129 |
| PN1414 | VH | PRT | U.S. 10/072,076; SEQ ID NO: 500 | 10130 |
| PN1415 | VH | PRT | U.S. 10/072,076; SEQ ID NO: 486 | 10131 |
| PN1416 | VH | PRT | U.S. 10/072,076; SEQ ID NO: 250 | 10132 |
| PN1417 | VH | PRT | U.S. 10/072,076; SEQ ID NO: 262 | 10133 |
| PN1418 | VH | PRT | U.S. 10/072,076; SEQ ID NO: 194 | 10134 |
| PN1419 | VH | PRT | U.S. 10/072,076; SEQ ID NO: 6 | 10135 |
| PN1420 | VH | PRT | U.S. 10/072,076; SEQ ID NO: 759 | 10136 |
| PN1421 | VH | PRT | U.S. 10/072,076; SEQ ID NO: 480 | 10137 |
| PN1422 | VH | PRT | U.S. 10/072,076; SEQ ID NO: 462 | 10138 |
| PN1423 | VH | PRT | U.S. 10/072,076; SEQ ID NO: 50 | 10139 |
| PN1424 | VH | PRT | U.S. 10/072,076; SEQ ID NO: 520 | 10140 |
| PN1425 | VH | PRT | U.S. 10/072,076; SEQ ID NO: 302 | 10141 |
| PN1426 | VH | PRT | U.S. 10/072,076; SEQ ID NO: 518 | 10142 |
| PN1427 | VH | PRT | U.S. 10/072,076; SEQ ID NO: 178 | 10143 |
| PN1428 | VH | PRT | U.S. 10/072,076; SEQ ID NO: 206 | 10144 |
| PN1429 | VH | PRT | U.S. 10/072,076; SEQ ID NO: 86 | 10145 |
| PN1430 | VH | PRT | U.S. 10/072,076; SEQ ID NO: 210 | 10146 |
| PN1431 | VH | PRT | U.S. 10/072,076; SEQ ID NO: 214 | 10147 |
| PN1432 | VH | PRT | U.S. 10/072,076; SEQ ID NO: 2 | 10148 |
| PN1433 | VH | PRT | U.S. 10/072,076; SEQ ID NO: 18 | 10149 |
| PN1434 | VH | PRT | U.S. 10/072,076; SEQ ID NO: 10 | 10150 |
| PN1435 | VH | PRT | U.S. 10/072,076; SEQ ID NO: 540 | 10151 |
| PN1436 | VH | PRT | U.S. 10/072,076; SEQ ID NO: 474 | 10152 |
| PN1437 | VH | PRT | U.S. 10/072,076; SEQ ID NO: 350 | 10153 |
| PN1438 | VH | PRT | U.S. 10/072,076; SEQ ID NO: 118 | 10154 |
| PN1439 | VH | PRT | U.S. 10/072,076; SEQ ID NO: 454 | 10155 |
| PN1440 | VH | PRT | U.S. 10/072,076; SEQ ID NO: 868 | 10156 |
| PN1441 | VH | PRT | U.S. 10/072,076; SEQ ID NO: 138 | 10157 |
| PN1442 | VH | PRT | U.S. 10/072,076; SEQ ID NO: 370 | 10158 |
| PN1443 | VH | PRT | U.S. 10/072,076; SEQ ID NO: 358 | 10159 |
| PN1444 | VH | PRT | U.S. 10/072,076; SEQ ID NO: 394 | 10160 |
| PN1445 | VH | PRT | U.S. 10/072,076; SEQ ID NO: 386 | 10161 |
| PN1446 | VH | PRT | U.S. 10/072,076; SEQ ID NO: 342 | 10162 |
| PN1447 | VH | PRT | U.S. 10/072,076; SEQ ID NO: 468 | 10163 |
| PN1448 | VH | PRT | U.S. 10/072,076; SEQ ID NO: 334 | 10164 |
| PN1449 | VH | PRT | U.S. 10/072,076; SEQ ID NO: 428 | 10165 |
| PN1450 | VH | PRT | U.S. 10/072,076; SEQ ID NO: 310 | 10166 |
| PN1451 | VH | PRT | U.S. 10/072,076; SEQ ID NO: 322 | 10167 |
| PN1452 | VH | PRT | U.S. 10/072,076; SEQ ID NO: 318 | 10168 |
| PN1453 | VH | PRT | U.S. 10/072,076; SEQ ID NO: 452 | 10169 |
| PN1454 | VH | PRT | U.S. 10/072,076; SEQ ID NO: 476 | 10170 |
| PN1455 | VH | PRT | U.S. 10/072,076; SEQ ID NO: 472 | 10171 |
| PN1456 | VH | PRT | U.S. 10/072,076; SEQ ID NO: 430 | 10172 |
| PN1457 | VH | PRT | U.S. 10/072,076; SEQ ID NO: 434 | 10173 |
| PN1458 | VH | PRT | U.S. 10/072,076; SEQ ID NO: 326 | 10174 |
| PN1459 | VH | PRT | U.S. 10/072,076; SEQ ID NO: 514 | 10175 |
| PN1460 | VH | PRT | U.S. 10/072,076; SEQ ID NO: 266 | 10176 |
| PN1461 | VH | PRT | U.S. 10/072,076; SEQ ID NO: 510 | 10177 |
| PN1462 | VH | PRT | U.S. 10/072,076; SEQ ID NO: 488 | 10178 |
| PN1463 | VH | PRT | U.S. 10/072,076; SEQ ID NO: 492 | 10179 |
| PN1464 | VH | PRT | U.S. 10/072,076; SEQ ID NO: 426 | 10180 |
| PN1465 | VH | PRT | U.S. 10/072,076; SEQ ID NO: 440 | 10181 |
| PN1466 | VH | PRT | U.S. 10/072,076; SEQ ID NO: 482 | 10182 |
| PN1467 | VH | PRT | U.S. 10/072,076; SEQ ID NO: 460 | 10183 |
| PN1468 | VH | PRT | U.S. 10/072,076; SEQ ID NO: 186 | 10184 |
| PN1469 | VH | PRT | U.S. 10/072,076; SEQ ID NO: 544 | 10185 |
| PN1470 | VH | PRT | U.S. 10/072,076; SEQ ID NO: 54 | 10186 |
| PN1471 | VH | PRT | U.S. 10/072,076; SEQ ID NO: 290 | 10187 |
| PN1472 | VH | PRT | U.S. 10/072,076; SEQ ID NO: 298 | 10188 |
| PN1473 | VH | PRT | U.S. 10/072,076; SEQ ID NO: 422 | 10189 |
| PN1474 | VH | PRT | U.S. 10/072,076; SEQ ID NO: 190 | 10190 |
| PN1475 | VH | PRT | U.S. 10/072,076; SEQ ID NO: 456 | 10191 |
| PN1476 | VH | PRT | U.S. 10/072,076; SEQ ID NO: 46 | 10192 |
| PN1477 | VH | PRT | U.S. 10/072,076; SEQ ID NO: 530 | 10193 |
| PN1478 | VH | PRT | U.S. 10/072,076; SEQ ID NO: 526 | 10194 |
| PN1479 | VH | PRT | U.S. 10/072,076; SEQ ID NO: 254 | 10195 |
| PN1480 | VH | PRT | U.S. 10/072,076; SEQ ID NO: 238 | 10196 |
| PN1481 | VH | PRT | U.S. 10/072,076; SEQ ID NO: 286 | 10197 |
| PN1482 | VH | PRT | U.S. 10/072,076; SEQ ID NO: 242 | 10198 |
| PN1483 | VH | PRT | U.S. 10/072,076; SEQ ID NO: 418 | 10199 |
| PN1484 | VH | PRT | U.S. 10/072,076; SEQ ID NO: 354 | 10200 |
| PN1485 | VH | PRT | U.S. 10/072,076; SEQ ID NO: 502 | 10201 |
| PN1486 | VH | PRT | U.S. 10/072,076; SEQ ID NO: 524 | 10202 |
| PN1487 | VH | PRT | U.S. 10/072,076; SEQ ID NO: 470 | 10203 |
| PN1488 | VH | PRT | U.S. 10/072,076; SEQ ID NO: 294 | 10204 |
| PN1489 | VH | PRT | U.S. 10/072,076; SEQ ID NO: 727 | 10205 |
| PN1490 | VH | PRT | US20160207996A1; SEQ ID NO: 608 | 10206 |
| PN1491 | VH | PRT | US20160207996A1; SEQ ID NO: 600 | 10207 |
| PN1492 | VH | PRT | US20160207996A1; SEQ ID NO: 607 | 10208 |
| PN1493 | VH | PRT | US20160207996A1; SEQ ID NO: 605 | 10209 |
| PN1494 | VI | DNA | U.S. 10/072,076; SEQ ID NO: 551 | 10210 |
| PN1495 | VL | DNA | US20180142038A1; SEQ ID NO: 192 | 10211 |
| PN1496 | VL | DNA | U.S. 10/202,450; SEQ ID NO: 16 | 10212 |
| PN1497 | VL | DNA | US20180142038A1; SEQ ID NO: 72 | 10213 |
| PN1498 | VL | DNA | US20180142038A1; SEQ ID NO: 112 | 10214 |
| PN1499 | VL | DNA | U.S. 10/072,076; SEQ ID NO: 798 | 10215 |
| PN1500 | VL | DNA | U.S. 10/072,076; SEQ ID NO: 143 | 10216 |
| PN1501 | VL | DNA | U.S. 10/072,076; SEQ ID NO: 199 | 10217 |
| PN1502 | VL | DNA | U.S. 10/072,076; SEQ ID NO: 203 | 10218 |
| PN1503 | VL | DNA | U.S. 10/072,076; SEQ ID NO: 279 | 10219 |
| PN1504 | VL | DNA | U.S. 10/072,076; SEQ ID NO: 649 | 10220 |
| PN1505 | VL | DNA | U.S. 10/072,076; SEQ ID NO: 609 | 10221 |
| PN1506 | VL | DNA | U.S. 10/072,076; SEQ ID NO: 627 | 10222 |
| PN1507 | VL | DNA | U.S. 10/072,076; SEQ ID NO: 343 | 10223 |
| PN1508 | VL | DNA | U.S. 10/072,076; SEQ ID NO: 371 | 10224 |
| PN1509 | VL | DNA | U.S. 10/072,076; SEQ ID NO: 399 | 10225 |
| PN1510 | VL | DNA | U.S. 10/072,076; SEQ ID NO: 255 | 10226 |
| PN1511 | VL | DNA | U.S. 10/072,076; SEQ ID NO: 597 | 10227 |
| PN1512 | VL | DNA | U.S. 10/072,076; SEQ ID NO: 625 | 10228 |
| PN1513 | VL | DNA | U.S. 10/072,076; SEQ ID NO: 605 | 10229 |
| PN1514 | VL | DNA | U.S. 10/072,076; SEQ ID NO: 613 | 10230 |
| PN1515 | VL | DNA | U.S. 10/072,076; SEQ ID NO: 611 | 10231 |
| PN1516 | VL | DNA | U.S. 10/072,076; SEQ ID NO: 247 | 10232 |
| PN1517 | VL | DNA | U.S. 10/072,076; SEQ ID NO: 39 | 10233 |
| PN1518 | VL | DNA | U.S. 10/072,076; SEQ ID NO: 599 | 10234 |
| PN1519 | VL | DNA | U.S. 10/072,076; SEQ ID NO: 621 | 10235 |
| PN1520 | VL | DNA | U.S. 10/072,076; SEQ ID NO: 307 | 10236 |
| PN1521 | VL | DNA | U.S. 10/072,076; SEQ ID NO: 593 | 10237 |
| PN1522 | VL | DNA | U.S. 10/072,076; SEQ ID NO: 31 | 10238 |
| PN1523 | VL | DNA | U.S. 10/072,076; SEQ ID NO: 295 | 10239 |
| PN1524 | VL | DNA | U.S. 10/072,076; SEQ ID NO: 55 | 10240 |
| PN1525 | VL | DNA | U.S. 10/072,076; SEQ ID NO: 311 | 10241 |
| PN1526 | VL | DNA | U.S. 10/072,076; SEQ ID NO: 643 | 10242 |
| PN1527 | VL | DNA | U.S. 10/072,076; SEQ ID NO: 631 | 10243 |
| PN1528 | VL | DNA | U.S. 10/072,076; SEQ ID NO: 710 | 10244 |
| PN1529 | VL | DNA | U.S. 10/072,076; SEQ ID NO: 619 | 10245 |
| PN1530 | VL | DNA | U.S. 10/072,076; SEQ ID NO: 379 | 10246 |
| PN1531 | VL | DNA | U.S. 10/072,076; SEQ ID NO: 47 | 10247 |
| PN1532 | VL | DNA | U.S. 10/072,076; SEQ ID NO: 615 | 10248 |
| PN1533 | VL | DNA | U.S. 10/072,076; SEQ ID NO: 43 | 10249 |
| PN1534 | VL | DNA | U.S. 10/072,076; SEQ ID NO: 271 | 10250 |
| PN1535 | VL | DNA | U.S. 10/072,076; SEQ ID NO: 663 | 10251 |
| PN1536 | VL | DNA | U.S. 10/072,076; SEQ ID NO: 665 | 10252 |
| PN1537 | VL | DNA | U.S. 10/072,076; SEQ ID NO: 601 | 10253 |
| PN1538 | VL | DNA | U.S. 10/072,076; SEQ ID NO: 603 | 10254 |
| PN1539 | VL | DNA | U.S. 10/072,076; SEQ ID NO: 259 | 10255 |
| PN1540 | VL | DNA | U.S. 10/072,076; SEQ ID NO: 319 | 10256 |
| PN1541 | VL | DNA | U.S. 10/072,076; SEQ ID NO: 367 | 10257 |
| PN1542 | VL | DNA | U.S. 10/072,076; SEQ ID NO: 335 | 10258 |
| PN1543 | VL | DNA | U.S. 10/072,076; SEQ ID NO: 415 | 10259 |
| PN1544 | VL | DNA | U.S. 10/072,076; SEQ ID NO: 419 | 10260 |
| PN1545 | VL | DNA | U.S. 10/072,076; SEQ ID NO: 355 | 10261 |
| PN1546 | VL | DNA | U.S. 10/072,076; SEQ ID NO: 659 | 10262 |
| PN1547 | VL | DNA | U.S. 10/072,076; SEQ ID NO: 403 | 10263 |
| PN1548 | VL | DNA | U.S. 10/072,076; SEQ ID NO: 91 | 10264 |
| PN1549 | VL | DNA | U.S. 10/072,076; SEQ ID NO: 95 | 10265 |
| PN1550 | VL | DNA | U.S. 10/072,076; SEQ ID NO: 359 | 10266 |
| PN1551 | VL | DNA | U.S. 10/072,076; SEQ ID NO: 347 | 10267 |
| PN1552 | VL | DNA | U.S. 10/072,076; SEQ ID NO: 363 | 10268 |
| PN1553 | VL | DNA | U.S. 10/072,076; SEQ ID NO: 383 | 10269 |
| PN1554 | VL | DNA | U.S. 10/072,076; SEQ ID NO: 411 | 10270 |
| PN1555 | VL | DNA | U.S. 10/072,076; SEQ ID NO: 267 | 10271 |
| PN1556 | VL | DNA | U.S. 10/072,076; SEQ ID NO: 275 | 10272 |
| PN1557 | VL | DNA | U.S. 10/072,076; SEQ ID NO: 35 | 10273 |
| PN1558 | VL | DNA | U.S. 10/072,076; SEQ ID NO: 395 | 10274 |
| PN1559 | VL | DNA | U.S. 10/072,076; SEQ ID NO: 183 | 10275 |
| PN1560 | VL | DNA | U.S. 10/072,076; SEQ ID NO: 637 | 10276 |
| PN1561 | VL | DNA | U.S. 10/072,076; SEQ ID NO: 573 | 10277 |
| PN1562 | VL | DNA | U.S. 10/072,076; SEQ ID NO: 159 | 10278 |
| PN1563 | VL | DNA | U.S. 10/072,076; SEQ ID NO: 563 | 10279 |
| PN1564 | VL | DNA | U.S. 10/072,076; SEQ ID NO: 549 | 10280 |
| PN1565 | VL | DNA | U.S. 10/072,076; SEQ ID NO: 115 | 10281 |
| PN1566 | VL | DNA | U.S. 10/072,076; SEQ ID NO: 571 | 10282 |
| PN1567 | VL | DNA | U.S. 10/072,076; SEQ ID NO: 591 | 10283 |
| PN1568 | VL | DNA | U.S. 10/072,076; SEQ ID NO: 315 | 10284 |
| PN1569 | VL | DNA | U.S. 10/072,076; SEQ ID NO: 653 | 10285 |
| PN1570 | VL | DNA | U.S. 10/072,076; SEQ ID NO: 67 | 10286 |
| PN1571 | VL | DNA | U.S. 10/072,076; SEQ ID NO: 71 | 10287 |
| PN1572 | VL | DNA | U.S. 10/072,076; SEQ ID NO: 645 | 10288 |
| PN1573 | VL | DNA | U.S. 10/072,076; SEQ ID NO: 865 | 10289 |
| PN1574 | VL | DNA | U.S. 10/072,076; SEQ ID NO: 83 | 10290 |
| PN1575 | VL | DNA | U.S. 10/072,076; SEQ ID NO: 407 | 10291 |
| PN1576 | VL | DNA | U.S. 10/072,076; SEQ ID NO: 565 | 10292 |
| PN1577 | VL | DNA | U.S. 10/072,076; SEQ ID NO: 167 | 10293 |
| PN1578 | VL | DNA | U.S. 10/072,076; SEQ ID NO: 567 | 10294 |
| PN1579 | VL | DNA | U.S. 10/072,076; SEQ ID NO: 873 | 10295 |
| PN1580 | VL | DNA | U.S. 10/072,076; SEQ ID NO: 59 | 10296 |
| PN1581 | VL | DNA | U.S. 10/072,076; SEQ ID NO: 581 | 10297 |
| PN1582 | VL | DNA | U.S. 10/072,076; SEQ ID NO: 555 | 10298 |
| PN1583 | VL | DNA | U.S. 10/072,076; SEQ ID NO: 607 | 10299 |
| PN1584 | VL | DNA | U.S. 10/072,076; SEQ ID NO: 577 | 10300 |
| PN1585 | VL | DNA | U.S. 10/072,076; SEQ ID NO: 287 | 10301 |
| PN1586 | VL | DNA | U.S. 10/072,076; SEQ ID NO: 323 | 10302 |
| PN1587 | VL | DNA | U.S. 10/072,076; SEQ ID NO: 583 | 10303 |
| PN1588 | VL | DNA | U.S. 10/072,076; SEQ ID NO: 557 | 10304 |
| PN1589 | VL | DNA | U.S. 10/072,076; SEQ ID NO: 163 | 10305 |
| PN1590 | VL | DNA | U.S. 10/072,076; SEQ ID NO: 569 | 10306 |
| PN1591 | VL | DNA | U.S. 10/072,076; SEQ ID NO: 211 | 10307 |
| PN1592 | VL | DNA | U.S. 10/072,076; SEQ ID NO: 351 | 10308 |
| PN1593 | VL | DNA | U.S. 10/072,076; SEQ ID NO: 235 | 10309 |
| PN1594 | VL | DNA | U.S. 10/072,076; SEQ ID NO: 327 | 10310 |
| PN1595 | VL | DNA | U.S. 10/072,076; SEQ ID NO: 63 | 10311 |
| PN1596 | VL | DNA | U.S. 10/072,076; SEQ ID NO: 75 | 10312 |
| PN1597 | VL | DNA | U.S. 10/072,076; SEQ ID NO: 661 | 10313 |
| PN1598 | VL | DNA | U.S. 10/072,076; SEQ ID NO: 547 | 10314 |
| PN1599 | VL | DNA | U.S. 10/072,076; SEQ ID NO: 151 | 10315 |
| PN1600 | VL | DNA | U.S. 10/072,076; SEQ ID NO: 633 | 10316 |
| PN1601 | VL | DNA | U.S. 10/072,076; SEQ ID NO: 617 | 10317 |
| PN1602 | VL | DNA | U.S. 10/072,076; SEQ ID NO: 623 | 10318 |
| PN1603 | VL | DNA | U.S. 10/072,076; SEQ ID NO: 103 | 10319 |
| PN1604 | VL | DNA | U.S. 10/072,076; SEQ ID NO: 107 | 10320 |
| PN1605 | VL | DNA | U.S. 10/072,076; SEQ ID NO: 706 | 10321 |
| PN1606 | VL | DNA | U.S. 10/072,076; SEQ ID NO: 283 | 10322 |
| PN1607 | VL | DNA | U.S. 10/072,076; SEQ ID NO: 263 | 10323 |
| PN1608 | VL | DNA | U.S. 10/072,076; SEQ ID NO: 299 | 10324 |
| PN1609 | VL | DNA | U.S. 10/072,076; SEQ ID NO: 191 | 10325 |
| PN1610 | VL | DNA | U.S. 10/072,076; SEQ ID NO: 131 | 10326 |
| PN1611 | VL | DNA | US20160207996A1; SEQ ID NO: 306 | 10327 |
| PN1612 | VL | DNA | U.S. 10/072,076; SEQ ID NO: 553 | 10328 |
| PN1613 | VL | DNA | U.S. 10/072,076; SEQ ID NO: 223 | 10329 |
| PN1614 | VL | DNA | U.S. 10/072,076; SEQ ID NO: 375 | 10330 |
| PN1615 | VL | DNA | U.S. 10/072,076; SEQ ID NO: 639 | 10331 |
| PN1616 | VL | DNA | U.S. 10/072,076; SEQ ID NO: 647 | 10332 |
| PN1617 | VL | DNA | U.S. 10/072,076; SEQ ID NO: 239 | 10333 |
| PN1618 | VL | DNA | U.S. 10/072,076; SEQ ID NO: 339 | 10334 |
| PN1619 | VL | DNA | U.S. 10/072,076; SEQ ID NO: 219 | 10335 |
| PN1620 | VL | DNA | U.S. 10/072,076; SEQ ID NO: 561 | 10336 |
| PN1621 | VL | DNA | U.S. 10/072,076; SEQ ID NO: 123 | 10337 |
| PN1622 | VL | DNA | U.S. 10/072,076; SEQ ID NO: 171 | 10338 |
| PN1623 | VL | DNA | U.S. 10/072,076; SEQ ID NO: 139 | 10339 |
| PN1624 | VL | DNA | U.S. 10/072,076; SEQ ID NO: 559 | 10340 |
| PN1625 | VL | DNA | U.S. 10/072,076; SEQ ID NO: 3 | 10341 |
| PN1626 | VL | DNA | U.S. 10/072,076; SEQ ID NO: 187 | 10342 |
| PN1627 | VL | DNA | U.S. 10/072,076; SEQ ID NO: 127 | 10343 |
| PN1628 | VL | DNA | U.S. 10/072,076; SEQ ID NO: 589 | 10344 |
| PN1629 | VL | DNA | U.S. 10/072,076; SEQ ID NO: 119 | 10345 |
| PN1630 | VL | DNA | U.S. 10/072,076; SEQ ID NO: 179 | 10346 |
| PN1631 | VL | DNA | U.S. 10/072,076; SEQ ID NO: 579 | 10347 |
| PN1632 | VL | DNA | U.S. 10/072,076; SEQ ID NO: 147 | 10348 |
| PN1633 | VL | DNA | U.S. 10/072,076; SEQ ID NO: 195 | 10349 |
| PN1634 | VL | DNA | U.S. 10/072,076; SEQ ID NO: 575 | 10350 |
| PN1635 | VL | DNA | U.S. 10/072,076; SEQ ID NO: 331 | 10351 |
| PN1636 | VL | DNA | U.S. 10/072,076; SEQ ID NO: 79 | 10352 |
| PN1637 | VL | DNA | U.S. 10/072,076; SEQ ID NO: 175 | 10353 |
| PN1638 | VL | DNA | U.S. 10/072,076; SEQ ID NO: 861 | 10354 |
| PN1639 | VL | DNA | U.S. 10/072,076; SEQ ID NO: 869 | 10355 |
| PN1640 | VL | DNA | U.S. 10/072,076; SEQ ID NO: 694 | 10356 |
| PN1641 | VL | DNA | U.S. 10/072,076; SEQ ID NO: 655 | 10357 |
| PN1642 | VL | DNA | U.S. 10/072,076; SEQ ID NO: 51 | 10358 |
| PN1643 | VL | DNA | U.S. 10/072,076; SEQ ID NO: 667 | 10359 |
| PN1644 | VL | DNA | US20180142038A1; SEQ ID NO: 152 | 10360 |
| PN1645 | VL | DNA | US20180142038A1; SEQ ID NO: 32 | 10361 |
| PN1646 | VL | DNA | U.S. 10/072,076; SEQ ID NO: 215 | 10362 |
| PN1647 | VL | DNA | U.S. 10/072,076; SEQ ID NO: 7 | 10363 |
| PN1648 | VL | DNA | U.S. 10/072,076; SEQ ID NO: 587 | 10364 |
| PN1649 | VL | DNA | U.S. 10/072,076; SEQ ID NO: 11 | 10365 |
| PN1650 | VL | DNA | U.S. 10/072,076; SEQ ID NO: 15 | 10366 |
| PN1651 | VL | DNA | U.S. 10/072,076; SEQ ID NO: 585 | 10367 |
| PN1652 | VL | DNA | U.S. 10/072,076; SEQ ID NO: 734 | 10368 |
| PN1653 | VL | DNA | U.S. 10/072,076; SEQ ID NO: 766 | 10369 |
| PN1654 | VL | DNA | U.S. 10/072,076; SEQ ID NO: 750 | 10370 |
| PN1655 | VL | DNA | U.S. 10/072,076; SEQ ID NO: 227 | 10371 |
| PN1656 | VL | DNA | U.S. 10/072,076; SEQ ID NO: 27 | 10372 |
| PN1657 | VL | DNA | U.S. 10/072,076; SEQ ID NO: 231 | 10373 |
| PN1658 | VL | DNA | U.S. 10/072,076; SEQ ID NO: 641 | 10374 |
| PN1659 | VL | DNA | U.S. 10/072,076; SEQ ID NO: 243 | 10375 |
| PN1660 | VL | DNA | U.S. 10/072,076; SEQ ID NO: 291 | 10376 |
| PN1661 | VL | DNA | U.S. 10/072,076; SEQ ID NO: 423 | 10377 |
| PN1662 | VL | DNA | U.S. 10/072,076; SEQ ID NO: 19 | 10378 |
| PN1663 | VL | DNA | U.S. 10/072,076; SEQ ID NO: 207 | 10379 |
| PN1664 | VL | DNA | U.S. 10/072,076; SEQ ID NO: 135 | 10380 |
| PN1665 | VL | DNA | U.S. 10/072,076; SEQ ID NO: 87 | 10381 |
| PN1666 | VL | DNA | U.S. 10/072,076; SEQ ID NO: 635 | 10382 |
| PN1667 | VL | DNA | U.S. 10/072,076; SEQ ID NO: 657 | 10383 |
| PN1668 | VL | DNA | U.S. 10/072,076; SEQ ID NO: 155 | 10384 |
| PN1669 | VL | DNA | U.S. 10/072,076; SEQ ID NO: 99 | 10385 |
| PN1670 | VL | DNA | U.S. 10/072,076; SEQ ID NO: 111 | 10386 |
| PN1671 | VL | DNA | U.S. 10/072,076; SEQ ID NO: 595 | 10387 |
| PN1672 | VL | DNA | U.S. 10/072,076; SEQ ID NO: 303 | 10388 |
| PN1673 | VL | DNA | U.S. 10/072,076; SEQ ID NO: 251 | 10389 |
| PN1674 | VL | DNA | U.S. 10/072,076; SEQ ID NO: 629 | 10390 |
| PN1675 | VL | DNA | US20160207996A1; SEQ ID NO: 308 | 10391 |
| PN1676 | VL | DNA | US20160207996A1; SEQ ID NO: 304 | 10392 |
| PN1677 | VL | PRT | U.S. 10/072,076; SEQ ID NO: 232 | 10393 |
| PN1678 | VL | PRT | U.S. 10/072,076; SEQ ID NO: 100 | 10394 |
| PN1679 | VL | PRT | U.S. 10/072,076; SEQ ID NO: 112 | 10395 |
| PN1680 | VL | PRT | U.S. 10/072,076; SEQ ID NO: 244 | 10396 |
| PN1681 | VL | PRT | U.S. 10/072,076; SEQ ID NO: 292 | 10397 |
| PN1682 | VL | PRT | U.S. 10/072,076; SEQ ID NO: 424 | 10398 |
| PN1683 | VL | PRT | U.S. 10/072,076; SEQ ID NO: 642 | 10399 |
| PN1684 | VL | PRT | U.S. 10/072,076; SEQ ID NO: 658 | 10400 |
| PN1685 | VL | PRT | U.S. 10/072,076; SEQ ID NO: 88 | 10401 |
| PN1686 | VL | PRT | U.S. 10/072,076; SEQ ID NO: 636 | 10402 |
| PN1687 | VL | PRT | U.S. 10/072,076; SEQ ID NO: 136 | 10403 |
| PN1688 | VL | PRT | U.S. 10/072,076; SEQ ID NO: 156 | 10404 |
| PN1689 | VL | PRT | U.S. 10/072,076; SEQ ID NO: 208 | 10405 |
| PN1690 | VL | PRT | U.S. 10/072,076; SEQ ID NO: 20 | 10406 |
| PN1691 | VL | PRT | U.S. 10/072,076; SEQ ID NO: 596 | 10407 |
| PN1692 | VL | PRT | U.S. 10/072,076; SEQ ID NO: 252 | 10408 |
| PN1693 | VL | PRT | U.S. 10/072,076; SEQ ID NO: 304 | 10409 |
| PN1694 | VL | PRT | U.S. 10/072,076; SEQ ID NO: 630 | 10410 |
| PN1695 | VL | PRT | US20160207996A1; SEQ ID NO: 255 | 10411 |
| PN1696 | VL | PRT | US20160207996A1; SEQ ID NO: 256 | 10412 |
| PN1697 | VL | PRT | US20160207996A1; SEQ ID NO: 303 | 10413 |
| PN1698 | VL | PRT | US20160207996A1; SEQ ID NO: 252 | 10414 |
| PN1699 | VL | PRT | US20160207996A1; SEQ ID NO: 253 | 10415 |
| PN1700 | VL | PRT | US20160207996A1; SEQ ID NO: 257 | 10416 |
| PN1701 | VL | PRT | US20160207996A1; SEQ ID NO: 258 | 10417 |
| PN1702 | VL | PRT | US20160207996A1; SEQ ID NO: 259 | 10418 |
| PN1703 | VL | PRT | U.S. 10/072,076; SEQ ID NO: 204 | 10419 |
| PN1704 | VL | PRT | U.S. 10/072,076; SEQ ID NO: 200 | 10420 |
| PN1705 | VL | PRT | U.S. 10/072,076; SEQ ID NO: 196 | 10421 |
| PN1706 | VL | PRT | U.S. 10/072,076; SEQ ID NO: 144 | 10422 |
| PN1707 | VL | PRT | U.S. 10/072,076; SEQ ID NO: 576 | 10423 |
| PN1708 | VL | PRT | U.S. 10/072,076; SEQ ID NO: 148 | 10424 |
| PN1709 | VL | PRT | U.S. 10/072,076; SEQ ID NO: 340 | 10425 |
| PN1710 | VL | PRT | U.S. 10/072,076; SEQ ID NO: 648 | 10426 |
| PN1711 | VL | PRT | U.S. 10/072,076; SEQ ID NO: 240 | 10427 |
| PN1712 | VL | PRT | U.S. 10/072,076; SEQ ID NO: 640 | 10428 |
| PN1713 | VL | PRT | U.S. 10/072,076; SEQ ID NO: 376 | 10429 |
| PN1714 | VL | PRT | U.S. 10/072,076; SEQ ID NO: 188 | 10430 |
| PN1715 | VL | PRT | U.S. 10/072,076; SEQ ID NO: 128 | 10431 |
| PN1716 | VL | PRT | U.S. 10/072,076; SEQ ID NO: 590 | 10432 |
| PN1717 | VL | PRT | U.S. 10/072,076; SEQ ID NO: 4 | 10433 |
| PN1718 | VL | PRT | U.S. 10/072,076; SEQ ID NO: 560 | 10434 |
| PN1719 | VL | PRT | U.S. 10/072,076; SEQ ID NO: 140 | 10435 |
| PN1720 | VL | PRT | U.S. 10/072,076; SEQ ID NO: 124 | 10436 |
| PN1721 | VL | PRT | U.S. 10/072,076; SEQ ID NO: 562 | 10437 |
| PN1722 | VL | PRT | U.S. 10/072,076; SEQ ID NO: 220 | 10438 |
| PN1723 | VL | PRT | U.S. 10/072,076; SEQ ID NO: 172 | 10439 |
| PN1724 | VL | PRT | U.S. 10/072,076; SEQ ID NO: 580 | 10440 |
| PN1725 | VL | PRT | U.S. 10/072,076; SEQ ID NO: 120 | 10441 |
| PN1726 | VL | PRT | U.S. 10/072,076; SEQ ID NO: 180 | 10442 |
| PN1727 | VL | PRT | U.S. 10/072,076; SEQ ID NO: 260 | 10443 |
| PN1728 | VL | PRT | U.S. 10/072,076; SEQ ID NO: 604 | 10444 |
| PN1729 | VL | PRT | U.S. 10/072,076; SEQ ID NO: 626 | 10445 |
| PN1730 | VL | PRT | U.S. 10/072,076; SEQ ID NO: 598 | 10446 |
| PN1731 | VL | PRT | U.S. 10/072,076; SEQ ID NO: 606 | 10447 |
| PN1732 | VL | PRT | U.S. 10/072,076; SEQ ID NO: 272 | 10448 |
| PN1733 | VL | PRT | U.S. 10/072,076; SEQ ID NO: 44 | 10449 |
| PN1734 | VL | PRT | U.S. 10/072,076; SEQ ID NO: 48 | 10450 |
| PN1735 | VL | PRT | U.S. 10/072,076; SEQ ID NO: 616 | 10451 |
| PN1736 | VL | PRT | U.S. 10/072,076; SEQ ID NO: 614 | 10452 |
| PN1737 | VL | PRT | U.S. 10/072,076; SEQ ID NO: 612 | 10453 |
| PN1738 | VL | PRT | U.S. 10/072,076; SEQ ID NO: 632 | 10454 |
| PN1739 | VL | PRT | U.S. 10/072,076; SEQ ID NO: 594 | 10455 |
| PN1740 | VL | PRT | U.S. 10/072,076; SEQ ID NO: 380 | 10456 |
| PN1741 | VL | PRT | U.S. 10/072,076; SEQ ID NO: 308 | 10457 |
| PN1742 | VL | PRT | U.S. 10/072,076; SEQ ID NO: 711 | 10458 |
| PN1743 | VL | PRT | U.S. 10/072,076; SEQ ID NO: 32 | 10459 |
| PN1744 | VL | PRT | U.S. 10/072,076; SEQ ID NO: 622 | 10460 |
| PN1745 | VL | PRT | U.S. 10/072,076; SEQ ID NO: 600 | 10461 |
| PN1746 | VL | PRT | U.S. 10/072,076; SEQ ID NO: 248 | 10462 |
| PN1747 | VL | PRT | U.S. 10/072,076; SEQ ID NO: 296 | 10463 |
| PN1748 | VL | PRT | U.S. 10/072,076; SEQ ID NO: 312 | 10464 |
| PN1749 | VL | PRT | U.S. 10/072,076; SEQ ID NO: 644 | 10465 |
| PN1750 | VL | PRT | U.S. 10/072,076; SEQ ID NO: 620 | 10466 |
| PN1751 | VL | PRT | U.S. 10/072,076; SEQ ID NO: 264 | 10467 |
| PN1752 | VL | PRT | U.S. 10/072,076; SEQ ID NO: 300 | 10468 |
| PN1753 | VL | PRT | U.S. 10/072,076; SEQ ID NO: 602 | 10469 |
| PN1754 | VL | PRT | U.S. 10/072,076; SEQ ID NO: 664 | 10470 |
| PN1755 | VL | PRT | U.S. 10/072,076; SEQ ID NO: 256 | 10471 |
| PN1756 | VL | PRT | U.S. 10/072,076; SEQ ID NO: 320 | 10472 |
| PN1757 | VL | PRT | U.S. 10/072,076; SEQ ID NO: 628 | 10473 |
| PN1758 | VL | PRT | U.S. 10/072,076; SEQ ID NO: 344 | 10474 |
| PN1759 | VL | PRT | U.S. 10/072,076; SEQ ID NO: 610 | 10475 |
| PN1760 | VL | PRT | U.S. 10/072,076; SEQ ID NO: 650 | 10476 |
| PN1761 | VL | PRT | U.S. 10/072,076; SEQ ID NO: 280 | 10477 |
| PN1762 | VL | PRT | U.S. 10/072,076; SEQ ID NO: 662 | 10478 |
| PN1763 | VL | PRT | U.S. 10/072,076; SEQ ID NO: 328 | 10479 |
| PN1764 | VL | PRT | U.S. 10/072,076; SEQ ID NO: 76 | 10480 |
| PN1765 | VL | PRT | U.S. 10/072,076; SEQ ID NO: 236 | 10481 |
| PN1766 | VL | PRT | U.S. 10/072,076; SEQ ID NO: 352 | 10482 |
| PN1767 | VL | PRT | U.S. 10/072,076; SEQ ID NO: 212 | 10483 |
| PN1768 | VL | PRT | U.S. 10/072,076; SEQ ID NO: 184 | 10484 |
| PN1769 | VL | PRT | US20160207996A1; SEQ ID NO: 250 | 10485 |
| PN1770 | VL | PRT | U.S. 10/072,076; SEQ ID NO: 224 | 10486 |
| PN1771 | VL | PRT | U.S. 10/072,076; SEQ ID NO: 72 | 10487 |
| PN1772 | VL | PRT | U.S. 10/072,076; SEQ ID NO: 68 | 10488 |
| PN1773 | VL | PRT | U.S. 10/072,076; SEQ ID NO: 654 | 10489 |
| PN1774 | VL | PRT | U.S. 10/072,076; SEQ ID NO: 316 | 10490 |
| PN1775 | VL | PRT | U.S. 10/072,076; SEQ ID NO: 646 | 10491 |
| PN1776 | VL | PRT | U.S. 10/072,076; SEQ ID NO: 84 | 10492 |
| PN1777 | VL | PRT | U.S. 10/072,076; SEQ ID NO: 368 | 10493 |
| PN1778 | VL | PRT | U.S. 10/072,076; SEQ ID NO: 164 | 10494 |
| PN1779 | VL | PRT | U.S. 10/072,076; SEQ ID NO: 356 | 10495 |
| PN1780 | VL | PRT | U.S. 10/072,076; SEQ ID NO: 420 | 10496 |
| PN1781 | VL | PRT | U.S. 10/072,076; SEQ ID NO: 416 | 10497 |
| PN1782 | VL | PRT | U.S. 10/072,076; SEQ ID NO: 336 | 10498 |
| PN1783 | VL | PRT | U.S. 10/072,076; SEQ ID NO: 408 | 10499 |
| PN1784 | VL | PRT | U.S. 10/072,076; SEQ ID NO: 566 | 10500 |
| PN1785 | VL | PRT | U.S. 10/072,076; SEQ ID NO: 556 | 10501 |
| PN1786 | VL | PRT | U.S. 10/072,076; SEQ ID NO: 582 | 10502 |
| PN1787 | VL | PRT | U.S. 10/072,076; SEQ ID NO: 168 | 10503 |
| PN1788 | VL | PRT | U.S. 10/072,076; SEQ ID NO: 568 | 10504 |
| PN1789 | VL | PRT | U.S. 10/072,076; SEQ ID NO: 874 | 10505 |
| PN1790 | VL | PRT | U.S. 10/072,076; SEQ ID NO: 60 | 10506 |
| PN1791 | VL | PRT | U.S. 10/072,076; SEQ ID NO: 584 | 10507 |
| PN1792 | VL | PRT | U.S. 10/072,076; SEQ ID NO: 360 | 10508 |
| PN1793 | VL | PRT | U.S. 10/072,076; SEQ ID NO: 412 | 10509 |
| PN1794 | VL | PRT | U.S. 10/072,076; SEQ ID NO: 384 | 10510 |
| PN1795 | VL | PRT | U.S. 10/072,076; SEQ ID NO: 348 | 10511 |
| PN1796 | VL | PRT | U.S. 10/072,076; SEQ ID NO: 96 | 10512 |
| PN1797 | VL | PRT | U.S. 10/072,076; SEQ ID NO: 92 | 10513 |
| PN1798 | VL | PRT | U.S. 10/072,076; SEQ ID NO: 404 | 10514 |
| PN1799 | VL | PRT | U.S. 10/072,076; SEQ ID NO: 268 | 10515 |
| PN1800 | VL | PRT | U.S. 10/072,076; SEQ ID NO: 660 | 10516 |
| PN1801 | VL | PRT | U.S. 10/072,076; SEQ ID NO: 578 | 10517 |
| PN1802 | VL | PRT | U.S. 10/072,076; SEQ ID NO: 288 | 10518 |
| PN1803 | VL | PRT | U.S. 10/072,076; SEQ ID NO: 324 | 10519 |
| PN1804 | VL | PRT | U.S. 10/072,076; SEQ ID NO: 558 | 10520 |
| PN1805 | VL | PRT | U.S. 10/072,076; SEQ ID NO: 608 | 10521 |
| PN1806 | VL | PRT | U.S. 10/072,076; SEQ ID NO: 570 | 10522 |
| PN1807 | VL | PRT | U.S. 10/072,076; SEQ ID NO: 574 | 10523 |
| PN1808 | VL | PRT | U.S. 10/072,076; SEQ ID NO: 564 | 10524 |
| PN1809 | VL | PRT | U.S. 10/072,076; SEQ ID NO: 160 | 10525 |
| PN1810 | VL | PRT | U.S. 10/072,076; SEQ ID NO: 548 | 10526 |
| PN1811 | VL | PRT | U.S. 10/072,076; SEQ ID NO: 116 | 10527 |
| PN1812 | VL | PRT | U.S. 10/072,076; SEQ ID NO: 572 | 10528 |
| PN1813 | VL | PRT | U.S. 10/072,076; SEQ ID NO: 550 | 10529 |
| PN1814 | VL | PRT | U.S. 10/072,076; SEQ ID NO: 554 | 10530 |
| PN1815 | VL | PRT | U.S. 10/072,076; SEQ ID NO: 592 | 10531 |
| PN1816 | VL | PRT | U.S. 10/072,076; SEQ ID NO: 638 | 10532 |
| PN1817 | VL | PRT | U.S. 10/072,076; SEQ ID NO: 284 | 10533 |
| PN1818 | VL | PRT | U.S. 10/072,076; SEQ ID NO: 618 | 10534 |
| PN1819 | VL | PRT | U.S. 10/072,076; SEQ ID NO: 624 | 10535 |
| PN1820 | VL | PRT | U.S. 10/072,076; SEQ ID NO: 396 | 10536 |
| PN1821 | VL | PRT | U.S. 10/072,076; SEQ ID NO: 634 | 10537 |
| PN1822 | VL | PRT | U.S. 10/072,076; SEQ ID NO: 108 | 10538 |
| PN1823 | VL | PRT | U.S. 10/072,076; SEQ ID NO: 707 | 10539 |
| PN1824 | VL | PRT | U.S. 10/072,076; SEQ ID NO: 104 | 10540 |
| PN1825 | VL | PRT | U.S. 10/072,076; SEQ ID NO: 152 | 10541 |
| PN1826 | VL | PRT | US20160207996A1; SEQ ID NO: 235 | 10542 |
| PN1827 | VL | PRT | U.S. 10/072,076; SEQ ID NO: 192 | 10543 |
| PN1828 | VL | PRT | U.S. 10/072,076; SEQ ID NO: 132 | 10544 |
| PN1829 | VL | PRT | U.S. 10/072,076; SEQ ID NO: 332 | 10545 |
| PN1830 | VL | PRT | U.S. 10/072,076; SEQ ID NO: 80 | 10546 |
| PN1831 | VL | PRT | U.S. 10/072,076; SEQ ID NO: 862 | 10547 |
| PN1832 | VL | PRT | U.S. 10/072,076; SEQ ID NO: 52 | 10548 |
| PN1833 | VL | PRT | U.S. 10/072,076; SEQ ID NO: 656 | 10549 |
| PN1834 | VL | PRT | U.S. 10/072,076; SEQ ID NO: 870 | 10550 |
| PN1835 | VL | PRT | U.S. 10/072,076; SEQ ID NO: 695 | 10551 |
| PN1836 | VL | PRT | U.S. 10/072,076; SEQ ID NO: 28 | 10552 |
| PN1837 | VL | PRT | U.S. Pat. No. 8,986,694; SEQ ID NO: 70 | 10553 |
| PN1838 | VL | PRT | US20160207996A1; SEQ ID NO: 228 | 10554 |
| PN1839 | VL | PRT | US20160207996A1; SEQ ID NO: 229 | 10555 |
| PN1840 | VL | PRT | US20160207996A1; SEQ ID NO: 227 | 10556 |
| PN1841 | VL | PRT | U.S. 10/072,076; SEQ ID NO: 668 | 10557 |
| PN1842 | VL | PRT | U.S. 10/072,076; SEQ ID NO: 228 | 10558 |
| PN1843 | VL | PRT | U.S. 10/072,076; SEQ ID NO: 751 | 10559 |
| PN1844 | VL | PRT | U.S. 10/072,076; SEQ ID NO: 588 | 10560 |
| PN1845 | VL | PRT | U.S. 10/072,076; SEQ ID NO: 767 | 10561 |
| PN1846 | VL | PRT | U.S. 10/072,076; SEQ ID NO: 176 | 10562 |
| PN1847 | VL | PRT | U.S. 10/072,076; SEQ ID NO: 16 | 10563 |
| PN1848 | VL | PRT | U.S. 10/072,076; SEQ ID NO: 12 | 10564 |
| PN1849 | VL | PRT | U.S. 10/072,076; SEQ ID NO: 586 | 10565 |
| PN1850 | VL | PRT | U.S. 10/072,076; SEQ ID NO: 735 | 10566 |
| PN1851 | VL | PRT | U.S. 10/072,076; SEQ ID NO: 8 | 10567 |
| PN1852 | VL | PRT | US20180142038A1; SEQ ID NO: 22 | 10568 |
| PN1853 | VL | PRT | US20180142038A1; SEQ ID NO: 142 | 10569 |
| PN1854 | VL | PRT | U.S. 10/072,076; SEQ ID NO: 216 | 10570 |
| PN1855 | VL | PRT | U.S. 10/072,076; SEQ ID NO: 799 | 10571 |
| PN1856 | VL | PRT | US20160207996A1; SEQ ID NO: 231 | 10572 |
| PN1857 | VL | PRT | US20180142038A1; SEQ ID NO: 182 | 10573 |
| PN1858 | VL | PRT | U.S. 10/202,450; SEQ ID NO: 8 | 10574 |
| PN1859 | VL | PRT | US20160207996A1; SEQ ID NO: 230 | 10575 |
| PN1860 | VL | PRT | U.S. 10/072,076; SEQ ID NO: 552 | 10576 |
| PN1861 | VL | PRT | US20160207996A1; SEQ ID NO: 233 | 10577 |
| PN1862 | VL | PRT | US20160207996A1; SEQ ID NO: 254 | 10578 |
| PN1863 | VL | PRT | US20160207996A1; SEQ ID NO: 251 | 10579 |
| PN1864 | VL | PRT | US20180142038A1; SEQ ID NO: 62 | 10580 |
| PN1865 | VL | PRT | US20180142038A1; SEQ ID NO: 102 | 10581 |
| PN1866 | VL | PRT | US20160207996A1; SEQ ID NO: 234 | 10582 |
| PN1867 | VL | PRT | US20160207996A1; SEQ ID NO: 232 | 10583 |
| PN1868 | VL | PRT | US20160207996A1; SEQ ID NO: 249 | 10584 |
| PN1869 | VH | PRT | WO2017139290; SEQ ID NO: 1 | 10585 |
| PN1870 | VL | PRT | WO2017139290; SEQ ID NO: 2 | 10586 |

[0977] In some embodiments, the payload region of the AAV particle comprises a nucleic acid sequence encoding a polypeptide which is an antibody, an antibody-based composition, or a fragment thereof. As anon-limiting example, the antibody may be one or more of the polypeptides listed in Table 13, or variants or fragments thereof. As another non-limiting example, the antibody may be one or more of the heavy chain sequences listed in Table 13. As anon-limiting example, the antibody may be one or more of the light chain sequences listed in Table 13, or variants or fragments thereof.

[0978] In some embodiments, the payload region of the AAV particle comprises a nucleic acid sequence encoding a polypeptide comprising a heavy chain and alight chain sequence listed in Table 13, or variants or fragments thereof. The payload region may also comprise a linker between the heavy and light chain sequences. The linker may be a sequence known in the art or described in Table 2.

[0979] In some embodiments, the payload region of the AAV particle comprises a nucleic acid sequence encoding a polypeptide comprising a heavy chain and alight chain sequence listed in Table 13, or variants or fragments thereof, where the heavy chain sequence is from a different antibody than the light chain sequence. The payload region may also comprise a linker between the heavy and light chain sequences. The linker may be a sequence known in the art or described in Table 2.

[0980] In some embodiments, the payload region comprises, in the 5′ to 3′ direction, an antibody light chain sequence, a linker and a heavy chain sequence. In another embodiment, the linker is not used.

[0981] In some embodiments, the payload region comprises a nucleic acid sequence encoding, in the 5′ to 3′ direction, an antibody light chain sequence from Table 13, one or more linkers from Table 2 and a heavy chain sequence from Table 13.

[0982] In some embodiments, the payload region comprises, in the 5′ to 3′ direction, an antibody heavy chain sequence, a linker region (may comprise one or more linkers) and alight chain sequence. In another embodiment, the linker is not used.

[0983] In some embodiments, the payload region comprises a nucleic acid sequence encoding, in the 5′ to 3′ direction, an antibody heavy chain sequence from Table 13, one or more linkers from Table 2, and alight chain sequence from Table 13.

[0984] In some embodiments, the payload region comprises a nucleic acid sequence encoding a single heavy chain. As a non-limiting example, the heavy chain is an amino acid sequence or fragment thereof described in Table 13.

[0985] Shown in Table 13 are a listing of antibodies and their polynucleotides and/or polypeptides sequences. These sequences may be encoded by or included in the AAV particles of the present disclosure. Variants or fragments of the antibody sequences described in Table 13 may be utilized in the AAV particles of the present disclosure.

[0986] In some embodiments, the AAV particles may comprise a viral genome, wherein one or more components may be codon-optimized. Codon-optimization may be achieved by any method known to one with skill in the art such as, but not limited to, by a method according to Genescript, EMBOSS, Bioinformatics, NUS, NUS2, Geneinfinity, IDT, NUS3, GregThatcher, Insilico, Molbio, N2P, Snapgene, and/or VectorNTI. Antibody heavy and/or light chain sequences within the same viral genome may be codon-optimized according to the same or according to different methods.

[0987] In some cases, the payload region of the AAV particles may encode one or more isoforms or variants of heavy and light chain antibody domains. Such variants may be humanized or optimized antibody domains comprising one or more complementarity determining regions (CDRs) from the heavy and light chains listed in Table 13. CDRs of the antibodies encoded by the viral genomes of the present disclosure may be 50%, 60%,70%, 80%, 90%, 95% identical to CDRs listed in or incorporated in the sequences of Table 13. Methods of determining CDRs are well known in the art and are described herein. Payload regions may encode antibody variants with one or more heavy chain variable domain (V_{H}) or light chain variable domain (V_{L}) derived from the antibody sequences in Table 13. In some cases, such variants may include bispecific antibodies. Bispecific antibodies encoded by payload regions may comprise variable domain pairs from two different antibodies.

[0988] In some embodiments, the AAV particles may comprise a heavy and a light chain of an antibody described herein and two promoters. As a non-limiting example, the AAV particles may comprise a nucleic acid sequence of a genome as described in FIG. 1 or FIG. 2 of US Patent Publication No. US20030219733, the contents of which are herein incorporated by reference in their entirety. As another non-limiting example, the AAV particles may be a dual-promoter AAV for antibody expression as described by Lewis et al. (J. of. Virology, September 2002, Vol. 76(17), p 8769-8775; the contents of which are herein incorporated by reference in their entirety).

[0989] Payload regions of the viral genomes may encode any pain-associated antibodies, not limited to those described in Table 13, including antibodies that are known in the art and/or antibodies that are commercially available. This may include fragments of such antibodies or antibodies that have been developed to comprise one or more of such fragments [e.g., variable domains or complementarity determining regions (CDRs)].

[0990] In some embodiments, the AAV particles may have a payload region comprising any of the pain-associated antibodies as described in International Publication Number WO2017058771, WO2017062016, WO2017062456, WO2017068472, WO2017074013, WO2017075052, WO2017079369, WO2017100193, WO2017102833, WO2017118761, WO2017120344, WO2017123636, WO2017139290, WO2017155990, WO2017156479, WO2017180993, WO2017181031, WO2017181039, WO2017181098, WO2017181139, WO2017189805, WO2017189959, WO2017210278, WO2018009903, WO2018022762, WO2018025982, WO2018039506, WO2018050111, WO2018053029, WO2018081282, WO2018083538, WO2018083645, WO2018102294, WO2018102597, WO2018119246, WO2018124107, WO2018132423, WO2018153262, WO2018157710, WO2018160896, WO2018167322, WO2018182266, WO2018187682, WO2018191414, WO2018204156, WO2018204757, WO2018204871, WO2018206565, WO2018213204, WO2018213679, WO2018215614, WO2018217638, WO2018223051, WO2018237064, WO2019012014, WO2019025847, WO2019028367, WO2019028456, WO2019042282, WO2019057992, WO2019059771, WO2019067293, WO2019067815, WO2019075136, WO2019084438, WO2019087133, WO2019089973, WO2019090069, WO2019090074, WO2019090076, WO2019090078, WO2019090081, WO2019090082, WO2019090085, WO2019090088, WO2019090090, the contents of each of which are herein incorporated by reference in their entirety.

[0991] In some embodiments, payloads may encode pain-associated antibodies (or fragments thereof) taught in US Publication Number US20170306013, the contents of each of which are herein incorporated by reference in their entirety. Such embodiments may include antibodies 22D04, 22G08, 22G09, 25A01, 25C01, 25F08, 27A03, 28608, 28CII, 30G01, 32A07, 321304, 32D04, 32E01, 35A06, 35A10, and 35EII, or fragments thereof. In certain embodiments, the payload region encodes antibodies 22D04, 22G08, 22G09, 25A01, 25C01, 25F08, 27A03, 28608, 28CII, 30G01, 32A07, 321304, 32D04, 32E01, 35A06, 35A10, and 35EII, or fragments thereof selected from SEQ ID NO: 330-602 as described in US20170306013A1.

[0992] In some embodiments, the payload region of the viral particle comprises one or more nucleic acid sequences encoding one or more of the migraine and pain payload antibody polypeptides listed in Table 10 of U.S. provisional patent application 62/844,433 (MP1-MP564; SEQ ID NO: 19666-20229), the contents of which are herein incorporated by reference in their entirety.

### Antibodies for the Treatment of Ocular Diseases

[0993] In some embodiments, the payload region of the AAV particle comprises one or more nucleic acid sequences encoding ocular disease-associated antibodies, variants or fragments thereof.

[0994] In some embodiments, the payload region of the AAV particle comprises one or more nucleic acid sequences encoding one or more of the payload antibody polypeptides listed in Tables 14, or variants or fragments thereof.

[0995] In some embodiments, the payload region of the AAV particle comprises one or more nucleic acid sequences listed in Table 14, or variants or fragments thereof.

[0996] In some embodiments, the payload region of the AAV particle comprises a nucleic acid sequence encoding a payload antibody with at least 50% identity to one or more payload antibody polypeptides listed in Table 14. The encoded antibody polypeptide may have 50%, 51%, 52%, 53%, 54%, 55%, 56%, 57%, 58%, 59%, 60%, 61%, 62%, 63%, 64%, 65%, 66%, 67%, 68%, 69%, 70%, 71%, 72%, 73%, 74%, 75%, 76%, 77%, 78%, 79%, 80%, 81%, 82%, 83%, 84%, 85%, 86%, 87%, 88%, 89%, 90%, 91%, 92%, 93%, 94%, 95%, 96%, 97%, 98%, 99%, or 100% identity to one or more of the payload antibody polypeptides listed in Table 14, or variants or fragments thereof.

[0997] In some embodiments, the full sequence of the encoded antibody polypeptide may have 50%, 51%, 52%, 53%, 54%, 55%, 56%, 57%, 58%, 59%, 60%, 61%, 62%, 63%, 64%, 65%, 66%, 67%, 68%, 69%, 70%, 71%, 72%, 73%, 74%, 75%, 76%, 77%, 78%, 79%, 80%, 81%, 82%, 83%, 84%, 85%, 86%, 87%, 88%, 89%, 90%, 91%, 92%, 93%, 94%, 95%, 96%, 97%, 98%, 99%, or 100% identity to one or more of the payload antibody polypeptides listed in Table 14, or variants or fragments thereof.

[0998] In some embodiments, the variable region sequence(s) of the encoded antibody polypeptide may have 50%, 51%, 52%, 53%, 54%, 55%, 56%, 57%, 58%, 59%, 60%, 61%, 62%, 63%, 64%, 65%, 66%, 67%, 68%, 69%, 70%, 71%, 72%, 73%, 74%, 75%, 76%, 77%, 78%, 79%, 80%, 81%, 82%, 83%, 84%, 85%, 86%, 87%, 88%, 89%, 90%, 91%, 92%, 93%, 94%, 95%, 96%, 97%, 98%, 99%, or 100% identity to one or more of the payload antibody polypeptides listed in Table 14, or variants or fragments thereof.

[0999] In some embodiments, the heavy chain of the encoded antibody polypeptide may have 50%, 51%, 52%, 53%, 54%, 55%, 56%, 57%, 58%, 59%, 60%, 61%, 62%, 63%, 64%, 65%, 66%, 67%, 68%, 69%, 70%, 71%, 72%, 73%, 74%, 75%, 76%, 77%, 78%, 79%, 80%, 81%, 82%, 83%, 84%, 85%, 86%, 87%, 88%, 89%, 90%, 91%, 92%, 93%, 94%, 95%, 96%, 97%, 98%, 99%, or 100% identity to one or more of the payload heavy chain antibody polypeptides listed in Table 14, or variants or fragments thereof.

[1000] In some embodiments, the light chain of the encoded antibody polypeptide may have 50%, 51%, 52%, 53%, 54%, 55%, 56%, 57%, 58%, 59%, 60%, 61%, 62%, 63%, 64%, 65%, 66%, 67%, 68%, 69%, 70%, 71%, 72%, 73%, 74%, 75%, 76%, 77%, 78%, 79%, 80%, 81%, 82%, 83%, 84%, 85%, 86%, 87%, 88%, 89%, 90%, 91%, 92%, 93%, 94%, 95%, 96%, 97%, 98%, 99%, or 100% identity to one or more of the payload light chain antibody polypeptides listed in Table 14, or variants or fragments thereof.

[1001] In some embodiments, the CDR region of the encoded antibody polypeptide may have 50%, 51%, 52%, 53%, 54%, 55%, 56%, 57%, 58%, 59%, 60%, 61%, 62%, 63%, 64%, 65%, 66%, 67%, 68%, 69%, 70%, 71%, 72%, 73%, 74%, 75%, 76%, 77%, 78%, 79%, 80%, 81%, 82%, 83%, 84%, 85%,86%, 87%, 88%, 89%, 90%, 91%, 92%, 93%, 94%, 95%, 96%, 97%, 98%, 99%, or 100% identity to the CDRs of one or more of the payload antibody polypeptides listed in Table 14, or variants or fragments thereof.

[1002] In some embodiments, the payload antibody has 90% identity to one or more of the antibody polypeptides listed in Table 14, or variants or fragments thereof.

[1003] In some embodiments, the payload antibody has 91% identity to one or more of the antibody polypeptides listed in Table 14, or variants or fragments thereof.

[1004] In some embodiments, the payload antibody has 92% identity to one or more of the antibody polypeptides listed in Table 14, or variants or fragments thereof.

[1005] In some embodiments, the payload antibody has 93% identity to one or more of the antibody polypeptides listed in Table 14, or variants or fragments thereof.

[1006] In some embodiments, the payload antibody has 94% identity to one or more of the antibody polypeptides listed in Table 14, or variants or fragments thereof.

[1007] In some embodiments, the payload antibody has 95% identity to one or more of the antibody polypeptides listed in Table 14, or variants or fragments thereof.

[1008] In some embodiments, the payload antibody has 96% identity to one or more of the antibody polypeptides listed in Table 14, or variants or fragments thereof.

[1009] In some embodiments, the payload antibody has 97% identity to one or more of the antibody polypeptides listed in Table 14, or variants or fragments thereof.

[1010] In some embodiments, the payload antibody has 98% identity to one or more of the antibody polypeptides listed in Table 14, or variants or fragments thereof.

[1011] In some embodiments, the payload antibody has 99% identity to one or more of the antibody polypeptides listed in Table 14, or variants or fragments thereof.

[1012] In some embodiments, the payload antibody has 100% identity to one or more of the antibody polypeptides listed in Table 14, or variants or fragments thereof.

[1013] In some embodiments, the payload antibody may be variants of any of the antibody polypeptides listed in Table 14, that exclude one or more amino acids designated as “X” or “x” in the described polypeptide sequence, wherein X may represent any amino acid. In some embodiments, the payload nucleic acid sequence may be variants of any of the nucleic acid sequences listed in Table 14, that exclude one or more nucleic acids designated as “n” or “N” in the described nucleic acid sequence, wherein n may represent any nucleic acid.

TABLE 14
Ocular disease antibodies

| | | Type | | |
|---|---|---|---|---|
| Ab ID | Component | (PRT/DNA) | Reference | SEQ ID NO |
| OCL1 | Antibody | PRT | WO2017062649; SEQ ID NO: 2 | 10587 |
| OCL2 | Antibody | PRT | WO2017062649; SEQ ID NO: 5 | 10588 |
| OCL3 | HC | PRT | WO2011117329; SEQ ID NO: 7 | 10589 |
| OCL4 | HC | PRT | WO2011117329; SEQ ID NO: 8 | 10590 |
| OCL5 | HC | PRT | WO2011117329; SEQ ID NO: 12 | 10591 |
| OCL6 | HC | PRT | WO2011117329; SEQ ID NO: 24 | 10592 |
| OCL7 | HC | PRT | WO2011117329; SEQ ID NO: 30 | 10593 |
| OCL8 | HC | PRT | WO2014009465; SEQ ID NO: 21 | 10594 |
| OCL9 | HC | PRT | WO2014009465; SEQ ID NO: 22 | 10595 |
| OCL10 | HC | PRT | WO2014009465; SEQ ID NO: 25 | 10596 |
| OCL11 | HC | PRT | WO2014009465; SEQ ID NO: 26 | 10597 |
| OCL12 | HC | PRT | WO2014009465; SEQ ID NO: 29 | 10598 |
| OCL13 | HC | PRT | WO2014009465; SEQ ID NO: 30 | 10599 |
| OCL14 | HC | PRT | WO2014009465; SEQ ID NO: 33 | 10600 |
| OCL15 | HC | PRT | WO2014009465; SEQ ID NO: 34 | 10601 |
| OCL16 | HC | PRT | WO2014009465; SEQ ID NO: 37 | 10602 |
| OCL17 | HC | PRT | WO2014009465; SEQ ID NO: 39 | 10603 |
| OCL18 | HC | PRT | WO2014009465; SEQ ID NO: 43 | 10604 |
| OCL19 | HC | PRT | WO2014009465; SEQ ID NO: 44 | 10605 |
| OCL20 | HC | PRT | WO2017053807; SEQ ID NO: 48 | 10606 |
| OCL21 | HC | PRT | WO2017053807; SEQ ID NO: 49 | 10607 |
| OCL22 | HC | PRT | WO2017062649; SEQ ID NO: 47 | 10608 |
| OCL23 | LC | PRT | WO2011117329; SEQ ID NO: 5 | 10609 |
| OCL24 | LC | PRT | WO2011117329; SEQ ID NO: 6 | 10610 |
| OCL25 | LC | PRT | WO2011117329; SEQ ID NO: 9 | 10611 |
| OCL26 | LC | PRT | WO2011117329; SEQ ID NO: 10 | 10612 |
| OCL27 | LC | PRT | WO2011117329; SEQ ID NO: 14 | 10613 |
| OCL28 | LC | PRT | WO2011117329; SEQ ID NO: 17 | 10614 |
| OCL29 | LC | PRT | WO2011117329; SEQ ID NO: 18 | 10615 |
| OCL30 | LC | PRT | WO2011117329; SEQ ID NO: 22 | 10616 |
| OCL31 | LC | PRT | WO2011117329; SEQ ID NO: 26 | 10617 |
| OCL32 | LC | PRT | WO2011117329; SEQ ID NO: 31 | 10618 |
| OCL33 | LC | PRT | WO2011117329; SEQ ID NO: 34 | 10619 |
| OCL34 | LC | PRT | WO2011117329; SEQ ID NO: 37 | 10620 |
| OCL35 | LC | PRT | WO2011117329; SEQ ID NO: 40 | 10621 |
| OCL36 | LC | PRT | WO2011117329; SEQ ID NO: 43 | 10622 |
| OCL37 | LC | PRT | WO2011117329; SEQ ID NO: 46 | 10623 |
| OCL38 | LC | PRT | WO2014009465; SEQ ID NO: 24 | 10624 |
| OCL39 | LC | PRT | WO2014009465; SEQ ID NO: 32 | 10625 |
| OCL49 | LC | PRT | WO2017053807; SEQ ID NO: 50 | 10626 |
| OCL41 | LC | PRT | WO2017062649; SEQ ID NO: 48 | 10627 |
| OCL42 | LC | PRT | WO2017062649; SEQ ID NO: 49 | 10628 |
| OCL43 | VH | PRT | WO2011117329; SEQ ID NO: 3 | 10629 |
| OCL44 | VH | PRT | WO2014009465; SEQ ID NO: 7 | 10630 |
| OCL45 | VH | PRT | WO2014009465; SEQ ID NO: 15 | 10631 |
| OCL46 | VH | PRT | WO2017053807; SEQ ID NO: 11 | 10632 |
| OCL47 | VH | PRT | WO2017053807; SEQ ID NO: 33 | 10633 |
| OCL48 | VH | PRT | WO2017053807; SEQ ID NO: 37 | 10634 |
| OCL49 | VH | PRT | WO2017053807; SEQ ID NO: 40 | 10635 |
| OCL50 | VH | PRT | WO2017053807; SEQ ID NO: 42 | 10636 |
| OCL51 | VH | PRT | WO2017079833; SEQ ID NO: 29 | 10637 |
| OCL52 | VH | PRT | WO2018014126; SEQ ID NO: 9 | 10638 |
| OCL53 | VH | PRT | WO2018014126; SEQ ID NO: 14 | 10639 |
| OCL54 | VH | PRT | WO2018014126; SEQ ID NO: 16 | 10640 |
| OCL55 | VH | PRT | WO2018014126; SEQ ID NO: 18 | 10641 |
| OCL56 | VH | PRT | WO2018014126; SEQ ID NO: 20 | 10642 |
| OCL57 | VH | PRT | WO2018014126; SEQ ID NO: 22 | 10643 |
| OCL58 | VH | PRT | WO2018014126; SEQ ID NO: 24 | 10644 |
| OCL59 | VH | PRT | WO2018014126; SEQ ID NO: 26 | 10645 |
| OCL60 | VH | PRT | WO2018014126; SEQ ID NO: 42 | 10646 |
| OCL61 | VH | PRT | WO2018014126; SEQ ID NO: 44 | 10647 |
| OCL62 | VH | PRT | WO201S014126; SEQ ID NO: 46 | 10648 |
| OCL63 | VH | PRT | WO2018014126; SEQ ID NO: 48 | 10649 |
| OCL64 | VH | PRT | WO2018014126; SEQ ID NO: 50 | 10650 |
| OCL65 | VH | PRT | WO2018014126; SEQ ID NO: 52 | 10651 |
| OCL66 | VH | PRT | WO2018014126; SEQ ID NO: 54 | 10652 |
| OCL67 | VH | PRT | WO2018014126; SEQ ID NO: 85 | 10653 |
| OCL68 | VL | PRT | WO2011117329; SEQ ID NO: 2 | 10654 |
| OCL69 | VL | PRT | WO2011117329; SEQ ID NO: 4 | 10655 |
| OCL70 | VL | PRT | WO2014009465; SEQ ID NO: 8 | 10656 |
| OCL71 | VL | PRT | WO2014009465; SEQ ID NO: 16 | 10657 |
| OCL72 | VL | PRT | WO2017053807; SEQ ID NO: 12 | 10658 |
| OCL73 | VL | PRT | WO2017053807; SEQ ID NO: 34 | 10659 |
| OCL74 | VL | PRT | WO2017053807; SEQ ID NO: 35 | 10660 |
| OCL75 | VL | PRT | WO2017053807; SEQ ID NO: 36 | 10661 |
| OCL76 | VL | PRT | WO2017053807; SEQ ID NO: 38 | 10662 |
| OCL77 | VL | PRT | WO2017053807; SEQ ID NO: 41 | 10663 |
| OCL78 | VL | PRT | WO2017053807; SEQ ID NO: 46 | 10664 |
| OCL79 | VL | PRT | WO2017053807; SEQ ID NO: 59 | 10665 |
| OCL80 | VL | PRT | WO2017053807; SEQ ID NO: 60 | 10666 |
| OCL81 | VL | PRT | WO2017079833; SEQ ID NO: 31 | 10667 |
| OCL82 | VL | PRT | WO2018014126; SEQ ID NO: 11 | 10668 |
| OCL83 | VL | PRT | WO2018014126; SEQ ID NO: 28 | 10669 |
| OCL84 | VL | PRT | WO2018014126; SEQ ID NO: 30 | 10670 |
| OCL85 | VL | PRT | WO2018014126; SEQ ID NO: 32 | 10671 |
| OCL86 | VL | PRT | WO2018014126; SEQ ID NO: 34 | 10672 |
| OCL87 | VL | PRT | WO2018014126; SEQ ID NO: 36 | 10673 |
| OCL88 | VL | PRT | WO2018014126; SEQ ID NO: 38 | 10674 |
| OCL89 | VL | PRT | WO2018014126; SEQ ID NO: 40 | 10675 |
| OCL99 | VL | PRT | WO2018014126; SEQ ID NO: 58 | 10676 |
| OCL91 | VL | PRT | WO2018014126; SEQ ID NO: 60 | 10677 |
| OCL92 | VL | PRT | WO2018014126; SEQ ID NO: 64 | 10678 |
| OCL93 | VL | PRT | WO2018014126; SEQ ID NO: 66 | 10679 |
| OCL94 | VL | PRT | WO2018014126; SEQ ID NO: 68 | 10680 |
| OCL95 | VL | PRT | WO2018014126; SEQ ID NO: 87 | 10681 |
| OCL96 | VL | PRT | WO2018014126; SEQ ID NO: 89 | 10682 |

[1014] In some embodiments, the payload region of the AAV particle comprises a nucleic acid sequence with at least 50% identity to one or more nucleic acid sequences listed in Table 14, or variants or fragments thereof. The payload nucleic acid sequence may have 50%, 51%, 52%, 53%, 54%, 55%, 56%, 57%, 58%, 59%, 60%, 61%, 62%, 63%, 64%, 65%, 66%, 67%, 68%, 69%, 70%: 71%, 72%, 73%, 74%, 75%, 76%, 77%, 78%, 79%, 80%, 81%, 82%, 83%, 84%, 85%, 86%, 87%, 88%, 89%, 90%, 91% 92% 93%. 94%, 95%, 96%, 97%, 98%, 99%, or 100% identity to one or more nucleic acid sequences listed in Table 14, or variants or fragments thereof.

[1015] In some embodiments, the payload nucleic acid sequence has 90% identity to one or more of the nucleic acid sequences listed in Table 14, or variants or fragments thereof.

[1016] In some embodiments, the payload nucleic acid sequence has 91% identity to one or more of the nucleic acid sequences listed in Table 14, or variants or fragments thereof.

[1017] In some embodiments, the payload nucleic acid sequence has 92% identity to one or more of the nucleic acid sequences listed in Table 14, or variants or fragments thereof.

[1018] In some embodiments, the payload nucleic acid sequence has 93% identity to one or more of the nucleic acid sequences listed in Table 14, or variants or fragments thereof.

[1019] In some embodiments, the payload nucleic acid sequence has 94% identity to one or more of the nucleic acid sequences listed in Table 14, or variants or fragments thereof.

[1020] In some embodiments, the payload nucleic acid sequence has 95% identity to one or more of the nucleic acid sequences listed in Table 14, or variants or fragments thereof.

[1021] In some embodiments, the payload nucleic acid sequence has 96% identity to one or more of the nucleic acid sequences listed in Table 14, or variants or fragments thereof.

[1022] In some embodiments, the payload nucleic acid sequence has 97% identity to one or more of the nucleic acid sequences listed in Table 14, or variants or fragments thereof.

[1023] In some embodiments, the payload nucleic acid sequence has 98% identity to one or more of the nucleic acid sequences listed in Table 14, or variants or fragments thereof.

[1024] In some embodiments, the payload nucleic acid sequence has 99% identity to one or more of the nucleic acid sequences listed in Table 14, or variants or fragments thereof.

[1025] In some embodiments, the payload nucleic acid sequence has 100% identity to one or more of the nucleic acid sequences listed in Table 14, or variants or fragments thereof.

[1026] In some embodiments, the payload region of the AAV particle comprises a nucleic acid sequence encoding a polypeptide which is an antibody, an antibody-based composition, or a fragment thereof. As a non-limiting example, the antibody may be one or more of the polypeptides listed in Table 14, or variants or fragments thereof. As another non-limiting example, the antibody may be one or more of the heavy chain sequences listed in Table 14. As a non-limiting example, the antibody may be one or more of the light chain sequences listed in Table 14, or variants or fragments thereof.

[1027] In some embodiments, the payload region of the AAV particle comprises a nucleic acid sequence encoding a polypeptide comprising a heavy chain and alight chain sequence listed in Table 14, or variants or fragments thereof. The payload region may also comprise a linker between the heavy and light chain sequences. The linker may be a sequence known in the art or described in Table 2.

[1028] In some embodiments, the payload region of the AAV particle comprises a nucleic acid sequence encoding a polypeptide comprising a heavy chain and alight chain sequence listed in Table 14, or variants or fragments thereof, where the heavy chain sequence is from a different antibody than the light chain sequence. The payload region may also comprise a linker between the heavy and light chain sequences. The linker may be a sequence known in the art or described in Table 2.

[1029] In some embodiments, the payload region comprises, in the 5′ to 3′ direction, an antibody light chain sequence, a linker and a heavy chain sequence. In another embodiment, the linker is not used.

[1030] In some embodiments, the payload region comprises a nucleic acid sequence encoding, in the 5′ to 3′ direction, an antibody light chain sequence from Table 14, one or more linkers from Table 2 and a heavy chain sequence from Table 14.

[1031] In some embodiments, the payload region comprises, in the 5′ to 3′ direction, an antibody heavy chain sequence, a linker region (may comprise one or more linkers) and alight chain sequence. In another embodiment, the linker is not used.

[1032] In some embodiments, the payload region comprises a nucleic acid sequence encoding, in the 5′ to 3′ direction, an antibody heavy chain sequence from Table 14, one or more linkers from Table 2, and alight chain sequence from Table 14.

[1033] In some embodiments, the payload region comprises a nucleic acid sequence encoding a single heavy chain. As a non-limiting example, the heavy chain is an amino acid sequence or fragment thereof described in Table 14.

[1034] Shown in Table 14 are a listing of antibodies and their polynucleotides and/or polypeptides sequences. These sequences may be encoded by or included in the AAV particles of the present disclosure. Variants or fragments of the antibody sequences described in Table 14 may be utilized in the AAV particles of the present disclosure.

[1035] In some embodiments, the AAV particles may comprise a viral genome, wherein one or more components may be codon-optimized. Codon-optimization may be achieved by any method known to one with skill in the art such as, but not limited to, by a method according to Genescript, EMBOSS, Bioinformatics, NUS, NUS2, Geneinfinity, IDT, NUS3, GregThatcher, Insilico, Molbio, N2P, Snapgene, and/or VectorNTI. Antibody heavy and/or light chain sequences within the same viral genome may be codon-optimized according to the same or according to different methods.

[1036] In some cases, the payload region of the AAV particles may encode one or more isoforms or variants of heavy and light chain antibody domains. Such variants may be humanized or optimized antibody domains comprising one or more complementarity determining regions (CDRs) from the heavy and light chains listed in Table 14. CDRs of the antibodies encoded by the viral genomes of the present disclosure may be 50%, 60%,70%, 80%, 90%, 95% identical to CDRs listed in or incorporated in the sequences of Table 14. Methods of determining CDRs are well known in the art and are described herein. Payload regions may encode antibody variants with one or more heavy chain variable domain (V_{H}) or light chain variable domain (V_{L}) derived from the antibody sequences in Table 14. In some cases, such variants may include bispecific antibodies. Bispecific antibodies encoded by payload regions may comprise variable domain pairs from two different antibodies.

[1037] In some embodiments, the AAV particles may comprise a heavy and alight chain of an antibody described herein and two promoters. As a non-limiting example, the AAV particles may comprise a nucleic acid sequence of a genome as described in FIG. 1 or FIG. 2 of US Patent Publication No. US20030219733, the contents of which are herein incorporated by reference in their entirety. As another non-limiting example, the AAV particles may be a dual-promoter AAV for antibody expression as described by Lewis et al. (J. of. Virology, September 2002, Vol. 76(17), p 8769-8775; the contents of which are herein incorporated by reference in their entirety).

[1038] Payload regions of the viral genomes may encode any ocular disease-associated antibodies, not limited to those described in Table 14, including antibodies that are known in the art and/or antibodies that are commercially available. This may include fragments of such antibodies or antibodies that have been developed to comprise one or more of such fragments [e.g., variable domains or complementarity determining regions (CDRs)].

[1039] In some embodiments, the AAV particles may have a payload region comprising any of the ocular disease-associated antibodies as described in International Publication Number WO2017048614, WO2017053807, WO2017054086, WO2017062649, WO2017062820, WO2017062952, WO2017067423, WO2017072325, WO2017075173, WO2017075212, WO2017075252, WO2017075259, WO2017079443, WO2017083488, WO2017083750, WO2017091719, WO2017100540, WO2017106236, WO2017117430, WO2017117464, WO2017120344, WO2017123646, WO2017124002, WO2017127833, WO2017129064, WO2017134301, WO2017134302, WO2017134305, WO2017134306, WO2017136350, WO2017136355, WO2017136549, WO2017137542, WO2017147293, WO2017149538, WO2017152102, WO2017153567, WO2017156488, WO2017176864, WO2017177169, WO2017180530, WO2017180936, WO2017180993, WO2017181021, WO2017181031, WO2017181039, WO2017186928, WO2017188570, WO2017189959, WO2017189963, WO2017189964, WO2017192538, WO2017194568, WO2017194782, WO2017194783, WO2017197331, WO2017197376, WO2017211731, WO2017214706, WO2017215524, WO2017218977, WO2017221128, WO2018005904, WO2018007314, WO2018017714, WO2018027329, WO2018039626, WO2018045325, WO2018053434, WO2018064190, WO2018070390, WO2018073680, WO2018077893, WO2018089305, WO2018102594, WO2018124582, WO2018127519, WO2018127586, WO2018127791, WO2018129404, WO2018129524, WO2018141964, WO2018144999, WO2018146074, WO2018158658, WO2018158727, WO2018160538, WO2018160896, WO2018161092, WO2018164385, WO2018165362, WO2018169948, WO2018175476, WO2018175752, WO2018175788, WO2018175988, WO2018178307, WO2018182266, WO2018191548, WO2018195283, WO2018195912, WO2018200620, WO2018204868, WO2018208625, WO2018208709, WO2018210898, WO2018212714, WO2018213260, WO2018213592, WO2018217976, WO2018217988, WO2018218083, WO2018218215, WO2018218240, WO2018220216, WO2018224630, WO2018226578, WO2019003074, WO2019015673, WO2019028051, WO2019028427, WO2019032661, WO2019032662, WO2019032663, WO2019042226, WO2019054819, WO2019055842, WO2019060653, WO2019062871, WO2019067540, WO2019067682, WO2019075136, WO2019075270, WO2019079249, WO2019079809, WO2019085804, WO2019086580, WO2019087087, WO2019089973, WO2019090069, WO2019090074, WO2019090076, WO2019090078, WO2019090081, WO2019090082, WO2019090085, WO2019090088, WO2019090090, WO2019090110, WO2019093807, WO2019094578, and WO2019094700, the contents of each of which are herein incorporated by reference in their entirety.

[1040] In some embodiments, payloads of the present disclosure may encode one or more of the ocular associated antibodies (or fragments thereof) taught in International Patent Publication Numbers WO2017053807, WO2010040508, WO2014009465, and/or WO2011117329 (the contents of each of which are herein incorporated by reference in their entirety). In some embodiments, the ocular associated antibodies may be Faricimab and/or Vanucizumab described in International Patent Publication Numbers WO2017053807, WO2010040508, WO2014009465, and/or WO2011117329.

[1041] In some embodiments, the payload region of the viral particle comprises one or more nucleic acid sequences encoding one or more of the ocular disease payload antibody polypeptides listed in Table 11 of US provisional patent application 623844,433 (OC1-OC676; SEQ ID NO: 20230-20905), the contents of which are herein incorporated by reference in their entirety.

### Antibodies for the Treatment of Excretory and Kidney Diseases

[1042] In some embodiments, the payload region of the AAV particle comprises one or more nucleic acid sequences encoding ocular disease-associated antibodies, variants or fragments thereof.

[1043] In some embodiments, the payload region of the AAV particle comprises one or more nucleic acid sequences encoding one or more of the payload antibody polypeptides listed in Tables 15, or variants or fragments thereof.

[1044] In some embodiments, the payload region of the AAV particle comprises one or more nucleic acid sequences listed in Table 15, or variants or fragments thereof.

[1045] In some embodiments, the payload region of the AAV particle comprises a nucleic acid sequence encoding a payload antibody with at least 50% identity to one or more payload antibody polypeptides listed in Table 15. The encoded antibody polypeptide may have 50%, 51%, 52%, 53%, 54%, 55%, 56%, 57%, 58%, 59%, 60%, 61%, 62%, 63%, 64%, 65%, 66%, 67%, 68%, 69%, 70%, 71%, 72%, 73%, 74%, 75%, 76%, 77%, 78%, 79%, 80%, 81%, 82%, 83%, 84%, 85%, 86%, 87%, 88%, 89%, 90%, 91%, 92%, 93%, 94%, 95%, 96%, 97%, 98%, 99%, or 100% identity to one or more of the payload antibody polypeptides listed in Table 15, or variants or fragments thereof.

[1046] In some embodiments, the full sequence of the encoded antibody polypeptide may have 50%, 51%, 52%, 53%, 54%, 55%, 56%, 57%, 58%, 59%, 60%, 61%, 62%, 63%, 64%, 65%, 66%, 67%, 68%, 69%, 70%, 71%, 72%, 73%, 74%, 75%, 76%, 77%, 78%, 79%, 80%, 81%, 82%, 83%, 84%, 85%, 86%, 87%, 88%, 89%, 90%, 91%, 92%, 93%, 94%, 95%, 96%, 97%, 98%, 99%, or 100% identity to one or more of the payload antibody polypeptides listed in Table 15, or variants or fragments thereof.

[1047] In some embodiments, the variable region sequence(s) of the encoded antibody polypeptide may have 50%, 51%, 52%, 53%, 54%, 55%, 56%, 57%, 58%, 59%, 60%, 61%, 62%, 63%, 64%, 65%, 66%, 67%, 68%, 69%, 70%, 71%, 72%, 73%, 74%, 75%, 76%, 77%, 78%, 79%, 80%, 81%, 82%, 83%, 84%, 85%, 86%, 87%, 88%, 89%, 90%, 91%, 92%, 93%, 94%, 95%, 96%, 97%, 98%, 99%, or 100% identity to one or more of the payload antibody polypeptides listed in Table 15, or variants or fragments thereof.

[1048] In some embodiments, the heavy chain of the encoded antibody polypeptide may have 50%, 51%, 52%,53%, 54%, 55%, 56%, 57%, 58%, 59%, 60%, 61%, 62%, 63%, 64%, 65%, 66%, 67%, 68%, 69%, 70%, 71%, 72%, 73%, 74%, 75%, 76%, 77%, 78%, 79%, 80%, 81%, 82%, 83%, 84%, 85%, 86%, 87%, 88%, 89%, 90%, 91%, 92%, 93%, 94%, 95%, 96%, 97%, 98%, 99%, or 100% identity to one or more of the payload heavy chain antibody polypeptides listed in Table 15, or variants or fragments thereof.

[1049] In some embodiments, the light chain of the encoded antibody polypeptide may have 50%, 51%, 52%, 53%,54%, 55%, 56%, 57%, 58%, 59%, 60%, 61%, 62%, 63%, 64%, 65%, 66%, 67%, 68%, 69%, 70%, 71%, 72%, 73%, 74%, 75%, 76%, 77%, 78%, 79%, 80%, 81%, 82%, 83%, 84%, 85%, 86%, 87%, 88%, 89%, 90%, 91%, 92%, 93%, 94%, 95%, 96%, 97%, 98%, 99%, or 100% identity to one or more of the payload light chain antibody polypeptides listed in Table 15, or variants or fragments thereof.

[1050] In some embodiments, the CDR region of the encoded antibody polypeptide may have 50%, 51%, 52%, 53%, 54%, 55%, 56%, 57%, 58%, 59%, 60%, 61%, 62%, 63%, 64%, 65%, 66%, 67%, 68%, 69%, 70%, 71%, 72%, 73%, 74%, 75%, 76%, 77%, 78%, 79%, 80%, 81%, 82%, 83%, 84%, 85%, 86%,87%,88%, 89%, 90%, 91%, 92%, 93%, 94%, 95%, 96%, 97%, 98%, 99%, or 100% identity to the CDRs of one or more of the payload antibody polypeptides listed in Table 15, or variants or fragments thereof.

[1051] In some embodiments, the payload antibody has 90% identity to one or more of the antibody polypeptides listed in Table 15, or variants or fragments thereof.

[1052] In some embodiments, the payload antibody has 91% identity to one or more of the antibody polypeptides listed in Table 15, or variants or fragments thereof.

[1053] In some embodiments, the payload antibody has 92% identity to one or more of the antibody polypeptides listed in Table 15, or variants or fragments thereof.

[1054] In some embodiments, the payload antibody has 93% identity to one or more of the antibody polypeptides listed in Table 15, or variants or fragments thereof.

[1055] In some embodiments, the payload antibody has 94% identity to one or more of the antibody polypeptides listed in Table 15, or variants or fragments thereof.

[1056] In some embodiments, the payload antibody has 95% identity to one or more of the antibody polypeptides listed in Table 15, or variants or fragments thereof.

[1057] In some embodiments, the payload antibody has 96% identity to one or more of the antibody polypeptides listed in Table 15, or variants or fragments thereof.

[1058] In some embodiments, the payload antibody has 97% identity to one or more of the antibody polypeptides listed in Table 15, or variants or fragments thereof.

[1059] In some embodiments, the payload antibody has 98% identity to one or more of the antibody polypeptides listed in Table 15, or variants or fragments thereof.

[1060] In some embodiments, the payload antibody has 99% identity to one or more of the antibody polypeptides listed in Table 15, or variants or fragments thereof.

[1061] In some embodiments, the payload antibody has 100% identity to one or more of the antibody polypeptides listed in Table 15, or variants or fragments thereof.

[1062] In some embodiments, the payload antibody may be variants of any of the antibody polypeptides listed in Table 15, that exclude one or more amino acids designated as “X” or “x” in the described polypeptide sequence, wherein X may represent any amino acid. In some embodiments, the payload nucleic acid sequence may be variants of any of the nucleic acid sequences listed in Table 15, that exclude one or more nucleic acids designated as “n” or “N” in the described nucleic acid sequence, wherein n may represent any nucleic acid.

TABLE 15
Excretory and Kidney disease antibodies

| | | Type | | |
|---|---|---|---|---|
| Ab ID | Component | (PRT/DNA) | Reference | SEQ ID NO |
| EKD1 | HC | PRT | WO2018227063; SEQ ID NO: 34 | 10683 |
| EKD2 | HC | PRT | WO2018227063; SEQ ID NO: 36 | 10684 |
| EKD3 | HC | PRT | WO2018227063; SEQ ID NO: 37 | 10685 |
| EKD4 | HC | PRT | WO2018227063; SEQ ID NO: 45 | 10686 |
| EKD5 | HC | PRT | WO2018227063; SEQ ID NO: 51 | 10687 |
| EKD6 | HC | PRT | WO2018227063; SEQ ID NO: 57 | 10688 |
| EKD7 | HC | PRT | WO2018227063; SEQ ID NO: 72 | 10689 |
| EKD8 | HC | PRT | WO2018227063; SEQ ID NO: 75 | 10690 |
| EKD9 | HC | PRT | WO2018227063; SEQ ID NO: 78 | 10691 |
| EKD10 | HC | PRT | WO2018227063; SEQ ID NO: 81 | 10692 |
| EKD11 | HC | PRT | WO2018227063; SEQ ID NO: 84 | 10693 |
| EKD12 | HC | PRT | WO2018227063; SEQ ID NO: 87 | 10694 |
| EKD13 | HC | PRT | WO2018227063; SEQ ID NO: 90 | 10695 |
| EKD14 | HC | PRT | WO2018227063; SEQ ID NO: 118 | 10696 |
| EKD15 | HC | PRT | WO2018227063; SEQ ID NO: 121 | 10697 |
| EKD16 | HC | PRT | WO2018227063; SEQ ID NO: 134 | 10698 |
| EKD17 | HC | PRT | WO2018227063; SEQ ID NO: 135 | 10699 |
| EKD18 | HC | PRT | WO2018227063; SEQ ID NO: 136 | 10700 |
| EKD19 | HC | PRT | WO2018227063; SEQ ID NO: 137 | 10701 |
| EKD20 | HC | PRT | WO2018227063; SEQ ID NO: 138 | 10702 |
| EKD21 | HC | PRT | WO2018227063; SEQ ID NO: 139 | 10703 |
| EKD22 | HC | PRT | WO2018227063; SEQ ID NO: 140 | 10704 |
| EKD23 | LC | PRT | WO2018227063; SEQ ID NO: 38 | 10705 |
| EKD24 | LC | PRT | WO2018227063; SEQ ID NO: 42 | 10706 |
| EKD25 | LC | PRT | WO2018227063; SEQ ID NO: 48 | 10707 |
| EKD26 | LC | PRT | WO2018227063; SEQ ID NO: 54 | 10708 |
| EKD27 | LC | PRT | WO2018227063; SEQ ID NO: 60 | 10709 |
| EKD28 | LC | PRT | WO2018227063; SEQ ID NO: 63 | 10710 |
| EKD29 | LC | PRT | WO2018227063; SEQ ID NO: 66 | 10711 |
| EKD30 | LC | PRT | WO2018227063; SEQ ID NO: 69 | 10712 |
| EKD31 | LC | PRT | WO2018227063; SEQ ID NO: 93 | 10713 |
| EKD32 | LC | PRT | WO2018227063; SEQ ID NO: 96 | 10714 |
| EKD33 | LC | PRT | WO2018227063; SEQ ID NO: 98 | 10715 |
| EKD34 | LC | PRT | WO2018227063; SEQ ID NO: 100 | 10716 |
| EKD35 | LC | PRT | WO2018227063; SEQ ID NO: 102 | 10717 |
| EKD36 | LC | PRT | WO2018227063; SEQ ID NO: 104 | 10718 |
| EKD37 | LC | PRT | WO2018227063; SEQ ID NO: 106 | 10719 |
| EKD38 | LC | PRT | WO2018227063; SEQ ID NO: 108 | 10720 |
| EKD39 | LC | PRT | WO2018227063; SEQ ID NO: 110 | 10721 |
| EKD40 | LC | PRT | WO2018227063; SEQ ID NO: 112 | 10722 |
| EKD41 | LC | PRT | WO2018227063; SEQ ID NO: 114 | 10723 |
| EKD42 | LC | PRT | WO2018227063; SEQ ID NO: 141 | 10724 |
| EKD43 | VH | PRT | WO2018227063; SEQ ID NO: 32 | 10725 |
| EKD44 | VH | PRT | WO2018227063; SEQ ID NO: 43 | 10726 |
| EKD45 | VH | PRT | WO2018227063; SEQ ID NO: 49 | 10727 |
| EKD46 | VH | PRT | WO2018227063; SEQ ID NO: 55 | 10728 |
| EKD47 | VH | PRT | WO2018227063; SEQ ID NO: 70 | 10729 |
| EKD48 | VH | PRT | WO2018227063; SEQ ID NO: 73 | 10730 |
| EKD49 | VH | PRT | WO2018227063; SEQ ID NO: 76 | 10731 |
| EKD50 | VH | PRT | WO2018227063; SEQ ID NO: 79 | 10732 |
| EKD51 | VH | PRT | WO2018227063; SEQ ID NO: 82 | 10733 |
| EKD52 | VH | PRT | WO2018227063; SEQ ID NO: 85 | 10734 |
| EKD53 | VH | PRT | WO2018227063; SEQ ID NO: 88 | 10735 |
| EKD54 | VH | PRT | WO2018227063; SEQ ID NO: 115 | 10736 |
| EKD55 | VH | PRT | WO2018227063; SEQ ID NO: 119 | 10737 |
| EKD56 | VH | PRT | WO2018227063; SEQ ID NO: 126 | 10738 |
| EKD57 | VH | PRT | WO2018227063; SEQ ID NO: 127 | 10739 |
| EKD58 | VH | PRT | WO2018227063; SEQ ID NO: 128 | 10740 |
| EKD59 | VH | PRT | WO2018227063; SEQ ID NO: 129 | 10741 |
| EKD60 | VH | PRT | WO20182270S3; SEQ ID NO: 130 | 10742 |
| EKD61 | VH | PRT | WO2018227063; SEQ ID NO: 131 | 10743 |
| EKD62 | VH | PRT | WO2018227063; SEQ ID NO: 132 | 10744 |
| EKD63 | VL | PRT | WO2018227063; SEQ ID NO: 39 | 10745 |
| EKD64 | VL | PRT | WO2018227063; SEQ ID NO: 46 | 10746 |
| EKD65 | VL | PRT | WO2018227063; SEQ ID NO: 52 | 10747 |
| EKD66 | VL | PRT | WO2018227063; SEQ ID NO: 58 | 10748 |
| EKD67 | VL | PRT | WO2018227063; SEQ ID NO: 61 | 10749 |
| EKD68 | VL | PRT | WO2018227063; SEQ ID NO: 64 | 10750 |
| EKD69 | VL | PRT | WO2018227063; SEQ ID NO: 67 | 10751 |
| EKD70 | VL | PRT | WO2018227063; SEQ ID NO: 91 | 10752 |
| EKD71 | VL | PRT | WO2018227063; SEQ ID NO: 94 | 10753 |
| EKD72 | VL | PRT | WO2018227063; SEQ ID NO: 97 | 10754 |
| EKD73 | VL | PRT | WO2018227063; SEQ ID NO: 99 | 10755 |
| EKD74 | VL | PRT | WO2018227063; SEQ ID NO: 101 | 10756 |
| EKD75 | VL | PRT | WO2018227063; SEQ ID NO: 103 | 10757 |
| EKD76 | VL | PRT | WO2018227063; SEQ ID NO: 105 | 10758 |
| EKD77 | VL | PRT | WO2018227063; SEQ ID NO: 107 | 10759 |
| EKD78 | VL | PRT | WO2018227063; SEQ ID NO: 109 | 10760 |
| EKD79 | VL | PRT | WO2018227063; SEQ ID NO: 111 | 10761 |
| EKD80 | VL | PRT | WO2018227063; SEQ ID NO: 113 | 10762 |
| EKD81 | VL | PRT | WO2018227063; SEQ ID NO: 133 | 10763 |

Antibodies for the Treatment of Multiple Specific Diseases and/or Targets

[1063] In some embodiments, the payload region of the AAV particle comprises one or more nucleic add sequences encoding multiple specific disease- and/or target-associated antibodies, variants or fragments thereof.

[1064] In some embodiments, the payload region of the AAV particle comprises one or more nucleic add sequences encoding one or more of the payload antibody polypeptides listed in Table 16, or variants or fragments thereof. As used herein, “antibody polynucleotide” refers to a nucleic acid sequence encoding an antibody polypeptide.

[1065] In some embodiments, the payload region of the AAV particle comprises one or more nucleic add sequences listed in Table 16, or variants or fragments thereof.

[1066] In some embodiments, the payload region of the AAV particle comprises a nucleic acid sequence encoding a payload antibody with at least 50% identity to one or more payload antibody polypeptides listed in Table 16. The encoded antibody polypeptide may have 50%: 51%, 52%, 53%, 54%, 55%, 56%, 57%, 58%, 59%, 60%, 61%, 62%, 63%, 64%, 65%, 66%,697%, 68%, 69%, 70%, 71%, 72%, 73%, 74%, 75%, 76%, 77%, 78%, 79%,80%,81%, 82%,83%, 84%, 85%, 86%, 87%, 88%, 89%, 90%, 91%, 92%, 93%, 94%, 95%, 96%, 97%, 98%, 99%, or 100% identity to one or more of the payload antibody polypeptides listed in Table 16, or variants or fragments thereof.

[1067] In some embodiments, the full sequence of the encoded antibody polypeptide may have 50%, 51%, 52%, 53%, 54%, 55%, 56%, 57%, 58%, 59%, 60%, 61%, 62%, 63%,64%, 65%, 66%, 67%, 68%, 69%, 70%, 71%, 72%, 73%, 74%, 75%, 76%, 77%, 78%, 79%, 80%, 81%, 82%, 83%, 84%, 85%, 86%, 87%, 88%, 89%, 90%, 91%, 92%, 93%, 94%, 95%, 96%, 97%, 98%, 99%, or 100% identity to one or more of the payload antibody polypeptides listed in Table 16, or variants or fragments thereof.

[1068] In some embodiments, the variable region sequence(s) of the encoded antibody polypeptide may have 50%,51%, 52%, 53%, 54%, 55%, 56%, 57%, 58%, 59%, 60%, 61%, 62%, 63%, 64%, 65%, 66%, 67%, 68%, 69%, 70%, 71%, 72%, 73%, 74%, 75%, 76%, 77%, 78%, 79%, 80%, 81%, 82%, 83%, 84%, 85%, 86%, 87%, 88%, 89%, 90%, 91%, 92%, 93%, 94%, 95%, 96%, 97%, 98%, 99%, or 100% identity to one or more of the payload antibody polypeptides listed in Table 16, or variants or fragments thereof.

[1069] In some embodiments, the heavy chain of the encoded antibody polypeptide may have 50%, 51%, 52%, 53%, 54%, 55%, 56%, 57%, 58%, 59%, 60%, 61%, 62%, 63%, 64%, 65%, 66%, 67%, 68%, 69%, 70%, 71%, 72%, 73%, 74%, 75%, 76%,77%, 78%, 79%, 80%, 81%, 82%, 83%, 84%, 85%, 86%, 87%, 88%, 89%, 90%, 91%, 92%, 93%, 94%, 95%, 96%, 97%, 98%, 99%, or 100% identity to one or more of the payload heavy chain antibody polypeptides listed in Table 16, or variants or fragments thereof.

[1070] In some embodiments, the light chain of the encoded antibody polypeptide may have 50%, 51%, 52%, 53%, 54%, 55%, 56%, 57%, 58%, 59%, 60%, 61%, 62%, 63%, 64%, 65%, 66%, 67%, 68%, 69%, 70%, 71%, 72%, 73%, 74%, 75%, 76%, 77%, 78%, 79%, 80%, 81%, 82%, 83%, 84%, 85%, 86%, 87%, 88%, 89%, 90%, 91%, 92%, 93%, 94%, 95%, 96%, 97%, 98%, 99%, or 100% identity to one or more of the payload light chain antibody polypeptides listed in Table 16, or variants or fragments thereof.

[1071] In some embodiments, the CDR region of the encoded antibody polypeptide may have 50%, 51%, 52%,53%, 54%, 55%, 56%, 57%, 58%, 59%, 60%, 61%, 62%, 63%, 64%, 65%, 66%, 67%, 68%, 69%, 70%, 71%, 72%, 73%, 74%, 75%, 76%, 77%, 78%, 79%, 80%, 81%, 82%, 83%, 84%, 85%, 86%, 87%, 88%, 89%,90%,91%, 92%,93%,94%, 95%, 96%,97%,98%, 99%, or 100% identity to the CDRs of one or more of the payload antibody polypeptides listed in Table 16, or variants or fragments thereof.

[1072] In some embodiments, the payload antibody has 90% identity to one or more of the antibody polypeptides listed in Table 16, or variants or fragments thereof.

[1073] In some embodiments, the payload antibody has 91% identity to one or more of the antibody polypeptides listed in Table 16, or variants or fragments thereof.

[1074] In some embodiments, the payload antibody has 92% identity to one or more of the antibody polypeptides listed in Table 16, or variants or fragments thereof.

[1075] In some embodiments, the payload antibody has 93% identity to one or more of the antibody polypeptides listed in Table 16, or variants or fragments thereof.

[1076] In some embodiments, the payload antibody has 94% identity to one or more of the antibody polypeptides listed in Table 16, or variants or fragments thereof.

[1077] In some embodiments, the payload antibody has 95% identity to one or more of the antibody polypeptides listed in Table 16, or variants or fragments thereof.

[1078] In some embodiments, the payload antibody has 96% identity to one or more of the antibody polypeptides listed in Table 16, or variants or fragments thereof.

[1079] In some embodiments, the payload antibody has 97% identity to one or more of the antibody polypeptides listed in Table 16, or variants or fragments thereof.

[1080] In some embodiments, the payload antibody has 98% identity to one or more of the antibody polypeptides listed in Table 16, or variants or fragments thereof.

[1081] In some embodiments, the payload antibody has 99% identity to one or more of the antibody polypeptides listed in Table 16, or variants or fragments thereof.

[1082] In some embodiments, the payload antibody has 100% identity to one or more of the antibody polypeptides listed in Table 16, or variants or fragments thereof.

[1083] In some embodiments, the payload region of the AAV particle comprises a nucleic acid sequence with at least 50% identity to one or more nucleic acid sequences listed in Table 16, or variants or fragments thereof. The payload nucleic acid sequence may have 50%, 51%, 52%, 53%, 54%, 55%, 56%, 57%, 58%, 59%, 60%, 61%, 62%, 63%, 64%, 65%, 66%,67%,68%, 69%, 70%, 71%, 72%, 73%, 74%, 75%, 76%, 77%, 78%, 79%, 80%, 81%, 82%, 83%, 84%, 85%, 86%, 87%, 88%, 89%, 90%, 91%, 92%, 93%, 94%, 95%, 96%, 97%, 98%, 99%, or 100% identity to one or more nucleic acid sequences listed in Table 16, or variants or fragments thereof.

[1084] In some embodiments, the payload nucleic acid sequence has 90% identity to one or more of the nucleic acid sequences listed in Table 16, or variants or fragments thereof.

[1085] In some embodiments, the payload nucleic acid sequence has 91% identity to one or more of the nucleic acid sequences listed in Table 16, or variants or fragments thereof.

[1086] In some embodiments, the payload nucleic acid sequence has 92% identity to one or more of the nucleic acid sequences listed in Table 16, or variants or fragments thereof.

[1087] In some embodiments, the payload nucleic acid sequence has 93% identity to one or more of the nucleic acid sequences listed in Table 16, or variants or fragments thereof.

[1088] In some embodiments, the payload nucleic acid sequence has 94% identity to one or more of the nucleic acid sequences listed in Table 16, or variants or fragments thereof.

[1089] In some embodiments, the payload nucleic acid sequence has 95% identity to one or more of the nucleic acid sequences listed in Table 16, or variants or fragments thereof.

[1090] In some embodiments, the payload nucleic acid sequence has 96% identity to one or more of the nucleic acid sequences listed in Table 16, or variants or fragments thereof.

[1091] In some embodiments, the payload nucleic acid sequence has 97% identity to one or more of the nucleic acid sequences listed in Table 16, or variants or fragments thereof.

[1092] In some embodiments, the payload nucleic acid sequence has 98% identity to one or more of the nucleic acid sequences listed in Table 16, or variants or fragments thereof.

[1093] In some embodiments, the payload nucleic acid sequence has 99% identity to one or more of the nucleic acid sequences listed in Table 16, or variants or fragments thereof.

[1094] In some embodiments, the payload nucleic acid sequence has 100% identity to one or more of the nucleic acid sequences listed in Table 16, or variants or fragments thereof.

[1095] In some embodiments, the payload antibody may be variants of any of the antibody polypeptides listed in Table 16, that exclude one or more amino acids designated as “X” or “x” in the described polypeptide sequence, wherein X may represent any amino acid. In some embodiments, the payload nucleic acid sequence may be variants of any of the nucleic acid sequences listed in Table 16, that exclude one or more nucleic acids designated as “n” or “N” in the described nucleic acid sequence, wherein n may represent any nucleic acid.

TABLE 16
Multiple specific disease and/or target antibodies

| | | Type | | |
|---|---|---|---|---|
| Ab ID | Component | (PRT/DNA) | Reference | SEQ ID NO. |
| MSP1 | HC | PRT | U.S. Pat. No. 9,080,177; SEQ ID NO: 19 | 10764 |
| MSP2 | HC | PRT | U.S. Pat. No. 9,080,177; SEQ ID NO: 15 | 10765 |
| MSP3 | HC | PRT | U.S. Pat. No. 9,080,177; SEQ ID NO: 13 | 10766 |
| MSP4 | HC | PRT | U.S. Pat. No. 9,080,177; SEQ ID NO: 17 | 10767 |
| MSP5 | HC | PRT | U.S. Pat. No. 9,080,177; SEQ ID NO: 23 | 10768 |
| MSP6 | HC | PRT | U.S. Pat. No. 9,080,177; SEQ ID NO: 21 | 10769 |
| MSP7 | HC | PRT | U.S. Pat. No. 9,080,177; SEQ ID NO: 12 | 10770 |
| MSP8 | LC | PRT | U.S. Pat. No. 9,080,177; SEQ ID NO: 18 | 10771 |
| MSP9 | LC | PRT | U.S. Pat. No. 9,080,177; SEQ ID NO: 20 | 10772 |
| MSP10 | LC | PRT | U.S. Pat. No. 9,080,177; SEQ ID NO: 11 | 10773 |
| MSP11 | LC | PRT | U.S. Pat. No. 9,080,177; SEQ ID NO: 24 | 10774 |
| MSP12 | LC | PRT | U.S. Pat. No. 9,080,177; SEQ ID NO: 22 | 10775 |
| MSP13 | LC | PRT | U.S. Pat. No. 9,080,177; SEQ ID NO: 16 | 10776 |
| MSP14 | LC | PRT | U.S. Pat. No. 9,080,177; SEQ ID NO: 14 | 10777 |
| MSP15 | HC | PRT | WO2017058771; SEQ ID NO: 68 | 10778 |
| MSP16 | LC | PRT | WO2017058771; SEQ ID NO: 8 | 10779 |
| MSP17 | LC | PRT | WO2017058771; SEQ ID NO: 184 | 10780 |
| MSP18 | LC | PRT | WO2017058771; SEQ ID NO: 338 | 10781 |
| MSP19 | Mab | PRT | WO2017058771; SEQ ID NO: 358 | 10782 |
| MSP20 | Mab | PRT | WO2017058771; SEQ ID NO: 359 | 10783 |
| MSP21 | Mab | PRT | WO2017058771; SEQ ID NO: 360 | 10784 |
| MSP22 | Mab | PRT | WO2017058771; SEQ ID NO: 361 | 10785 |
| MSP23 | Mab | PRT | WO2017058771; SEQ ID NO: 362 | 10786 |
| MSP24 | Mab | PRT | WO2017058771; SEQ ID NO: 363 | 10787 |
| MSP25 | Mab | PRT | WO2017058771; SEQ ID NO: 365 | 10788 |
| MSP26 | Mab | PRT | WO2017058771; SEQ ID NO: 366 | 10789 |
| MSP27 | Mab | PRT | WO2017058771; SEQ ID NO: 367 | 10790 |
| MSP28 | Mab | PRT | WO2017058771; SEQ ID NO: 368 | 10791 |
| MSP29 | Mab | PRT | WO2017058771; SEQ ID NO: 369 | 10792 |
| MSP30 | Mab | PRT | WO2017058771; SEQ ID NO: 370 | 10793 |
| MSP31 | Mab | PRT | WO2017058771; SEQ ID NO: 371 | 10794 |
| MSP32 | Mab | PRT | WO2017058771; SEQ ID NO: 372 | 10795 |
| MSP33 | Mab | PRT | WO2017058771; SEQ ID NO: 373 | 10796 |
| MSP34 | Mab | PRT | WO2017058771; SEQ ID NO: 374 | 10797 |
| MSP35 | Mab | PRT | WO2017058771; SEQ ID NO: 375 | 10798 |
| MSP36 | Mab | PRT | WO2017058771; SEQ ID NO: 376 | 10799 |
| MSP37 | Mab | PRT | WO2017058771; SEQ ID NO: 377 | 10800 |
| MSP38 | Mab | PRT | WO2017058771; SEQ ID NO: 378 | 10801 |
| MSP39 | Mab | PRT | WO2017058771; SEQ ID NO: 379 | 10802 |
| MSP40 | Mab | PRT | WO2017058771; SEQ ID NO: 380 | 10803 |
| MSP41 | Mab | PRT | WO2017058771; SEQ ID NO: 381 | 10804 |
| MSP42 | Mab | PRT | WO2017058771; SEQ ID NO: 382 | 10805 |
| MSP43 | Mab | PRT | WO2017058771; SEQ ID NO: 383 | 10806 |
| MSP44 | Mab | PRT | WO2017058771; SEQ ID NO: 384 | 10807 |
| MSP45 | Mab | PRT | WO2017058771; SEQ ID NO: 385 | 10808 |
| MSP46 | Mab | PRT | WO2017058771; SEQ ID NO: 386 | 10809 |
| MSP47 | Mab | PRT | WO2017058771; SEQ ID NO: 387 | 10810 |
| MSP48 | Mab | PRT | WO2017058771; SEQ ID NO: 388 | 10811 |
| MSP49 | Mab | PRT | WO2017058771; SEQ ID NO: 389 | 10812 |
| MSP50 | Mab | PRT | WO2017058771; SEQ ID NO: 390 | 10813 |
| MSP51 | Mab | PRT | WO2017058771; SEQ ID NO: 392 | 10814 |
| MSP52 | Mab | PRT | WO2017058771; SEQ ID NO: 393 | 10815 |
| MSP53 | Mab | PRT | WO2017058771; SEQ ID NO: 394 | 10816 |
| MSP54 | Mab | PRT | WO2017058771; SEQ ID NO: 395 | 10817 |
| MSP55 | Mab | PRT | WO2017058771; SEQ ID NO: 396 | 10818 |
| MSP56 | Mab | PRT | WO2017058771; SEQ ID NO: 398 | 10819 |
| MSP57 | Mab | PRT | WO2017058771; SEQ ID NO: 399 | 10820 |
| MSP58 | Mab | PRT | WO2017058771; SEQ ID NO: 406 | 10821 |
| MSP59 | Mab | PRT | WO2017058771; SEQ ID NO: 402 | 10822 |
| MSP60 | Mab | PRT | WO2017058771; SEQ ID NO: 403 | 10823 |
| MSP61 | Mab | PRT | WO2017058771; SEQ ID NO: 404 | 10824 |
| MSP62 | Mab | PRT | WO2017058771; SEQ ID NO: 405 | 10825 |
| MSP63 | Mab | PRT | WO2017058771; SEQ ID NO: 406 | 10826 |
| MSP64 | Mab | PRT | WO2017058771; SEQ ID NO: 407 | 10827 |
| MSP65 | Mab | PRT | WO2017058771; SEQ ID NO: 408 | 10828 |
| MSP66 | Mab | PRT | WO2017058771; SEQ ID NO: 409 | 10829 |
| MSP67 | Mab | PRT | WO2017058771; SEQ ID NO: 410 | 10830 |
| MSP68 | Mab | PRT | WO2017058771; SEQ ID NO: 411 | 10831 |
| MSP69 | Mab | PRT | WO2017058771; SEQ ID NO: 412 | 10832 |
| MSP70 | Mab | PRT | WO2017058771; SEQ ID NO: 413 | 10833 |
| MSP71 | Mab | PRT | WO2017058771; SEQ ID NO: 415 | 10834 |
| MSP72 | Mab | PRT | WO2017058771; SEQ ID NO: 416 | 10835 |
| MSP73 | Mab | PRT | WO2017058771; SEQ ID NO: 417 | 10836 |
| MSP74 | Mab | PRT | WO2017058771; SEQ ID NO: 418 | 10837 |
| MSP75 | Mab | PRT | WO2017058771; SEQ ID NO: 419 | 10838 |
| MSP76 | Mab | PRT | WO2017058771; SEQ ID NO: 420 | 10839 |
| MSP77 | Mab | PRT | WO2017058771; SEQ ID NO: 421 | 10840 |
| MSP78 | Mab | PRT | WO2017058771; SEQ ID NO: 422 | 10841 |
| MSP79 | Mab | PRT | WO2017058771; SEQ ID NO: 424 | 10842 |
| MSP80 | Mab | PRT | WO2017058771; SEQ ID NO: 425 | 10843 |
| MSP81 | Mab | PRT | WO2017058771; SEQ ID NO: 426 | 10844 |
| MSP82 | Mab | PRT | WO2017058771; SEQ ID NO: 427 | 10845 |
| MSP83 | Mab | PRT | WO2017058771; SEQ ID NO: 428 | 10846 |
| MSP84 | Mab | PRT | WO2017058771; SEQ ID NO: 429 | 10847 |
| MSP85 | Mab | PRT | WO2017058771; SEQ ID NO: 430 | 10848 |
| MSP86 | Mab | PRT | WO2017058771; SEQ ID NO: 431 | 10849 |
| MSP87 | Mab | PRT | WO2017058771; SEQ ID NO: 432 | 10850 |
| MSP88 | VH | PRT | WO2017058771; SEQ ID NO: 2 | 10851 |
| MSP89 | VH | PRT | WO2017058771; SEQ ID NO: 10 | 10852 |
| MSP90 | VH | PRT | WO2017058771; SEQ ID NO: 26 | 10853 |
| MSP91 | VH | PRT | WO2017058771; SEQ ID NO: 34 | 10854 |
| MSP92 | VH | PRT | WO2017058771; SEQ ID NO: 42 | 10855 |
| MSP93 | VH | PRT | WO2017058771; SEQ ID NO: 50 | 10856 |
| MSP94 | VH | PRT | WO2017058771; SEQ ID NO: 62 | 10857 |
| MSP95 | VH | PRT | WO2017058771; SEQ ID NO: 74 | 10858 |
| MSP96 | VH | PRT | WO2017058771; SEQ ID NO: 90 | 10859 |
| MSP97 | VH | PRT | WO2017058771; SEQ ID NO: 106 | 10860 |
| MSP98 | VH | PRT | WO2017058771; SEQ ID NO: 138 | 10861 |
| MSP99 | VH | PRT | WO2017058771; SEQ ID NO: 146 | 10862 |
| MSP100 | VH | PRT | WO2017058771; SEQ ID NO: 154 | 10863 |
| MSP101 | VH | PRT | WO2017058771; SEQ ID NO: 162 | 10864 |
| MSP102 | VH | PRT | WO2017058771; SEQ ID NO: 170 | 10865 |
| MSP103 | VH | PRT | WO2017058771; SEQ ID NO: 178 | 10866 |
| MSP104 | VH | PRT | WO2017058771; SEQ ID NO: 186 | 10867 |
| MSP105 | VH | PRT | WO2017058771; SEQ ID NO: 194 | 10868 |
| MSP106 | VH | PRT | WO2017058771; SEQ ID NO: 202 | 10869 |
| MSP107 | VH | PRT | WO2017058771; SEQ ID NO: 210 | 10870 |
| MSP108 | VH | PRT | WO2017058771; SEQ ID NO: 218 | 10871 |
| MSP109 | VH | PRT | WO2017058771; SEQ ID NO: 250 | 10872 |
| MSP110 | VH | PRT | WO2017058771; SEQ ID NO: 258 | 10873 |
| MSP111 | VH | PRT | WO2017058771; SEQ ID NO: 266 | 10874 |
| MSP112 | VH | PRT | WO2017058771; SEQ ID NO: 339 | 10875 |
| MSP113 | VH | PRT | WO2017058771; SEQ ID NO: 340 | 10876 |
| MSP114 | VH | PRT | WO2017058771; SEQ ID NO: 341 | 10877 |
| MSP115 | VL | PRT | WO2017058771; SEQ ID NO: 14 | 10878 |
| MSP116 | VL | PRT | WO2017058771; SEQ ID NO: 30 | 10879 |
| MSP117 | VL | PRT | WO2017058771; SEQ ID NO: 38 | 10880 |
| MSP118 | VL | PRT | WO2017058771; SEQ ID NO: 46 | 10881 |
| MSP119 | VL | PRT | WO2017058771; SEQ ID NO: 54 | 10882 |
| MSP120 | VL | PRT | WO2017058771; SEQ ID NO: 66 | 10883 |
| MSP121 | VL | PRT | WO2017058771; SEQ ID NO: 78 | 10884 |
| MSP122 | VL | PRT | WO2017058771; SEQ ID NO: 86 | 10885 |
| MSP123 | VL | PRT | WO2017058771; SEQ ID NO: 98 | 10886 |
| MSP124 | VL | PRT | WO2017058771; SEQ ID NO: 102 | 10887 |
| MSP125 | VL | PRT | WO2017058771; SEQ ID NO: 110 | 10888 |
| MSP126 | VL | PRT | WO2017058771; SEQ ID NO: 118 | 10889 |
| MSP127 | VL | PRT | WO2017058771; SEQ ID NO: 126 | 10890 |
| MSP128 | VL | PRT | WO2017058771; SEQ ID NO: 142 | 10891 |
| MSP129 | VL | PRT | WO2017058771; SEQ ID NO: 150 | 10892 |
| MSP130 | VL | PRT | WO2017058771; SEQ ID NO: 158 | 10893 |
| MSP131 | VL | PRT | WO2017058771; SEQ ID NO: 168 | 10894 |
| MSP132 | VL | PRT | WO2017058771; SEQ ID NO: 174 | 10895 |
| MSP133 | VL | PRT | WO2017058771; SEQ ID NO: 182 | 10896 |
| MSP134 | VL | PRT | WO2017058771; SEQ ID NO: 190 | 10897 |
| MSP135 | VL | PRT | WO2017058771; SEQ ID NO: 198 | 10898 |
| MSP136 | VL | PRT | WO2017058771; SEQ ID NO: 296 | 10899 |
| MSP137 | VL | PRT | WO2017058771; SEQ ID NO: 222 | 10900 |
| MSP138 | VL | PRT | WO2017058771; SEQ ID NO: 230 | 10901 |
| MSP139 | VL | PRT | WO2017058771; SEQ ID NO: 238 | 10902 |
| MSP140 | VL | PRT | WO2017058771; SEQ ID NO: 246 | 10903 |
| MSP141 | VL | PRT | WO2017058771; SEQ ID NO: 254 | 10904 |
| MSP142 | VL | PRT | WO2017058771; SEQ ID NO: 262 | 10905 |
| MSP143 | VL | PRT | WO2017058771; SEQ ID NO: 270 | 10906 |
| MSP144 | VL | PRT | WO2017058771; SEQ ID NO: 278 | 10907 |
| MSP145 | VL | PRT | WO2017058771; SEQ ID NO: 286 | 10908 |
| MSP146 | VL | PRT | WO2017058771; SEQ ID NO: 294 | 10909 |
| MSP147 | VL | PRT | WO2017058771; SEQ ID NO: 302 | 10910 |
| MSP148 | VL | PRT | WO2017058771; SEQ ID NO: 310 | 10911 |
| MSP149 | VL | PRT | WO2017058771; SEQ ID NO: 318 | 10912 |
| MSP150 | VL | PRT | WO2017058771; SEQ ID NO: 326 | 10913 |
| MSP151 | VL | PRT | WO2017058771; SEQ ID NO: 334 | 10914 |
| MSP152 | VL | PRT | WO2017058771; SEQ ID NO: 337 | 10915 |
| MSP153 | VL | PRT | WO2017058771; SEQ ID NO: 242 | 10916 |

[1096] In some embodiments, the payload region of the AAV particle comprises a nucleic acid sequence encoding a polypeptide which is an antibody, an antibody-based composition, or a fragment thereof. As anon-limiting example, the antibody may be one or more of the polypeptides listed in Table 16, or variants or fragments thereof. As another non-limiting example, the antibody may be one or more of the heavy chain sequences listed in Table 16. As anon-limiting example, the antibody may be one or more of the light chain sequences listed in Table 16, or variants or fragments thereof.

[1097] In some embodiments, the payload region of the AAV particle comprises a nucleic acid sequence encoding a polypeptide comprising a heavy chain and alight chain sequence listed in Table 16, or variants or fragments thereof. The payload region may also comprise a linker between the heavy and light chain sequences. The linker may be a sequence known in the art or described in Table 2.

[1098] In some embodiments, the payload region of the AAV particle comprises a nucleic acid sequence encoding a polypeptide comprising a heavy chain and a light chain sequence listed in Table 16, or variants or fragments thereof, where the heavy chain sequence is from a different antibody than the light chain sequence. The payload region may also comprise a linker between the heavy and light chain sequences. The linker may be a sequence known in the art or described in Table 2.

[1099] In some embodiments, the payload region comprises, in the 5′ to 3′ direction, an antibody light chain sequence, a linker and a heavy chain sequence. In another embodiment, the linker is not used.

[1100] In some embodiments, the payload region comprises a nucleic acid sequence encoding, in the 5′ to 3′ direction, an antibody light chain sequence from Table 16, one or more linkers from Table 2 and a heavy chain sequence from Table 16.

[1101] In some embodiments, the payload region comprises, in the 5′ to 3′ direction, an antibody heavy chain sequence, a linker region (may comprise one or more linkers) and alight chain sequence. In another embodiment, the linker is not used.

[1102] In some embodiments, the payload region comprises a nucleic acid sequence encoding, in the 5′ to 3′ direction, an antibody heavy chain sequence from Table 16, one or more linkers from Table 2, and alight chain sequence from Table 16.

[1103] In some embodiments, the payload region comprises a nucleic acid sequence encoding a single heavy chain. As a non-limiting example, the heavy chain is an amino acid sequence or fragment thereof described in Table 16.

[1104] Shown in Table 16 are a listing of antibodies and their polynucleotides and/or polypeptides sequences. These sequences may be encoded by or included in the AAV particles of the present disclosure. Variants or fragments of the antibody sequences described in Table 16 may be utilized in the AAV particles of the present disclosure.

[1105] In some embodiments, the AAV particles may comprise a viral genome, wherein one or more components may be codon-optimized. Codon-optimization may be achieved by any method known to one with skill in the art such as, but not limited to, by a method according to Genescript, EMBOSS, Bioinformatics, NUS, NUS2, Geneinfinity, IDT, NUS3, GregThatcher, Insilico, Molbio, N2P, Snapgene, and/or VectorNTI. Antibody heavy and/or light chain sequences within the same viral genome may be codon-optimized according to the same or according to different methods.

[1106] In some cases, the payload region of the AAV particles may encode one or more isoforms or variants of heavy and light chain antibody domains. Such variants may be humanized or optimized antibody domains comprising one or more complementarity determining regions (CDRs) from the heavy and light chains listed in Table 16. CDRs of the antibodies encoded by the viral genomes of the present disclosure may be 50%, 60%, 70%, 80%, 90%, 95% identical to CDRs listed in or incorporated in the sequences of Table 16. Methods of determining CDRs are well known in the art and are described herein. Payload regions may encode antibody variants with one or more heavy chain variable domain (V_{L}) or light chain variable domain (V₄) derived from the antibody sequences in Table 16. In some cases, such variants may include bispecific antibodies. Bispecific antibodies encoded by payload regions may comprise variable domain pairs from two different antibodies.

[1107] In some embodiments, the AAV particles may comprise a heavy and alight chain of an antibody described herein and two promoters. As a non-limiting example, the AAV particles may comprise a nucleic acid sequence of a genome as described in FIG. 1 or FIG. 2 of US Patent Publication No. US20030219733, the contents of which are herein incorporated by reference in their entirety. As another non-limiting example, the AAV particles may be a dual-promoter AAV for antibody expression as described by Lewis et al. (J. of. Virology, September 2002, Vol. 76(17), p 8769-8775; the contents of which are herein incorporated by reference in their entirety).

[1108] Payload regions of the viral genomes may encode any multiple specific diseases and/or target-associated antibodies, not limited to those described in Table 16, including antibodies that are known in the art and/or antibodies that are commercially available. This may include fragments of such antibodies or antibodies that have been developed to comprise one or more of such fragments [e.g., variable domains or complementarity determining regions (CDRs)].

[1109] In some embodiments, the AAV particles may have a payload region comprising any of the multiple specific disease and/or target-associated antibodies as described in International Publication Number WO2019096797, WO2019086395, WO2019060713, WO2018224951, WO2018218076, WO2018215427, WO2018209055, WO2018199337, WO201815719, WO2018151375, WO2018144784, WO2018141894, WO2018129713, WO2018112253, WO2018106842, WO2018090052, WO2018075692, WO2018038469, WO2018037092, WO2017218707, WO2017210149, WO2017190079, WO2017184831, WO2017134667, WO2017121843, WO2017101828, WO2017097706, WO2017055539, WO2017055537, and WO2017049004, the contents of each of which are herein incorporated by reference in their entirety.

[1110] In some embodiments, viral genomes of the AAV particles of the present disclosure comprising nucleic acids which have been engineered to enable expression of antibodies as described herein for the treatment of a specific disease, disorder or condition may also be used for the treatment of any other disease, disorder or condition. Further, viral genomes may comprise any combination of nucleic acid sequences from any of Tables 3-16 or encode a combination of amino acid sequences described in any of Tables 3-16.

[1111] In certain embodiments, viral genomes of the AAV particles of the present disclosure may comprise nucleic acids which have been engineered to enable expression of clinically relevant antibodies including, but not limited to, antibodies recently approved or currently under review for use in a clinical trial, or antibodies in use in a Phase of a clinical trial, e.g. Phase 2/3 or Phase 3 of a clinical trial. In such embodiments, viral genomes of the AAV particles of the present disclosure may comprise nucleic acids which have been engineered to enable expression of clinically relevant antibodies including, but not limited to, Dupilumab (Dupixent), Durvalumab (Imfinzi), Emicizumab (Hemlibra), Guselkumab (Tremfya), Inotuzumab ozogamicin (Besponsa), Ocrelizumab (Ocrevus), Sarilumab (Kevzara), Avelumab (Bavencio), Brodalumab (Siliq, Lumicef, Kyntheum), Benralizumab (Fasenra), Mogamulizumab (Poteligeo), Burosumab, Erenumab (Aimovig), Fremanezumab, Galcanezumab (Emgality), Ibalizumab, Tildrakizumab, Caplacizumab (ALX-0081), Romosozumab (Evenity), Tislelizumab (BGB-A317), (vic-)trastuzumab duocarmazine, Aducanumab (BIIB037), Andecaliximab, Anifrolumab, BGB-A317, Brolucizumab, Carotuximab (TRC-105), Crenezumab, Cemiplimab (REGN2810), Enfortumab vedotin, Epratuzumab (LymphoCide), Eptinezumab (ALD403), Etrolizumab, Fasinumab, futuximab, Ganitumab, Gantenerumab, I-131-BC8 (lomab-B), Sintilimab (IBI308), Isatuximab, JS001, L191L2/L19TNF, Lanadelumab, Margetuximab, Mirvetuximab soravtansine, Moxetumomab pasudotox, Nimotuzumab, Olokizumab, OMS721, Onartuzumab (MetMAb), Oportuzumab monatox, Spartalizumab (PDR001), Polatuzumab vedotin, Rabimabs, Racotumomab, Ravulizumab (ALXN1210), Risankizumab, Rovalpituzumab tesirine, Sacituzumab govitecan, Satralizumab, SCT400, SGM-101, SHP-647, Tanezumab, Teprotumumab, Tezepelumab, Tralokinumab, Tremelimumab, Ublituximab, Utomilumab, RC18, Bermekimab (MABp1, Xilonix), DRL_TZ, Actoxumab (MK-3415), Modotuximab (as a component of Sym004), Trastuzumab deruxtecan (DS-8201), Phase 2/3, Teplizumab, BCD-085, BCD-100, Camrelizumab (SHR-1210), Emapalumab, Inebilizumab (MEDI-551), PRO-140 (PA14, Roledumab, XMAB-5574 (MOR208), Depatuxizumab mafodotin (ABT-414), and Crizanlizumab.

### Payload Antibodies: Additional Antibodies

[1112] In some embodiments, the payload region of the viral particle comprises one or more nucleic acid sequences encoding antibodies, variants or fragments thereof.

[1113] In some embodiments, the payload region of the viral particle comprises one or more nucleic acid sequences encoding one or more of the payload antibody polypeptides listed in any of International Publications, WO2017191559, WO2017191561 or WO2017191560 all to Prothena Biosciences, Limited, the contents of each of which are incorporated by reference herein in their entirety.

[1114] In some embodiments, the payload region of the viral particle comprises one or more nucleic acid sequences encoding one or more of the payload antibody polypeptides listed in Tables 3-53 of U.S. provisional patent application 62/844,433, the contents of which are herein incorporated by reference in their entirety, or variants or fragments thereof. As used herein, “antibody polynucleotide” refers to a nucleic acid sequence encoding an antibody polypeptide.

[1115] In some embodiments, the payload region of the viral particle may be any one or more of those described in U.S. provisional patent application 62/844,433, the contents of which are herein incorporated by reference in their entirety.

[1116] In some embodiments, a payload region of the present disclosure may comprise an antibody sequence of any antibody known in the art, described herein or in U.S. provisional patent application 62/844,433, the contents of which are herein incorporated by reference in their entirety, or a fragment, variant or derivative thereof. In some embodiments, the payload may be a bispecific antibody.

[1117] In some embodiments, payloads of the present disclosure may comprise an Fc swap component, wherein said Fc swap may mediate direct cell killing.

### Systemic Disease Antibodies

[1118] In some embodiments, the payload region of the viral particle comprises one or more nucleic acid sequences encoding one or more of the systemic disease payload antibody polypeptides listed in Table 12 of U.S. provisional patent application 62/844,433 (SYS1-SYS73; SEQ ID NO: 20906-2097), the contents of which are herein incorporated by reference in their entirety.

### Foodborne Illness and Gastroenteritis Related Antibodies

[1119] In some embodiments, the payload region of the viral particle comprises one or more nucleic acid sequences encoding one or more of the gastrointestinal and food illness related payload antibody polypeptides listed in Tables 14-20 of U.S. provisional patent application 62/844,433, the contents of which are herein incorporated by reference in their entirety.

[1120] In some embodiments, the payload region of the viral particle comprises one or more nucleic acid sequences encoding one or more of the payload antibody polypeptides listed in Table 14 of U.S. provisional patent application 62/844,433 against Clostridium Difficile toxins (CD1-CD141; SEQ ID NO: 22301-22441), the contents of which are herein incorporated by reference in their entirety.

[1121] In some embodiments, the payload region of the viral particle comprises one or more nucleic acid sequences encoding one or more of the payload antibody polypeptides listed in Table 15 of U.S. provisional patent application 62/844,433, against Campylobacter jejuni (CAMP1-CAMP10; SEQ ID NO: 22442-22451), the contents of which are herein incorporated by reference in their entirety.

[1122] In some embodiments, the payload region of the viral particle comprises one or more nucleic acid sequences encoding one or more of the payload antibody polypeptides listed in Table 16 of U.S. provisional patent application 62/844,433 against bacterial infections of the intestine (BACG1-BACG98; SEQ ID NO: 22452-22549), the contents of which are herein incorporated by reference in their entirety.

[1123] In some embodiments, the payload region of the viral particle comprises one or more nucleic acid sequences encoding one or more of the payload antibody polypeptides listed in Table 17 of U.S. provisional patent application 62/844,433 against Hepatitis A and/or Hepatitis E (HEPAE1-HEPAE41; SEQ ID NO: 22550-22590), the contents of which are herein incorporated by reference in their entirety.

[1124] In some embodiments, the payload region of the viral particle comprises one or more nucleic acid sequences, fragment or variants thereof or encodes one or more polypeptides, fragments or variants thereof described in Chinese Pub. No. CN103923881, CN103923882, CN1605628, CN1318565, CN1163512, the contents of each of which are herein incorporated by reference in their entirety, against HAV.

[1125] In some embodiments, the payload region of the viral particle comprises one or more nucleic acid sequences encoding one or more of the payload antibody polypeptides listed in Table 18 of U.S. provisional patent application 62/844,433 against Norwalk virus (NORV1-NORV48; SEQ ID NO: 22591-22638), the contents of which are herein incorporated by reference in their entirety.

[1126] In some embodiments, the payload region of the viral particle comprises one or more nucleic acid sequences encoding one or more of the payload antibody polypeptides listed in Table 19 of U.S. provisional patent application 62/844,433 against Rotavirus (ROTV1-ROTV25; SEQ ID NO: 22639-22663), the contents of which are herein incorporated by reference in their entirety.

[1127] In some embodiments, the payload region of the viral particle comprises one or more nucleic acid sequences encoding one or more of the payload antibody polypeptides listed in Table 20 of U.S. provisional patent application 62/844,433 against Entamoeba Histolytica (ENTH1-ENTH16; SEQ ID NO: 22664-22679), the contents of which are herein incorporated by reference in their entirety.

[1128] In some embodiments, the payload region of the viral particle comprises one or more nucleic acid sequences encoding one or more of the payload antibody polypeptides, fragments or variants thereof described in International Pub. No. WO2001012646, the contents of which are herein incorporated by reference in their entirety, against Listeria monocytogenes, salmonella and/or leishmania.

### Neglected Tropical Diseases

[1129] In some embodiments, the payload region of the viral particle comprises one or more nucleic acid sequences encoding one or more of the neglected tropical disease related payload antibody polypeptides listed in Tables 21-24 of U.S. provisional patent application 62/844,433, the contents of which are herein incorporated by reference in their entirety.

[1130] In some embodiments, the payload region of the viral particle comprises one or more nucleic acid sequences encoding one or more of the payload antibody polypeptides listed in Table 21 of US provisional patent application 62/844,433 against Dengue Fever Virus (DENG1-DENG123; SEQ ID NO: 22680-22802), the contents of which are herein incorporated by reference in their entirety.

[1131] In some embodiments, the payload region of the viral particle comprises one or more nucleic acid sequences encoding one or more of the payload antibody polypeptides, fragments or variants thereof described in International Pub. No. WO2013089647 and WO2013035345, U.S. Pat. No. 8,637,035 and US887187, US Publication No. US20050123900, and Chinese Patent Publication No. CN102757480, the contents of which are herein incorporated by reference in their entirety, against Listeria monocytogenes, salmonella and/or leishmania.

[1132] In some embodiments, the payload region of the viral particle comprises one or more nucleic acid sequences encoding one or more of the payload antibody polypeptides listed in Table 22 of U.S. provisional patent application 62/844,433 against Rabies Virus (RABV1-RABV91; SEQ ID NO: 22803-22893), the contents of which are herein incorporated by reference in their entirety.

[1133] In some embodiments, the payload region of the viral particle comprises one or more nucleic acid sequences encoding one or more of the payload antibody polypeptides listed in Table 23 of U.S. provisional patent application 62/844,433 against Chagas Virus (CHAG1-CHAG2; SEQ ID NO: 22894-22895), the contents of which are herein incorporated by reference in their entirety.

[1134] In some embodiments, the payload region of the viral particle comprises one or more nucleic acid sequences encoding one or more of the payload antibody polypeptides listed in Table 24 of U.S. provisional patent application 62/844,433 against Chikungunya Virus (CHIK1-CHIK6; SEQ ID NO: 22896-22901), the contents of which are herein incorporated by reference in their entirety.

[1135] In some embodiments, the payload region of the viral particle comprises one or more nucleic acid sequences, fragment or variants thereof or encodes one or more polypeptides, fragments or variants thereof encoding antibodies described International Pub No. WO1983001785 and U.S. Pat. No. 5,827,671, the contents of each of which are herein incorporated by reference in their entirety, against the protozoan parasite Leishmania.

[1136] In some embodiments, the payload region of the viral particle comprises one or more nucleic acid sequences, fragment or variants thereof or encodes one or more polypeptides, fragments or variants thereof encoding antibodies against the Buruli ulcer (Mycobacterium ulcerans), Leprosy/Hansen's disease (Mycobacterium leprae), Leishmaniasis, Cysticercosis, Dracunculiasis (Guinea Worm Disease), Echinococcosis, Fascioliasis, Human African Trypanosomiasis (African Sleeping Sickness), Lymphatic filariasis, Onchocerciasis, Schistosomiasis, Soil-transmitted Helminths (STH).

### Toxins

[1137] In some embodiments, the payload region of the viral particle comprises one or more nucleic acid sequences encoding one or more of the toxin related payload antibody polypeptides listed in Tables 25-28 of U.S. provisional patent application 62/844,433, the contents of which are herein incorporated by reference in their entirety.

[1138] In some embodiments, the payload region of the viral particle comprises one or more nucleic acid sequences encoding one or more of the payload antibody polypeptides listed in Table 25 of US provisional patent application 62/844,433 against Ricin Toxin (RICN1-RICN20; SEQ ID NO: 22902-22921), the contents of which are herein incorporated by reference in their entirety.

[1139] In some embodiments, the payload region of the viral particle comprises one or more nucleic acid sequences encoding one or more of the payload antibody polypeptides listed in Table 26 of U.S. provisional patent application 62/844,433 against Anthrax (ANTH1-ANT H245; SEQ ID NO: 22922-23166), the contents of which are herein incorporated by reference in their entirety.

[1140] In some embodiments, the payload region of the viral particle comprises one or more nucleic acid sequences encoding one or more of the payload antibody polypeptides listed in Table 27 of U.S. provisional patent application 62/844,433 against Botulinum Toxin (BOTT1-BOTT30; SEQ ID NO: 23167-23196), the contents of which are herein incorporated by reference in their entirety.

[1141] In some embodiments, the payload region of the viral particle comprises one or more nucleic acid sequences encoding one or more of the payload antibody polypeptides listed in Table 28 of U.S. provisional patent application 62/844,433 against Shiga Toxin (SHIG1-SHIG71; SEQ ID NO: 23197-23267), the contents of which are herein incorporated by reference in their entirety.

[1142] In some embodiments, the payload region of the viral particle comprises one or more nucleic acid sequences, fragments or variants thereof or encodes one or more polypeptides, fragments or variants thereof described in US Pub. No. US20090280104, the contents of each of which are herein incorporated by reference in their entirety, against Shiga toxin.

### Tropical Diseases

[1143] In some embodiments, the payload region of the viral particle comprises one or more nucleic acid sequences encoding one or more of the tropical disease related payload antibody polypeptides listed in Tables 29-31 of U.S. provisional patent application 62/844,433, the contents of which are herein incorporated by reference in their entirety.

[1144] In some embodiments, the payload region of the viral particle comprises one or more nucleic acid sequences encoding one or more of the payload antibody polypeptides listed in Table 29 of U.S. provisional patent application 62/844,433 against Plasmodium Falciparum causing Malaria (MALA1-MALA57; SEQ ID NO: 23268-23324), the contents of which are herein incorporated by reference in their entirety.

[1145] In some embodiments, the payload region of the viral particle comprises one or more nucleic acid sequences encoding one or more of the payload antibody polypeptides listed in Table 30 of U.S. provisional patent application 62/844,433 against Ebola and/or Margburg Viruses (EBOL1-EBOL53; SEQ ID NO: 23325-23377), the contents of which are herein incorporated by reference in their entirety.

[1146] In some embodiments, the payload region of the viral particle comprises one or more nucleic acid sequences, fragment or variants thereof or encodes one or more polypeptides, fragments or variants thereof described in U.S. Pat. No. 7,335,356 and EP Pub. No. EP1539238, the contents of each of which are herein incorporated by reference in their entirety, against Ebola.

[1147] In some embodiments, the payload region of the viral particle comprises one or more nucleic acid sequences encoding one or more of the payload antibody polypeptides listed in Table 31 of U.S. provisional patent application 62/844,433 against Mosquito-borne disease (MOSQ1-MOSQ118; SEQ ID NO: 23378-23495), the contents of which are herein incorporated by reference in their entirety.

[1148] In some embodiments, the payload region of the viral particle comprises one or more nucleic acid sequences, fragment or variants thereof or encodes one or more polypeptides, fragments or variants thereof described in U.S. Pat. No. 6,399,062 and US Pub. No. US20110171225, the contents of each of which are herein incorporated by reference in their entirety, against Malaria.

### Disease Specific Epitopes, Innate Defense Regulator Peptides, Cyclic Peptides

[1149] In some embodiments, the viral genomes of the AAV particles may comprise nucleic acids which have been engineered to enable expression of antibodies binding to disease-specific epitopes of proteins. Such antibodies may be used to diagnose, prevent, and/or treat the corresponding medical conditions by targeting epitopes of the protein presented by or accessible on native or non-native forms (e.g., misfolded forms of native proteins) of the target. Such epitopes may be specific to diseases involved with misfolding of a protein due to pathologic condition and resulting in misfolded aggregates. The disease-specific proteins are considered to be toxic to neurons and to have a role in neuronal cell death and dysfunction in neurodegenerative diseases including, but not limited to, Alzheimer's disease (AD), amyotrophic lateral sclerosis (ALS), Parkinson's disease, dementia by Lewy body (DLB), and prion diseases, e.g. Creutzfeldt-Jakob disease (CJD), Gerstmann. Straussler-Scheinker syndrome (GSS), kuru, and fatal familial insomnia (FFI).

[1150] In some embodiments, the encoded disease-specific epitopes may include epitopes on SOD1 that are revealed as SOD1 (Superoxide dismutase [Cu—Zn]) dissociates from its homodimeric, normal state. The SOD epitopes may be selectively presented or accessible in non-native SOD1 forms including misfolded SOD1 monomer, misfolded SOD1 dimer, and the epitopes selectively presented or accessible in SOD1 aggregates. Such epitopes may be specific to neurodegenerative diseases including, but not limited to, amyotrophic lateral sclerosis (ALS), Alzheimer's (AD), Parkinson's (PD), and Lewy body diseases (LBD).

[1151] In some embodiments, the expressed antibodies may bind to epitopes presented by or accessible on non-native forms of SOD1, such as those presented by SED ID NO: 2, 3, 5, 6, and 7 of U.S. Pat. No. 7,977,314 (the contents of which are herein incorporated by reference in its entirety), or presented by or accessible on monomeric forms of SOD1, such as those presented by SEQ ID NOs: 1 and 4 of U.S. Pat. No. 7,977,314, the contents of which are herein incorporated by reference in their entirety. In some embodiments, the expressed antibodies may comprise isolated peptides corresponding to such epitopes, such as those presented in SEQ ID NOs: 18 or SEQ ID NOs: 8-16, or epitopes presented by SEQ ID NOs: 34-63, 65-79 of U.S. Pat. No. 7,977,314, the contents of which are herein incorporated by reference in their entirety.

[1152] In some embodiments, the encoded disease-specific epitopes may be specific to diseases associated with prion protein (PrP); familial amyloid polyneuropathy or senile systemic amyloidosis or a disease related by the presence of misfolded transthyretine (TTR); renal accumulation of 02 microglobulin amyloid deposits or a disease related by the presence of misfolded β2 microglobulin, amyotrophic lateral sclerosis (ALS) or a disease related by the presence of misfolded SOD1; leukemias or myelomas or a disease related by the presence of misfolded cluster of differentiation 38 (CD38); colon cancer metastasis and or a disease related by the presence of misfolded cluster of differentiation (CD44); tumors associated with tumor necrosis factor receptor (TNFR); cancers including cervical, head and neck, endometrial, lung and breast carcinomas, pleural mesotheliomas, malignant melanomas, Hodgkin lymphomas, anaplastic large cell non-Hodgkin lymphomas, or a disease related by the presence of misfolded Notch homolog 1 (NOTCH1) e.g. acute myeloid leukemias and B-cell chronic lymphoid leukemias; cancer in which Fas receptor (FasR) is implicated; cancers and related disorders in which misfolded epidermal growth factor (EGFR) is implicated; and/or other related diseases, disorders and conditions.

[1153] In some embodiments, the encoded disease specific epitopes may include epitopes that are revealed as the proteins misfold. In some embodiments, the expressed antibodies may bind to predicted epitopes of human PrP, such as those presented by SEQ ID NOs: 1-10 of US Patent Publication No. US20100233176; bovine PrP, such as those presented by SEQ ID NOs: 11-15 of US Patent Publication No. US20100233176, TTR, such as those presented by SEQ ID NOs: 1622 of US Patent Publication No. US20100233176; beta-2 microglobulin, such as those presented by SEQ ID NOs: 23-26 of US Patent Publication No. US20100233176; SOD1, such as those presented by SEQ ID NOs: 27-40 of US Patent Publication No. US20100233176; CD38, such as those presented by SEQ ID NOs: 41-45 of US Patent Publication No. US20100233176; CD44, such as those presented by 46-50 of US Patent Publication No. US20100233176; TNFR, such as those presented by 51-55 of US Patent Publication No. US20100233176; notch protein, such as those presented in SEQ ID NOs: 56-60 of US Patent Publication No. US20100233176; FasR, such as those presented by SEQ ID NOs: 61-65 of US Patent Publication No. US20100233176 and EGFR, such as those presented by SEQ ID NOs: 66-80 of US Patent Publication No. US20100233176; the contents of which are herein incorporated by reference in their entirety.

[1154] In some embodiments, the expressed antibodies may comprise peptides corresponding to such epitopes. In some embodiments, the expressed antibodies may comprise prion-specific peptides, such as those presented by SEQ ID NOs: 81-88 of US Patent Publication No. US20100233176, the contents of which are herein incorporated by reference in their entirety, and variations thereof.

[1155] In some embodiments, the encoded disease-specific epitopes may be specific to prion diseases, including transmissible spongiform encephalopathies (TSEs) or other prion diseases. In some embodiments, the expressed antibodies may bind to predicted epitopes of PrP, such as those presented by SEQ ID NOs: 24, 26, 28, 30, 32, 34, 36, 39.43, of US Patent Publication No. US20150004185, the contents of which are herein incorporated by reference in their entirety. In some embodiments, the expressed antibodies may comprise prion-specific peptides or peptide fusions, such as those presented by SEQ ID NOs: 12-23, 25, 27, 29, 31, 33, 35, 37, 38, 43, and 44-48 of US Patent Publication No. US20150004185, the contents of which are herein incorporated by reference in their entirety.

[1156] In some embodiments, the expressed antibodies may comprise prion peptides binding to prion specific abnormal isoform of the prion protein, such as those presented by SEQ ID NOs: 2-10 of US Patent Publication No. US20040072236, the contents of which are herein incorporated by reference in their entirety.

[1157] In some embodiments, the viral genomes of the AAV particles may comprise nucleic acids which have been engineered to express innate defense regulator (IDR) peptides. IDRs are immunomodulatory peptides that act directly on cells to effect an innate immune response. Such IDRs may be used to treat neurodegenerative diseases associated with neuroinflammation, e.g. amyotrophic lateral sclerosis (ALS), Alzheimer's disease, Friedreich's ataxia, Huntington's disease, Lewy body disease, Parkinson's disease, spinal muscular atrophy, and multiple sclerosis (MS) and other neurodegenerative diseases. In some embodiments, IDRs may be those presented by SEQ ID NOS: 1-969, and 973-1264 of International Publication No. WO2013034982, the contents of which are herein incorporated by reference in their entirety, or analogs, derivatives, amidated variations and conservative variations thereof.

[1158] In some embodiments, the viral genomes of the AAV particles may comprise nucleic acids which have been engineered to express antibodies binding to an epitope of the Tropomyosin receptor kinase (TrkC) receptor. Such antibodies may comprise a peptide, such as one presented by SEQ ID NO: 1 of U.S. Pat. No. 9,200,080, the contents of which are herein incorporated by reference in their entirety.

[1159] In some embodiments, the viral genomes of the AAV particles may comprise nucleic acids which have been engineered to express cyclic peptides with an amino acid sequence SNK. Non-limiting examples of other cyclic peptides include SEQ ID NO:1.7 of U.S. Pat. No. 9,216,217, the contents of which are herein incorporated by reference in their entirety. The method of preparing the antibodies may include hyperimmune preparation method, as described in U.S. Pat. No. 9,216,217, the contents of which are herein incorporated by reference in their entirety.

### Prions

[1160] In some embodiments, the viral genomes of the AAV particles may comprise a nucleic acid sequence encoding antibodies comprising prion peptides comprising prion epitopes, and fusions and repeats thereof, such as those presented by SEQ ID NOs: 8-32, 35, and 36 of U.S. Pat. No. 9,056,918, the contents of which are herein incorporated by reference in their entirety.

[1161] In some embodiments, the viral genomes of the AAV particles may comprise a nucleic acid sequence encoding prion binding proteins (PrPBP). In some embodiments, the PrPBPs are cadherins, such as those presented by SEQ ID NOs: 1 and 2 of International Publication WO1997/045746, the contents of which are herein incorporated by reference in their entirety. In some embodiments, the PrPBPs are cadherins, such as those presented by SEQ ID NOs: 2 and 7-9 of International Publication No. WO2001000235, the contents of which are herein incorporated by reference in their entirety.

### The Nature of the Polypeptides and Variants

[1162] Antibodies encoded by payload regions of the viral genomes may be translated as a whole polypeptide, a plurality of polypeptides or fragments of polypeptides, which independently may be encoded by one or more nucleic acids, fragments of nucleic acids or variants of any of the aforementioned. As used herein, “polypeptide” means a polymer of amino acid residues (natural or unnatural) linked together most often by peptide bonds. The term, as used herein, refers to proteins, polypeptides, and peptides of any size, structure, or function. In some instances, the polypeptide encoded is smaller than about 50 amino acids and the polypeptide is then termed a peptide. If the polypeptide is a peptide, it will be at least about 2, 3, 4, or at least 5 amino acid residues long. Thus, polypeptides include gene products, naturally occurring polypeptides, synthetic polypeptides, homologs, orthologs, paralogs, fragments and other equivalents, variants, and analogs of the foregoing. A polypeptide may be a single molecule or may be a multi-molecular complex such as a dimer, trimer or tetramer. They may also comprise single chain or multichain polypeptides and may be associated or linked. The term polypeptide may also apply to amino acid polymers in which one or more amino acid residues are an artificial chemical analogue of a corresponding naturally occurring amino acid.

[1163] The term “polypeptide variant” refers to molecules which differ in their amino acid sequence from a native or reference sequence. The amino acid sequence variants may possess substitutions, deletions, and/or insertions at certain positions within the amino acid sequence, as compared to a native or reference sequence. Ordinarily, variants will possess at least about 50% identity (homology) to a native or reference sequence, and preferably, they will be at least about 80%, more preferably at least about 90% identical (homologous) to a native or reference sequence.

[1164] In some embodiments “variant mimics” are provided. As used herein, the term “variant mimic” is one which contains one or more amino acids which would mimic an activated sequence. For example, glutamate may serve as a mimic for phospho-threonine and/or phospho-serine. Alternatively, variant mimics may result in deactivation or in an inactivated product containing the mimic, e.g., phenylalanine may act as an inactivating substitution for tyrosine; or alanine may act as an inactivating substitution for serine.

[1165] The term “amino acid sequence variant” refers to molecules with some differences in their amino acid sequences as compared to a native or starting sequence. The amino acid sequence variants may possess substitutions, deletions, and/or insertions at certain positions within the amino acid sequence. “Native” or “starting” sequence should not be confused with a wild type sequence. As used herein, a native or starting sequence is a relative term referring to an original molecule against which a comparison may be made. “Native” or “starting” sequences or molecules may represent the wild-type (that sequence found in nature) but do not have to be the wild-type sequence.

[1166] Ordinarily, variants will possess at least about 70% homology to a native sequence, and preferably, they will be at least about 80%, more preferably at least about 90% homologous to a native sequence. “Homology” as it applies to amino acid sequences is defined as the percentage of residues in the candidate amino acid sequence that are identical with the residues in the amino acid sequence of a second sequence after aligning the sequences and introducing gaps, if necessary, to achieve the maximum percent homology. Methods and computer programs for the alignment are well known in the art. It is understood that homology depends on a calculation of percent identity but may differ in value due to gaps and penalties introduced in the calculation.

[1167] By “homologs” as it applies to amino acid sequences is meant the corresponding sequence of other species having substantial identity to a second sequence of a second species.

[1168] “Analogs” is meant to include polypeptide variants which differ by one or more amino acid alterations, e.g., substitutions, additions, or deletions of amino acid residues that still maintain the properties of the parent polypeptide.

[1169] Sequence tags or amino acids, such as one or more lysines, can be added to the peptide sequences (e.g., at the N-terminal or C-terminal ends). Sequence tags can be used for peptide purification or localization. Lysines can be used to increase peptide solubility or to allow for biotinylation. Alternatively, amino acid residues located at the carboxy and amino terminal regions of the amino acid sequence of a peptide or protein may optionally be deleted providing for truncated sequences. Certain amino acids (e.g., C-terminal or N-terminal residues) may alternatively be deleted depending on the use of the sequence, as for example, expression of the sequence as part of a larger sequence which is soluble, or linked to a solid support.

[1170] “Substitutional variants” when referring to proteins are those that have at least one amino acid residue in a native or starting sequence removed and a different amino acid inserted in its place at the same position. The substitutions may be single, where only one amino acid in the molecule has been substituted, or they may be multiple, where two or more amino acids have been substituted in the same molecule.

[1171] As used herein the term “conservative amino acid substitution” refers to the substitution of an amino acid that is normally present in the sequence with a different amino acid of similar size, charge, or polarity. Examples of conservative substitutions include the substitution of a non-polar (hydrophobic) residue such as isoleucine, valine, and leucine for another non-polar residue. Likewise, examples of conservative substitutions include the substitution of one polar (hydrophilic) residue for another such as between arginine and lysine, between glutamine and asparagine, and between glycine and serine. Additionally, the substitution of a basic residue such as lysine, arginine, or histidine for another, or the substitution of one acidic residue such as aspartic acid or glutamic acid for another acidic residue are additional examples of conservative substitutions. Examples of non-conservative substitutions include the substitution of a non-polar (hydrophobic) amino acid residue such as isoleucine, valine, leucine, alanine, methionine for a polar (hydrophilic) residue such as cysteine, glutamine, glutamic acid or lysine and/or a polar residue for a non-polar residue.

[1172] “Insertional variants” when referring to proteins are those with one or more amino acids inserted immediately adjacent to an amino acid at a particular position in a native or starting sequence. “Immediately adjacent” to an amino acid means connected to either the alpha-carboxy or alpha-amino functional group of the amino acid.

[1173] “Deletional variants” when referring to proteins, are those with one or more amino acids in the native or starting amino acid sequence removed. Ordinarily, deletional variants will have one or more amino acids deleted in a particular region of the molecule.

[1174] As used herein, the term “derivative” is used synonymously with the term “variant” and refers to a molecule that has been modified or changed in any way relative to a reference molecule or starting molecule. In some embodiments, derivatives include native or starting proteins that have been modified with an organic proteinaceous or non-proteinaceous derivatizing agent, and post-translational modifications. Covalent modifications are traditionally introduced by reacting targeted amino acid residues of the protein with an organic derivatizing agent that is capable of reacting with selected side-chains or terminal residues, or by harnessing mechanisms of post-translational modifications that function in selected recombinant host cells. The resultant covalent derivatives are useful in programs directed at identifying residues important for biological activity, for immunoassays, or for the preparation of anti-protein antibodies for immunoaffinity purification of the recombinant glycoprotein. Such modifications are within the ordinary skill in the art and are performed without undue experimentation.

[1175] Certain post-translational modifications are the result of the action of recombinant host cells on the expressed polypeptide. Glutaminyl and asparaginyl residues are frequently post-translationally deamidated to the corresponding glutamyl and aspartyl residues. Alternatively, these residues are deamidated under mildly acidic conditions. Either form of these residues may be present in the proteins used in accordance with the present disclosure.

[1176] Other post-translational modifications include hydroxylation of proline and lysine, phosphorylation of hydroxyl groups of seryl or threonyl residues, methylation of the alpha-amino groups of lysine, arginine, and histidine side chains (T. E. Creighton, Proteins: Structure and Molecular Properties, W.H. Freeman & Co., San Francisco, pp. 79-86 (1983)).

[1177] “Features” when referring to proteins are defined as distinct amino acid sequence-based components of a molecule. Features of the proteins of the present disclosure include surface manifestations, local conformational shape, folds, loops, half-loops, domains, half-domains, sites, termini or any combination thereof.

[1178] As used herein when referring to proteins the term “surface manifestation” refers to a polypeptide-based component of a protein appearing on an outermost surface.

[1179] As used herein when referring to proteins the term “local conformational shape” means a polypeptide based structural manifestation of a protein which is located within a definable space of the protein.

[1180] As used herein when referring to proteins the term “fold” means the resultant conformation of an amino acid sequence upon energy minimization. A fold may occur at the secondary or tertiary level of the folding process. Examples of secondary level folds include beta sheets and alpha helices. Examples of tertiary folds include domains and regions formed due to aggregation or separation of energetic forces. Regions formed in this way include hydrophobic and hydrophilic pockets, and the like.

[1181] As used herein the term “turn” as it relates to protein conformation means a bend which alters the direction of the backbone of a peptide or polypeptide and may involve one, two, three or more amino acid residues.

[1182] As used herein when referring to proteins the term “loop” refers to a structural feature of a peptide or polypeptide which reverses the direction of the backbone of a peptide or polypeptide and comprises four or more amino acid residues. Oliva et al. have identified at least 5 classes of protein loops (J. Mol Biol 266 (4): 814-830; 1997).

[1183] As used herein when referring to proteins the term “half-loop” refers to a portion of an identified loop having at least half the number of amino acid residues as the loop from which it is derived. It is understood that loops may not always contain an even number of amino acid residues. Therefore, in those cases where a loop contains or is identified to comprise an odd number of amino acids, a half-loop of the odd-numbered loop will comprise the whole number portion or next whole number portion of the loop (number of amino acids of the loop/2+/−0.5 amino acids). For example, a loop identified as a 7-amino acid loop could produce half-loops of 3 amino acids or 4 amino acids (7/2=3.5+/−0.5 being 3 or 4).

[1184] As used herein when referring to proteins the term “domain” refers to a motif of a polypeptide having one or more identifiable structural or functional characteristics or properties (e.g., binding capacity, serving as a site for protein-protein interactions).

[1185] As used herein when referring to proteins the term “half-domain” means portion of an identified domain having at least half the number of amino acid residues as the domain from which it is derived. It is understood that domains may not always contain an even number of amino acid residues. Therefore, in those cases where a domain contains or is identified to comprise an odd number of amino acids, a half-domain of the odd-numbered domain will comprise the whole number portion or next whole number portion of the domain (number of amino acids of the domain/2+/−0.5 amino acids). For example, a domain identified as a 7-amino acid domain could produce half-domains of 3 amino acids or 4 amino acids (7/2=3.5+/−0.5 being 3 or 4). It is also understood that sub-domains may be identified within domains or half-domains, these subdomains possessing less than all of the structural or functional properties identified in the domains or half domains from which they were derived. It is also understood that the amino acids that comprise any of the domain types herein need not be contiguous along the backbone of the polypeptide (i.e., nonadjacent amino acids may fold structurally to produce a domain, half-domain or subdomain).

[1186] As used herein when referring to proteins the terms “site” as it pertains to amino acid-based embodiments is used synonymous with “amino acid residue” and “amino acid side chain”. A site represents a position within a peptide or polypeptide that may be modified, manipulated, altered, derivatized or varied within the polypeptide-based molecules of the present disclosure.

[1187] As used herein the terms “termini or terminus” when referring to proteins refers to an extremity of a peptide or polypeptide. Such extremity is not limited only to the first or final site of the peptide or polypeptide but may include additional amino acids in the terminal regions. The polypeptide-based molecules of the present disclosure may be characterized as having both an N-terminus (terminated by an amino acid with a free amino group (NH2)) and a C-terminus (terminated by an amino acid with a free carboxyl group (COOH)). Proteins are in some cases made up of multiple polypeptide chains brought together by disulfide bonds or by non-covalent forces (multimers, oligomers). These sorts of proteins will have multiple N- and C-termini. Alternatively, the termini of the polypeptides may be modified such that they begin or end, as the case may be, with a non-polypeptide-based moiety such as an organic conjugate.

[1188] Once any of the features have been identified or defined as a component of a molecule, any of several manipulations and/or modifications of these features may be performed by moving, swapping, inverting, deleting, randomizing, or duplicating. Furthermore, it is understood that manipulation of features may result in the same outcome as a modification to the molecules. For example, a manipulation which involves deleting a domain would result in the alteration of the length of a molecule just as modification of a nucleic acid to encode less than a full-length molecule would.

[1189] Modifications and manipulations can be accomplished by methods known in the art such as site directed mutagenesis. The resulting modified molecules may then be tested for activity using in vitro or in vivo assays such as those described herein or any other suitable screening assay known in the art.

### Payload Regulation

[1190] In one embodiment, expression of payloads from viral genomes may be regulated using various methods known in the art. In such embodiments, a type of regulation may be e.g. temporal or spatial. In other such embodiments, a type of regulation may be e.g. temporary or permanent. In certain embodiments, expression of payloads from viral genomes may be upregulated to increase, enhance or accelerate the rate of expression. In certain embodiments, expression of payloads from viral genomes may be downregulated to decrease, halt, or decelerate the rate of expression.

[1191] While not wishing to be bound by theory, destabilizing domains are known to confer instability and decrease transgene expression. The presence of the destabilizing domain can trigger the cell's proteasomal degradation systems, which then can lead to antibody destruction. Destabilizing domains may comprise peptide sequences which are rich in a particular subset of amino acids which are thought to signal degradation, such as, but not limited to, proline, glutamic acid, serine and threonine (known as PEST sequences).

[1192] In some embodiments, the expression of the payload may be regulated by fusion with a stabilizing or a destabilizing domain. Stabilizing and destabilizing domains which can be used are well known in the art. Non-limiting examples of destabilizing domains include FK506 Binding Protein (FKBP), E. coli dihydrofolate reductase (DHFR), mouse ornithine decarboxylase (MODC), or estrogen receptors (ER). Examples of destabilizing domains, their ligands and/or binding partners are taught in International Publication WO2017180587 (Application: PCTUS2017026950), the contents of which are incorporated herein by reference in their entirety.

[1193] In some embodiments the destabilizing domain may be inducible. In some embodiments the destabilizing domain may be a “single ligand-single domain,” which allows control of protein stability through a small molecule ligand. In some embodiments the destabilizing domain may be FK506- and rapamycin-binding protein (FKBP12) destabilizing domain, which can be regulated by rapamycin and its analogs, and is unstable in the absence of its ligand. In one embodiment, a point mutant (L106P) of the 107-amino acid protein FKBP confers instability to fusion partners, and this instability is reversed by a synthetic ligand named Shield-1, as described in Banaszynski, L, Chen, L., Maynard-Smith, L. A., Ooi, G. L. and Wandless, T. J. A rapid, reversible, and tunable method to regulate protein function in living cells using synthetic small molecules. Cell 126, 995-1004 (2006), the contents of which is herein incorporated by reference in its entirety.

[1194] In another embodiment, the destabilizing domain may be derived from E. Coli dihydrofolate reductase. In some embodiments the small molecule trimethoprim (TMP) can bind to the domain and act as a stabilizer, for example, as described in Iwamoto et al. (Chem Biol. 2010 September 24; 17(9):981-8. A general chemical method to regulate protein stability in the mammalian central nervous system) the contents of which is herein incorporated by reference in its entirety. This system has been shown to be applied to regulation of glia cell derived neurotrophic factor (GDNF), as described in Tai et al. (DOI: 10.1371/journal.pone.0046269, Destabilizing Domains Mediate Reversible Transgene Expression in the Brain), the contents of which is herein incorporated by reference in its entirety.

[1195] In another embodiment, the destabilizing domain may be alight sensitive degradation domain. In a non-limiting example, the light sensitive degradation domain may be one of the domains described in U.S. Pat. No. 9,115,184, the contents of which is herein incorporated by reference in its entirety. In one embodiment, the domain comprises LOV24.

[1196] It is contemplated as part of the disclosure that any of the destabilizing domains may be combined with any of the payloads, e.g., antibodies or fragments thereof, and/or other proteins or fusion proteins described herein.

[1197] In one embodiment, an antibody payload may be fused to a destabilizing domain. In one embodiment, an antibody payload may be fused to a destabilizing domain which can be further regulated by a ligand.

[1198] In some embodiments, nucleic acid sequences from any of Tables 3-16 may comprise a CDS or coding region that enables expression of amino acid sequences such as those presented in SEQ ID NO:10917 to SEQ ID NO: 10927.

### Antibody Regulation

[1199] In some embodiments, the quantity, i.e., level or amount, or activity, e.g. binding affinity, of an antibody, or fragment or variant thereof, of the present disclosure may be regulated. As a non-limiting example, the quantity or activity of the antibody may be upregulated, enhanced, or increased. As another non-liming example, the quantity or activity of an antibody may be downregulated, suppressed or reduced. In certain embodiments, the regulated antibody may be an endogenous antibody. As a non-limiting example, the endogenous antibody may be an anti-AAV neutralizing antibody (NAb). In certain embodiments, the regulated antibody may be any antibody, or fragment or variant thereof, encoded by payload regions of the viral genomes of the present disclosure. The regulation of the antibody may be therapeutically effective, prophylactically effective, or diagnostically effective.

[1200] In some embodiments, the quantity or activity of an antibody may be regulated by a protease. In some embodiments, the protease may be encoded by payload regions of the viral genomes of the AVV particles of the present disclosure. In some embodiments, the protease may be prepared as a pharmaceutical composition such as, but not limited to, a pharmaceutical composition comprising a protease diluted in an infusion solution.

[1201] In some embodiments, the protease encoded by payload regions of the viral genomes of the present disclosure, also termed the protease AAV particle herein, may be administered or delivered alone, i.e. separately, or in combination, with the protease pharmaceutical composition. In some embodiments, the protease pharmaceutical composition may be administered or delivered alone, i.e. separately, or in combination, with the protease AAV particle. In some embodiments the protease AAV particle and/or the protease pharmaceutical composition may be administered or delivered alone, i.e. separately, or in combination with any AAV of the present disclosure.

[1202] In some embodiments, the protease AAV particle, may be administered or delivered in combination with the protease pharmaceutical composition at the same time, i.e. simultaneously, or independently, at different times. In some embodiments, the protease AAV particle and/or the protease pharmaceutical composition may be administered in combination with any AAV of the present disclosure at the same time, i.e. simultaneously, or independently, at different times.

[1203] In some embodiments the protease AAV particle and/or the protease pharmaceutical composition may be administered in a single dose. In some embodiments the protease AAV particle and/or the protease pharmaceutical composition may be administered in multiple doses.

[1204] In some embodiments, the protease AAV particles or protease pharmaceutical compositions may be administered by any delivery route described herein. As a non-limiting example, the protease AAV particles or protease pharmaceutical compositions may be administered via an intravenous delivery route.

[1205] In some embodiments, the quantity or activity of an antibody may be regulated by a protease that may be a streptococcal protease. As a non-limiting example, the streptococcal protease is IdeS (Immunoglobulin G-degrading enzyme of streptococcus pyrogenes), as described by Winstedt et al, 2015 (see Winstedt et al, PLoS One. 2015 Jul. 15; 10(7):e0132011) and by Järnum et al, 2019 (see, J Immunol. 2015 Dec. 15; 195(12):5592-601), the contents of each of which are herein incorporated by reference in their entirety.

[1206] In some embodiments, IdeS cleaves immunoglobulin G (IgG) antibodies. In some embodiments, IdeS cleaves an IgG antibody first by generating a single-cleaved IgG molecule (scIgG) with one intact heavy chain, and then by generating one F(ab′)2 fragment and one homo-dimeric Fc fragment, which are held together by non-covalent interactions. In some embodiments, IdeS cleavage of immunoglobulin G (IgG) antibodies leads to their enzymatic inactivation.

[1207] In some embodiments, IdeS cleaves the entire IgG pool, resulting in complete removal of IgG antibodies. In some embodiments, IdeS cleaves a portion of the IgG pool, resulting in partial removal of IgG antibodies.

[1208] In some embodiments, IdeS removal or reduction of the IgG pool may be temporary, or impermanent. In such embodiments, the IgG pool may be restored following IdeS administration or delivery to levels consistent with those prior to IdeS administration or delivery. In some embodiments, newly synthesized IgG may be detectable one to two weeks following IdeS administration or delivery, and may constitute the main IgG fraction by three weeks following IdeS administration or delivery. In some embodiments, antibiotics may be given until the IgG pool is restored following IdeS administration or delivery to levels consistent with those prior to IdeS administration or delivery.

[1209] In some embodiments, further proteolytic cleavage by IdeS may be prevented with a protease inhibitor. As a non-limiting example, the protease inhibitor is iodoacetic acid.

[1210] In some embodiments, IdeS may cleave an antigen-specific IgG antibody. The antigen-specific IgG antibody may be endogenous, or exogenous. As a non-limiting example, the endogenous antigen-specific IgG antibody may be an anti-AAV neutralizing antibody (NAb), which, when cleaved, may be associated with enhanced AAV transduction efficacy. As a non-limiting example, the exogenous antigen-specific IgG antibody may be any antibody, or fragment or variant thereof, encoded by payload regions of the viral genomes of the present disclosure.

[1211] In some embodiments, IdeS may cleave an IgG antibody to clear, or unblock, effector cell antibody receptors, as described by Järnum et al, 2019 (see. J Immunol. 2015 Dec. 15; 195(12):5592-601), the contents of which are herein incorporated by reference in their entirety. In such embodiments, the clearance or unblocking of effector cell receptors may allow for preferential loading (binding) of other, i.e., non-IdeS-cleaved antibodies, onto effector cells, thereby enhancing or potentiating their binding and/or efficacy. As a non-limiting example, antibodies encoded by payload regions of the viral genomes of the present disclosure, may preferentially load onto effector cells following IdeS cleavage of IgG antibodies, thereby enhancing or potentiating their binding and/or efficacy.

[1212] In some embodiments, IdeS cleavage and processing efficacy may be investigated using different methods. As a non-limiting example, IdeS cleavage and processing efficacy may be investigated using an ELISA that measures IgG and IgG fragment levels in serum. As another non-limiting example, IdeS cleavage and processing efficacy may be investigated using an ELISA that may measure the dynamics of the F(ab′)2- and Fc-containing fragments.

### AAV Production

[1213] The present disclosure provides methods for the generation of parvoviral particles, e.g. AAV particles, by viral genome replication in a viral replication cell.

[1214] In accordance with the disclosure, the viral genome comprising a payload region encoding an antibody, an antibody-based composition or fragment thereof, will be incorporated into the AAV particle produced in the viral replication cell. Methods of making AAV particles are well known in the art and are described in e.g., States U.S. Pat. Nos. 6,204,059, 5,756,283, 6,258,595, 6,261,551, 6,270,996, 6,281,010, 6,365,394, 6,475,769, 6,482,634, 6,485,966, 6,943,019, 6,953,690, 7,022,519, 7,238,526, 7,291,498 and 7,491,508, 5,064,764, 6,194,191, 6,566,118, 8,137,948; or International Publication Nos. WO1996039530, WO1998010088, WO1999014354, WO1999015685, WO1999047691, WO2000055342, WO2000075353, and WO2001023597; Methods In Molecular Biology, ed. Richard, Humana Press, N J (1995); O'Reilly et al., Baculovirus Expression Vectors, A Laboratory Manual, Oxford Univ. Press (1994); Samulski et al., J. Vir. 63:3822.8 (1989); Kajigaya et al., Proc. Natl. Acad. Sci. USA 88: 4646.50 (1991); Ruffing et al., J. Vir. 66:6922-30 (1992); Kimbauer et al., Vir, 219:37-44 (1996); Zhao et al., Vir.272:38293 (2000); the contents of each of which are herein incorporated by reference in their entirety. In some embodiments, the AAV particles are made using the methods described in WO2015191508, the contents of which are herein incorporated by reference in their entirety.

[1215] Viral replication cells commonly used for production of recombinant AAV viral vectors include but are not limited to 293 cells, COS cells, HeLa cells, KB cells, and other mammalian cell lines as described in U.S. Pat. Nos. U.S. Pat. Nos. 6,156,303, 5,387,484, 5,741,683, 5,691,176, and 5,688,676; U.S. patent publication No. 200210081721, and International Patent Publication Nos. WO 00/47757, WO 0024916, and WO 96/17947, the contents of each of which are herein incorporated by reference in their entireties.

[1216] In some embodiments, the AAV particles of the present disclosure may be produced in insect cells (e.g., Sf9 cells).

[1217] In some embodiments, the AAV particles of the present disclosure may be produced using triple transfection.

[1218] In some embodiments, the AAV particles of the present disclosure may be produced in mammalian cells.

[1219] In some embodiments, the AAV particles of the present disclosure may be produced by triple transfection in mammalian cells.

[1220] In some embodiments, the AAV particles of the present disclosure may be produced by triple transfection in HEK293 cells.

[1221] The present disclosure provides a method for producing an AAV particle comprising the steps of: 1) co-transfecting competent bacterial cells with a bacmid vector and either a viral construct vector and/or AAV payload construct vector, 2) isolating the resultant viral construct expression vector and AAV payload construct expression vector and separately transfecting viral replication cells, 3) isolating and purifying resultant payload and viral construct particles comprising viral construct expression vector or AAV payload construct expression vector, 4) co-infecting a viral replication cell with both the AAV payload and viral construct particles comprising viral construct expression vector or AAV payload construct expression vector, 5) harvesting and purifying the viral particle comprising a parvoviral genome.

[1222] In some embodiments, the present disclosure provides a method for producing an AAV particle comprising the steps of 1) simultaneously co-transfecting mammalian cells, such as, but not limited to HEK293 cells, with a payload region, a construct expressing rep and cap genes and a helper construct, 2) harvesting and purifying the AAV particle comprising a viral genome.

[1223] In some embodiments, the viral construct vector(s) used for AAV production may contain a nucleotide sequence encoding the AAV capsid proteins where the initiation codon of the AAV VP1 capsid protein is a non-ATG, i.e., a suboptimal initiation codon, allowing the expression of a modified ratio of the viral capsid proteins in the production system, to provide improved infectivity of the host cell. In a non-limiting example, a viral construct vector may contain a nucleic acid construct comprising a nucleotide sequence encoding AAV VP1, VP2, and VP3 capsid proteins, wherein the initiation codon for translation of the AAV VP1 capsid protein is CTG, TTG, or GTG, as described in U.S. Pat. No. 8,163,543, the contents of which are herein incorporated by reference in its entirety.

[1224] In some embodiments, the viral construct vector(s) used for AAV production may contain a nucleotide sequence encoding the AAV rep proteins where the initiation codon of the AAV rep protein or proteins is a non-ATG. In some embodiments, a single coding sequence is used for the Rep78 and Rep52 proteins, wherein initiation codon for translation of the Rep78 protein is a suboptimal initiation codon, selected from the group consisting of ACG, TTG, CTG and GTG, that effects partial exon skipping upon expression in insect cells, as described in U.S. Pat. No. 8,512,981, the contents of which is herein incorporated by reference in its entirety, for example to promote less abundant expression of Rep78 as compared to Rep52, which may be advantageous in that it promotes high vector yields.

[1225] In some embodiments, the viral genome of the AAV particle optionally encodes a selectable marker. The selectable marker may comprise a cell-surface marker, such as any protein expressed on the surface of the cell including, but not limited to receptors, CD markers, lectins, integrins, or truncated versions thereof.

[1226] In some embodiments, selectable marker reporter genes are selected from those described in International Application No. WO 96/23810; Heim et al., Current Biology 2:178-182 (1996); Heim et al., Proc. Natl. Acad. Sci. USA (1995); or Heim et al., Science 373:663-664 (1995); WO 96/30540, the contents of each of which are incorporated herein by reference in their entireties).

[1227] The AAV viral genomes encoding an anti-tau antibody payload described herein may be useful in the fields of human disease, veterinary applications and a variety of in vivo and in vitro settings. The AAV particles of the present disclosure may be useful in the field of medicine for the treatment, prophylaxis, palliation or amelioration of neurological diseases and/or disorders. In some embodiments, the AAV particles are used for the prevention and/or treatment of a tauopathy.

[1228] Various embodiments herein provide a pharmaceutical composition comprising the AAV particles described herein and a pharmaceutically acceptable excipient.

[1229] Various embodiments herein provide a method of treating a subject in need thereof comprising administering to the subject a therapeutically effective amount of the pharmaceutical composition described herein.

[1230] Certain embodiments of the method provide that the subject is treated by a route of administration of the pharmaceutical composition selected from the group consisting of: intravenous, intracerebroventricular, intraparenchymal, intrathecal, subpial and intramuscular, or a combination thereof. Certain embodiments of the method provide that the subject is treated for a tauopathy and/or other neurological disorder. In one aspect of the method, a pathological feature of the tauopathy or other neurological disorder is alleviated and/or the progression of the tauopathy or other neurological disorder is halted, slowed, ameliorated or reversed.

[1231] Various embodiments herein describe a method of decreasing the level of soluble tau in the central nervous system of a subject in need thereof comprising administering to said subject an effective amount of the pharmaceutical composition described herein.

[1232] Also described herein are compositions, methods, processes, kits and devices for the design, preparation, manufacture and/or formulation of AAV particles. In some embodiments, payloads, such as but not limited to anti-tau antibodies, may be encoded by payload constructs or contained within plasmids or vectors or recombinant adeno-associated viruses (AAVs).

[1233] The present disclosure also provides administration and/or delivery methods for vectors and viral particles, e.g., AAV particles, for the treatment or amelioration of neurological disease, such as, but not limited to tauopathy.

AAV Particles Comprising Viral Genomes with Antibody Payloads

[1234] In some embodiments, the AAV particle comprises a viral genome with a payload region comprising one or more antibody polynucleotide sequences. In such an embodiment, a viral genome encoding more than one polypeptide may be replicated and packaged into a viral particle. A target cell transduced with a viral particle comprising one or more antibody polynucleotides may express the encoded antibody or antibodies in a single cell.

[1235] In some embodiments, the AAV particles are useful in the field of medicine for the treatment, prophylaxis, palliation or amelioration of diseases and/or disorders.

[1236] In some embodiments, the AAV particles comprising antibody polynucleotide sequences which comprise a nucleic acid sequence encoding at least one antibody heavy and/or light chain may be introduced into mammalian cells.

[1237] The V viral genomes encoding antibody polynucleotides described herein may be useful in the fields of human disease, viruses, infections veterinary applications and a variety of in vivo and in vitro settings. In some embodiments, the AAV viral genomes encoding antibody polynucleotides are used for the prevention and/or treatment of a disease, disorder and/or condition.

[1238] The viral genome of the AAV particles of the present disclosure may comprise any combination of the sequence regions described in Tables 17-24 encapsidated in any of the capsids listed in Table 1 or described herein.

[1239] In some embodiments, the AAV particle viral genome may comprise at least one sequence region as described in Tables 17-24. The regions may be located before or after any of the other sequence regions described herein. Viral genomes may further comprise more than one copy of one or more sequence regions as described in Tables 17-24.

[1240] In some embodiments, the AAV particle viral genome may comprise at least one inverted terminal repeat (ITR) region. The ITR region(s) may, independently, have a length such as, but not limited to, 75, 76, 77, 78, 79, 80, 81, 82, 83, 84, 85, 86, 87, 88, 89, 90, 91, 92, 93, 94, 95, 96, 97, 98, 99, 100, 101, 102, 103, 104, 105, 106, 107, 108, 109, 110, 111, 112, 113, 114, 115, 116, 117, 118, 119, 120, 121, 122, 123, 124, 125, 126, 127, 128, 129, 130, 131, 132, 133, 134, 135, 136, 137, 138, 139, 140, 141, 142, 143, 144, 145, 146,147, 148,149, 150, 151, 152, 153, 154, 155, 156, 157, 158, 159, 160, 161, 162, 163, 164, 165, 166, 167, 168, 169, 170, 171, 172, 173, 174, and 175 nucleotides. The length of the ITR region for the viral genome may be 7580, 7585, 75-100, 80-85, 80-90, 80-105, 85-90, 85-95, 85-110, 90-95, 90-100, 90-115, 95-100, 95-105, 95-120, 100-105, 100-110,100-125, 105-110,105-115, 105-130, 110-115, 110-120, 110-135, 115-120, 115-125, 115-140, 120-125,120-130, 120.145, 125-130,125-135, 125-150,130-135, 130-140, 130-155, 135-140, 135-145,135-160, 140-145, 140-150, 140-165, 145-150, 145-155, 145-170, 150-155, 150-160, 150-175, 155-160, 155-165, 160-165, 160-170, 165-170, 165-175, and 170-175 nucleotides. As a non-limiting example, the viral genome comprises a 5′ ITR that is about 141 nucleotides in length. As a non-limiting example, the viral genome comprises a 5′ ITR that is about 130 nucleotides in length.

[1241] In some embodiments, the AAV particle viral genome comprises at least one 5′ inverted terminal repeat (5′ ITR) sequence region. Non-limiting examples of 5′ ITR sequence regions are described in Table 17.

TABLE 17
Inverted Terminal Repeat (ITR) Sequence Regions

| Sequence | Sequence | |
|---|---|---|
| Region Name | Length | SEQ ID NO |
| ITR1 | 130 | 13519 |
| ITR2 | 141 | 13520 |
| ITR3 | 130 | 13521 |
| ITR4 | 141 | 13522 |

[1242] In some embodiments, the AAV particle viral genome may have an ITR that comprises ITR1. In some embodiments, the AAV particle viral genome may have an ITR that comprises ITR2. In some embodiments, the AAV particle viral genome may have an ITR that comprises ITR3. In some embodiments, the AAV particle viral genome may have an ITR that comprises ITR4.

[1243] In some embodiments, the AAV particle viral genome may have two ITRs. As a non-limiting example, the two ITRs are ITR1 and ITR3. As a non-limiting example, the two ITRs are ITR1 and ITR4. As a non-limiting example, the two ITRs are ITR2 and ITR3. As a non-limiting example, the two ITRs are ITR2 and ITR4

[1244] In some embodiments, the AAV particle viral genome may comprise at least one promoter sequence region. The promoter sequence region(s) may, independently, have a length such as, but not limited to, 4, 5, 6, 7, 8, 9, 10, 11, 12, 13, 14, 15, 16, 17, 18, 19, 20, 21, 22, 23, 24, 25, 26, 27, 28, 29, 30, 31, 32, 33, 34, 35, 36, 37, 38, 39, 40, 41, 42, 43, 44, 45, 46, 47, 48, 49, 50, 51, 52, 53, 54, 55, 56, 57, 58, 59, 60, 61, 62, 63, 64, 65, 66, 67, 68, 69, 70, 71, 72, 73, 74, 75, 76, 77, 78, 79, 80, 81, 82, 83, 84, 85, 86, 87, 88, 89, 90, 91, 92, 93, 94, 95, 96, 97, 98, 99, 100, 101, 102, 103, 104, 105, 106, 107, 108, 109, 110, 111, 112, 113, 114, 115, 116, 117, 118, 119, 120, 121, 122, 123, 124, 125, 126, 127, 128, 129, 130, 131, 132, 133, 134, 135, 136, 137, 138, 139, 140, 141, 142, 143, 144, 145, 146, 147, 148, 149, 150, 151, 152, 153, 154, 155, 156, 157, 158, 159, 160, 161, 162, 163, 164, 165, 166, 167, 168, 169, 170, 171, 172, 173, 174, 175, 176, 177, 178, 179, 180, 181,182, 183, 184, 185, 186, 187, 188, 189, 190, 191, 192, 193, 194, 195, 196, 197, 198, 199, 200, 201, 202, 203, 204, 205, 206, 207, 208, 209, 210, 211, 212, 213, 214, 215, 216, 217, 218, 219, 220, 221, 222, 223, 224, 225, 226, 227, 228, 229, 230, 231, 232, 233, 234, 235, 236, 237, 238, 239, 240, 241, 242, 243, 244, 245, 246, 247, 248, 249, 250, 251, 252, 253, 254, 255, 256, 257, 258, 259, 260, 261, 262, 263, 264, 265, 266, 267, 268, 269, 270, 271, 272, 273, 274, 275, 276, 277, 278, 279, 280, 281, 282, 283, 284, 285, 286, 287, 288, 289, 290, 291, 292, 293, 294, 295, 296, 297, 298, 299, 300, 301, 302, 303, 304, 305, 306, 307, 308, 309, 310, 311, 312, 313, 314, 315, 316, 317, 318, 319, 320, 321, 322, 323, 324, 325, 326, 327, 328, 329, 330, 331, 332, 333, 334, 335, 336, 337, 338, 339, 340, 341, 342, 343, 344, 345, 346, 347, 348, 349, 350, 351, 352, 353, 354, 355, 356, 357, 358, 359, 360, 361, 362, 363, 364, 365, 366, 367, 368, 369, 370, 371, 372, 373, 374, 375, 376, 377, 378, 379, 380, 381, 382, 383, 384, 385, 386, 387, 388, 389, 390, 391, 392, 393, 394, 395, 396, 397, 398, 399, 400, 401, 402, 403, 404, 405, 406, 407, 408, 409, 410, 411, 412, 413, 414, 415, 416, 417, 418, 419, 420, 421, 422, 423, 424, 425, 426, 427, 428, 429, 430, 431, 432, 433, 434, 435, 436, 437, 438, 439, 440, 441, 442, 443, 444, 445, 446, 447, 448, 449, 450, 451, 452, 453, 454, 455, 456, 457, 458, 459, 460, 461, 462, 463, 464, 465, 466, 467, 468, 469, 470, 471, 472, 473, 474, 475, 476, 477, 478, 479, 480, 481, 482, 483, 484, 485, 486, 487, 488, 489, 490, 491, 492, 493, 494, 495, 496, 497, 498, 499, 500, 501, 502, 503, 504, 505, 506, 507, 508, 509, 510, 511, 512, 513, 514, 515, 516, 517, 518, 519, 520, 521, 522, 523, 524, 525, 526, 527, 528, 529, 530, 531, 532, 533, 534, 535, 536, 537, 538, 539, 540, 541, 542, 543, 544, 545, 546, 547, 548, 549, 550, 551, 552, 553, 554, 555, 556, 557, 558, 559, 560, 561, 562, 563, 564, 565, 566, 567, 568, 569, 570, 571, 572, 573, 574, 575, 576, 577, 578, 579, 580, 581, 582, 583, 584, 585, 586, 587, 588, 589, 590, 591, 592, 593, 594, 595, 596, 597, 598, 599, 600 and more than 600 nucleotides. The length of the promoter region for the viral genome may be 4-10, 10-20, 10-50, 20-30, 30-40, 40-50, 50-60, 50-100, 60-70, 70-80, 80-90, 90-100,100-110, 100-150, 110-120, 120-130, 130-140, 140-150, 150-160, 150-200, 160-170,170-180, 180-190, 190-200, 200-210, 200-250, 210-220, 220.230, 230.240, 240.250, 250-260, 250-300, 260-270, 270-280, 280-290, 290-300, 300-310, 300-350, 310-320, 320-330, 330-340, 340-350, 350-360, 350-400, 360-370, 370-380, 380-390, 390-400, 400-410, 400-450, 410-420, 420-430, 430.440, 440-450, 450-460, 450-500, 460-470, 470-480, 480-490, 490.500, 500.510, 500-550, 510-520, 520.530, 530-540, 540-550, 550-560, 550-600, 560.570, 570-580, 580-590, 590-600 and more than 600 nucleotides. As a non-limiting example, the viral genome comprises a promoter region that is about 260 nucleotides in length. As a non-limiting example, the viral genome comprises a promoter region that is about 283 nucleotides in length. As a non-limiting example, the viral genome comprises a promoter region that is about 299 nucleotides in length. As a non-limiting example, the viral genome comprises a promoter region that is about 365 nucleotides in length. As a non-limiting example, the viral genome comprises a promoter region that is about 380 nucleotides in length. As a non-limiting example, the viral genome comprises a promoter region that is about 382 nucleotides in length. As a non-limiting example, the viral genome comprises a promoter region that is about 557 nucleotides in length. As a non-limiting example, the viral genome comprises a promoter region that is about 654 nucleotides in length. As a non-limiting example, the viral genome comprises a promoter region that is about 699 nucleotides in length. As a non-limiting example, the viral genome comprises a promoter region that is about 1714 nucleotides in length. As a non-limiting example, the viral genome comprises a promoter region that is about 1715 nucleotides in length. As a non-limiting example, the viral genome comprises a promoter region that is about 1736 nucleotides in length.

[1245] In some embodiments, the AAV particle viral genome comprises at least one promoter sequence region. Non-limiting examples of promoter sequence regions are described in Table 18.

TABLE 18
Promoter Sequence Regions

| Sequence | Sequence | SEQ ID |
|---|---|---|
| Region Name | Length | NO |
| Promoter 1 | 1715 | 13523 |
| Promoter 2 | 299 | 13524 |
| Promoter 3 | 283 | 13525 |
| Promoter 4 | 260 | 13526 |
| Promoter 5 | 654 | 13527 |
| Promoter 6 | 699 | 13528 |
| Promoter 7 | 557 | 13529 |
| Promoter 8 | 382 | 13530 |
| Promoter 9 | 1736 | 13531 |
| Promoter 10 | 365 | 13532 |
| Promoter 11 | 1714 | 13533 |
| Promoter 12 | 380 | 13534 |

[1246] In some embodiments, the AAV particle viral genome comprises one promoter sequence region. In some embodiments, the promoter sequence region is Promoter 1. In some embodiments, the promoter sequence region is Promoter 2. In some embodiments, the promoter sequence region is Promoter 3. In some embodiments, the promoter sequence region is Promoter 4. In some embodiments, the promoter sequence region is Promoter 5. In some embodiments, the promoter sequence region is Promoter 6. In some embodiments, the promoter sequence region is Promoter 7. In some embodiments, the promoter sequence region is Promoter 8. In some embodiments, the promoter sequence region is Promoter 9. In some embodiments, the promoter sequence region is Promoter 10. In some embodiments, the promoter sequence region is Promoter 11. In some embodiments, the promoter sequence region is Promoter 12. In some embodiments, the promoter sequence region further comprises at least one promoter sub-region. As a non-limiting example, the promoter sequence is Promoter 1, further comprising Promoter 2 and Promoter 3 sub-regions.

[1247] In some embodiments, the AAV particle viral genome comprises more than one promoter sequence region. In some embodiments, the AAV particle viral genome comprises two promoter sequence regions. In some embodiments, the AAV particle viral genome comprises three promoter sequence regions.

[1248] In some embodiments, the AAV particle viral genome may comprise at least one exon sequence region. The exon region(s) may, independently, have a length such as, but not limited to, 2, 3, 4, 5, 6, 7, 8, 9, 10, 11, 12, 13, 14, 15, 16, 17, 18, 19, 20, 21, 22, 23, 24, 25, 26, 27, 28, 29, 30, 31, 32, 33, 34, 35, 36, 37, 38, 39, 40, 41, 42, 43, 44, 45, 46, 47, 48, 49, 50, 51, 52, 53, 54, 55, 56, 57, 58, 59, 60, 61, 62, 63, 64, 65, 66, 67, 68, 69, 70, 71, 72, 73, 74, 75, 76, 77, 78, 79, 80, 81, 82, 83, 84, 85, 86, 87, 88, 89, 90, 91, 92, 93, 94, 95, 96, 97, 98, 99, 100, 101, 102, 103, 104, 105, 106, 107, 108, 109, 110, 111, 112, 113, 114, 115, 116, 117, 118, 119, 120, 121, 122, 123, 124, 125, 126, 127, 128, 129, 130, 131, 132, 133, 134, 135, 136, 137, 138, 139, 140, 141, 142, 143, 144, 145, 146, 147, 148, 149, and 150 nucleotides. The length of the exon region for the viral genome may be 2.10, 5-10, 5-15, 10-20, 10-30, 10-40, 15-20, 15-25, 20-30, 20-40, 20-50, 25-30, 25-35, 30-40, 30-50, 30-60, 35.40, 35-45, 40-50, 40-60, 40-70, 45-50, 45-55, 50-60, 50-70, 50-80, 55-60, 55-65, 60-70, 60-80, 60-90, 65-70, 65-75, 70-80, 70-90, 70-100, 75-80, 75-85, 80-90, 80-100, 80-110, 85-90, 85-95, 90-100, 90-110, 90-120, 95-100, 95-105, 100-110, 100-120, 100-130, 105-110, 105-115, 110-120, 110-130, 110-140, 115-120, 115-125, 120-130, 120-140, 120-150, 125-130, 125-135, 130-140, 130-150, 135-140, 135-145, 140-150, and 145-150 nucleotides. As a non-limiting example, the viral genome comprises an exon region that is about 53 nucleotides in length. As a non-limiting example, the viral genome comprises an exon region that is about 54 nucleotides in length. As a non-limiting example, the viral genome comprises an exon region that is about 59 nucleotides in length. As a non-limiting example, the viral genome comprises an exon region that is about 102 nucleotides in length. As a non-limiting example, the viral genome comprises an exon region that is about 134 nucleotides in length.

[1249] In some embodiments, the AAV particle viral genome comprises at least one Exon sequence region. Non-limiting examples of Exon sequence regions are described in Table 19.

TABLE 19
Exon Sequence Regions

| Sequence | Sequence | SEQ ID |
|---|---|---|
| Region Name | Length | NO |
| Exon1 | 134 | 13535 |
| Exon2 | 102 | 13536 |
| Exon3 | 59 | 13537 |
| Exon4 | 53 | 13538 |
| Exon5 | 54 | 13539 |

[1250] In some embodiments, the AAV particle viral genome comprises one Exon sequence region. In some embodiments, the Exon sequence region is the Exon1 sequence region. In some embodiments, the Exon sequence region is the Exon2 sequence region. In some embodiments, the Exon sequence region is the Exon3 sequence region. In some embodiments, the Exon sequence region is the Exon4 sequence region. In some embodiments, the Exon sequence region is the Exon5 sequence region.

[1251] In some embodiments, the AAV particle viral genome comprises two Exon sequence regions. In some embodiments, the AAV particle viral genome comprises three Exon sequence regions. In some embodiments, the AAV particle viral genome comprises four Exon sequence regions. In some embodiments, the AAV particle viral genome comprises more than four Exon sequence regions.

[1252] In some embodiments, the AAV particle viral genome may comprise at least one intron sequence region. The intron region(s) may, independently, have a length such as, but not limited to, 10, 11, 12, 13, 14, 15, 16, 17, 18, 19, 20, 21, 22, 23, 24, 25, 26, 27, 28, 29, 30, 31, 32, 33, 34, 35, 36, 37, 38, 39, 40, 41, 42, 43, 44, 45, 46, 47, 48, 49, 50, 51, 52, 53, 54, 55, 56, 57, 58, 59, 60, 61, 62, 63, 64, 65, 66, 67, 68, 69, 70, 71, 72, 73, 74, 75, 76, 77, 78, 79, 80, 81, 82, 83, 84, 85, 86, 87, 88, 89, 90, 91, 92, 93, 94, 95, 96, 97, 98, 99, 100, 101, 102, 103, 104, 105, 106, 107, 108, 109, 110, 111, 112, 113, 114, 115, 116, 117, 118, 119, 120, 121, 122, 123, 124, 125, 126, 127, 128, 129, 130, 131, 132, 133, 134, 135, 136, 137, 138, 139, 140, 141, 142, 143, 144, 145, 146, 147, 148, 149, 150, 151, 152, 153, 154, 155, 156, 157, 158, 159, 160, 161, 162, 163, 164, 165, 166, 167, 168, 169, 170, 171, 172, 173, 174, 175, 176, 177, 178, 179, 180, 181, 182, 183, 184, 185, 186, 187, 188, 189, 190, 191, 192, 193, 194, 195, 196, 197, 198, 199, 200, 201, 202, 203, 204, 205, 206, 207, 208, 209, 210, 211, 212, 213, 214, 215, 216, 217, 218, 219, 220, 221, 222, 223, 224, 225, 226, 227, 228, 229, 230, 231, 232, 233, 234, 235, 236, 237, 238, 239, 240, 241, 242, 243, 244, 245, 246, 247, 248, 249, 250, 251, 252, 253, 254, 255, 256, 257, 258, 259, 260, 261, 262, 263, 264, 265, 266, 267, 268, 269, 270, 271, 272, 273, 274, 275, 276, 277, 278, 279, 280, 281, 282, 283, 284, 285, 286, 287, 288, 289, 290, 291, 292, 293, 294, 295, 296, 297, 298, 299, 300, 301, 302, 303, 304, 305, 306, 307, 308, 309, 310, 311, 312, 313, 314, 315, 316, 317, 318, 319, 320, 321, 322, 323, 324, 325, 326, 327, 328, 329, 330, 331, 332, 333, 334, 335, 336, 337, 338, 339, 340, 341, 342, 343, 344, 345, 346, 347, 348, 349, 350 and more than 350 nucleotides. The length of the intron region for the viral genome may be 25-35, 25-50, 35-45, 45-55, 50-75, 55-65, 65-75, 75-85, 75.100, 85.95, 95-105,100-125, 105-115, 115-125,125-135, 125-150,135-145, 145-155,150-175, 155-165,165-175, 175-185, 175-200, 185-195, 195-205, 200-225, 205-215, 215-225, 225-235, 225-250, 235-245, 245-255, 250-275, 255-265, 265-275, 275-285, 275-300, 285-295, 295-305, 300-325, 305-315, 315-325, 325-335, 325-350, and 335-345 nucleotides. As a non-limiting example, the viral genome comprises an intron region that is about 15 nucleotides in length. As a non-limiting example, the viral genome comprises an intron region that is about 32 nucleotides in length. As a non-limiting example, the viral genome comprises an intron region that is about 41 nucleotides in length. As a non-limiting example, the viral genome comprises an intron region that is about 53 nucleotides in length. As a non-limiting example, the viral genome comprises an intron region that is about 73 nucleotides in length. As a non-limiting example, the viral genome comprises an intron region that is about 168 nucleotides in length. As a non-limiting example, the viral genome comprises an intron region that is about 172 nucleotides in length. As a non-limiting example, the viral genome comprises an intron region that is about 292 nucleotides in length. As a non-limiting example, the viral genome comprises an intron region that is about 347 nucleotides in length. As a non-limiting example, the viral genome comprises an intron region that is about 387 nucleotides in length. As a non-limiting example, the viral genome comprises an intron region that is about 491 nucleotides in length. As a non-limiting example, the viral genome comprises an intron region that is about 566 nucleotides in length. As a non-limiting example, the viral genome comprises an intron region that is about 1074 nucleotides in length.

[1253] In some embodiments, the AAV particle viral genome comprises at least one intron sequence region. Non-limiting examples of intron sequence regions are described in Table 20.

TABLE 20
Intron Sequence Regions

| Sequence | Sequence | SEQ ID |
|---|---|---|
| Region Name | Length | NO |
| Intron1 | 32 | 13540 |
| Intron2 | 15 | 13541 |
| Intron3 | 347 | 13542 |
| Intron4 | 168 | 13543 |
| Intron5 | 73 | 13544 |
| Intron6 | 73 | 13545 |
| Intron7 | 73 | 13546 |
| Intron8 | 53 | 13547 |
| Intron9 | 172 | 13548 |
| Intron10 | 1074 | 13549 |
| Intron11 | 41 | 13550 |
| Intron12 | 566 | 13551 |
| Intron13 | 491 | 13552 |
| Intron14 | 387 | 13553 |
| Intron15 | 292 | 13554 |

[1254] In some embodiments, the AAV particle viral genome comprises one intron sequence region. In some embodiments, the intron sequence region is the Intron1 sequence region. In some embodiments, the intron sequence region is the Intron2 sequence region. In some embodiments, the intron sequence region is the Intron3 sequence region. In some embodiments, the intron sequence region is the Intron4 sequence region. In some embodiments, the intron sequence region is the Intron5 sequence region. In some embodiments, the intron sequence region is the Intron6 sequence region. In some embodiments, the intron sequence region is the Intron7 sequence region. In some embodiments, the intron sequence region is the Intron8 sequence region. In some embodiments, the intron sequence region is the Intron9 sequence region. In some embodiments, the intron sequence region is the Intron10 sequence region. In some embodiments, the intron sequence region is the Intron11 sequence region. In some embodiments, the intron sequence region is the Intron12 sequence region. In some embodiments, the intron sequence region is the Intron13 sequence region. In some embodiments, the intron sequence region is the Intron14 sequence region. In some embodiments, the intron sequence region is the Intron15 sequence region.

[1255] In some embodiments, the AAV particle viral genome comprises two intron sequence regions. In some embodiments, the AAV particle viral genome comprises three intron sequence regions. In some embodiments, the AAV particle viral genome comprises more than three intron sequence regions.

[1256] In some embodiments, the AAV particle viral genome may comprise at least one signal sequence region, not derived from an antibody. In another embodiment, the signal sequence region may be derived from an antibody sequence. The signal sequence region(s) may, independently, have a length such as, but not limited to, 10, 11, 12, 13, 14, 15, 16, 17, 18, 19, 20, 21, 22, 23, 24, 25, 26, 27, 28, 29, 30, 31, 32, 33, 34, 35, 36, 37, 38, 39, 40, 41, 42, 43, 44, 45, 46, 47, 48, 49, 50, 51, 52, 53, 54, 55, 56, 57, 58, 59, 60, 61, 62, 63, 64, 65, 66, 67, 68, 69, 70, 71, 72, 73, 74, 75, 76, 77, 78, 79, 80, 81, 82, 83, 84, 85, 86, 87, 88, 89, 90, 91, 92, 93, 94, 95, 96, 97, 98, 99, 100, 101, 102, 103, 104, 105, 106, 107, 108, 109, 110, 111, 112, 113, 114, 115, 116, 117, 118, 119, 120, 121, 122, 123, 124, 125, 126, 127, 128, 129, 130, 131, 132, 133, 134, 135, 136, 137, 138, 139, 140, 141, 142, 143, 144, 145, 146, 147, 148, 149, and 150 nucleotides. The length of the signal region in the viral genome may be 10-15, 15-25, 25-35, 25-50, 35.45, 45.55, 50.75, 55-65, 65.75, 75-85,75-100, 85-95, 95-105, 100-125, 105-115, 115-125, 125-135, 125-150, 135-145, 145-155, 150-175, 155-165, 165-175, 175-185, 175-200, 185-195, 195-205, 200-225, 205-215, 215-225, 225.235, 225-250, 235-245, 245.255, 250-275, 255.265, 265.275, 275.285, 275-300, 285.295, 295-305, 300-325, 305.315, 315-325, 325.335, 325-350, and 335-345 nucleotides. As a non-limiting example, the viral genome comprises a signal sequence region that is about 12 nucleotides in length. As a non-limiting example, the viral genome comprises a signal sequence region that is about 57 nucleotides in length. As a non-limiting example, the viral genome comprises a signal sequence region that is about 66 nucleotides in length. As a non-limiting example, the viral genome comprises a signal sequence region that is about 69 nucleotides in length. As a non-limiting example, the viral genome comprises a signal sequence region that is about 72 nucleotides in length. As a non-limiting example, the viral genome comprises a signal sequence region that is about 78 nucleotides in length. As a non-limiting example, the viral genome comprises a signal sequence region that is about 81 nucleotides in length. As a non-limiting example, the viral genome comprises a signal sequence region that is about 84 nucleotides in length. As a non-limiting example, the viral genome comprises a signal sequence region that is about 93 nucleotides in length. As a non-limiting example, the viral genome comprises a signal sequence region that is about 96 nucleotides in length. As a non-limiting example, the viral genome comprises a signal sequence region that is about 411 nucleotides in length.

[1257] In some embodiments, the AAV particle viral genome comprises at least one signal sequence region. Non-limiting examples of signal sequence regions not derived from an antibody sequence are described in Table 21.

TABLE 21
Signal Sequence Regions

| Sequence | Sequence | SEQ ID |
|---|---|---|
| Region Name | Length | NO |
| Signal1 | 84 | 13555 |
| Signal2 | 93 | 13556 |
| Signal3 | 96 | 13557 |
| Signal4 | 66 | 13558 |
| Signal5 | 72 | 13559 |
| Signal6 | 93 | 13560 |
| Signal7 | 69 | 13561 |
| Signal8 | 81 | 13562 |
| Signal9 | 12 | 13563 |
| Signal10 | 81 | 13564 |
| Signal11 | 66 | 13565 |
| Signal12 | 78 | 13566 |
| Signal13 | 57 | 13567 |
| Signal14 | 57 | 13568 |
| Signal15 | 57 | 13569 |
| Signal16 | 411 | 13570 |

[1258] In some embodiments, the AAV particle viral genome comprises one signal sequence region. In some embodiments, the signal sequence region is the Signal1 sequence region. In some embodiments, the signal sequence region is the Signal2 sequence region. In some embodiments, the signal sequence region is the Signal3 sequence region. In some embodiments, the signal sequence region is the Signal4 sequence region. In some embodiments, the signal sequence region is the Signal5 sequence region. In some embodiments, the signal sequence region is the Signal6 sequence region. In some embodiments, the signal sequence region is the Signal7 sequence region. In some embodiments, the signal sequence region is the Signal8 sequence region. In some embodiments, the signal sequence region is the Signal9 sequence region. In some embodiments, the signal sequence region is the Signal10 sequence region. In some embodiments, the signal sequence region is the Signal11 sequence region. In some embodiments, the signal sequence region is the Signal12 sequence region. In some embodiments, the signal sequence region is the Signal13 sequence region. In some embodiments, the signal sequence region is the Signal14 sequence region. In some embodiments, the signal sequence region is the Signal15 sequence region. In some embodiments, the signal sequence region is the Signal16 sequence region.

[1259] In some embodiments, the AAV particle viral genome comprises one signal sequence region. In some embodiments, the AAV particle viral genome comprises two signal sequence regions. In some embodiments, the AAV particle viral genome comprises three signal sequence regions. In some embodiments, the AAV particle viral genome comprises more than three signal sequence regions. In some embodiments, the signal sequences of a viral genome comprising more than one signal sequence, are the same. In another embodiment, the signal sequences of a viral genome comprising more than one signal sequence, are not the same.

[1260] In some embodiments, the AAV particle viral genome may comprise at least one tag sequence region. As used herein, the term “tag” indicates a polynucleotide sequence appended to the payload, that once expressed may be used to identify the expressed payload. Alternatively, the term “tag” may indicate a polynucleotide sequence appended to the payload that signals for retention of the expressed payload in a particular region of the cell (e.g., endoplasmic reticulum). The tag sequence region(s) may, independently, have a length such as, but not limited to, 10, 11, 12, 13, 14, 15, 16, 17, 18, 19, 20, 21, 22, 23, 24, 25, 26, 27, 28, 29, 30 or more than 30 nucleotides. The length of the tag sequence region in the viral genome may be 10-15, 15-20, 20-25, 25-30, or more than 30 nucleotides. As a non-limiting example, the viral genome comprises a tag sequence region that is about 18 nucleotides in length. As a non-limiting example, the viral genome comprises a tag sequence region that is about 21 nucleotides in length. As a non-limiting example, the viral genome comprises a tag sequence region that is about 27 nucleotides in length.

[1261] In some embodiments, the AAV particle viral genome comprises at least one tag sequence region. Non-limiting examples of tag sequence regions are described in Table 22.

TABLE 22
Tag Sequence Regions

| Sequence | Sequence | SEQ ID |
|---|---|---|
| Region Name | Length | NO |
| Tag1 | 27 | 13571 |
| Tag2 | 21 | 13572 |
| Tag3 | 18 | 13573 |
| Tag4 | 18 | 13574 |
| Tag5 | 18 | 13575 |

[1262] In some embodiments, the AAV particle viral genome comprises one tag sequence region. In some embodiments, the tag sequence region is the Tag1 sequence region. In some embodiments, the tag sequence region is the Tag2 sequence region. In some embodiments, the tag sequence region is the Tag3 sequence region. In some embodiments, the tag sequence region is the Tag4 sequence region. In some embodiments, the tag sequence region is the Tag5 sequence region.

[1263] In some embodiments, the AAV particle viral genome comprises more than one tag sequence region. In some embodiments, the AAV particle viral genome comprises two tag sequence regions. In some embodiments, the AAV particle viral genome comprises three tag sequence regions. In some embodiments, the AAV particle viral genome comprises more than three tag sequence regions.

[1264] In some embodiments, the AAV particle viral genome may comprise at least one polyadenylation sequence region. The polyadenylation sequence region(s) may, independently, have a length such as, but not limited to, 4, 5, 6, 7, 8, 9, 10, 11, 12, 13, 14, 15, 16, 17, 18, 19, 20, 21, 22, 23, 24, 25, 26, 27, 28, 29, 30, 31, 32, 33, 34, 35, 36, 37, 38, 39, 40, 41, 42, 43, 44, 45, 46, 47, 48, 49, 50, 51, 52, 53, 54, 55, 56, 57, 58, 59, 60, 61, 62, 63, 64, 65, 66, 67, 68, 69, 70, 71, 72, 73, 74, 75, 76, 77, 78, 79, 80, 81, 82, 83, 84, 85, 86, 87, 88, 89, 90, 91, 92, 93, 94, 95, 96, 97, 98, 99, 100, 101, 102, 103, 104, 105, 106, 107, 108, 109, 110, 111, 112, 113, 114, 115, 116, 117, 118, 119,120, 121,122, 123, 124, 125, 126, 127, 128, 129, 130, 131, 132, 133, 134, 135, 136, 137, 138, 139, 140, 141, 142, 143, 144, 145, 146, 147, 148, 149, 150, 151, 152, 153, 154, 155, 156, 157, 158, 159, 160, 161, 162, 163, 164, 165, 166, 167, 168, 169, 170, 171, 172, 173, 174, 175, 176, 177, 178, 179, 180, 181, 182, 183, 184, 185, 186, 187, 188, 189, 190, 191, 192, 193, 194, 195, 196, 197, 198, 199, 200, 201, 202, 203, 204, 205, 206, 207, 208, 209, 210, 211, 212, 213, 214, 215, 216, 217, 218, 219, 220, 221, 222, 223, 224, 225, 226, 227, 228, 229, 230, 231, 232, 233, 234, 235, 236, 237, 238, 239, 240, 241, 242, 243, 244, 245, 246, 247, 248, 249, 250, 251, 252, 253, 254, 255, 256, 257, 258, 259, 260, 261, 262, 263, 264, 265, 266, 267, 268, 269, 270, 271, 272, 273, 274, 275, 276, 277, 278, 279, 280, 281, 282, 283, 284, 285, 286, 287, 288, 289, 290, 291, 292, 293, 294, 295, 296, 297, 298, 299, 300, 301, 302, 303, 304, 305, 306, 307, 308, 309, 310, 311, 312, 313, 314, 315, 316, 317, 318, 319, 320, 321, 322, 323, 324, 325, 326, 327, 328, 329, 330, 331, 332, 333, 334, 335, 336, 337, 338, 339, 340, 341, 342, 343, 344, 345, 346, 347, 348, 349, 350, 351, 352, 353, 354, 355, 356, 357, 358, 359, 360, 361, 362, 363, 364, 365, 366, 367, 368, 369, 370, 371, 372, 373, 374, 375, 376, 377, 378, 379, 380, 381, 382, 383, 384, 385, 386, 387, 388, 389, 390, 391, 392, 393, 394, 395, 396, 397, 398, 399, 400, 401, 402, 403, 404, 405, 406, 407, 408, 409, 410, 411, 412, 413, 414, 415, 416, 417, 418, 419, 420, 421, 422, 423, 424, 425, 426, 427, 428, 429, 430, 431, 432, 433, 434, 435, 436, 437, 438, 439, 440, 441, 442, 443, 444, 445, 446, 447, 448, 449, 450, 451, 452, 453, 454, 455, 456, 457, 458, 459, 460, 461, 462, 463, 464, 465, 466, 467, 468, 469, 470, 471, 472, 473, 474, 475, 476, 477, 478, 479, 480, 481, 482, 483, 484, 485, 486, 487, 488, 489, 490, 491, 492, 493, 494, 495, 496, 497, 498, 499, 500, 501, 502, 503, 504, 505, 506, 507, 508, 509, 510, 511, 512, 513, 514, 515, 516, 517, 518, 519, 520, 521, 522, 523, 524, 525, 526, 527, 528, 529, 530, 531, 532, 533, 534, 535, 536, 537, 538, 539, 540, 541, 542, 543, 544, 545, 546, 547, 548, 549, 550, 551, 552, 553, 554, 555, 556, 557, 558, 559, 560, 561, 562, 563, 564, 565, 566, 567, 568, 569, 570, 571, 572, 573, 574, 575, 576, 577, 578, 579, 580, 581, 582, 583, 584, 585, 586, 587, 588, 589, 590, 591, 592, 593, 594, 595, 596, 597, 598, 599, and 600 nucleotides. The length of the polyadenylation sequence region for the viral genome may be 4-10, 10-20, 10-50, 20-30, 30-40, 40-50, 50-60, 50-100, 60-70, 70-80, 80-90, 90-100,100-110, 100-150, 110-120,120-130, 130-140,140-150, 150-160, 150-200, 160-170, 170-180, 180-190, 190-200, 200-210, 200-250, 210.220, 220.230, 230.240, 240-250, 250-260, 250-300, 260-270, 270-280, 280-290, 290-300, 300-310, 300-350, 310-320, 320-330, 330-340, 340-350, 350-360, 350.400, 360-370, 370-380, 380-390, 390.400, 400.410, 400.450, 410.420, 420.430, 430-440, 440-450, 450.460, 450-500, 460.470, 470-480, 480.490, 490-500, 500-510, 500-550, 510.520, 520-530, 530.540, 540.550, 550-560, 550-600, 560-570, 570.580, 580-590, and 590-600 nucleotides. As a non-limiting example, the viral genome comprises a polyadenylation sequence region that is about 127 nucleotides in length. As a non-limiting example, the viral genome comprises a polyadenylation sequence region that is about 477 nucleotides in length. As a non-limiting example, the viral genome comprises a polyadenylation sequence region that is about 552 nucleotides in length.

[1265] In some embodiments, the AAV particle viral genome comprises at least one polyadenylation (polyA) sequence region. Non-limiting examples of polyA sequence regions are described in Table 23.

TABLE 23
PolyA Signal Sequence Regions

| Sequence | Sequence | SEQ ID |
|---|---|---|
| Region Name | Length | NO |
| PolyA1 | 127 | 13576 |
| PolyA2 | 477 | 13577 |
| PolyA3 | 552 | 13578 |

[1266] In some embodiments, the AAV particle viral genome comprises one polyA sequence region. In some embodiments, the polyA sequence region is the PolyA1 sequence. In some embodiments, the polyA sequence region is the PolyA2 sequence. In some embodiments, the polyA signal sequence region is the PolyA3 sequence.

[1267] In some embodiments, the AAV particle viral genome comprises more than one polyA sequence region.

[1268] In some embodiments, the AAV particle viral genome may comprise at least one or multiple filler sequence regions. The filler region(s) may, independently, have a length such as, but not limited to, 50, 51, 52, 53, 54, 55, 56, 57, 58, 59, 60, 61, 62, 63, 64, 65, 66, 67, 68, 69, 70, 71, 72, 73, 74, 75, 76, 77, 78, 79, 80, 81, 82, 83, 84, 85, 86, 87, 88, 89, 90, 91, 92, 93, 94, 95, 96, 97, 98, 99, 100, 101, 102, 103, 104, 105, 106, 107, 108, 109, 110, 111, 112,113, 114,115, 116, 117, 118, 119, 120, 121, 122, 123, 124, 125, 126, 127, 128, 129, 130, 131, 132, 133, 134, 135, 136, 137, 138, 139, 140, 141, 142, 143, 144, 145, 146, 147, 148, 149, 150, 151, 152, 153, 154, 155, 156, 157, 158, 159, 160, 161, 162, 163, 164, 165, 166, 167, 168, 169, 170, 171, 172, 173, 174, 175, 176, 177, 178, 179, 180, 181, 182, 183, 184, 185,186, 187, 188, 189, 190, 191, 192, 193, 194, 195, 196, 197, 198, 199, 200, 201, 202, 203, 204, 205, 206, 207, 208, 209, 210, 211, 212, 213, 214, 215, 216, 217, 218, 219, 220, 221, 222, 223, 224, 225, 226, 227, 228, 229, 230, 231, 232, 233, 234, 235, 236, 237, 238, 239, 240, 241, 242, 243, 244, 245, 246, 247, 248, 249, 250, 251, 252, 253, 254, 255, 256, 257, 256, 259, 260, 261, 262, 263, 264, 265, 266, 267, 268, 269, 270, 271, 272, 273, 274, 275, 276, 277, 278, 279, 280, 281, 282, 283, 284, 285, 286, 287, 288, 289, 290, 291, 292, 293, 294, 295, 296, 297, 298, 299, 300, 301, 302, 303, 304, 305, 306, 307, 308, 309, 310, 311, 312, 313, 314, 315, 316, 317, 318, 319, 320, 321, 322, 323, 324, 325, 326, 327, 328, 329, 330, 331, 332, 333, 334, 335, 336, 337, 338, 339, 340, 341, 342, 343, 344, 345, 346, 347, 348, 349, 350, 351, 352, 353, 354, 355, 356, 357, 358, 359, 360, 361, 362, 363, 364, 365, 366, 367, 368, 369, 370, 371, 372, 373, 374, 375, 376, 377, 378, 379, 380, 381, 382, 383, 384, 385, 386, 387, 388, 389, 390, 391, 392, 393, 394, 395, 396, 397, 398, 399, 400, 401, 402, 403, 404, 405, 406, 407, 408, 409, 410, 411, 412, 413, 414, 415, 416, 417, 418, 419, 420, 421, 422, 423, 424, 425, 426, 427, 428, 429, 430, 431, 432, 433, 434, 435, 436, 437, 438, 439, 440, 441, 442, 443, 444, 445, 446, 447, 448, 449, 450, 451, 452, 453, 454, 455, 456, 457, 458, 459, 460, 461, 462, 463, 464, 465, 466, 467, 468, 469, 470, 471, 472, 473, 474, 475, 476, 477, 478, 479, 480, 481, 482, 483, 484, 485, 486, 487, 488, 489, 490, 491, 492, 493, 494, 495, 496, 497, 498, 499, 500, 501, 502, 503, 504, 505, 506, 507, 508, 509, 510, 511, 512, 513, 514, 515, 516, 517, 518, 519, 520, 521, 522, 523, 524, 525, 526, 527, 528, 529, 530, 531, 532, 533, 534, 535, 536, 537, 538, 539, 540, 541, 542, 543, 544, 545, 546, 547, 548, 549, 550, 551, 552, 553, 554, 555, 556, 557, 558, 559, 560, 561, 562, 563, 564, 565, 566, 567, 568, 569, 570, 571, 572, 573, 574, 575, 576, 577, 578, 579, 580, 581, 582, 583, 584, 585, 586, 587, 588, 589, 590, 591, 592, 593, 594, 595, 596, 597, 598, 599, 600, 601, 602, 603, 604, 605, 606, 607, 608, 609, 610, 611, 612, 613, 614, 615, 616, 617, 618, 619, 620, 621, 622, 623, 624, 625, 626, 627, 628, 629, 630, 631, 632, 633, 634, 635, 636, 637, 638, 639, 640, 641, 642, 643, 644, 645, 646, 647, 648, 649, 650, 651, 652, 653, 654, 655, 656, 657, 658, 659, 660, 661, 662, 663, 664, 665, 666, 667, 668, 669, 670, 671, 672, 673, 674, 675, 676, 677, 678, 679, 680, 681, 682, 683, 684, 685, 686, 687, 688, 689, 690, 691, 692, 693, 694, 695, 696, 697, 698, 699, 700, 701, 702, 703, 704, 705, 706, 707, 708, 709, 710, 711, 712, 713, 714, 715, 716, 717, 718, 719, 720, 721, 722, 723, 724, 725, 726, 727, 728, 729, 730, 731, 732, 733, 734, 735, 736, 737, 738, 739, 740, 741, 742, 743, 744, 745, 746, 747, 748, 749, 750, 751, 752, 753, 754, 755, 756, 757, 758, 759, 760, 761, 762, 763, 764, 765, 766, 767, 768, 769, 770, 771, 772, 773, 774, 775, 776, 777, 778, 779, 780, 781, 782, 783, 784, 785, 786, 787, 788, 789, 790, 791, 792, 793, 794, 795, 796, 797, 798, 799, 800, 801, 802, 803, 804, 805, 806, 807, 808, 809, 810, 811, 812, 813, 814, 815, 816, 817, 818, 819, 820, 821, 822, 823, 824, 825, 826, 827, 828, 829, 830, 831, 832, 833, 834, 835, 836, 837, 838, 839, 840, 841, 842, 843, 844, 845, 846, 847, 848, 849, 850, 851, 852, 853, 854, 855, 856, 857, 858, 859, 860, 861, 862, 863, 864, 865, 866, 867, 868, 869, 870, 871, 872, 873, 874, 875, 876, 877, 878, 879, 880, 881, 882, 883, 884, 885, 886, 887, 888, 889, 890, 891, 892, 893, 894, 895, 896, 897, 898, 899, 900, 901, 902, 903, 904, 905, 906, 907, 908, 909, 910, 911, 912, 913, 914, 915, 916, 917, 918, 919, 920, 921, 922, 923, 924, 925, 926, 927, 928, 929, 930, 931, 932, 933, 934, 935, 936, 937, 938, 939, 940, 941, 942, 943, 944, 945, 946, 947, 948, 949, 950, 951, 952, 953, 954, 955, 956, 957, 958, 959, 960, 961, 962, 963, 964, 965, 966, 967, 968, 969, 970, 971, 972, 973, 974, 975, 976, 977, 978, 979, 980, 981, 982, 983, 984, 985, 986, 987, 988, 989, 990, 991, 992, 993, 994, 995, 996, 997, 998, 999, 1000, 1001, 1002, 1003, 1004, 1005, 1006, 1007, 1008, 1009, 1010, 1011, 1012, 1013, 1014, 1015, 1016, 1017, 1018, 1019, 1020, 1021, 1022, 1023, 1024, 1025, 1026, 1027, 1028, 1029, 1030, 1031, 1032, 1033, 1034, 1035, 1036, 1037, 1038, 1039, 1040, 1041, 1042, 1043, 1044, 1045, 1046, 1047, 1048, 1049, 1050, 1051, 1052, 1053, 1054, 1055, 1056, 1057, 1058, 1059, 1060, 1061, 1062, 1063, 1064, 1065, 1066, 1067, 1068, 1069, 1070, 1071, 1072, 1073, 1074, 1075, 1076, 1077, 1078, 1079, 1080, 1081, 1082, 1083, 1084, 1085, 1086, 1087, 1088, 1089, 1090, 1091, 1092, 1093, 1094, 1095, 1096, 1097, 1098, 1099, 1100, 1101, 1102, 1103, 1104, 1105, 1106, 1107, 1108, 1109, 1110, 1111, 1112, 1113, 1114, 1115, 1116, 1117, 1118, 1119, 1120, 1121, 1122, 1123, 1124, 1125, 1126, 1127, 1128, 1129, 1130, 1131, 1132, 1133, 1134, 1135, 1136, 1137, 1138, 1139, 1140, 1141, 1142, 1143, 1144, 1145, 1146, 1147, 1148, 1149, 1150, 1151, 1152, 1153, 1154, 1155, 1156, 1157, 1158, 1159, 1160, 1161, 1162, 1163, 1164, 1165, 1166, 1167, 1168, 1169, 1170, 1171, 1172, 1173, 1174, 1175, 1176, 1177, 1178, 1179, 1180, 1181, 1182, 1183, 1184, 1185, 1186, 1187, 1188, 1189, 1190, 1191, 1192, 1193, 1194, 1195, 1196, 1197, 1198, 1199, 1200, 1201, 1202, 1203, 1204, 1205, 1206, 1207, 1208, 1209, 1210, 1211, 1212, 1213, 1214, 1215, 1216, 1217, 1218, 1219, 1220, 1221, 1222, 1223, 1224, 1225, 1226, 1227, 1228, 1229, 1230, 1231, 1232, 1233, 1234, 1235, 1236, 1237, 1238, 1239, 1240, 1241, 1242, 1243, 1244, 1245, 1246, 1247, 1248, 1249, 1250, 1251, 1252, 1253, 1254, 1255, 1256, 1257, 1258, 1259, 1260, 1261, 1262, 1263, 1264, 1265, 1266, 1267, 1268, 1269, 1270, 1271, 1272, 1273, 1274, 1275, 1276, 1277, 1278, 1279, 1280, 1281, 1282, 1283, 1284, 1285, 1286, 1287, 1288, 1289, 1290, 1291, 1292, 1293, 1294, 1295, 1296, 1297, 1298, 1299, 1300, 1301, 1302, 1303, 1304, 1305, 1306, 1307, 1308, 1309, 1310, 1311, 1312, 1313, 1314, 1315, 1316, 1317, 1318, 1319, 1320, 1321, 1322, 1323, 1324, 1325, 1326, 1327, 1328, 1329, 1330, 1331, 1332, 1333, 1334, 1335, 1336, 1337, 1338, 1339, 1340, 1341, 1342, 1343, 1344, 1345, 1346, 1347, 1348, 1349, 1350, 1351, 1352, 1353, 1354, 1355, 1356, 1357, 1358, 1359, 1360, 1361, 1362, 1363, 1364, 1365, 1366, 1367, 1368, 1369, 1370, 1371, 1372, 1373, 1374, 1375, 1376, 1377, 1378, 1379, 1380, 1381, 1382, 1383, 1384, 1385, 1386, 1387, 1388, 1389, 1390, 1391, 1392, 1393, 1394, 1395, 1396, 1397, 1398, 1399, 1400, 1401, 1402, 1403, 1404, 1405, 1406, 1407, 1408, 1409, 1410, 1411, 1412, 1413, 1414, 1415, 1416, 1417, 1418, 1419, 1420, 1421, 1422, 1423, 1424, 1425, 1426, 1427, 1428, 1429, 1430, 1431, 1432, 1433, 1434, 1435, 1436, 1437, 1438, 1439, 1440, 1441, 1442, 1443, 1444, 1445, 1446, 1447, 1448, 1449, 1450, 1451, 1452, 1453, 1454, 1455, 1456, 1457, 1458, 1459, 1460, 1461, 1462, 1463, 1464, 1465, 1466, 1467, 1468, 1469, 1470, 1471, 1472, 1473, 1474, 1475, 1476, 1477, 1478, 1479, 1480, 1481, 1482, 1483, 1484, 1485, 1486, 1487, 1488, 1489, 1490, 1491, 1492, 1493, 1494, 1495, 1496, 1497, 1498, 1499, 1500, 1501, 1502, 1503, 1504, 1505, 1506, 1507, 1508, 1509, 1510, 1511, 1512, 1513, 1514, 1515, 1516, 1517, 1518, 1519, 1520, 1521, 1522, 1523, 1524, 1525, 1526, 1527, 1528, 1529, 1530, 1531, 1532, 1533, 1534, 1535, 1536, 1537, 1538, 1539, 1540, 1541, 1542, 1543, 1544, 1545, 1546, 1547, 1548, 1549, 1550, 1551, 1552, 1553, 1554, 1555, 1556, 1557, 1558, 1559, 1560, 1561, 1562, 1563, 1564, 1565, 1566, 1567, 1568, 1569, 1570, 1571, 1572, 1573, 1574, 1575, 1576, 1577, 1578, 1579, 1580, 1581, 1582, 1583, 1584, 1585, 1586, 1587, 1588, 1589, 1590, 1591, 1592, 1593, 1594, 1595, 1596, 1597, 1598, 1599, 1600, 1601, 1602, 1603, 1604, 1605, 1606, 1607, 1608, 1609, 1610, 1611, 1612, 1613, 1614, 1615, 1616, 1617, 1618, 1619, 1620, 1621, 1622, 1623, 1624, 1625, 1626, 1627, 1628, 1629, 1630, 1631, 1632, 1633, 1634, 1635, 1636, 1637, 1638, 1639, 1640, 1641, 1642, 1643, 1644, 1645, 1646, 1647, 1648, 1649, 1650, 1651, 1652, 1653, 1654, 1655, 1656, 1657, 1658, 1659, 1660, 1661, 1662, 1663, 1664, 1665, 1666, 1667, 1668, 1669, 1670, 1671, 1672, 1673, 1674, 1675, 1676, 1677, 1678, 1679, 1680, 1681, 1682, 1683, 1684, 1685, 1686, 1687, 1688, 1689, 1690, 1691, 1692, 1693, 1694, 1695, 1696, 1697, 1698, 1699, 1700, 1701, 1702, 1703, 1704, 1705, 1706, 1707, 1708, 1709, 1710, 1711, 1712, 1713, 1714, 1715, 1716, 1717, 1718, 1719, 1720, 1721, 1722, 1723, 1724, 1725, 1726, 1727, 1728, 1729, 1730, 1731, 1732, 1733, 1734, 1735, 1736, 1737, 1738, 1739, 1740, 1741, 1742, 1743, 1744, 1745, 1746, 1747, 1748, 1749, 1750, 1751, 1752, 1753, 1754, 1755, 1756, 1757, 1758, 1759, 1760, 1761, 1762, 1763, 1764, 1765, 1766, 1767, 1768, 1769, 1770, 1771, 1772, 1773, 1774, 1775, 1776, 1777, 1778, 1779, 1780, 1781, 1782, 1783, 1784, 1785, 1786, 1787, 1788, 1789, 1790, 1791, 1792, 1793, 1794, 1795, 1796, 1797, 1798, 1799, 1800, 1801, 1802, 1803, 1804, 1805, 1806, 1807, 1808, 1809, 1810, 1811, 1812, 1813, 1814, 1815, 1816, 1817, 1818, 1819, 1820, 1821, 1822, 1823, 1824, 1825, 1826, 1827, 1828, 1829, 1830, 1831, 1832, 1833, 1834, 1835, 1836, 1837, 1838, 1839, 1840, 1841, 1842, 1843, 1844, 1845, 1846, 1847, 1848, 1849, 1850, 1851, 1852, 1853, 1854, 1855, 1856, 1857, 1858, 1859, 1860, 1861, 1862, 1863, 1864, 1865, 1866, 1867, 1868, 1869, 1870, 1871, 1872, 1873, 1874, 1875, 1876, 1877, 1878, 1879, 1880, 1881, 1882, 1883, 1884, 1885, 1886, 1887, 1888, 1889, 1890, 1891, 1892, 1893, 1894, 1895, 1896, 1897, 1898, 1899, 1900, 1901, 1902, 1903, 1904, 1905, 1906, 1907, 1908, 1909, 1910, 1911, 1912, 1913, 1914, 1915, 1916, 1917, 1918, 1919, 1920, 1921, 1922, 1923, 1924, 1925, 1926, 1927, 1928, 1929, 1930, 1931, 1932, 1933, 1934, 1935, 1936, 1937, 1938, 1939, 1940, 1941, 1942, 1943, 1944, 1945, 1946, 1947, 1948, 1949, 1950, 1951, 1952, 1953, 1954, 1955, 1956, 1957, 1958, 1959, 1960, 1961, 1962, 1963, 1964, 1965, 1966, 1967, 1968, 1969, 1970, 1971, 1972, 1973, 1974, 1975, 1976, 1977, 1978, 1979, 1980, 1981, 1982, 1983, 1984, 1985, 1986, 1987, 1988, 1989, 1990, 1991, 1992, 1993, 1994, 1995, 1996, 1997, 1998, 1999, 2000, 2001, 2002, 2003, 2004, 2005, 2006, 2007, 2008, 2009, 2010, 2011, 2012, 2013, 2014, 2015, 2016, 2017, 2018, 2019, 2020, 2021, 2022, 2023, 2024, 2025, 2026, 2027, 2028, 2029, 2030, 2031, 2032, 2033, 2034, 2035, 2036, 2037, 2038, 2039, 2040, 2041, 2042, 2043, 2044, 2045, 2046, 2047, 2048, 2049, 2050, 2051, 2052, 2053, 2054, 2055, 2056, 2057, 2058, 2059, 2060, 2061, 2062, 2063, 2064, 2065, 2066, 2067, 2068, 2069, 2070, 2071, 2072, 2073, 2074, 2075, 2076, 2077, 2078, 2079, 2080, 2081, 2082, 2083, 2084, 2085, 2086, 2087, 2088, 2089, 2090, 2091, 2092, 2093, 2094, 2095, 2096, 2097, 2098, 2099, 2100, 2101, 2102, 2103, 2104, 2105, 2106, 2107, 2108, 2109, 2110, 2111, 2112, 2113, 2114, 2115, 2116, 2117, 2118, 2119, 2120, 2121, 2122, 2123, 2124, 2125, 2126, 2127, 2128, 2129, 2130, 2131, 2132, 2133, 2134, 2135, 2136, 2137, 2138, 2139, 2140, 2141, 2142, 2143, 2144, 2145, 2146, 2147, 2148, 2149, 2150, 2151, 2152, 2153, 2154, 2155, 2156, 2157, 2158, 2159, 2160, 2161, 2162, 2163, 2164, 2165, 2166, 2167, 2168, 2169, 2170, 2171, 2172, 2173, 2174, 2175, 2176, 2177, 2178, 2179, 2180, 2181, 2182, 2183, 2184, 2185, 2186, 2187, 2188, 2189, 2190, 2191, 2192, 2193, 2194, 2195, 2196, 2197, 2198, 2199, 2200, 2201, 2202, 2203, 2204, 2205, 2206, 2207, 2208, 2209, 2210, 2211, 2212, 2213, 2214, 2215, 2216, 2217, 2218, 2219, 2220, 2221, 2222, 2223, 2224, 2225, 2226, 2227, 2228, 2229, 2230, 2231, 2232, 2233, 2234, 2235, 2236, 2237, 2238, 2239, 2240, 2241, 2242, 2243, 2244, 2245, 2246, 2247, 2248, 2249, 2250, 2251, 2252, 2253, 2254, 2255, 2256, 2257, 2258, 2259, 2260, 2261, 2262, 2263, 2264, 2265, 2266, 2267, 2268, 2269, 2270, 2271, 2272, 2273, 2274, 2275, 2276, 2277, 2278, 2279, 2280, 2281, 2282, 2283, 2284, 2285, 2286, 2287, 2288, 2289, 2290, 2291, 2292, 2293, 2294, 2295, 2296, 2297, 2298, 2299, 2300, 2301, 2302, 2303, 2304, 2305, 2306, 2307, 2308, 2309, 2310, 2311, 2312, 2313, 2314, 2315, 2316, 2317, 2318, 2319, 2320, 2321, 2322, 2323, 2324, 2325, 2326, 2327, 2328, 2329, 2330, 2331, 2332, 2333, 2334, 2335, 2336, 2337, 2338, 2339, 2340, 2341, 2342, 2343, 2344, 2345, 2346, 2347, 2348, 2349, 2350, 2351, 2352, 2353, 2354, 2355, 2356, 2357, 2358, 2359, 2360, 2361, 2362, 2363, 2364, 2365, 2366, 2367, 2368, 2369, 2370, 2371, 2372, 2373, 2374, 2375, 2376, 2377, 2378, 2379, 2380, 2381, 2382, 2383, 2384, 2385, 2386, 2387, 2388, 2389, 2390, 2391, 2392, 2393, 2394, 2395, 2396, 2397, 2398, 2399, 2400, 2401, 2402, 2403, 2404, 2405, 2406, 2407, 2408, 2409, 2410, 2411, 2412, 2413, 2414, 2415, 2416, 2417, 2418, 2419, 2420, 2421, 2422, 2423, 2424, 2425, 2426, 2427, 2428, 2429, 2430, 2431, 2432, 2433, 2434, 2435, 2436, 2437, 2438, 2439, 2440, 2441, 2442, 2443, 2444, 2445, 2446, 2447, 2448, 2449, 2450, 2451, 2452, 2453, 2454, 2455, 2456, 2457, 2458, 2459, 2460, 2461, 2462, 2463, 2464, 2465, 2466, 2467, 2468, 2469, 2470, 2471, 2472, 2473, 2474, 2475, 2476, 2477, 2478, 2479, 2480, 2481, 2482, 2483, 2484, 2485, 2486, 2487, 2488, 2489, 2490, 2491, 2492, 2493, 2494, 2495, 2496, 2497, 2498, 2499, 2500, 2501, 2502, 2503, 2504, 2505, 2506, 2507, 2508, 2509, 2510, 2511, 2512, 2513, 2514, 2515, 2516, 2517, 2518, 2519, 2520, 2521, 2522, 2523, 2524, 2525, 2526, 2527, 2528, 2529, 2530, 2531, 2532, 2533, 2534, 2535, 2536, 2537, 2538, 2539, 2540, 2541, 2542, 2543, 2544, 2545, 2546, 2547, 2548, 2549, 2550, 2551, 2552, 2553, 2554, 2555, 2556, 2557, 2558, 2559, 2560, 2561, 2562, 2563, 2564, 2565, 2566, 2567, 2568, 2569, 2570, 2571, 2572, 2573, 2574, 2575, 2576, 2577, 2578, 2579, 2580, 2581, 2582, 2583, 2584, 2585, 2586, 2587, 2588, 2589, 2590, 2591, 2592, 2593, 2594, 2595, 2596, 2597, 2598, 2599, 2600, 2601, 2602, 2603, 2604, 2605, 2606, 2607, 2608, 2609, 2610, 2611, 2612, 2613, 2614, 2615, 2616, 2617, 2618, 2619, 2620, 2621, 2622, 2623, 2624, 2625, 2626, 2627, 2628, 2629, 2630, 2631, 2632, 2633, 2634, 2635, 2636, 2637, 2638, 2639, 2640, 2641, 2642, 2643, 2644, 2645, 2646, 2647, 2648, 2649, 2650, 2651, 2652, 2653, 2654, 2655, 2656, 2657, 2658, 2659, 2660, 2661, 2662, 2663, 2664, 2665, 2666, 2667, 2668, 2669, 2670, 2671, 2672, 2673, 2674, 2675, 2676, 2677, 2678, 2679, 2680, 2681, 2682, 2683, 2684, 2685, 2686, 2687, 2688, 2689, 2690, 2691, 2692, 2693, 2694, 2695, 2696, 2697, 2698, 2699, 2700, 2701, 2702, 2703, 2704, 2705, 2706, 2707, 2708, 2709, 2710, 2711, 2712, 2713, 2714, 2715, 2716, 2717, 2718, 2719, 2720, 2721, 2722, 2723, 2724, 2725, 2726, 2727, 2728, 2729, 2730, 2731, 2732, 2733, 2734, 2735, 2736, 2737, 2738, 2739, 2740, 2741, 2742, 2743, 2744, 2745, 2746, 2747, 2748, 2749, 2750, 2751, 2752, 2753, 2754, 2755, 2756, 2757, 2758, 2759, 2760, 2761, 2762, 2763, 2764, 2765, 2766, 2767, 2768, 2769, 2770, 2771, 2772, 2773, 2774, 2775, 2776, 2777, 2778, 2779, 2780, 2781, 2782, 2783, 2784, 2785, 2786, 2787, 2788, 2789, 2790, 2791, 2792, 2793, 2794, 2795, 2796, 2797, 2798, 2799, 2800, 2801, 2802, 2803, 2804, 2805, 2806, 2807, 2808, 2809, 2810, 2811, 2812, 2813, 2814, 2815, 2816, 2817, 2818, 2819, 2820, 2821, 2822, 2823, 2824, 2825, 2826, 2827, 2828, 2829, 2830, 2831, 2832, 2833, 2834, 2835, 2836, 2837, 2838, 2839, 2840, 2841, 2842, 2843, 2844, 2845, 2846, 2847, 2848, 2849, 2850, 2851, 2852, 2853, 2854, 2855, 2856, 2857, 2858, 2859, 2860, 2861, 2862, 2863, 2864, 2865, 2866, 2867, 2868, 2869, 2870, 2871, 2872, 2873, 2874, 2875, 2876, 2877, 2878, 2879, 2880, 2881, 2882, 2883, 2884, 2885, 2886, 2887, 2888, 2889, 2890, 2891, 2892, 2893, 2894, 2895, 2896, 2897, 2898, 2899, 2900, 2901, 2902, 2903, 2904, 2905, 2906, 2907, 2908, 2909, 2910, 2911, 2912, 2913, 2914, 2915, 2916, 2917, 2918, 2919, 2920, 2921, 2922, 2923, 2924, 2925, 2926, 2927, 2928, 2929, 2930, 2931, 2932, 2933, 2934, 2935, 2936, 2937, 2938, 2939, 2940, 2941, 2942, 2943, 2944, 2945, 2946, 2947, 2948, 2949, 2950, 2951, 2952, 2953, 2954, 2955, 2956, 2957, 2958, 2959, 2960, 2961, 2962, 2963, 2964, 2965, 2966, 2967, 2968, 2969, 2970, 2971, 2972, 2973, 2974, 2975, 2976, 2977, 2978, 2979, 2980, 2981, 2982, 2983, 2984, 2985, 2986, 2987, 2988, 2989, 2990, 2991, 2992, 2993, 2994, 2995, 2996, 2997, 2998, 2999, 3000, 3001, 3002, 3003, 3004, 3005, 3006, 3007, 3008, 3009, 3010, 3011, 3012, 3013, 3014, 3015, 3016, 3017, 3018, 3019, 3020, 3021, 3022, 3023, 3024, 3025, 3026, 3027, 3028, 3029, 3030, 3031, 3032, 3033, 3034, 3035, 3036, 3037, 3038, 3039, 3040, 3041, 3042, 3043, 3044, 3045, 3046, 3047, 3048, 3049, 3050, 3051, 3052, 3053, 3054, 3055, 3056, 3057, 3058, 3059, 3060, 3061, 3062, 3063, 3064, 3065, 3066, 3067, 3068, 3069, 3070, 3071, 3072, 3073, 3074, 3075, 3076, 3077, 3078, 3079, 3080, 3081, 3082, 3083, 3084, 3085, 3086, 3087, 3088, 3089, 3090, 3091, 3092, 3093, 3094, 3095, 3096, 3097, 3098, 3099, 3100, 3101, 3102, 3103, 3104, 3105, 3106, 3107, 3108, 3109, 3110, 3111, 3112, 3113, 3114, 3115, 3116, 3117, 3118, 3119, 3120, 3121, 3122, 3123, 3124, 3125, 3126, 3127, 3128, 3129, 3130, 3131, 3132, 3133, 3134, 3135, 3136, 3137, 3138, 3139, 3140, 3141, 3142, 3143, 3144, 3145, 3146, 3147, 3148, 3149, 3150, 3151, 3152, 3153, 3154, 3155, 3156, 3157, 3158, 3159, 3160, 3161, 3162, 3163, 3164, 3165, 3166, 3167, 3168, 3169, 3170, 3171, 3172, 3173, 3174, 3175, 3176, 3177, 3178, 3179, 3180, 3181, 3182, 3183, 3184, 3185, 3186, 3187, 3188, 3189, 3190, 3191, 3192, 3193, 3194, 3195, 3196, 3197, 3198, 3199, 3200, 3201, 3202, 3203, 3204, 3205, 3206, 3207, 3208, 3209, 3210, 3211, 3212, 3213, 3214, 3215, 3216, 3217, 3218, 3219, 3220, 3221, 3222, 3223, 3224, 3225, 3226, 3227, 3228, 3229, 3230, 3231, 3232, 3233, 3234, 3235, 3236, 3237, 3238, 3239, 3240, 3241, 3242, 3243, 3244, 3245, 3246, 3247, 3248, 3249, and 3250 nucleotides. The length of any filler region for the viral genome may be 50-100, 100-150, 150-200, 200-250, 250-300, 300-350, 350-400, 400-450, 450-500, 500-550, 550-600, 600-650, 650-700, 700-750, 750-800, 800.850, 850-900, 900-950, 950-1000, 1000-1050, 1050-1100, 1100-1150, 1150-1200, 1200.1250, 1250-1300,1300-1350, 1350-1400, 1400-1450, 1450-1500,1500-1550, 1550-1600, 1600-1650,1650-1700, 1700-1750, 1750-1800, 1800-1850, 1850-1900, 1900-1950, 1950-2000, 2000-2050, 2050-2100, 2100.2150, 2150.2200, 2200.2250, 2250-2300, 2300-2350, 2350.2400, 2400.2450, 2450.2500, 2500-2550, 2550-2600, 2600-2650, 2650-2700, 2700-2750, 2750-2800, 2800-2850, 2850-2900, 2900-2950, 2950-3000, 3000-3050, 3050-3100, 3100-3150, 3150-3200, and 3200-3250 nucleotides. As a non-limiting example, the viral genome comprises a filler region that is about 1153 nucleotides in length. As a non-limiting example, the viral genome comprises a filler region that is about 1240 nucleotides in length.

[1269] In some embodiments, the AAV particle viral genome comprises at least one filler sequence region. Non-limiting examples of filler sequence regions are described in Table 24.

TABLE 24
Filler Sequence Regions

| Sequence | Sequence | SEQ ID |
|---|---|---|
| Region Name | Length | NO |
| FILLER1 | 1153 | 13579 |
| FILLER2 | 1240 | 13580 |

[1270] In some embodiments, the AAV particle viral genome comprises filler sequence region FILLER1. In some embodiments, the AAV particle viral genome comprises filler sequence region FILLER2. In some embodiments, the AAV particle viral genome comprises both FILLER1 and FILLER2. In some embodiments, the AAV particle viral genome does not comprise a filler sequence region.

### Regions of Viral Genome Cassettes

[1271] In some embodiments, the viral genome comprises at least one sequence region described in Tables 17-24.

### Viral Genome Cassette Sequence Regions: 5′ITR, 3′ITR, Promoter, PolyA

[1272] In some embodiments, the viral genome comprises a 5′ITR and 3′ITR sequence region, at least one promoter sequence region, a polyA sequence region and at least one payload region. The 5′ITR and 3′ITR sequence region may be selected from Table 17, at least one of the promoter sequence regions may be selected from Table 18, and the polyA sequence region may be selected from Table 23. The ITR sequence regions may be located on the 5 and 3′ termini of the construct, the promoter is located upstream of the payload region and the polyA sequence region may be located upstream of the 3′ITR sequence region.

[1273] In some embodiments, the viral genome comprises a 5′ITR and 3′ITR sequence region, at least one promoter sequence region, a polyA sequence region, a filler sequence region and at least one payload region. The 5′ITR and 3′ITR sequence region may be selected from Table 17, at least one of the promoter sequence regions may be selected from Table 18, the polyA sequence region may be selected from Table 23, and the filler sequence region may be selected from Table 24. The ITR sequence regions may be located on the 5′ and 3′ termini of the construct, the promoter is located upstream of the payload region, the polyA sequence region may be located upstream of the 3′ITR sequence region, and the filler sequence region may be located between the polyA sequence region and the 3′ITR sequence region.

[1274] As a non-limiting example, the 5′ITR is ITR1 (SEQ ID NO: 13519), the 3′ITR is ITR3 (SEQ ID NO: 13521), the promoter is PROMOTER 1 (SEQ ID NO: 13523), and the polyA sequence is POLYA1 (SEQ ID NO: 13576). As a non-limiting example, the 5′ITR is ITR1 (SEQ ID NO: 13519), the 3′ITR is ITR3 (SEQ ID NO: 13521), the promoter is PROMOTER 1 (SEQ ID NO: 13523), and the polyA sequence is POLYA2 (SEQ ID NO: 13577). As a non-limiting example, the 5′ITR is ITR1 (SEQ ID NO: 13519), the 3′ITR is ITR3 (SEQ ID NO: 13521), the promoter is PROMOTER 1 (SEQ ID NO: 13523), and the polyA sequence is POLYA3 (SEQ ID NO: 13578). As a non-limiting example, the 5′ITR is ITR1 (SEQ ID NO: 13519), the 3′ITR is ITR3 (SEQ ID NO: 13521), the promoter is PROMOTER 2 (SEQ ID NO: 13524), and the polyA sequence is POLYA1 (SEQ ID NO: 13576). As a non-limiting example, the 5′ITR is ITR1 (SEQ ID NO: 13519), the 3′ITR is ITR3 (SEQ ID NO: 13521), the promoter is PROMOTER 2 (SEQ ID NO: 13524), and the polyA sequence is POLYA2 (SEQ ID NO: 13577). As a non-limiting example, the 5′ITR is ITR1 (SEQ ID NO: 13519), the 3′ITR is ITR3 (SEQ ID NO: 13521), the promoter is PROMOTER 2 (SEQ ID NO: 13524), and the polyA sequence is POLYA3 (SEQ ID NO: 13578). As a non-limiting example, the 5′ITR is ITR1 (SEQ ID NO: 13519), the 3′ITR is ITR3 (SEQ ID NO: 13521), the promoter is PROMOTER 3 (SEQ ID NO: 13525), and the polyA sequence is POLYA1 (SEQ ID NO: 13576). As a non-limiting example, the 5′ITR is ITR1 (SEQ ID NO: 13519), the 3′ITR is ITR3 (SEQ ID NO: 13521), the promoter is PROMOTER 3 (SEQ ID NO: 13525), and the polyA sequence is POLYA2 (SEQ ID NO: 13577). As a non-limiting example, the 5′ITR is ITR1 (SEQ ID NO: 13519), the 3′ITR is ITR3 (SEQ ID NO: 13521), the promoter is PROMOTER 3 (SEQ ID NO: 13525), and the polyA sequence is POLYA3 (SEQ ID NO: 13578). As a non-limiting example, the 5′ITR is ITR1 (SEQ ID NO: 13519), the 3′ITR is ITR3 (SEQ ID NO: 13521), the promoter is PROMOTER 4 (SEQ ID NO: 13526), and the polyA sequence is POLYA1 (SEQ ID NO: 13576). As a non-limiting example, the 5′ITR is ITR1 (SEQ ID NO: 13519), the 3′ITR is ITR3 (SEQ ID NO: 13521), the promoter is PROMOTER 4 (SEQ ID NO: 13526), and the polyA sequence is POLYA2 (SEQ ID NO: 13577). As a non-limiting example, the 5′ITR is ITR1 (SEQ ID NO: 13519), the 3′ITR is ITR3 (SEQ ID NO: 13521), the promoter is PROMOTER 4 (SEQ ID NO: 13526), and the polyA sequence is POLYA3 (SEQ ID NO: 13578). As a non-limiting example, the 5′ITR is ITR1 (SEQ ID NO: 13519), the 3′ITR is ITR3 (SEQ ID NO: 13521), the promoter is PROMOTER 5 (SEQ ID NO: 13527), and the polyA sequence is POLYA1 (SEQ ID NO: 13576). As a non-limiting example, the 5′ITR is ITR1 (SEQ ID NO: 13519), the 3′ITR is ITR3 (SEQ ID NO: 13521), the promoter is PROMOTER 5 (SEQ ID NO: 13527), and the polyA sequence is POLYA2 (SEQ ID NO: 13577). As a non-limiting example, the 5′ITR is ITR1 (SEQ ID NO: 13519), the 3′ITR is ITR3 (SEQ ID NO: 13521), the promoter is PROMOTER 5 (SEQ ID NO: 13527), and the polyA sequence is POLYA3 (SEQ ID NO: 13578). As a non-limiting example, the 5′ITR is ITR1 (SEQ ID NO: 13519), the 3′ITR is ITR3 (SEQ ID NO: 13521), the promoter is PROMOTER 6 (SEQ ID NO: 13528), and the polyA sequence is POLYA1 (SEQ ID NO: 13576). As a non-limiting example, the 5′ITR is ITR1 (SEQ ID NO: 13519), the 3′ITR is ITR3 (SEQ ID NO: 13521), the promoter is PROMOTER 6 (SEQ ID NO: 13528), and the polyA sequence is POLYA2 (SEQ ID NO: 13577). As a non-limiting example, the 5′ITR is ITR1 (SEQ ID NO: 13519), the 3′ITR is ITR3 (SEQ ID NO: 13521), the promoter is PROMOTER 6 (SEQ ID NO: 13528), and the polyA sequence is POLYA3 (SEQ ID NO: 13578). As a non-limiting example, the 5′ITR is ITR1 (SEQ ID NO: 13519), the 3′ITR is ITR3 (SEQ ID NO: 13521), the promoter is PROMOTER 7 (SEQ ID NO: 13529), and the polyA sequence is POLYA1 (SEQ ID NO: 13576). As a non-limiting example, the 5′ITR is ITR1 (SEQ ID NO: 13519), the 3′ITR is ITR3 (SEQ ID NO: 13521), the promoter is PROMOTER 7 (SEQ ID NO: 13529), and the polyA sequence is POLYA2 (SEQ ID NO: 13577). As a non-limiting example, the 5′ITR is ITR1 (SEQ ID NO: 13519), the 3′ITR is ITR3 (SEQ ID NO: 13521), the promoter is PROMOTER 7 (SEQ ID NO: 13529), and the polyA sequence is POLYA3 (SEQ ID NO: 13578). As a non-limiting example, the 5′ITR is ITR1 (SEQ ID NO: 13519), the 3′ITR is ITR3 (SEQ ID NO: 13521), the promoter is PROMOTER 8 (SEQ ID NO: 13530), and the polyA sequence is POLYA1 (SEQ ID NO: 13576). As a non-limiting example, the 5′ITR is ITR1 (SEQ ID NO: 13519), the 3′ITR is ITR3 (SEQ ID NO: 13521), the promoter is PROMOTER 8 (SEQ ID NO: 13530), and the polyA sequence is POLYA2 (SEQ ID NO: 13577). As a non-limiting example, the 5′ITR is ITR1 (SEQ ID NO: 13519), the 3′ITR is ITR3 (SEQ ID NO: 13521), the promoter is PROMOTER 8 (SEQ ID NO: 13530), and the polyA sequence is POLYA3 (SEQ ID NO: 13578). As a non-limiting example, the 5′ITR is ITR1 (SEQ ID NO: 13519), the 3′ITR is ITR3 (SEQ ID NO: 13521), the promoter is PROMOTER 9 (SEQ ID NO: 13531), and the polyA sequence is POLYA1 (SEQ ID NO: 13576). As a non-limiting example, the 5′ITR is ITR1 (SEQ ID NO: 13519), the 3′ITR is ITR3 (SEQ ID NO: 13521), the promoter is PROMOTER 9 (SEQ ID NO: 13531), and the polyA sequence is POLYA2 (SEQ ID NO: 13577). As a non-limiting example, the 5′ITR is ITR1 (SEQ ID NO: 13519), the 3′ITR is ITR3 (SEQ ID NO: 13521), the promoter is PROMOTER 9 (SEQ ID NO: 13531), and the polyA sequence is POLYA3 (SEQ ID NO: 13578). As a non-limiting example, the 5′ITR is ITR1 (SEQ ID NO: 13519), the 3′ITR is ITR3 (SEQ ID NO: 13521), the promoter is PROMOTER 10 (SEQ ID NO: 13532), and the polyA sequence is POLYA1 (SEQ ID NO: 13576). As a non-limiting example, the 5′ITR is ITR1 (SEQ ID NO: 13519), the 3′ITR is ITR3 (SEQ ID NO: 13521), the promoter is PROMOTER 10 (SEQ ID NO: 13532), and the polyA sequence is POLYA2 (SEQ ID NO: 13577). As a non-limiting example, the 5′ITR is ITR1 (SEQ ID NO: 13519), the 3′ITR is ITR3 (SEQ ID NO: 13521), the promoter is PROMOTER 10 (SEQ ID NO: 13532), and the polyA sequence is POLYA3 (SEQ ID NO: 13578). As a non-limiting example, the 5′ITR is ITR1 (SEQ ID NO: 13519), the 3′ITR is ITR3 (SEQ ID NO: 13521), the promoter is PROMOTER 11 (SEQ ID NO: 13533), and the polyA sequence is POLYA1 (SEQ ID NO: 13576). As a non-limiting example, the 5′ITR is ITR1 (SEQ ID NO: 13519), the 3′ITR is ITR3 (SEQ ID NO: 13521), the promoter is PROMOTER 11 (SEQ ID NO: 13533), and the polyA sequence is POLYA2 (SEQ ID NO: 13577). As a non-limiting example, the 5′ITR is ITR1 (SEQ ID NO: 13519), the 3′ITR is ITR3 (SEQ ID NO: 13521), the promoter is PROMOTER 11 (SEQ ID NO: 13533), and the polyA sequence is POLYA3 (SEQ ID NO: 13578). As a non-limiting example, the 5′ITR is ITR1 (SEQ ID NO: 13519), the 3′ITR is ITR3 (SEQ ID NO: 13521), the promoter is PROMOTER 12 (SEQ ID NO: 13534), and the polyA sequence is POLYA1 (SEQ ID NO: 13576). As a non-limiting example, the 5′ITR is ITR1 (SEQ ID NO: 13519), the 3′ITR is ITR3 (SEQ ID NO: 13521), the promoter is PROMOTER 12 (SEQ ID NO: 13534), and the polyA sequence is POLYA2 (SEQ ID NO: 13577). As a non-limiting example, the 5′ITR is ITR1 (SEQ ID NO: 13519), the 3′ITR is ITR3 (SEQ ID NO: 13521), the promoter is PROMOTER 12 (SEQ ID NO: 13534), and the polyA sequence is POLYA3 (SEQ ID NO: 13578). As a non-limiting example, the 5′ITR is ITR1 (SEQ ID NO: 13519), the 3′ITR is ITR3 (SEQ ID NO: 13521), the promoter is PROMOTER 1 (SEQ ID NO: 13523) which comprises PROMOTER 2 (SEQ ID NO: 13524) and PROMOTER 3 (SEQ ID NO: 13525), and the polyA sequence is POLYA1 (SEQ ID NO: 13576). As a non-limiting example, the 5′ITR is ITR1 (SEQ ID NO: 13519), the 3′ITR is ITR3 (SEQ ID NO: 13521), the promoter is PROMOTER 1 (SEQ ID NO: 13523) which comprises PROMOTER 2 (SEQ ID NO: 13524) and PROMOTER 3 (SEQ ID NO: 13525), and the polyA sequence is POLYA2 (SEQ ID NO: 13577). As a non-limiting example, the 5′ITR is ITR1 (SEQ ID NO: 13519), the 3′ITR is ITR3 (SEQ ID NO: 13521), the promoter is PROMOTER 1 (SEQ ID NO: 13523) which comprises PROMOTER 2 (SEQ ID NO: 13524) and PROMOTER 3 (SEQ ID NO: 13525), and the polyA sequence is POLYA3 (SEQ ID NO: 13578). As a non-limiting example, the 5′ITR is ITR1 (SEQ ID NO: 13519), the 3′ITR is ITR3 (SEQ ID NO: 13521), the promoter is PROMOTER 4 (SEQ ID NO: 13526) and PROMOTER 8 (SEQ ID NO: 13530), and the polyA sequence is POLYA1 (SEQ ID NO: 13576). As a non-limiting example, the 5′ITR is ITR1 (SEQ ID NO: 13519), the 3′ITR is ITR3 (SEQ ID NO: 13521), the promoter is PROMOTER 4 (SEQ ID NO: 13526) and PROMOTER 8 (SEQ ID NO: 13530), and the polyA sequence is POLYA2 (SEQ ID NO: 13577). As a non-limiting example, the 5′ITR is ITR1 (SEQ ID NO: 13519), the 3′ITR is ITR3 (SEQ ID NO: 13521), the promoter is PROMOTER 4 (SEQ ID NO: 13526) and PROMOTER 8 (SEQ ID NO: 13530), and the polyA sequence is POLYA3 (SEQ ID NO: 13578). As a non-limiting example, the 5′ITR is ITR1 (SEQ ID NO: 13519), the 3′ITR is ITR3 (SEQ ID NO: 13521), the promoter is PROMOTER 4 (SEQ ID NO: 13526) and PROMOTER 12 (SEQ ID NO: 13534), and the polyA sequence is POLYA1 (SEQ ID NO: 13576). As a non-limiting example, the 5′ITR is ITR1 (SEQ ID NO: 13519), the 3′ITR is ITR3 (SEQ ID NO: 13521), the promoter is PROMOTER 4 (SEQ ID NO: 13526) and PROMOTER 12 (SEQ ID NO: 13534), and the polyA sequence is POLYA2 (SEQ ID NO: 13577). As a non-limiting example, the 5′ITR is ITR1 (SEQ ID NO: 13519), the 3′ITR is ITR3 (SEQ ID NO: 13521), the promoter is PROMOTER 4 (SEQ ID NO: 13526) and PROMOTER 12 (SEQ ID NO: 13534), and the polyA sequence is POLYA3 (SEQ ID NO: 13578).

[1275] As a non-limiting example, the 5′ITR is ITR1 (SEQ ID NO: 13519), the 3′ITR is ITR4 (SEQ ID NO: 13522), the promoter is PROMOTER 1 (SEQ ID NO: 13523), and the polyA sequence is POLYA1 (SEQ ID NO: 13576). As a non-limiting example, the 5′ITR is ITR1 (SEQ ID NO: 13519), the 3′ITR1s ITR4 (SEQ ID NO: 13522), the promoter is PROMOTER 1 (SEQ ID NO: 13523), and the polyA sequence is POLYA2 (SEQ ID NO: 13577). As a non-limiting example, the 5′ITR is ITR1 (SEQ ID NO: 13519), the 3′ITR is ITR4 (SEQ ID NO: 13522), the promoter is PROMOTER 1 (SEQ ID NO: 13523), and the polyA sequence is POLYA3 (SEQ ID NO: 13578). As a non-limiting example, the 5′ITR is ITR1 (SEQ ID NO: 13519), the 3′ITR is ITR4 (SEQ ID NO: 13522), the promoter is PROMOTER 2 (SEQ ID NO: 13524), and the polyA sequence is POLYA1 (SEQ ID NO: 13576). As a non-limiting example, the 5′ITR is ITR1 (SEQ ID NO: 13519), the 3′ITR is ITR4 (SEQ ID NO: 13522), the promoter is PROMOTER 2 (SEQ ID NO: 13524), and the polyA sequence is POLYA2 (SEQ ID NO: 13577). As a non-limiting example, the 5′ITR is ITR1 (SEQ ID NO: 13519), the 3′ITR is ITR4 (SEQ ID NO: 13522), the promoter is PROMOTER 2 (SEQ ID NO: 13524), and the polyA sequence is POLYA3 (SEQ ID NO: 13578). As a non-limiting example, the 5′ITR is ITR1 (SEQ ID NO: 13519), the 3′ITR is ITR4 (SEQ ID NO: 13522), the promoter is PROMOTER 3 (SEQ ID NO: 13525), and the polyA sequence is POLYA1 (SEQ ID NO: 13576). As a non-limiting example, the 5′ITR is ITR1 (SEQ ID NO: 13519), the 3′ITR is ITR4 (SEQ ID NO: 13522), the promoter is PROMOTER 3 (SEQ ID NO: 13525), and the polyA sequence is POLYA2 (SEQ ID NO: 13577). As a non-limiting example, the 5′ITR is ITR1 (SEQ ID NO: 13519), the 3′ITR is ITR4 (SEQ ID NO: 13522), the promoter is PROMOTER 3 (SEQ ID NO: 13525), and the polyA sequence is POLYA3 (SEQ ID NO: 13578). As a non-limiting example, the 5′ITR is ITR1 (SEQ ID NO: 13519), the 3′ITR is ITR4 (SEQ ID NO: 13522), the promoter is PROMOTER 4 (SEQ ID NO: 13526), and the polyA sequence is POLYA1 (SEQ ID NO: 13576). As a non-limiting example, the 5′ITR is ITR1 (SEQ ID NO: 13519), the 3′ITR is ITR4 (SEQ ID NO: 13522), the promoter is PROMOTER 4 (SEQ ID NO: 13526), and the polyA sequence is POLYA2 (SEQ ID NO: 13577). As a non-limiting example, the 5′ITR is ITR1 (SEQ ID NO: 13519), the 3′ITR is ITR4 (SEQ ID NO: 13522), the promoter is PROMOTER 4 (SEQ ID NO: 13526), and the polyA sequence is POLYA3 (SEQ ID NO: 13578). As a non-limiting example, the 5′ITR is ITR1 (SEQ ID NO: 13519), the 3′ITR is ITR4 (SEQ ID NO: 13522), the promoter is PROMOTER 5 (SEQ ID NO: 13527), and the polyA sequence is POLYA1 (SEQ ID NO: 13576). As a non-limiting example, the 5′ITR is ITR1 (SEQ ID NO: 13519), the 3′ITR is ITR4 (SEQ ID NO: 13522), the promoter is PROMOTER 5 (SEQ ID NO: 13527), and the polyA sequence is POLYA2 (SEQ ID NO: 13577). As a non-limiting example, the 5′ITR is ITR1 (SEQ ID NO: 13519), the 3′ITR is ITR4 (SEQ ID NO: 13522), the promoter is PROMOTER 5 (SEQ ID NO: 13527), and the polyA sequence is POLYA3 (SEQ ID NO: 13578). As a non-limiting example, the 5′ITR is ITR1 (SEQ ID NO: 13519), the 3′ITR is ITR4 (SEQ ID NO: 13522), the promoter is PROMOTER 6 (SEQ ID NO: 13528), and the polyA sequence is POLYA1 (SEQ ID NO: 13576). As a non-limiting example, the 5′ITR is ITR1 (SEQ ID NO: 13519), the 3′ITR is ITR4 (SEQ ID NO: 13522), the promoter is PROMOTER 6 (SEQ ID NO: 13528), and the polyA sequence is POLYA2 (SEQ ID NO: 13577). As a non-limiting example, the 5′ITR is ITR1 (SEQ ID NO: 13519), the 3′ITR is ITR4 (SEQ ID NO: 13522), the promoter is PROMOTER 6 (SEQ ID NO: 13528), and the polyA sequence is POLYA3 (SEQ ID NO: 13578). As a non-limiting example, the 5′ITR is ITR1 (SEQ ID NO: 13519), the 3′ITR is ITR4 (SEQ ID NO: 13522), the promoter is PROMOTER 7 (SEQ ID NO: 13529), and the polyA sequence is POLYA1 (SEQ ID NO: 13576). As a non-limiting example, the 5′ITR is ITR1 (SEQ ID NO: 13519), the 3′ITR is ITR4 (SEQ ID NO: 13522), the promoter is PROMOTER 7 (SEQ ID NO: 13529), and the polyA sequence is POLYA2 (SEQ ID NO: 13577). As a non-limiting example, the 5′ITR is ITR1 (SEQ ID NO: 13519), the 3′ITR is ITR4 (SEQ ID NO: 13522), the promoter is PROMOTER 7 (SEQ ID NO: 13529), and the polyA sequence is POLYA3 (SEQ ID NO: 13578). As a non-limiting example, the 5′ITR is ITR1 (SEQ ID NO: 13519), the 3′ITR is ITR4 (SEQ ID NO: 13522), the promoter is PROMOTER 8 (SEQ ID NO: 13530), and the polyA sequence is POLYA1 (SEQ ID NO: 13576). As a non-limiting example, the 5′ITR is ITR1 (SEQ ID NO: 13519), the 3′ITR is ITR4 (SEQ ID NO: 13522), the promoter is PROMOTER 8 (SEQ ID NO: 13530), and the polyA sequence is POLYA2 (SEQ ID NO: 13577). As a non-limiting example, the 5′ITR is ITR1 (SEQ ID NO: 13519), the 3′ITR is ITR4 (SEQ ID NO: 13522), the promoter is PROMOTER 8 (SEQ ID NO: 13530), and the polyA sequence is POLYA3 (SEQ ID NO: 13578). As a non-limiting example, the 5′ITR is ITR1 (SEQ ID NO: 13519), the 3′ITR is ITR4 (SEQ ID NO: 13522), the promoter is PROMOTER 9 (SEQ ID NO: 13531), and the polyA sequence is POLYA1 (SEQ ID NO: 13576). As a non-limiting example, the 5′ITR is ITR1 (SEQ ID NO: 13519), the 3′ITR is ITR4 (SEQ ID NO: 13522), the promoter is PROMOTER 9 (SEQ ID NO: 13531), and the polyA sequence is POLYA2 (SEQ ID NO: 13577). As a non-limiting example, the 5′ITR is ITR1 (SEQ ID NO: 13519), the 3′ITR is ITR4 (SEQ ID NO: 13522), the promoter is PROMOTER 9 (SEQ ID NO: 13531), and the polyA sequence is POLYA3 (SEQ ID NO: 13578). As a non-limiting example, the 5′ITR is ITR1 (SEQ ID NO: 13519), the 3′ITR is ITR4 (SEQ ID NO: 13522), the promoter is PROMOTER 10 (SEQ ID NO: 13532), and the polyA sequence is POLYA1 (SEQ ID NO: 13576). As a non-limiting example, the 5′ITR is ITR1 (SEQ ID NO: 13519), the 3′ITR is ITR4 (SEQ ID NO: 13522), the promoter is PROMOTER 10 (SEQ ID NO: 13532), and the polyA sequence is POLYA2 (SEQ ID NO: 13577). As a non-limiting example, the 5′ITR is ITR1 (SEQ ID NO: 13519), the 3′ITR is ITR4 (SEQ ID NO: 13522), the promoter is PROMOTER 10 (SEQ ID NO: 13532), and the polyA sequence is POLYA3 (SEQ ID NO: 13578). As a non-limiting example, the 5′ITR is ITR1 (SEQ ID NO: 13519), the 3′ITR is ITR4 (SEQ ID NO: 13522), the promoter is PROMOTER 11 (SEQ ID NO: 13533), and the polyA sequence is POLYA1 (SEQ ID NO: 13576). As a non-limiting example, the 5′ITR is ITR1 (SEQ ID NO: 13519), the 3′ITR is ITR4 (SEQ ID NO: 13522), the promoter is PROMOTER 11 (SEQ ID NO: 13533), and the polyA sequence is POLYA2 (SEQ ID NO: 13577). As a non-limiting example, the 5′ITR is ITR1 (SEQ ID NO: 13519), the 3′ITR is ITR4 (SEQ ID NO: 13522), the promoter is PROMOTER 11 (SEQ ID NO: 13533), and the polyA sequence is POLYA3 (SEQ ID NO: 13578). As a non-limiting example, the 5′ITR is ITR1 (SEQ ID NO: 13519), the 3′ITR is ITR4 (SEQ ID NO: 13522), the promoter is PROMOTER 12 (SEQ ID NO: 13534), and the polyA sequence is POLYA1 (SEQ ID NO: 13576). As a non-limiting example, the 5′ITR is ITR1 (SEQ ID NO: 13519), the 3′ITR is ITR4 (SEQ ID NO: 13522), the promoter is PROMOTER 12 (SEQ ID NO: 13534), and the polyA sequence is POLYA2 (SEQ ID NO: 13577). As a non-limiting example, the 5′ITR is ITR1 (SEQ ID NO: 13519), the 3′ITR is ITR4 (SEQ ID NO: 13522), the promoter is PROMOTER 12 (SEQ ID NO: 13534), and the polyA sequence is POLYA3 (SEQ ID NO: 13578). As a non-limiting example, the 5′ITR is ITR1 (SEQ ID NO: 13519), the 3′ITR is ITR4 (SEQ ID NO: 13522), the promoter is PROMOTER 1 (SEQ ID NO: 13523) which comprises PROMOTER 2 (SEQ ID NO: 13524) and PROMOTER 3 (SEQ ID NO: 13525), and the polyA sequence is POLYA1 (SEQ ID NO: 13576). As a non-limiting example, the 5′ITR is ITR1 (SEQ ID NO: 13519), the 3′ITR is ITR4 (SEQ ID NO: 13522), the promoter is PROMOTER 1 (SEQ ID NO: 13523) which comprises PROMOTER 2 (SEQ ID NO: 13524) and PROMOTER 3 (SEQ ID NO: 13525), and the polyA sequence is POLYA2 (SEQ ID NO: 13577). As a non-limiting example, the 5′ITR is ITR1 (SEQ ID NO: 13519), the 3′ITR is ITR4 (SEQ ID NO: 13522), the promoter is PROMOTER 1 (SEQ ID NO: 13523) which comprises PROMOTER 2 (SEQ ID NO: 13524) and PROMOTER 3 (SEQ ID NO: 13525), and the polyA sequence is POLYA3 (SEQ ID NO: 13578). As a non-limiting example, the 5′ITR is ITR1 (SEQ ID NO: 13519), the 3′ITR is ITR4 (SEQ ID NO: 13522), the promoter is PROMOTER 4 (SEQ ID NO: 13526) and PROMOTER 8 (SEQ ID NO: 13530), and the polyA sequence is POLYA1 (SEQ ID NO: 13576). As a non-limiting example, the 5′ITR is ITR1 (SEQ ID NO: 13519), the 3′ITR is ITR4 (SEQ ID NO: 13522), the promoter is PROMOTER 4 (SEQ ID NO: 13526) and PROMOTER 8 (SEQ ID NO: 13530), and the polyA sequence is POLYA2 (SEQ ID NO: 13577). As a non-limiting example, the 5′ITR is ITR1 (SEQ ID NO: 13519), the 3′ITR is ITR4 (SEQ ID NO: 13522), the promoter is PROMOTER 4 (SEQ ID NO: 13526) and PROMOTER 8 (SEQ ID NO: 13530), and the polyA sequence is POLYA3 (SEQ ID NO: 13578). As a non-limiting example, the 5′ITR is ITR1 (SEQ ID NO: 13519), the 3′ITR is ITR4 (SEQ ID NO: 13522), the promoter is PROMOTER 4 (SEQ ID NO: 13526) and PROMOTER 12 (SEQ ID NO: 13534), and the polyA sequence is POLYA1 (SEQ ID NO: 13576). As a non-limiting example, the 5′ITR is ITR1 (SEQ ID NO: 13519), the 3′ITR is ITR4 (SEQ ID NO: 13522), the promoter is PROMOTER 4 (SEQ ID NO: 13526) and PROMOTER 12 (SEQ ID NO: 13534), and the polyA sequence is POLYA2 (SEQ ID NO: 13577). As a non-limiting example, the 5′ITR is ITR1 (SEQ ID NO: 13519), the 3′ITR is ITR4 (SEQ ID NO: 13522), the promoter is PROMOTER 4 (SEQ ID NO: 13526) and PROMOTER 12 (SEQ ID NO: 13534), and the polyA sequence is POLYA3 (SEQ ID NO: 13578).

[1276] As a non-limiting example, the 5′ITR is ITR2 (SEQ ID NO: 13520), the 3′ITR is ITR3 (SEQ ID NO: 13521), the promoter is PROMOTER 1 (SEQ ID NO: 13523), and the polyA sequence is POLYA1 (SEQ ID NO: 13576). As a non-limiting example, the 5′ITR is ITR2 (SEQ ID NO: 13520), the 3′ITR is ITR3 (SEQ ID NO: 13521), the promoter is PROMOTER 1 (SEQ ID NO: 13523), and the polyA sequence is POLYA2 (SEQ ID NO: 13577). As a non-limiting example, the 5′ITR is ITR2 (SEQ ID NO: 13520), the 3′ITR is ITR3 (SEQ ID NO: 13521), the promoter is PROMOTER 1 (SEQ ID NO: 13523), and the polyA sequence is POLYA3 (SEQ ID NO: 13578). As a non-limiting example, the 5′ITR is ITR2 (SEQ ID NO: 13520), the 3′ITR is ITR3 (SEQ ID NO: 13521), the promoter is PROMOTER 2 (SEQ ID NO: 13524), and the polyA sequence is POLYA1 (SEQ ID NO: 13576). As a non-limiting example, the 5′ITR is ITR2 (SEQ ID NO: 13520), the 3′ITR is ITR3 (SEQ ID NO: 13521), the promoter is PROMOTER 2 (SEQ ID NO: 13524), and the polyA sequence is POLYA2 (SEQ ID NO: 13577). As a non-limiting example, the 5′ITR is ITR2 (SEQ ID NO: 13520), the 3′ITR is ITR3 (SEQ ID NO: 13521), the promoter is PROMOTER 2 (SEQ ID NO: 13524), and the polyA sequence is POLYA3 (SEQ ID NO: 13578). As a non-limiting example, the 5′ITR is ITR2 (SEQ ID NO: 13520), the 3′ITR is ITR3 (SEQ ID NO: 13521), the promoter is PROMOTER 3 (SEQ ID NO: 13525), and the polyA sequence is POLYA1 (SEQ ID NO: 13576). As a non-limiting example, the 5′ITR is ITR2 (SEQ ID NO: 13520), the 3′ITR is ITR3 (SEQ ID NO: 13521), the promoter is PROMOTER 3 (SEQ ID NO: 13525), and the polyA sequence is POLYA2 (SEQ ID NO: 13577). As a non-limiting example, the 5′ITR is ITR2 (SEQ ID NO: 13520), the 3′ITR is ITR3 (SEQ ID NO: 13521), the promoter is PROMOTER 3 (SEQ ID NO: 13525), and the polyA sequence is POLYA3 (SEQ ID NO: 13578), As a non-limiting example, the 5′ITR is ITR2 (SEQ ID NO: 13520), the 3′ITR is ITR3 (SEQ ID NO: 13521), the promoter is PROMOTER 4 (SEQ ID NO: 13526), and the polyA sequence is POLYA1 (SEQ ID NO: 13576). As a non-limiting example, the 5′ITR is ITR2 (SEQ ID NO: 13520), the 3′ITR is ITR3 (SEQ ID NO: 13521), the promoter is PROMOTER 4 (SEQ ID NO: 13526), and the polyA sequence is POLYA2 (SEQ ID NO: 13577). As a non-limiting example, the 5′ITR is ITR2 (SEQ ID NO: 13520), the 3′ITR is ITR3 (SEQ ID NO: 13521), the promoter is PROMOTER 4 (SEQ ID NO: 13526), and the polyA sequence is POLYA3 (SEQ ID NO: 13578). As a non-limiting example, the 5′ITR is ITR2 (SEQ ID NO: 13520), the 3′ITR is ITR3 (SEQ ID NO: 13521), the promoter is PROMOTER 5 (SEQ ID NO: 13527), and the polyA sequence is POLYA1 (SEQ ID NO: 13576). As a non-limiting example, the 5′ITR is ITR2 (SEQ ID NO: 13520), the 3′ITR is ITR3 (SEQ ID NO: 13521), the promoter is PROMOTER 5 (SEQ ID NO: 13527), and the polyA sequence is POLYA2 (SEQ ID NO: 13577). As a non-limiting example, the 5′ITR is ITR2 (SEQ ID NO: 13520), the 3′ITR is ITR3 (SEQ ID NO: 13521), the promoter is PROMOTER 5 (SEQ ID NO: 13527), and the polyA sequence is POLYA3 (SEQ ID NO: 13578), As a non-limiting example, the 5′ITR is ITR2 (SEQ ID NO: 13520), the ITR is ITR3 (SEQ ID NO: 13521), the promoter is PROMOTER 6 (SEQ ID NO: 13528), and the polyA sequence is POLYA1 (SEQ ID NO: 13576). As a non-limiting example, the 5′ITR is ITR2 (SEQ ID NO: 13520), the 3′ITR is ITR3 (SEQ ID NO: 13521), the promoter is PROMOTER 6 (SEQ ID NO: 13528), and the polyA sequence is POLYA2 (SEQ ID NO: 13577). As a non-limiting example, the 5′ITR is ITR2 (SEQ ID NO: 13520), the 3′ITR is ITR3 (SEQ ID NO: 13521), the promoter is PROMOTER 6 (SEQ ID NO: 13528), and the polyA sequence is POLYA3 (SEQ ID NO: 13578). As a non-limiting example, the 5′ITR is ITR2 (SEQ ID NO: 13520), the 3′ITR is ITR3 (SEQ ID NO: 13521), the promoter is PROMOTER 7 (SEQ ID NO: 13529), and the polyA sequence is POLYA1 (SEQ ID NO: 13576). As a non-limiting example, the 5′ITR is ITR2 (SEQ ID NO: 13520), the 3′ITR is ITR3 (SEQ ID NO: 13521), the promoter is PROMOTER 7 (SEQ ID NO: 13529), and the polyA sequence is POLYA2 (SEQ ID NO: 13577). As a non-limiting example, the 5′ITR is ITR2 (SEQ ID NO: 13520), the 3′ITR is ITR3 (SEQ ID NO: 13521), the promoter is PROMOTER 7 (SEQ ID NO: 13529), and the polyA sequence is POLYA3 (SEQ ID NO: 13578). As a non-limiting example, the 5′ITR is ITR2 (SEQ ID NO: 13520), the 3′ITR is ITR3 (SEQ ID NO: 13521), the promoter is PROMOTER 8 (SEQ ID NO: 13530), and the polyA sequence is POLYA1 (SEQ ID NO: 13576). As a non-limiting example, the 5′ITR is ITR2 (SEQ ID NO: 13520), the 3′ITR is ITR3 (SEQ ID NO: 13521), the promoter is PROMOTER 8 (SEQ ID NO: 13530), and the polyA sequence is POLYA2 (SEQ ID NO: 13577). As a non-limiting example, the 5′ITR is ITR2 (SEQ ID NO: 13520), the 3′ITR is ITR3 (SEQ ID NO: 13521), the promoter is PROMOTER 8 (SEQ ID NO: 13530), and the polyA sequence is POLYA3 (SEQ ID NO: 13578). As a non-limiting example, the 5′ITR is ITR2 (SEQ ID NO: 13520), the 3′ITR is ITR3 (SEQ ID NO: 13521), the promoter is PROMOTER 9 (SEQ ID NO: 13531), and the polyA sequence is POLYA1 (SEQ ID NO: 13576). As a non-limiting example, the 5′ITR is ITR2 (SEQ ID NO: 13520), the 3′ITR is ITR3 (SEQ ID NO: 13521), the promoter is PROMOTER 9 (SEQ ID NO: 13531), and the polyA sequence is POLYA2 (SEQ ID NO: 13577). As a non-limiting example, the 5′ITR is ITR2 (SEQ ID NO: 13520), the 3′ITR is ITR3 (SEQ ID NO: 13521), the promoter is PROMOTER 9 (SEQ ID NO: 13531), and the polyA sequence is POLYA3 (SEQ ID NO: 13578). As a non-limiting example, the 5′ITR is ITR2 (SEQ ID NO: 13520), the 3′ITR is ITR3 (SEQ ID NO: 13521), the promoter is PROMOTER 10 (SEQ ID NO: 13532), and the polyA sequence is POLYA1 (SEQ ID NO: 13576). As a non-limiting example, the 5′ITR is ITR2 (SEQ ID NO: 13520), the 3′ITR is ITR3 (SEQ ID NO: 13521), the promoter is PROMOTER 10 (SEQ ID NO: 13532), and the polyA sequence is POLYA2 (SEQ ID NO: 13577). As a non-limiting example, the 5′ITR is ITR2 (SEQ ID NO: 13520), the 3′ITR is ITR3 (SEQ ID NO: 13521), the promoter is PROMOTER 10 (SEQ ID NO: 13532), and the polyA sequence is POLYA3 (SEQ ID NO: 13578). As a non-limiting example, the 5′ITR is ITR2 (SEQ ID NO: 13520), the 3′ITR is ITR3 (SEQ ID NO: 13521), the promoter is PROMOTER 11 (SEQ ID NO: 13533), and the polyA sequence is POLYA1 (SEQ ID NO: 13576). As a non-limiting example, the 5′ITR is ITR2 (SEQ ID NO: 13520), the 3′ITR is ITR3 (SEQ ID NO: 13521), the promoter is PROMOTER 11 (SEQ ID NO: 13533), and the polyA sequence is POLYA2 (SEQ ID NO: 13577). As a non-limiting example, the 5′ITR is ITR2 (SEQ ID NO: 13520), the 3′ITR is ITR3 (SEQ ID NO: 13521), the promoter is PROMOTER 11 (SEQ ID NO: 13533), and the polyA sequence is POLYA3 (SEQ ID NO: 13578). As a non-limiting example, the 5′ITR is ITR2 (SEQ ID NO: 13520), the 3′ITR is ITR3 (SEQ ID NO: 13521), the promoter is PROMOTER 12 (SEQ ID NO: 13534), and the polyA sequence is POLYA1 (SEQ ID NO: 13576). As a non-limiting example, the 5′ITR is ITR2 (SEQ ID NO: 13520), the 3′ITR is ITR3 (SEQ ID NO: 13521), the promoter is PROMOTER 12 (SEQ ID NO: 13534), and the polyA sequence is POLYA2 (SEQ ID NO: 13577). As a non-limiting example, the 5′ITR is ITR2 (SEQ ID NO: 13520), the 3′ITR is ITR3 (SEQ ID NO: 13521), the promoter is PROMOTER 12 (SEQ ID NO: 13534), and the polyA sequence is POLYA3 (SEQ ID NO: 13578). As a non-limiting example, the 5′ITR is ITR2 (SEQ ID NO: 13520), the ITR is ITR3 (SEQ ID NO: 13521), the promoter is PROMOTER 1 (SEQ ID NO: 13523) which comprises PROMOTER 2 (SEQ ID NO: 13524) and PROMOTER 3 (SEQ ID NO: 13525), and the polyA sequence is POLYA1 (SEQ ID NO: 13576). As a non-limiting example, the 5′ITR is ITR2 (SEQ ID NO: 13520), the 3′ITR is ITR3 (SEQ ID NO: 13521), the promoter is PROMOTER 1 (SEQ ID NO: 13523) which comprises PROMOTER 2 (SEQ ID NO: 13524) and PROMOTER 3 (SEQ ID NO: 13525), and the polyA sequence is POLYA2 (SEQ ID NO: 13577). As a non-limiting example, the 5′ITR is ITR2 (SEQ ID NO: 13520), the 3′ITR is ITR3 (SEQ ID NO: 13521), the promoter is PROMOTER 1 (SEQ ID NO: 13523) which comprises PROMOTER 2 (SEQ ID NO: 13524) and PROMOTER 3 (SEQ ID NO: 13525), and the polyA sequence is POLYA3 (SEQ ID NO: 13578). As a non-limiting example, the 5′ITR is ITR2 (SEQ ID NO: 13520), the 3′ITR is ITR3 (SEQ ID NO: 13521), the promoter is PROMOTER 4 (SEQ ID NO: 13526) and PROMOTER 8 (SEQ ID NO: 13530), and the polyA sequence is POLYA1 (SEQ ID NO: 13576). As a non-limiting example, the 5′ITR is ITR2 (SEQ ID NO: 13520), the 3′ITR is ITR3 (SEQ ID NO: 13521), the promoter is PROMOTER 4 (SEQ ID NO: 13526) and PROMOTER 8 (SEQ ID NO: 13530), and the polyA sequence is POLYA2 (SEQ ID NO: 13577). As a non-limiting example, the 5′ITR is ITR2 (SEQ ID NO: 13520), the 3′ITR is ITR3 (SEQ ID NO: 13521), the promoter is PROMOTER 4 (SEQ ID NO: 13526) and PROMOTER 8 (SEQ ID NO: 13530), and the polyA sequence is POLYA3 (SEQ ID NO: 13578). As a non-limiting example, the 5′ITR is ITR2 (SEQ ID NO: 13520), the 3′ITR is ITR3 (SEQ ID NO: 13521), the promoter is PROMOTER 4 (SEQ ID NO: 13526) and PROMOTER 12 (SEQ ID NO: 13534), and the polyA sequence is POLYA1 (SEQ ID NO: 13576). As a non-limiting example, the 5′ITR is ITR2 (SEQ ID NO: 13520), the 3′ITR is ITR3 (SEQ ID NO: 13521), the promoter is PROMOTER 4 (SEQ ID NO: 13526) and PROMOTER 12 (SEQ ID NO: 13534), and the polyA sequence is POLYA2 (SEQ ID NO: 13577). As a non-limiting example, the 5′ITR is ITR2 (SEQ ID NO: 13520), the 3′ITR is ITR3 (SEQ ID NO: 13521), the promoter is PROMOTER 4 (SEQ ID NO: 13526) and PROMOTER 12 (SEQ ID NO: 13534), and the polyA sequence is POLYA3 (SEQ ID NO: 13578).

[1277] As a non-limiting example, the 5′ITR is ITR1 (SEQ ID NO: 13519), the 3′ITR is ITR4 (SEQ ID NO: 13522), the promoter is PROMOTER 1 (SEQ ID NO: 13523), and the polyA sequence is POLYA1 (SEQ ID NO: 13576). As a non-limiting example, the 5′ITR is ITR1 (SEQ ID NO: 13519), the 3′ITR is ITR4 (SEQ ID NO: 13522), the promoter is PROMOTER 1 (SEQ ID NO: 13523), and the polyA sequence is POLYA2 (SEQ ID NO: 13577). As a non-limiting example, the 5′ITR is ITR1 (SEQ ID NO: 13519), the 3′ITR is ITR4 (SEQ ID NO: 13522), the promoter is PROMOTER 1 (SEQ ID NO: 13523), and the polyA sequence is POLYA3 (SEQ ID NO: 13578). As a non-limiting example, the 5′ITR is ITR1 (SEQ ID NO: 13519), the 3′ITR is ITR4 (SEQ ID NO: 13522), the promoter is PROMOTER 2 (SEQ ID NO: 13524), and the polyA sequence is POLYA1 (SEQ ID NO: 13576). As a non-limiting example, the 5′ITR is ITR1 (SEQ ID NO: 13519), the 3′ITR is ITR4 (SEQ ID NO: 13522), the promoter is PROMOTER 2 (SEQ ID NO: 13524), and the polyA sequence is POLYA2 (SEQ ID NO: 13577). As a non-limiting example, the 5′ITR is ITR1 (SEQ ID NO: 13519), the 3′ITR is ITR4 (SEQ ID NO: 13522), the promoter is PROMOTER 2 (SEQ ID NO: 13524), and the polyA sequence is POLYA3 (SEQ ID NO: 13578). As a non-limiting example, the 5′ITR is ITR1 (SEQ ID NO: 13519), the 3′ITR is ITR4 (SEQ ID NO: 13522), the promoter is PROMOTER 3 (SEQ ID NO: 13525), and the polyA sequence is POLYA1 (SEQ ID NO: 13576). As a non-limiting example, the 5′ITR is ITR1 (SEQ ID NO: 13519), the 3′1′ITR is ITR4 (SEQ ID NO: 13522), the promoter is PROMOTER 3 (SEQ ID NO: 13525), and the polyA sequence is POLYA2 (SEQ ID NO: 13577). As a non-limiting example, the 5′ITR is ITR1 (SEQ ID NO: 13519), the 3′ITR is ITR4 (SEQ ID NO: 13522), the promoter is PROMOTER 3 (SEQ ID NO: 13525), and the polyA sequence is POLYA3 (SEQ ID NO: 13578). As a non-limiting example, the 5′ITR is ITR1 (SEQ ID NO: 13519), the 3′ITR is ITR4 (SEQ ID NO: 13522), the promoter is PROMOTER 4 (SEQ ID NO: 13526), and the polyA sequence is POLYA1 (SEQ ID NO: 13576). As a non-limiting example, the 5′ITR is ITR1 (SEQ ID NO: 13519), the 3′ITR is ITR4 (SEQ ID NO: 13522), the promoter is PROMOTER 4 (SEQ ID NO: 13526), and the polyA sequence is POLYA2 (SEQ ID NO: 13577). As a non-limiting example, the 5′ITR is ITR1 (SEQ ID NO: 13519), the 3′ITR is ITR4 (SEQ ID NO: 13522), the promoter is PROMOTER 4 (SEQ ID NO: 13526), and the polyA sequence is POLYA3 (SEQ ID NO: 13578). As a non-limiting example, the 5′ITR is ITR1 (SEQ ID NO: 13519), the 3′ITR is ITR4 (SEQ ID NO: 13522), the promoter is PROMOTER 5 (SEQ ID NO: 13527), and the polyA sequence is POLYA1 (SEQ ID NO: 13576). As a non-limiting example, the 5′ITR is ITR1 (SEQ ID NO: 13519), the 3′ITR is ITR4 (SEQ ID NO: 13522), the promoter is PROMOTER 5 (SEQ ID NO: 13527), and the polyA sequence is POLYA2 (SEQ ID NO: 13577). As a non-limiting example, the 5′ITR is ITR1 (SEQ ID NO: 13519), the 3′ITR is ITR4 (SEQ ID NO: 13522), the promoter is PROMOTER 5 (SEQ ID NO: 13527), and the polyA sequence is POLYA3 (SEQ ID NO: 13578). As a non-limiting example, the 5′ITR is ITR1 (SEQ ID NO: 13519), the 3′ITR is ITR4 (SEQ ID NO: 13522), the promoter is PROMOTER 6 (SEQ ID NO: 13528), and the polyA sequence is POLYA1 (SEQ ID NO: 13576). As a non-limiting example, the 5′ITR is ITR1 (SEQ ID NO: 13519), the 3′ITR is ITR4 (SEQ ID NO: 13522), the promoter is PROMOTER 6 (SEQ ID NO: 13528), and the polyA sequence is POLYA2 (SEQ ID NO: 13577). As a non-limiting example, the 5′ITR is ITR1 (SEQ ID NO: 13519), the 3′ITR is ITR4 (SEQ ID NO: 13522), the promoter is PROMOTER 6 (SEQ ID NO: 13528), and the polyA sequence is POLYA3 (SEQ ID NO: 13578). As a non-limiting example, the 5′ITR is ITR1 (SEQ ID NO: 13519), the 3′ITR is ITR4 (SEQ ID NO: 13522), the promoter is PROMOTER 7 (SEQ ID NO: 13529), and the polyA sequence is POLYA1 (SEQ ID NO: 13576). As a non-limiting example, the 5′ITR is ITR1 (SEQ ID NO: 13519), the 3′ITR is ITR4 (SEQ ID NO: 13522), the promoter is PROMOTER 7 (SEQ ID NO: 13529), and the polyA sequence is POLYA2 (SEQ ID NO: 13577). As a non-limiting example, the 5′ITR is ITR1 (SEQ ID NO: 13519), the 3′ITR is ITR4 (SEQ ID NO: 13522), the promoter is PROMOTER 7 (SEQ ID NO: 13529), and the polyA sequence is POLYA3 (SEQ ID NO: 13578). As a non-limiting example, the 5′ITR is ITR1 (SEQ ID NO: 13519), the 3′ITR is ITR4 (SEQ ID NO: 13522), the promoter is PROMOTER 8 (SEQ ID NO: 13530), and the polyA sequence is POLYA1 (SEQ ID NO: 13576). As a non-limiting example, the 5′ITR is ITR1 (SEQ ID NO: 13519), the 3′ITR is ITR4 (SEQ ID NO: 13522), the promoter is PROMOTER 8 (SEQ ID NO: 13530), and the polyA sequence is POLYA2 (SEQ ID NO: 13577). As a non-limiting example, the 5′ITR is ITR1 (SEQ ID NO: 13519), the 3′ITR is ITR4 (SEQ ID NO: 13522), the promoter is PROMOTER 8 (SEQ ID NO: 13530), and the polyA sequence is POLYA3 (SEQ ID NO: 13578). As a non-limiting example, the 5′ITR is ITR1 (SEQ ID NO: 13519), the 3′ITR is ITR4 (SEQ ID NO: 13522), the promoter is PROMOTER 9 (SEQ ID NO: 13531), and the polyA sequence is POLYA1 (SEQ ID NO: 13576). As a non-limiting example, the 5′ITR is ITR1 (SEQ ID NO: 13519), the 3′ITR is ITR4 (SEQ ID NO: 13522), the promoter is PROMOTER 9 (SEQ ID NO: 13531), and the polyA sequence is POLYA2 (SEQ ID NO: 13577). As a non-limiting example, the 5′ITR is ITR1 (SEQ ID NO: 13519), the 3′ITR is ITR4 (SEQ ID NO: 13522), the promoter is PROMOTER 9 (SEQ ID NO: 13531), and the polyA sequence is POLYA3 (SEQ ID NO: 13578). As a non-limiting example, the 5′ITR is ITR1 (SEQ ID NO: 13519), the 3′ITR is ITR4 (SEQ ID NO: 13522), the promoter is PROMOTER 10 (SEQ ID NO: 13532), and the polyA sequence is POLYA1 (SEQ ID NO: 13576). As a non-limiting example, the 5′ITR is ITR1 (SEQ ID NO: 13519), the 3′ITR is ITR4 (SEQ ID NO: 13522), the promoter is PROMOTER 10 (SEQ ID NO: 13532), and the polyA sequence is POLYA2 (SEQ ID NO: 13577). As a non-limiting example, the 5′ITR is ITR1 (SEQ ID NO: 13519), the 3′ITR is ITR4 (SEQ ID NO: 13522), the promoter is PROMOTER 10 (SEQ ID NO: 13532), and the polyA sequence is POLYA3 (SEQ ID NO: 13578). As a non-limiting example, the 5′ITR is ITR1 (SEQ ID NO: 13519), the 3′ITR is ITR4 (SEQ ID NO: 13522), the promoter is PROMOTER 11 (SEQ ID NO: 13533), and the polyA sequence is POLYA1 (SEQ ID NO: 13576). As a non-limiting example, the 5′ITR is ITR1 (SEQ ID NO: 13519), the 3′ITR is ITR4 (SEQ ID NO: 13522), the promoter is PROMOTER 11 (SEQ ID NO: 13533), and the polyA sequence is POLYA2 (SEQ ID NO: 13577). As a non-limiting example, the 5′ITR is ITR1 (SEQ ID NO: 13519), the 3′ITR is ITR4 (SEQ ID NO: 13522), the promoter is PROMOTER 11 (SEQ ID NO: 13533), and the polyA sequence is POLYA3 (SEQ ID NO: 13578). As a non-limiting example, the 5′ITR is ITR1 (SEQ ID NO: 13519), the 3′ITR is ITR4 (SEQ ID NO: 13522), the promoter is PROMOTER 12 (SEQ ID NO: 13534), and the polyA sequence is POLYA1 (SEQ ID NO: 13576). As a non-limiting example, the 5′ITR is ITR1 (SEQ ID NO: 13519), the 3′ITR is ITR4 (SEQ ID NO: 13522), the promoter is PROMOTER 12 (SEQ ID NO: 13534), and the polyA sequence is POLYA2 (SEQ ID NO: 13577). As a non-limiting example, the 5′ITR is ITR1 (SEQ ID NO: 13519), the 3′ITR is ITR4 (SEQ ID NO: 13522), the promoter is PROMOTER 12 (SEQ ID NO: 13534), and the polyA sequence is POLYA3 (SEQ ID NO: 13578). As a non-limiting example, the 5′ITR is ITR1 (SEQ ID NO: 13519), the 3′ITR is ITR4 (SEQ ID NO: 13522), the promoter is PROMOTER 1 (SEQ ID NO: 13523) which comprises PROMOTER 2 (SEQ ID NO: 13524) and PROMOTER 3 (SEQ ID NO: 13525), and the polyA sequence is POLYA1 (SEQ ID NO: 13576). As a non-limiting example, the 5′ITR is ITR1 (SEQ ID NO: 13519), the 3′ITR is ITR4 (SEQ ID NO: 13522), the promoter is PROMOTER1 (SEQ ID NO: 13523) which comprises PROMOTER 2 (SEQ ID NO: 13524) and PROMOTER 3 (SEQ ID NO: 13525), and the polyA sequence is POLYA2 (SEQ ID NO: 13577). As a non-limiting example, the 5′ITR is ITR1 (SEQ ID NO: 13519), the 3′ITR is ITR4 (SEQ ID NO: 13522), the promoter is PROMOTER 1 (SEQ ID NO: 13523) which comprises PROMOTER 2 (SEQ ID NO: 13524) and PROMOTER 3 (SEQ ID NO: 13525), and the polyA sequence is POLYA3 (SEQ ID NO: 13578). As a non-limiting example, the 5′ITR is ITR1 (SEQ ID NO: 13519), the 3′ITR is ITR4 (SEQ ID NO: 13522), the promoter is PROMOTER 4 (SEQ ID NO: 13526) and PROMOTER 8 (SEQ ID NO: 13530), and the polyA sequence is POLYA1 (SEQ ID NO: 13576). As a non-limiting example, the 5′ITR is ITR1 (SEQ ID NO: 13519), the 3′ITR is ITR4 (SEQ ID NO: 13522), the promoter is PROMOTER 4 (SEQ ID NO: 13526) and PROMOTER 8 (SEQ ID NO: 13530), and the polyA sequence is POLYA2 (SEQ ID NO: 13577). As a non-limiting example, the 5′ITR is ITR1 (SEQ ID NO: 13519), the 3′ITR is ITR4 (SEQ ID NO: 13522), the promoter is PROMOTER 4 (SEQ ID NO: 13526) and PROMOTER 8 (SEQ ID NO: 13530), and the polyA sequence is POLYA3 (SEQ ID NO: 13578). As a non-limiting example, the 5′ITR is ITR1 (SEQ ID NO: 13519), the 3′ITR is ITR4 (SEQ ID NO: 13522), the promoter is PROMOTER 4 (SEQ ID NO: 13526) and PROMOTER 12 (SEQ ID NO: 13534), and the polyA sequence is POLYA1 (SEQ ID NO: 13576). As a non-limiting example, the 5′ITR is ITR1 (SEQ ID NO: 13519), the 3′ITR is ITR4 (SEQ ID NO: 13522), the promoter is PROMOTER 4 (SEQ ID NO: 13526) and PROMOTER 12 (SEQ ID NO: 13534), and the polyA sequence is POLYA2 (SEQ ID NO: 13577). As a non-limiting example, the 5′ITR is ITR1 (SEQ ID NO: 13519), the 3′ITR is ITR4 (SEQ ID NO: 13522), the promoter is PROMOTER 4 (SEQ ID NO: 13526) and PROMOTER 12 (SEQ ID NO: 13534), and the polyA sequence is POLYA3 (SEQ ID NO: 13578).

### Viral Genome Cassette Sequence Regions: Exon and Intron Sequences

[1278] In some embodiments, the viral genome comprises a 5′ITR and 3′ITR sequence region, at least one promoter sequence region, at least one exon sequence region, at least one intron sequence region, at least one a polyA sequence region and at least one payload region. The 5′ITR and 3′ITR sequence region may be selected from Table 17, at least one of the promoter sequence regions may be selected from Table 18, at least one of the exon sequence regions may be selected from Table 19, at least one of the intron sequence regions may be selected from Table 20, the polyA sequence region may be selected from Table 23. The ITR sequence regions may be located on the 5′ and 3′ termini of the construct, the promoter is located upstream of the payload region, the polyA sequence region may be located upstream of the 3′ITR sequence region, and the filler sequence region may be located between the polyA sequence region and the 3′ITR sequence region.

[1279] In some embodiments, the viral genome comprises a 5′ITR and 3′ITR sequence region, at least one promoter sequence region, at least one intron sequence region, at least one a polyA sequence region and at least one payload region. The 5′ITR and 3′ITR sequence region may be selected from Table 17, at least one of the promoter sequence regions may be selected from Table 18, at least one of the intron sequence regions may be selected from Table 20, the polyA sequence region may be selected from Table 23. The ITR sequence regions may be located on the 5 and 3′ termini of the construct, the promoter is located upstream of the payload region, the polyA sequence region may be located upstream of the 3′ITR sequence region, and the filler sequence region may be located between the polyA sequence region and the 3′ITR sequence region. As a non-limiting example, the intron is INTRON1 (SEQ ID NO: 13540). As a non-limiting example, the intron is INTRON2 (SEQ ID NO: 13541). As a non-limiting example, the intron is INTRON3 (SEQ ID NO: 13542). As a non-limiting example, the intron is INTRON4 (SEQ ID NO: 13543). As a non-limiting example, the intron is INTRON5 (SEQ ID NO: 13544). As a non-limiting example, the intron is INTRON6 (SEQ ID NO: 13545). As a non-limiting example, the intron is INTRON7 (SEQ ID NO: 13546). As a non-limiting example, the intron is INTRONS (SEQ ID NO: 13547). As a non-limiting example, the intron is INTRON9 (SEQ ID NO: 13548). As a non-limiting example, the intron is INTRON10 (SEQ ID NO: 13549). As a non-limiting example, the intron is INTRON11 (SEQ ID NO: 13550). As a non-limiting example, the intron is INTRON12 (SEQ ID NO: 13551). As a non-limiting example, the intron is INTRON13 (SEQ ID NO: 13552). As a non-limiting example, the intron is INTRON14 (SEQ ID NO: 13553). As a non-limiting example, the intron is INTRON15 (SEQ ID NO: 13554).

### Viral Genome Cassette Sequence Regions: Filler Sequence

[1280] The viral genome may also optionally comprise a filler sequence region. Non-limiting examples of filler sequence regions are described in Table 24. As a non-limiting example, the viral genome comprises FILLER1 (SEQ ID NO: 13579). As a non-limiting example, the viral genome comprises FILLER2 (SEQ ID NO: 13580).

### Viral Genome Cassette Sequence Regions: Tag Sequence

[1281] In some embodiments, the viral genome cassette may also comprise a tag sequence region. The tag sequence may be located upstream of the polyA sequence region. The tag sequence region may be selected from Table 22. As a non-limiting example, the tag sequence region is TAG1 (SEQ ID NO: 13571). As a non-limiting example, the tag sequence region is TAG2 (SEQ ID NO: 13572). As a non-limiting example, the tag sequence region is TAG3 (SEQ ID NO: 13573). As a non-limiting example, the tag sequence region is TAG4 (SEQ ID NO: 13574).

### Viral Genome Cassette Sequence Regions: Signal Sequence

[1282] In some embodiments, the viral genome cassette may also comprise at least one signal sequence region. The signal sequence region may be located upstream of the payload region and, if there is more than one payload region, the signal sequence may be located upstream to some or all of the payload regions. If there is more than one signal sequence regions in the viral genome, the signal sequence regions may be the same or different. The signal sequence region may be selected from Table 21. As a non-limiting example, the signal sequence region is SIGNAL1 (SEQ ID NO: 13555). As a non-limiting example, the signal sequence region is SIGNAL2 (SEQ ID NO: 13556). As a non-limiting example, the signal sequence region is SIGNAL3 (SEQ ID NO: 13557). As a non-limiting example, the signal sequence region is SIGNAL4 (SEQ ID NO: 13558). As a non-limiting example, the signal sequence region is SIGNALS (SEQ ID NO: 13559). As a non-limiting example, the signal sequence region is SIGNALS (SEQ ID NO: 13560). As a non-limiting example, the signal sequence region is SIGNAL7 (SEQ ID NO: 13561). As a non-limiting example, the signal sequence region is SIGNALS (SEQ ID NO: 13562). As a non-limiting example, the signal sequence region is SIGNAL9 (SEQ ID NO: 13563). As a non-limiting example, the signal sequence region is SIGNAL10 (SEQ ID NO: 13564). As a non-limiting example, the signal sequence region is SIGNAL11 (SEQ ID NO: 13565). As a non-limiting example, the signal sequence region is SIGNAL12 (SEQ ID NO: 13566). As a non-limiting example, the signal sequence region is SIGNAL13 (SEQ ID NO: 13567). As a non-limiting example, the signal sequence region is SIGNAL14 (SEQ ID NO: 13568). As a non-limiting example, the signal sequence region is SIGNAL15 (SEQ ID NO: 13569). As a non-limiting example, the signal sequence region is SIGNAL16 (SEQ ID NO: 13570).

[1283] In some embodiments, the viral genome cassette may also comprise two signal sequence regions. The payload region of the viral genome may have one of the two signal sequences located upstream of the payload region and the signal sequences may be the same or different sequences. As a non-limiting example, the viral genome comprises two signal sequence regions and the two signal sequence regions are: SIGNAL1 (SEQ ID NO: 13555) and SIGNAL2 (SEQ ID NO: 13556). As a non-limiting example, the viral genome comprises two signal sequence regions and the two signal sequence regions are: SIGNAL1 (SEQ ID NO: 13555) and SIGNAL3 (SEQ ID NO: 13557). As a non-limiting example, the viral genome comprises two signal sequence regions and the two signal sequence regions are: SIGNAL1 (SEQ ID NO: 13555) and SIGNAL4 (SEQ ID NO: 13558). As a non-limiting example, the viral genome comprises two signal sequence regions and the two signal sequence regions are: SIGNAL1 (SEQ ID NO: 13555) and SIGNALS (SEQ ID NO: 13559). As a non-limiting example, the viral genome comprises two signal sequence regions and the two signal sequence regions are: SIGNAL1 (SEQ ID NO: 13555) and SIGNALS (SEQ ID NO: 13560). As a non-limiting example, the viral genome comprises two signal sequence regions and the two signal sequence regions are: SIGNAL1 (SEQ ID NO: 13555) and SIGNAL7 (SEQ ID NO: 13561). As a non-limiting example, the viral genome comprises two signal sequence regions and the two signal sequence regions are: SIGNAL1 (SEQ ID NO: 13555) and SIGNALS (SEQ ID NO: 13562). As a non-limiting example, the viral genome comprises two signal sequence regions and the two signal sequence regions are: SIGNAL1 (SEQ ID NO: 13555) and SIGNAL9 (SEQ ID NO: 13563). As a non-limiting example, the viral genome comprises two signal sequence regions and the two signal sequence regions are: SIGNAL1 (SEQ ID NO: 13555) and SIGNAL10 (SEQ ID NO: 13564). As a non-limiting example, the viral genome comprises two signal sequence regions and the two signal sequence regions are: SIGNAL1 (SEQ ID NO: 13555) and SIGNAL11 (SEQ ID NO: 13565). As a non-limiting example, the viral genome comprises two signal sequence regions and the two signal sequence regions are: SIGNAL1 (SEQ ID NO: 13555) and SIGNAL12 (SEQ ID NO: 13566). As a non-limiting example, the viral genome comprises two signal sequence regions and the two signal sequence regions are: SIGNAL1 (SEQ ID NO: 13555) and SIGNAL13 (SEQ ID NO: 13567). As a non-limiting example, the viral genome comprises two signal sequence regions and the two signal sequence regions are: SIGNAL1 (SEQ ID NO: 13555) and SIGNAL14 (SEQ ID NO: 13568). As a non-limiting example, the viral genome comprises two signal sequence regions and the two signal sequence regions are: SIGNAL1 (SEQ ID NO: 13555) and SIGNAL15 (SEQ ID NO: 13569). As a non-limiting example, the viral genome comprises two signal sequence regions and the two signal sequence regions are: SIGNAL1 (SEQ ID NO: 13555) and SIGNAL16 (SEQ ID NO: 13570). As a non-limiting example, the viral genome comprises two signal sequence regions and the two signal sequence regions are: SIGNAL2 (SEQ ID NO: 13556) and SIGNAL3 (SEQ ID NO: 13557). As a non-limiting example, the viral genome comprises two signal sequence regions and the two signal sequence regions are: SIGNAL2 (SEQ ID NO: 13556) and SIGNAL4 (SEQ ID NO: 13558). As a non-limiting example, the viral genome comprises two signal sequence regions and the two signal sequence regions are: SIGNAL2 (SEQ ID NO: 13556) and SIGNAL5 (SEQ ID NO: 13559). As a non-limiting example, the viral genome comprises two signal sequence regions and the two signal sequence regions are: SIGNAL2 (SEQ ID NO: 13556) and SIGNALS (SEQ ID NO: 13560). As a non-limiting example, the viral genome comprises two signal sequence regions and the two signal sequence regions are: SIGNAL2 (SEQ ID NO: 13556) and SIGNAL7 (SEQ ID NO: 13561). As a non-limiting example, the viral genome comprises two signal sequence regions and the two signal sequence regions are: SIGNAL2 (SEQ ID NO: 13556) and SIGNAL8 (SEQ ID NO: 13562). As a non-limiting example, the viral genome comprises two signal sequence regions and the two signal sequence regions are: SIGNAL2 (SEQ ID NO: 13556) and SIGNAL9 (SEQ ID NO: 13563). As a non-limiting example, the viral genome comprises two signal sequence regions and the two signal sequence regions are: SIGNAL2 (SEQ ID NO: 13556) and SIGNAL10 (SEQ ID NO: 13564). As a non-limiting example, the viral genome comprises two signal sequence regions and the two signal sequence regions are: SIGNAL2 (SEQ ID NO: 13556) and SIGNAL11 (SEQ ID NO: 13565). As a non-limiting example, the viral genome comprises two signal sequence regions and the two signal sequence regions are: SIGNAL2 (SEQ ID NO: 13556) and SIGNAL12 (SEQ ID NO: 13566). As a non-limiting example, the viral genome comprises two signal sequence regions and the two signal sequence regions are: SIGNAL2 (SEQ ID NO: 13556) and SIGNAL13 (SEQ ID NO: 13567). As a non-limiting example, the viral genome comprises two signal sequence regions and the two signal sequence regions are: SIGNAL2 (SEQ ID NO: 13556) and SIGNAL14 (SEQ ID NO: 13568). As a non-limiting example, the viral genome comprises two signal sequence regions and the two signal sequence regions are: SIGNAL2 (SEQ ID NO: 13556) and SIGNAL15 (SEQ ID NO: 13569). As a non-limiting example, the viral genome comprises two signal sequence regions and the two signal sequence regions are: SIGNAL2 (SEQ ID NO: 13556) and SIGNAL16 (SEQ ID NO: 13570). As a non-limiting example, the viral genome comprises two signal sequence regions and the two signal sequence regions are: SIGNAL3 (SEQ ID NO: 13557) and SIGNAL4 (SEQ ID NO: 13558). As a non-limiting example, the viral genome comprises two signal sequence regions and the two signal sequence regions are: SIGNAL3 (SEQ ID NO: 13557) and SIGNALS (SEQ ID NO: 13559). As a non-limiting example, the viral genome comprises two signal sequence regions and the two signal sequence regions are: SIGNAL3 (SEQ ID NO: 13557) and SIGNALS (SEQ ID NO: 13560). As a non-limiting example, the viral genome comprises two signal sequence regions and the two signal sequence regions are: SIGNAL3 (SEQ ID NO: 13557) and SIGNAL7 (SEQ ID NO: 13561). As a non-limiting example, the viral genome comprises two signal sequence regions and the two signal sequence regions are: SIGNAL3 (SEQ ID NO: 13557) and SIGNALS (SEQ ID NO: 13562). As a non-limiting example, the viral genome comprises two signal sequence regions and the two signal sequence regions are: SIGNAL3 (SEQ ID NO: 13557) and SIGNAL9 (SEQ ID NO: 13563). As a non-limiting example, the viral genome comprises two signal sequence regions and the two signal sequence regions are: SIGNAL3 (SEQ ID NO: 13557) and SIGNAL11 (SEQ ID NO: 13564). As a non-limiting example, the viral genome comprises two signal sequence regions and the two signal sequence regions are: SIGNAL3 (SEQ ID NO: 13557) and SIGNAL11 (SEQ ID NO: 13565). As a non-limiting example, the viral genome comprises two signal sequence regions and the two signal sequence regions are: SIGNAL3 (SEQ ID NO: 13557) and SIGNAL12 (SEQ ID NO: 13566). As a non-limiting example, the viral genome comprises two signal sequence regions and the two signal sequence regions are: SIGNAL3 (SEQ ID NO: 13557) and SIGNAL13 (SEQ ID NO: 13567). As a non-limiting example, the viral genome comprises two signal sequence regions and the two signal sequence regions are: SIGNAL3 (SEQ ID NO: 13557) and SIGNAL14 (SEQ ID NO: 13568). As a non-limiting example, the viral genome comprises two signal sequence regions and the two signal sequence regions are: SIGNAL3 (SEQ ID NO: 13557) and SIGNAL15 (SEQ ID NO: 13569). As a non-limiting example, the viral genome comprises two signal sequence regions and the two signal sequence regions are: SIGNAL3 (SEQ ID NO: 13557) and SIGNAL16 (SEQ ID NO: 13570). As a non-limiting example, the viral genome comprises two signal sequence regions and the two signal sequence regions are: SIGNAL4 (SEQ ID NO: 13558) and SIGNALS (SEQ ID NO: 13559). As a non-limiting example, the viral genome comprises two signal sequence regions and the two signal sequence regions are: SIGNAL4 (SEQ ID NO: 13558) and SIGNALS (SEQ ID NO: 13560). As a non-limiting example, the viral genome comprises two signal sequence regions and the two signal sequence regions are: SIGNAL4 (SEQ ID NO: 13558) and SIGNAL7 (SEQ ID NO: 13561). As a non-limiting example, the viral genome comprises two signal sequence regions and the two signal sequence regions are: SIGNAL4 (SEQ ID NO: 13558) and SIGNALS (SEQ ID NO: 13562). As a non-limiting example, the viral genome comprises two signal sequence regions and the two signal sequence regions are: SIGNAL4 (SEQ ID NO: 13558) and SIGNAL9 (SEQ ID NO: 13563). As a non-limiting example, the viral genome comprises two signal sequence regions and the two signal sequence regions are: SIGNAL4 (SEQ ID NO: 13558) and SIGNAL10 (SEQ ID NO: 13564). As a non-limiting example, the viral genome comprises two signal sequence regions and the two signal sequence regions are: SIGNAL4 (SEQ ID NO: 13558) and SIGNAL11 (SEQ ID NO: 13565). As a non-limiting example, the viral genome comprises two signal sequence regions and the two signal sequence regions are: SIGNAL4 (SEQ ID NO: 13558) and SIGNAL12 (SEQ ID NO: 13566). As a non-limiting example, the viral genome comprises two signal sequence regions and the two signal sequence regions are: SIGNAL4 (SEQ ID NO: 13558) and SIGNAL13 (SEQ ID NO: 13567). As a non-limiting example, the viral genome comprises two signal sequence regions and the two signal sequence regions are: SIGNAL4 (SEQ ID NO: 13558) and SIGNAL14 (SEQ ID NO: 13568). As a non-limiting example, the viral genome comprises two signal sequence regions and the two signal sequence regions are: SIGNAL4 (SEQ ID NO: 13558) and SIGNAL15 (SEQ ID NO: 13569). As a non-limiting example, the viral genome comprises two signal sequence regions and the two signal sequence regions are: SIGNAL4 (SEQ ID NO: 13558) and SIGNAL16 (SEQ ID NO: 13570). As a non-limiting example, the viral genome comprises two signal sequence regions and the two signal sequence regions are: SIGNALS (SEQ ID NO: 13559) and SIGNALS (SEQ ID NO: 13560). As a non-limiting example, the viral genome comprises two signal sequence regions and the two signal sequence regions are: SIGNALS (SEQ ID NO: 13559) and SIGNAL7 (SEQ ID NO: 13561). As a non-limiting example, the viral genome comprises two signal sequence regions and the two signal sequence regions are: SIGNALS (SEQ ID NO: 13559) and SIGNAL8 (SEQ ID NO: 13562). As a non-limiting example, the viral genome comprises two signal sequence regions and the two signal sequence regions are: SIGNALS (SEQ ID NO: 13559) and SIGNAL9 (SEQ ID NO: 13563). As a non-limiting example, the viral genome comprises two signal sequence regions and the two signal sequence regions are: SIGNALS (SEQ ID NO: 13559) and SIGNAL10 (SEQ ID NO: 13564). As a non-limiting example, the viral genome comprises two signal sequence regions and the two signal sequence regions are: SIGNALS (SEQ ID NO: 13559) and SIGNAL11 (SEQ ID NO: 13565). As a non-limiting example, the viral genome comprises two signal sequence regions and the two signal sequence regions are: SIGNALS (SEQ ID NO: 13559) and SIGNAL12 (SEQ ID NO: 13566). As a non-limiting example, the viral genome comprises two signal sequence regions and the two signal sequence regions are: SIGNALS (SEQ ID NO: 13559) and SIGNAL13 (SEQ ID NO: 13567). As a non-limiting example, the viral genome comprises two signal sequence regions and the two signal sequence regions are: SIGNALS (SEQ ID NO: 13559) and SIGNAL14 (SEQ ID NO: 13568). As a non-limiting example, the viral genome comprises two signal sequence regions and the two signal sequence regions are: SIGNALS (SEQ ID NO: 13559) and SIGNAL15 (SEQ ID NO: 13569). As a non-limiting example, the viral genome comprises two signal sequence regions and the two signal sequence regions are: SIGNALS (SEQ ID NO: 13559) and SIGNAL16 (SEQ ID NO: 13570). As a non-limiting example, the viral genome comprises two signal sequence regions and the two signal sequence regions are: SIGNALS (SEQ ID NO: 13560) and SIGNAL7 (SEQ ID NO: 13561). As a non-limiting example, the viral genome comprises two signal sequence regions and the two signal sequence regions are: SIGNALS (SEQ ID NO: 13560) and SIGNAL8 (SEQ ID NO: 13562). As a non-limiting example, the viral genome comprises two signal sequence regions and the two signal sequence regions are: SIGNALS (SEQ ID NO: 13560) and SIGNAL9 (SEQ ID NO: 13563). As a non-limiting example, the viral genome comprises two signal sequence regions and the two signal sequence regions are: SIGNALS (SEQ ID NO: 13560) and SIGNAL10 (SEQ ID NO: 13564). As a non-limiting example, the viral genome comprises two signal sequence regions and the two signal sequence regions are: SIGNALS (SEQ ID NO: 13560) and SIGNAL11 (SEQ ID NO: 13565). As a non-limiting example, the viral genome comprises two signal sequence regions and the two signal sequence regions are: SIGNAL6 (SEQ ID NO: 13560) and SIGNAL12 (SEQ ID NO: 13566). As a non-limiting example, the viral genome comprises two signal sequence regions and the two signal sequence regions are: SIGNALS (SEQ ID NO: 13560) and SIGNAL13 (SEQ ID NO: 13567). As a non-limiting example, the viral genome comprises two signal sequence regions and the two signal sequence regions are: SIGNAL6 (SEQ ID NO: 13560) and SIGNAL14 (SEQ ID NO: 13566). As a non-limiting example, the viral genome comprises two signal sequence regions and the two signal sequence regions are: SIGNALS (SEQ ID NO: 13560) and SIGNAL15 (SEQ ID NO: 13569). As a non-limiting example, the viral genome comprises two signal sequence regions and the two signal sequence regions are: SIGNAL6 (SEQ ID NO: 13560) and SIGNAL16 (SEQ ID NO: 13570). As a non-limiting example, the viral genome comprises two signal sequence regions and the two signal sequence regions are: SIGNAL7 (SEQ ID NO: 13561) and SIGNALS (SEQ ID NO: 13562). As a non-limiting example, the viral genome comprises two signal sequence regions and the two signal sequence regions are: SIGNAL7 (SEQ ID NO: 13561) and SIGNAL9 (SEQ ID NO: 13563). As a non-limiting example, the viral genome comprises two signal sequence regions and the two signal sequence regions are: SIGNAL7 (SEQ ID NO: 13561) and SIGNAL10 (SEQ ID NO: 13564). As a non-limiting example, the viral genome comprises two signal sequence regions and the two signal sequence regions are: SIGNAL7 (SEQ ID NO: 13561) and SIGNAL11 (SEQ ID NO: 13565). As a non-limiting example, the viral genome comprises two signal sequence regions and the two signal sequence regions are: SIGNAL7 (SEQ ID NO: 13561) and SIGNAL12 (SEQ ID NO: 13566). As a non-limiting example, the viral genome comprises two signal sequence regions and the two signal sequence regions are: SIGNAL7 (SEQ ID NO: 13561) and SIGNAL13 (SEQ ID NO: 13567). As a non-limiting example, the viral genome comprises two signal sequence regions and the two signal sequence regions are: SIGNAL7 (SEQ ID NO: 13561) and SIGNAL14 (SEQ ID NO: 13568). As a non-limiting example, the viral genome comprises two signal sequence regions and the two signal sequence regions are: SIGNAL7 (SEQ ID NO: 13561) and SIGNAL15 (SEQ ID NO: 13569). As a non-limiting example, the viral genome comprises two signal sequence regions and the two signal sequence regions are: SIGNAL7 (SEQ ID NO: 13561) and SIGNAL16 (SEQ ID NO: 13570). As a non-limiting example, the viral genome comprises two signal sequence regions and the two signal sequence regions are: SIGNAL8 (SEQ ID NO: 13562) and SIGNAL9 (SEQ ID NO: 13563). As a non-limiting example, the viral genome comprises two signal sequence regions and the two signal sequence regions are: SIGNALS (SEQ ID NO: 13562) and SIGNAL11 (SEQ ID NO: 13564). As a non-limiting example, the viral genome comprises two signal sequence regions and the two signal sequence regions are: SIGNAL8 (SEQ ID NO: 13562) and SIGNAL11 (SEQ ID NO: 13565). As a non-limiting example, the viral genome comprises two signal sequence regions and the two signal sequence regions are: SIGNALS (SEQ ID NO: 13562) and SIGNAL12 (SEQ ID NO: 13566). As a non-limiting example, the viral genome comprises two signal sequence regions and the two signal sequence regions are: SIGNALS (SEQ ID NO: 13562) and SIGNAL13 (SEQ ID NO: 13567). As a non-limiting example, the viral genome comprises two signal sequence regions and the two signal sequence regions are: SIGNALS (SEQ ID NO: 13562) and SIGNAL14 (SEQ ID NO: 13568). As a non-limiting example, the viral genome comprises two signal sequence regions and the two signal sequence regions are: SIGNALS (SEQ ID NO: 13562) and SIGNAL15 (SEQ ID NO: 13569). As a non-limiting example, the viral genome comprises two signal sequence regions and the two signal sequence regions are: SIGNALS (SEQ ID NO: 13562) and SIGNAL16 (SEQ ID NO: 13570). As a non-limiting example, the viral genome comprises two signal sequence regions and the two signal sequence regions are: SIGNAL9 (SEQ ID NO: 13563) and SIGNAL10 (SEQ ID NO: 13564). As a non-limiting example, the viral genome comprises two signal sequence regions and the two signal sequence regions are: SIGNAL9 (SEQ ID NO: 13563) and SIGNAL11 (SEQ ID NO: 13565). As a non-limiting example, the viral genome comprises two signal sequence regions and the two signal sequence regions are: SIGNAL9 (SEQ ID NO: 13563) and SIGNAL12 (SEQ ID NO: 13566). As a non-limiting example, the viral genome comprises two signal sequence regions and the two signal sequence regions are: SIGNAL9 (SEQ ID NO: 13563) and SIGNAL13 (SEQ ID NO: 13567). As a non-limiting example, the viral genome comprises two signal sequence regions and the two signal sequence regions are: SIGNAL9 (SEQ ID NO: 13563) and SIGNAL14 (SEQ ID NO: 13568). As a non-limiting example, the viral genome comprises two signal sequence regions and the two signal sequence regions are: SIGNAL9 (SEQ ID NO: 13563) and SIGNAL15 (SEQ ID NO: 13569). As a non-limiting example, the viral genome comprises two signal sequence regions and the two signal sequence regions are: SIGNAL9 (SEQ ID NO: 13563) and SIGNAL16 (SEQ ID NO: 13570). As a non-limiting example, the viral genome comprises two signal sequence regions and the two signal sequence regions are: SIGNAL10 (SEQ ID NO: 13564) and SIGNAL11 (SEQ ID NO: 13565). As a non-limiting example, the viral genome comprises two signal sequence regions and the two signal sequence regions are: SIGNAL10 (SEQ ID NO: 13564) and SIGNAL12 (SEQ ID NO: 13566). As a non-limiting example, the viral genome comprises two signal sequence regions and the two signal sequence regions are: SIGNAL10 (SEQ ID NO: 13564) and SIGNAL13 (SEQ ID NO: 13567). As a non-limiting example, the viral genome comprises two signal sequence regions and the two signal sequence regions are: SIGNAL10 (SEQ ID NO: 13564) and SIGNAL14 (SEQ ID NO: 13568). As a non-limiting example, the viral genome comprises two signal sequence regions and the two signal sequence regions are: SIGNAL10 (SEQ ID NO: 13564) and SIGNAL15 (SEQ ID NO: 13569). As a non-limiting example, the viral genome comprises two signal sequence regions and the two signal sequence regions are: SIGNAL10 (SEQ ID NO: 13564) and SIGNAL16 (SEQ ID NO: 13570). As a non-limiting example, the viral genome comprises two signal sequence regions and the two signal sequence regions are: SIGNAL11 (SEQ ID NO: 13565) and SIGNAL12 (SEQ ID NO: 13566). As a non-limiting example, the viral genome comprises two signal sequence regions and the two signal sequence regions are: SIGNAL11 (SEQ ID NO: 13565) and SIGNAL13 (SEQ ID NO: 13567). As a non-limiting example, the viral genome comprises two signal sequence regions and the two signal sequence regions are: SIGNAL11 (SEQ ID NO: 13565) and SIGNAL14 (SEQ ID NO: 13568). As a non-limiting example, the viral genome comprises two signal sequence regions and the two signal sequence regions are: SIGNAL11 (SEQ ID NO: 13565) and SIGNAL15 (SEQ ID NO: 13569). As a non-limiting example, the viral genome comprises two signal sequence regions and the two signal sequence regions are: SIGNAL11 (SEQ ID NO: 13565) and SIGNAL16 (SEQ ID NO: 13570). As a non-limiting example, the viral genome comprises two signal sequence regions and the two signal sequence regions are: SIGNAL12 (SEQ ID NO: 13566) and SIGNAL13 (SEQ ID NO: 13567). As a non-limiting example, the viral genome comprises two signal sequence regions and the two signal sequence regions are: SIGNAL12 (SEQ ID NO: 13566) and SIGNAL14 (SEQ ID NO: 13568). As a non-limiting example, the viral genome comprises two signal sequence regions and the two signal sequence regions are: SIGNAL12 (SEQ ID NO: 13566) and SIGNAL15 (SEQ ID NO: 13569). As a non-limiting example, the viral genome comprises two signal sequence regions and the two signal sequence regions are: SIGNAL12 (SEQ ID NO: 13566) and SIGNAL16 (SEQ ID NO: 13570). As a non-limiting example, the viral genome comprises two signal sequence regions and the two signal sequence regions are: SIGNAL13 (SEQ ID NO: 13567) and SIGNAL14 (SEQ ID NO: 13568). As a non-limiting example, the viral genome comprises two signal sequence regions and the two signal sequence regions are: SIGNAL13 (SEQ ID NO: 13567) and SIGNAL15 (SEQ ID NO: 13569). As a non-limiting example, the viral genome comprises two signal sequence regions and the two signal sequence regions are: SIGNAL13 (SEQ ID NO: 13567) and SIGNAL16 (SEQ ID NO: 13570). As a non-limiting example, the viral genome comprises two signal sequence regions and the two signal sequence regions are: SIGNAL14 (SEQ ID NO: 13568) and SIGNAL15 (SEQ ID NO: 13569). As a non-limiting example, the viral genome comprises two signal sequence regions and the two signal sequence regions are: SIGNAL14 (SEQ ID NO: 13568) and SIGNAL16 (SEQ ID NO: 13570). As a non-limiting example, the viral genome comprises two signal sequence regions and the two signal sequence regions are: SIGNAL15 (SEQ ID NO: 13569) and SIGNAL16 (SEQ ID NO: 13570).

### Viral Genome Cassette Sequence Regions: Payload Sequence

[1284] The payload region may be any antibody sequence known in the art or may be any of the antibody sequences (these antibodies are also referred to as “reference antibody”) described herein such as, but not limited to, those in Tables 3-16. The payload region may comprise a variable domain sequence region, a constant domain sequence region, or both a variable domain and constant domain sequence region. The sequence regions may be from the light chain, heavy chain or both the light and heavy chain sequences of the reference antibody or they may be fragments or variants of the reference antibody. As a non-limiting example, the viral genome cassette includes a payload region of the variable domain of the light chain of the reference antibody. As a non-limiting example, the viral genome cassette includes a payload region of the variable domain of the light chain of a reference antibody and a constant domain of the light chain of the reference antibody. As a non-limiting example, the viral genome cassette includes a payload region of the variable domain of the heavy chain of the reference antibody and a constant domain of the heavy chain of the reference antibody. As a non-limiting example, the viral genome cassette includes a payload region of the variable domain of the heavy chain of the reference antibody, the constant domain of the heavy chain of the reference antibody, the variable domain of the light chain of the reference antibody, the constant domain of the light chain of the reference antibody. As a non-limiting example, the viral genome cassette includes a payload region of the variable domain of the heavy chain of the reference antibody, the constant domain of the heavy chain of the reference antibody, and the variable domain of the light chain of the reference antibody. As a non-limiting example, the viral genome cassette includes a payload region of the variable domain of the heavy chain of the reference antibody, the variable domain of the light chain of the reference antibody, the constant domain of the light chain of the reference antibody.

[1285] The viral genomes may also include one or more linker regions to separate coding (e.g., payload) or non-coding regions. Non-limiting examples of linker sequences are shown in Table 2. As a non-limiting example, the viral genome comprises at least one linker and that linker is LINKER 1 (SEQ ID NO: 1724). As a non-limiting example, the viral genome comprises at least one linker and that linker is LINKER 2 (SEQ ID NO: 1725). As a non-limiting example, the viral genome comprises at least one linker and that linker is LINKER 3 (SEQ ID NO: 1726). As a non-limiting example, the viral genome comprises at least one linker and that linker is LINKER 4 (SEQ ID NO: 1727). As a non-limiting example, the viral genome comprises at least one linker and that linker is LINKER 5 (SEQ ID NO: 1728). As a non-limiting example, the viral genome comprises at least one linker and that linker is LINKER 6 (SEQ ID NO: 1729). As a non-limiting example, the viral genome comprises at least one linker and that linker is LINKER 7 (SEQ ID NO: 1730). As a non-limiting example, the viral genome comprises at least one linker and that linker is LINKER 8 (SEQ ID NO: 1731). As a non-limiting example, the viral genome comprises at least one linker and that linker is LINKER 9 (SEQ ID NO: 1732). As a non-limiting example, the viral genome comprises at least one linker and that linker is LINKER 10 (SEQ ID NO: 1733). As a non-limiting example, the viral genome comprises at least one linker and that linker is LINKER 11 (SEQ ID NO: 1734). As a non-limiting example, the viral genome comprises at least one linker and that linker is LINKER 12 (SEQ ID NO: 1735). As a non-limiting example, the viral genome comprises at least one linker and that linker is LINKER 13 (SEQ ID NO: 1736). As a non-limiting example, the viral genome comprises at least one linker and that linker is LINKER 14 (SEQ ID NO: 1737). As a non-limiting example, the viral genome comprises at least one linker and that linker is LINKER 15 (SEQ ID NO: 1738). As a non-limiting example, the viral genome comprises at least one linker and that linker is LINKER 16 (SEQ ID NO: 1739). As a non-limiting example, the viral genome comprises at least one linker and that linker is LINKER 17 (SEQ ID NO: 13151). As a non-limiting example, the viral genome comprises at least one linker and that linker is LINKER 18 (SEQ ID NO: 13152). As a non-limiting example, the viral genome comprises at least one linker and that linker is LINKER 19 (SEQ ID NO: 13153). As a non-limiting example, the viral genome comprises at least one linker and that linker is LINKER 20 (SEQ ID NO: 13154). As a non-limiting example, the viral genome comprises at least one linker and that linker is LINKER 21 (SEQ ID NO: 13155). As a non-limiting example, the viral genome comprises at least one linker and that linker is LINKER 22 (SEQ ID NO: 13156). As a non-limiting example, the viral genome comprises at least one linker and that linker is LINKER 23 (SEQ ID NO: 13157). As a non-limiting example, the viral genome comprises at least one linker and that linker is LINKER 24 (SEQ ID NO: 13158). As a non-limiting example, the viral genome comprises at least one linker and that linker is LINKER 25 (SEQ ID NO: 13159). As a non-limiting example, the viral genome comprises at least one linker and that linker is LINKER 26 (SEQ ID NO: 13160). As a non-limiting example, the viral genome comprises at least one linker and that linker is LINKER 27 (SEQ ID NO: 13161). As a non-limiting example, the viral genome comprises at least one linker and that linker is LINKER 28 (SEQ ID NO: 13162). In some cases, the linker may be a peptide linker that may be used to connect the polypeptides encoded by the payload region (e.g., light and heavy antibody chains). Some peptide linkers may be cleaved after expression to separate heavy and light chain domains, allowing assembly of mature antibodies or antibody fragments. Linker cleavage may be enzymatic. In some cases, linkers comprise an enzymatic cleavage site to facilitate intracellular or extracellular cleavage. Some payload regions encode linkers that interrupt polypeptide synthesis during translation of the linker sequence from an mRNA transcript. Such linkers may facilitate the translation of separate protein domains (e.g., heavy and light chain antibody domains) from a single transcript. In some cases, two or more linkers are encoded by a payload region of the viral genome.

### Exemplary Viral Genome Cassettes

[1286] In some embodiments, the viral genome comprises at least one sequence region described in Tables 17-24. As a non-limiting example, the viral genome comprises a 5′ITR sequence region, at least one promoter sequence region, a first exon sequence region, a first intron sequence region, a second intron sequence region, a second exon sequence region, a first signal sequence region, at least one linker sequence region, a second signal sequence region, a tag sequence region, a PolyA sequence region, a filler sequence region, and a 3′ITR sequence region. As a non-limiting example, the viral genome comprises a 5′ITR sequence region, at least one promoter sequence region, a first exon sequence region, a first intron sequence region, a second intron sequence region, a second exon sequence region, a first signal sequence region, at least one linker sequence region, a second signal sequence region, a tag sequence region, a PolyA sequence region, and a 3′ITR sequence region. As a non-limiting example, the viral genome comprises a 5′ITR sequence region, at least one promoter sequence region, a first exon sequence region, a first intron sequence region, a second intron sequence region, a second exon sequence region, a first signal sequence region, at least one linker sequence region, a second signal sequence region, a PolyA sequence region, a filler sequence region, and a 3′ITR sequence region. As a non-limiting example, the viral genome comprises a 5′ITR sequence region, at least one promoter sequence region, a first exon sequence region, a first intron sequence region, a second intron sequence region, a second exon sequence region, a first signal sequence region, at least one linker sequence region, a second signal sequence region, a PolyA sequence region, and a 3′ITR sequence region. As a non-limiting example, the viral genome comprises a 5′ITR sequence region, at least one promoter sequence region, a first exon sequence region, a first intron sequence region, a second intron sequence region, a second exon sequence region, a first signal sequence region, at least one linker sequence region, a second signal sequence region, a tag sequence region, a PolyA sequence region, a filler sequence region, and a 3′ITR sequence region. As a non-limiting example, the viral genome comprises a 5′ITR sequence region, at least one promoter sequence region, a first exon sequence region, a first intron sequence region, a second intron sequence region, a second exon sequence region, a first signal sequence region, at least one linker sequence region, a second signal sequence region, a tag sequence region, a PolyA sequence region, and a 3′ITR sequence region. As a non-limiting example, the viral genome comprises a 5′ITR sequence region, at least one promoter sequence region, a first exon sequence region, a first intron sequence region, a second intron sequence region, a second exon sequence region, a first signal sequence region, at least one linker sequence region, a second signal sequence region, a PolyA sequence region, a filler sequence region, and a 3′ITR sequence region. As a non-limiting example, the viral genome comprises a 5′ITR sequence region, at least one promoter sequence region, a first exon sequence region, a first intron sequence region, a second intron sequence region, a second exon sequence region, a first signal sequence region, at least one linker sequence region, a second signal sequence region, a PolyA sequence region, and a 3′ITR sequence region. As a non-limiting example, the viral genome comprises a 5′ITR sequence region, at least one promoter sequence region, a first exon sequence region, a first intron sequence region, a second intron sequence region, a second exon sequence region, a first signal sequence region, at least one linker sequence region, a second signal sequence region, a tag sequence region, a PolyA sequence region, a filler sequence region, and a 3′ITR sequence region. As a non-limiting example, the viral genome comprises a 5′ITR sequence region, at least one promoter sequence region, a first exon sequence region, a first intron sequence region, a second intron sequence region, a second exon sequence region, a first signal sequence region, at least one linker sequence region, a second signal sequence region, a tag sequence region, a PolyA sequence region, and a 3′ITR sequence region. As a non-limiting example, the viral genome comprises a 5′ITR sequence region, at least one promoter sequence region, a first exon sequence region, a first intron sequence region, a second intron sequence region, a second exon sequence region, a first signal sequence region, at least one linker sequence region, a second signal sequence region, a PolyA sequence region, a filler sequence region, and a 3′ITR sequence region. As a non-limiting example, the viral genome comprises a 5′ITR sequence region, at least one promoter sequence region, a first exon sequence region, a first intron sequence region, a second intron sequence region, a second exon sequence region, a first signal sequence region, at least one linker sequence region, a second signal sequence region, a PolyA sequence region, and a 3′ITR sequence region. As a non-limiting example, the viral genome comprises a 5′ITR sequence region, at least one promoter sequence region, a first exon sequence region, a first intron sequence region, a second intron sequence region, a second exon sequence region, a first signal sequence region, at least one linker sequence region, a second signal sequence region, a tag sequence region, a PolyA sequence region, a filler sequence region, and a 3′ITR sequence region. As a non-limiting example, the viral genome comprises a 5′ITR sequence region, at least one promoter sequence region, a first exon sequence region, a first intron sequence region, a second intron sequence region, a second exon sequence region, a first signal sequence region, at least one linker sequence region, a second signal sequence region, a tag sequence region, a PolyA sequence region, and a 3′ITR sequence region. As a non-limiting example, the viral genome comprises a 5′ITR sequence region, at least one promoter sequence region, a first exon sequence region, a first intron sequence region, a second intron sequence region, a second exon sequence region, a first signal sequence region, at least one linker sequence region, a second signal sequence region, a PolyA sequence region, a filler sequence region, and a 3′ITR sequence region. As a non-limiting example, the viral genome comprises a 5′ITR sequence region, at least one promoter sequence region, a first exon sequence region, a first intron sequence region, a second intron sequence region, a second exon sequence region, a first signal sequence region, at least one linker sequence region, a second signal sequence region, a PolyA sequence region, and a 3′ITR sequence region. As a non-limiting example, the viral genome comprises a 5′ITR sequence region, at least one promoter sequence region, a first exon sequence region, a first intron sequence region, a second intron sequence region, a second exon sequence region, a first signal sequence region, at least one linker sequence region, a tag sequence region, a PolyA sequence region, a filler sequence region, and a 3′ITR sequence region. As a non-limiting example, the viral genome comprises a 5′ITR sequence region, at least one promoter sequence region, a first exon sequence region, a first intron sequence region, a second intron sequence region, a second exon sequence region, a first signal sequence region, at least one linker sequence region, a tag sequence region, a PolyA sequence region, and a 3′ITR sequence region. As a non-limiting example, the viral genome comprises a 5′ITR sequence region, at least one promoter sequence region, a first exon sequence region, a first intron sequence region, a second intron sequence region, a second exon sequence region, a first signal sequence region, at least one linker sequence region, a PolyA sequence region, a filler sequence region, and a 3′ITR sequence region. As a non-limiting example, the viral genome comprises a 5′ITR sequence region, at least one promoter sequence region, a first exon sequence region, a first intron sequence region, a second intron sequence region, a second exon sequence region, a first signal sequence region, at least one linker sequence region, a PolyA sequence region, and a 3′ITR sequence region. As a non-limiting example, the viral genome comprises a 5′ITR sequence region, at least one promoter sequence region, a first exon sequence region, a first intron sequence region, a second intron sequence region, a second exon sequence region, a first signal sequence region, at least one linker sequence region, a tag sequence region, a PolyA sequence region, a filler sequence region, and a 3′ITR sequence region. As a non-limiting example, the viral genome comprises a 5′ITR sequence region, at least one promoter sequence region, a first exon sequence region, a first intron sequence region, a second intron sequence region, a second exon sequence region, a first signal sequence region, at least one linker sequence region, a tag sequence region, a PolyA sequence region, and a 3′ITR sequence region. As a non-limiting example, the viral genome comprises a 5′ITR sequence region, at least one promoter sequence region, a first exon sequence region, a first intron sequence region, a second intron sequence region, a second exon sequence region, a first signal sequence region, at least one linker sequence region, a PolyA sequence region, a filler sequence region, and a 3′ITR sequence region. As a non-limiting example, the viral genome comprises a 5′ITR sequence region, at least one promoter sequence region, a first exon sequence region, a first intron sequence region, a second intron sequence region, a second exon sequence region, a first signal sequence region, at least one linker sequence region, a PolyA sequence region, and a 3′ITR sequence region. As a non-limiting example, the viral genome comprises a 5′ITR sequence region, at least one promoter sequence region, a first exon sequence region, a first intron sequence region, a second intron sequence region, a second exon sequence region, a first signal sequence region, at least one linker sequence region, a tag sequence region, a PolyA sequence region, a filler sequence region, and a 3′ITR sequence region. As a non-limiting example, the viral genome comprises a 5′ITR sequence region, at least one promoter sequence region, a first exon sequence region, a first intron sequence region, a second intron sequence region, a second exon sequence region, a first signal sequence region, at least one linker sequence region, a tag sequence region, a PolyA sequence region, and a 3′ITR sequence region. As a non-limiting example, the viral genome comprises a 5′ITR sequence region, at least one promoter sequence region, a first exon sequence region, a first intron sequence region, a second intron sequence region, a second exon sequence region, a first signal sequence region, at least one linker sequence region, a PolyA sequence region, a filler sequence region, and a 3′ITR sequence region. As a non-limiting example, the viral genome comprises a 5′ITR sequence region, at least one promoter sequence region, a first exon sequence region, a first intron sequence region, a second intron sequence region, a second exon sequence region, a first signal sequence region, at least one linker sequence region, a PolyA sequence region, and a 3′ITR sequence region. As a non-limiting example, the viral genome comprises a 5′ITR sequence region, at least one promoter sequence region, a first exon sequence region, a first intron sequence region, a second intron sequence region, a second exon sequence region, a first signal sequence region, at least one linker sequence region, a tag sequence region, a PolyA sequence region, a filler sequence region, and a 3′ITR sequence region. As a non-limiting example, the viral genome comprises a 5′ITR sequence region, at least one promoter sequence region, a first exon sequence region, a first intron sequence region, a second intron sequence region, a second exon sequence region, a first signal sequence region, at least one linker sequence region, a tag sequence region, a PolyA sequence region, and a 3′ITR sequence region. As a non-limiting example, the viral genome comprises a 5′ITR sequence region, at least one promoter sequence region, a first exon sequence region, a first intron sequence region, a second intron sequence region, a second exon sequence region, a first signal sequence region, at least one linker sequence region, a PolyA sequence region, a filler sequence region, and a 3′ITR sequence region. As a non-limiting example, the viral genome comprises a 5′ITR sequence region, at least one promoter sequence region, a first exon sequence region, a first intron sequence region, a second intron sequence region, a second exon sequence region, a first signal sequence region, at least one linker sequence region, a PolyA sequence region, and a 3′ITR sequence region. As a non-limiting example, the viral genome comprises a 5′ITR sequence region, at least one promoter sequence region, a first exon sequence region, a first intron sequence region, a second intron sequence region, a second exon sequence region, a first signal sequence region, a second signal sequence region, a tag sequence region, a PolyA sequence region, a filler sequence region, and a 3′ITR sequence region. As a non-limiting example, the viral genome comprises a 5′ITR sequence region, at least one promoter sequence region, a first exon sequence region, a first intron sequence region, a second intron sequence region, a second exon sequence region, a first signal sequence region, a second signal sequence region, a tag sequence region, a PolyA sequence region, and a 3′ITR sequence region. As a non-limiting example, the viral genome comprises a 5′ITR sequence region, at least one promoter sequence region, a first exon sequence region, a first intron sequence region, a second intron sequence region, a second exon sequence region, a first signal sequence region, a second signal sequence region, a PolyA sequence region, a filler sequence region, and a 3′ITR sequence region. As a non-limiting example, the viral genome comprises a 5′ITR sequence region, at least one promoter sequence region, a first exon sequence region, a first intron sequence region, a second intron sequence region, a second exon sequence region, a first signal sequence region, a second signal sequence region, a PolyA sequence region, and a 3′ITR sequence region. As a non-limiting example, the viral genome comprises a 5′ITR sequence region, at least one promoter sequence region, a first exon sequence region, a first intron sequence region, a second intron sequence region, a second exon sequence region, a first signal sequence region, a second signal sequence region, a tag sequence region, a PolyA sequence region, a filler sequence region, and a 3′ITR sequence region. As a non-limiting example, the viral genome comprises a 5′ITR sequence region, at least one promoter sequence region, a first exon sequence region, a first intron sequence region, a second intron sequence region, a second exon sequence region, a first signal sequence region, a second signal sequence region, a tag sequence region, a PolyA sequence region, and a 3′ITR sequence region. As a non-limiting example, the viral genome comprises a 5′ITR sequence region, at least one promoter sequence region, a first exon sequence region, a first intron sequence region, a second intron sequence region, a second exon sequence region, a first signal sequence region, a second signal sequence region, a PolyA sequence region, a filler sequence region, and a 3′ITR sequence region. As a non-limiting example, the viral genome comprises a 5′ITR sequence region, at least one promoter sequence region, a first exon sequence region, a first intron sequence region, a second intron sequence region, a second exon sequence region, a first signal sequence region, a second signal sequence region, a PolyA sequence region, and a 3′ITR sequence region. As a non-limiting example, the viral genome comprises a 5′ITR sequence region, at least one promoter sequence region, a first exon sequence region, a first intron sequence region, a second intron sequence region, a second exon sequence region, a first signal sequence region, a second signal sequence region, a tag sequence region, a PolyA sequence region, a filler sequence region, and a 3′ITR sequence region. As a non-limiting example, the viral genome comprises a 5′ITR sequence region, at least one promoter sequence region, a first exon sequence region, a first intron sequence region, a second intron sequence region, a second exon sequence region, a first signal sequence region, a second signal sequence region, a tag sequence region, a PolyA sequence region, and a 3′ITR sequence region. As a non-limiting example, the viral genome comprises a 5′ITR sequence region, at least one promoter sequence region, a first exon sequence region, a first intron sequence region, a second intron sequence region, a second exon sequence region, a first signal sequence region, a second signal sequence region, a PolyA sequence region, a filler sequence region, and a 3′ITR sequence region. As a non-limiting example, the viral genome comprises a 5′ITR sequence region, at least one promoter sequence region, a first exon sequence region, a first intron sequence region, a second intron sequence region, a second exon sequence region, a first signal sequence region, a second signal sequence region, a PolyA sequence region, and a 3′ITR sequence region. As a non-limiting example, the viral genome comprises a 5′ITR sequence region, at least one promoter sequence region, a first exon sequence region, a first intron sequence region, a second intron sequence region, a second exon sequence region, a first signal sequence region, a second signal sequence region, a tag sequence region, a PolyA sequence region, a filler sequence region, and a 3′ITR sequence region. As a non-limiting example, the viral genome comprises a 5′ITR sequence region, at least one promoter sequence region, a first exon sequence region, a first intron sequence region, a second intron sequence region, a second exon sequence region, a first signal sequence region, a second signal sequence region, a tag sequence region, a PolyA sequence region, and a 3′ITR sequence region. As a non-limiting example, the viral genome comprises a 5′ITR sequence region, at least one promoter sequence region, a first exon sequence region, a first intron sequence region, a second intron sequence region, a second exon sequence region, a first signal sequence region, a second signal sequence region, a PolyA sequence region, a filler sequence region, and a 3′ITR sequence region. As a non-limiting example, the viral genome comprises a 5′ITR sequence region, at least one promoter sequence region, a first exon sequence region, a first intron sequence region, a second intron sequence region, a second exon sequence region, a first signal sequence region, a second signal sequence region, a PolyA sequence region, and a 3′ITR sequence region. As a non-limiting example, the viral genome comprises a 5′ITR sequence region, at least one promoter sequence region, a first exon sequence region, a first intron sequence region, a second intron sequence region, a second exon sequence region, a first signal sequence region, a tag sequence region, a PolyA sequence region, a filler sequence region, and a 3′ITR sequence region. As a non-limiting example, the viral genome comprises a 5′ITR sequence region, at least one promoter sequence region, a first exon sequence region, a first intron sequence region, a second intron sequence region, a second exon sequence region, a first signal sequence region, a tag sequence region, a PolyA sequence region, and a 3′ITR sequence region. As a non-limiting example, the viral genome comprises a 5′ITR sequence region, at least one promoter sequence region, a first exon sequence region, a first intron sequence region, a second intron sequence region, a second exon sequence region, a first signal sequence region, a PolyA sequence region, a filler sequence region, and a 3′ITR sequence region. As a non-limiting example, the viral genome comprises a 5′ITR sequence region, at least one promoter sequence region, a first exon sequence region, a first intron sequence region, a second intron sequence region, a second exon sequence region, a first signal sequence region, a PolyA sequence region, and a 3′ITR sequence region. As a non-limiting example, the viral genome comprises a 5′ITR sequence region, at least one promoter sequence region, a first exon sequence region, a first intron sequence region, a second intron sequence region, a second exon sequence region, a first signal sequence region, a tag sequence region, a PolyA sequence region, a filler sequence region, and a 3′ITR sequence region. As a non-limiting example, the viral genome comprises a 5′ITR sequence region, at least one promoter sequence region, a first exon sequence region, a first intron sequence region, a second intron sequence region, a second exon sequence region, a first signal sequence region, a tag sequence region, a PolyA sequence region, and a 3′ITR sequence region. As a non-limiting example, the viral genome comprises a 5′ITR sequence region, at least one promoter sequence region, a first exon sequence region, a first intron sequence region, a second intron sequence region, a second exon sequence region, a first signal sequence region, a PolyA sequence region, a filler sequence region, and a 3′ITR sequence region. As a non-limiting example, the viral genome comprises a 5′ITR sequence region, at least one promoter sequence region, a first exon sequence region, a first intron sequence region, a second intron sequence region, a second exon sequence region, a first signal sequence region, a PolyA sequence region, and a 3′ITR sequence region. As a non-limiting example, the viral genome comprises a 5′ITR sequence region, at least one promoter sequence region, a first exon sequence region, a first intron sequence region, a second intron sequence region, a second exon sequence region, a first signal sequence region, a tag sequence region, a PolyA sequence region, a filler sequence region, and a 3′ITR sequence region. As a non-limiting example, the viral genome comprises a 5′ITR sequence region, at least one promoter sequence region, a first exon sequence region, a first intron sequence region, a second intron sequence region, a second exon sequence region, a first signal sequence region, a tag sequence region, a PolyA sequence region, and a 3′ITR sequence region. As a non-limiting example, the viral genome comprises a 5′ITR sequence region, at least one promoter sequence region, a first exon sequence region, a first intron sequence region, a second intron sequence region, a second exon sequence region, a first signal sequence region, a PolyA sequence region, a filler sequence region, and a 3′ITR sequence region. As a non-limiting example, the viral genome comprises a 5′ITR sequence region, at least one promoter sequence region, a first exon sequence region, a first intron sequence region, a second intron sequence region, a second exon sequence region, a first signal sequence region, a PolyA sequence region, and a 3′ITR sequence region. As a non-limiting example, the viral genome comprises a 5′ITR sequence region, at least one promoter sequence region, a first exon sequence region, a first intron sequence region, a second intron sequence region, a second exon sequence region, a first signal sequence region, a tag sequence region, a PolyA sequence region, a filler sequence region, and a 3′ITR sequence region. As a non-limiting example, the viral genome comprises a 5′ITR sequence region, at least one promoter sequence region, a first exon sequence region, a first intron sequence region, a second intron sequence region, a second exon sequence region, a first signal sequence region, a tag sequence region, a PolyA sequence region, and a 3′ITR sequence region. As a non-limiting example, the viral genome comprises a 5′ITR sequence region, at least one promoter sequence region, a first exon sequence region, a first intron sequence region, a second intron sequence region, a second exon sequence region, a first signal sequence region, a PolyA sequence region, a filler sequence region, and a 3′ITR sequence region. As a non-limiting example, the viral genome comprises a 5′ITR sequence region, at least one promoter sequence region, a first exon sequence region, a first intron sequence region, a second intron sequence region, a second exon sequence region, a first signal sequence region, a PolyA sequence region, and a 3′ITR sequence region. As a non-limiting example, the viral genome comprises a 5′ITR sequence region, at least one promoter sequence region, a first exon sequence region, a first intron sequence region, a second intron sequence region, a second exon sequence region, a first signal sequence region, at least one linker sequence region, a second signal sequence region, a tag sequence region, a PolyA sequence region, a filler sequence region, and a 3′ITR sequence region. As a non-limiting example, the viral genome comprises a 5′ITR sequence region, at least one promoter sequence region, a first exon sequence region, a first intron sequence region, a second intron sequence region, a second exon sequence region, a first signal sequence region, at least one linker sequence region, a second signal sequence region, a tag sequence region, a PolyA sequence region, and a 3′ITR sequence region. As a non-limiting example, the viral genome comprises a 5′ITR sequence region, at least one promoter sequence region, a first exon sequence region, a first intron sequence region, a second intron sequence region, a second exon sequence region, a first signal sequence region, at least one linker sequence region, a second signal sequence region, a PolyA sequence region, a filler sequence region, and a 3′ITR sequence region. As a non-limiting example, the viral genome comprises a 5′ITR sequence region, at least one promoter sequence region, a first exon sequence region, a first intron sequence region, a second intron sequence region, a second exon sequence region, a first signal sequence region, at least one linker sequence region, a second signal sequence region, a PolyA sequence region, and a 3′ITR sequence region. As a non-limiting example, the viral genome comprises a 5′ITR sequence region, at least one promoter sequence region, a first exon sequence region, a first intron sequence region, a second intron sequence region, a second exon sequence region, a first signal sequence region, at least one linker sequence region, a second signal sequence region, a tag sequence region, a PolyA sequence region, a filler sequence region, and a 3′ITR sequence region. As a non-limiting example, the viral genome comprises a 5′ITR sequence region, at least one promoter sequence region, a first exon sequence region, a first intron sequence region, a second intron sequence region, a second exon sequence region, a first signal sequence region, at least one linker sequence region, a second signal sequence region, a tag sequence region, a PolyA sequence region, and a 3′ITR sequence region. As a non-limiting example, the viral genome comprises a 5′ITR sequence region, at least one promoter sequence region, a first exon sequence region, a first intron sequence region, a second intron sequence region, a second exon sequence region, a first signal sequence region, at least one linker sequence region, a second signal sequence region, a PolyA sequence region, a filler sequence region, and a 3′ITR sequence region. As a non-limiting example, the viral genome comprises a 5′ITR sequence region, at least one promoter sequence region, a first exon sequence region, a first intron sequence region, a second intron sequence region, a second exon sequence region, a first signal sequence region, at least one linker sequence region, a second signal sequence region, a PolyA sequence region, and a 3′ITR sequence region. As a non-limiting example, the viral genome comprises a 5′ITR sequence region, at least one promoter sequence region, a first exon sequence region, a first intron sequence region, a second intron sequence region, a second exon sequence region, a first signal sequence region, at least one linker sequence region, a second signal sequence region, a tag sequence region, a PolyA sequence region, a filler sequence region, and a 3′ITR sequence region. As a non-limiting example, the viral genome comprises a 5′ITR sequence region, at least one promoter sequence region, a first exon sequence region, a first intron sequence region, a second intron sequence region, a second exon sequence region, a first signal sequence region, at least one linker sequence region, a second signal sequence region, a tag sequence region, a PolyA sequence region, and a 3′ITR sequence region. As a non-limiting example, the viral genome comprises a 5′ITR sequence region, at least one promoter sequence region, a first exon sequence region, a first intron sequence region, a second intron sequence region, a second exon sequence region, a first signal sequence region, at least one linker sequence region, a second signal sequence region, a PolyA sequence region, a filler sequence region, and a 3′ITR sequence region. As a non-limiting example, the viral genome comprises a 5′ITR sequence region, at least one promoter sequence region, a first exon sequence region, a first intron sequence region, a second intron sequence region, a second exon sequence region, a first signal sequence region, at least one linker sequence region, a second signal sequence region, a PolyA sequence region, and a 3′ITR sequence region. As a non-limiting example, the viral genome comprises a 5′ITR sequence region, at least one promoter sequence region, a first exon sequence region, a first intron sequence region, a second intron sequence region, a second exon sequence region, a first signal sequence region, at least one linker sequence region, a second signal sequence region, a tag sequence region, a PolyA sequence region, a filler sequence region, and a 3′ITR sequence region. As a non-limiting example, the viral genome comprises a 5′ITR sequence region, at least one promoter sequence region, a first exon sequence region, a first intron sequence region, a second intron sequence region, a second exon sequence region, a first signal sequence region, at least one linker sequence region, a second signal sequence region, a tag sequence region, a PolyA sequence region, and a 3′ITR sequence region. As a non-limiting example, the viral genome comprises a 5′ITR sequence region, at least one promoter sequence region, a first exon sequence region, a first intron sequence region, a second intron sequence region, a second exon sequence region, a first signal sequence region, at least one linker sequence region, a second signal sequence region, a PolyA sequence region, a filler sequence region, and a 3′ITR sequence region. As a non-limiting example, the viral genome comprises a 5′ITR sequence region, at least one promoter sequence region, a first exon sequence region, a first intron sequence region, a second intron sequence region, a second exon sequence region, a first signal sequence region, at least one linker sequence region, a second signal sequence region, a PolyA sequence region, and a 3′ITR sequence region. As a non-limiting example, the viral genome comprises a 5′ITR sequence region, at least one promoter sequence region, a first exon sequence region, a first intron sequence region, a second intron sequence region, a second exon sequence region, a first signal sequence region, at least one linker sequence region, a tag sequence region, a PolyA sequence region, a filler sequence region, and a 3′ITR sequence region. As a non-limiting example, the viral genome comprises a 5′ITR sequence region, at least one promoter sequence region, a first exon sequence region, a first intron sequence region, a second intron sequence region, a second exon sequence region, a first signal sequence region, at least one linker sequence region, a tag sequence region, a PolyA sequence region, and a 3′ITR sequence region. As a non-limiting example, the viral genome comprises a 5′ITR sequence region, at least one promoter sequence region, a first exon sequence region, a first intron sequence region, a second intron sequence region, a second exon sequence region, a first signal sequence region, at least one linker sequence region, a PolyA sequence region, a filler sequence region, and a 3′ITR sequence region. As a non-limiting example, the viral genome comprises a 5′ITR sequence region, at least one promoter sequence region, a first exon sequence region, a first intron sequence region, a second intron sequence region, a second exon sequence region, a first signal sequence region, at least one linker sequence region, a PolyA sequence region, and a 3′ITR sequence region. As a non-limiting example, the viral genome comprises a 5′ITR sequence region, at least one promoter sequence region, a first exon sequence region, a first intron sequence region, a second intron sequence region, a second exon sequence region, a first signal sequence region, at least one linker sequence region, a tag sequence region, a PolyA sequence region, a filler sequence region, and a 3′ITR sequence region. As a non-limiting example, the viral genome comprises a 5′ITR sequence region, at least one promoter sequence region, a first exon sequence region, a first intron sequence region, a second intron sequence region, a second exon sequence region, a first signal sequence region, at least one linker sequence region, a tag sequence region, a PolyA sequence region, and a 3′ITR sequence region. As a non-limiting example, the viral genome comprises a 5′ITR sequence region, at least one promoter sequence region, a first exon sequence region, a first intron sequence region, a second intron sequence region, a second exon sequence region, a first signal sequence region, at least one linker sequence region, a PolyA sequence region, a filler sequence region, and a 3′ITR sequence region. As a non-limiting example, the viral genome comprises a 5′ITR sequence region, at least one promoter sequence region, a first exon sequence region, a first intron sequence region, a second intron sequence region, a second exon sequence region, a first signal sequence region, at least one linker sequence region, a PolyA sequence region, and a 3′ITR sequence region. As a non-limiting example, the viral genome comprises a 5′ITR sequence region, at least one promoter sequence region, a first exon sequence region, a first intron sequence region, a second intron sequence region, a second exon sequence region, a first signal sequence region, at least one linker sequence region, a tag sequence region, a PolyA sequence region, a filler sequence region, and a 3′ITR sequence region. As a non-limiting example, the viral genome comprises a 5′ITR sequence region, at least one promoter sequence region, a first exon sequence region, a first intron sequence region, a second intron sequence region, a second exon sequence region, a first signal sequence region, at least one linker sequence region, a tag sequence region, a PolyA sequence region, and a 3′ITR sequence region. As a non-limiting example, the viral genome comprises a 5′ITR sequence region, at least one promoter sequence region, a first exon sequence region, a first intron sequence region, a second intron sequence region, a second exon sequence region, a first signal sequence region, at least one linker sequence region, a PolyA sequence region, a filler sequence region, and a 3′ITR sequence region. As a non-limiting example, the viral genome comprises a 5′ITR sequence region, at least one promoter sequence region, a first exon sequence region, a first intron sequence region, a second intron sequence region, a second exon sequence region, a first signal sequence region, at least one linker sequence region, a PolyA sequence region, and a 3′ITR sequence region. As a non-limiting example, the viral genome comprises a 5′ITR sequence region, at least one promoter sequence region, a first exon sequence region, a first intron sequence region, a second intron sequence region, a second exon sequence region, a first signal sequence region, at least one linker sequence region, a tag sequence region, a PolyA sequence region, a filler sequence region, and a 3′ITR sequence region. As a non-limiting example, the viral genome comprises a 5′ITR sequence region, at least one promoter sequence region, a first exon sequence region, a first intron sequence region, a second intron sequence region, a second exon sequence region, a first signal sequence region, at least one linker sequence region, a tag sequence region, a PolyA sequence region, and a 3′ITR sequence region. As a non-limiting example, the viral genome comprises a 5′ITR sequence region, at least one promoter sequence region, a first exon sequence region, a first intron sequence region, a second intron sequence region, a second exon sequence region, a first signal sequence region, at least one linker sequence region, a PolyA sequence region, a filler sequence region, and a 3′ITR sequence region. As a non-limiting example, the viral genome comprises a 5′ITR sequence region, at least one promoter sequence region, a first exon sequence region, a first intron sequence region, a second intron sequence region, a second exon sequence region, a first signal sequence region, at least one linker sequence region, a PolyA sequence region, and a 3′ITR sequence region. As a non-limiting example, the viral genome comprises a 5′ITR sequence region, at least one promoter sequence region, a first exon sequence region, a first intron sequence region, a second intron sequence region, a second exon sequence region, a first signal sequence region, a second signal sequence region, a tag sequence region, a PolyA sequence region, a filler sequence region, and a 3′ITR sequence region. As a non-limiting example, the viral genome comprises a 5′ITR sequence region, at least one promoter sequence region, a first exon sequence region, a first intron sequence region, a second intron sequence region, a second exon sequence region, a first signal sequence region, a second signal sequence region, a tag sequence region, a PolyA sequence region, and a 3′ITR sequence region. As a non-limiting example, the viral genome comprises a 5′ITR sequence region, at least one promoter sequence region, a first exon sequence region, a first intron sequence region, a second intron sequence region, a second exon sequence region, a first signal sequence region, a second signal sequence region, a PolyA sequence region, a filler sequence region, and a 3′ITR sequence region. As a non-limiting example, the viral genome comprises a 5′ITR sequence region, at least one promoter sequence region, a first exon sequence region, a first intron sequence region, a second intron sequence region, a second exon sequence region, a first signal sequence region, a second signal sequence region, a PolyA sequence region, and a 3′ITR sequence region. As a non-limiting example, the viral genome comprises a 5′ITR sequence region, at least one promoter sequence region, a first exon sequence region, a first intron sequence region, a second intron sequence region, a second exon sequence region, a first signal sequence region, a second signal sequence region, a tag sequence region, a PolyA sequence region, a filler sequence region, and a 3′ITR sequence region. As a non-limiting example, the viral genome comprises a 5′ITR sequence region, at least one promoter sequence region, a first exon sequence region, a first intron sequence region, a second intron sequence region, a second exon sequence region, a first signal sequence region, a second signal sequence region, a tag sequence region, a PolyA sequence region, and a 3′ITR sequence region. As a non-limiting example, the viral genome comprises a 5′ITR sequence region, at least one promoter sequence region, a first exon sequence region, a first intron sequence region, a second intron sequence region, a second exon sequence region, a first signal sequence region, a second signal sequence region, a PolyA sequence region, a filler sequence region, and a 3′ITR sequence region. As a non-limiting example, the viral genome comprises a 5′ITR sequence region, at least one promoter sequence region, a first exon sequence region, a first intron sequence region, a second intron sequence region, a second exon sequence region, a first signal sequence region, a second signal sequence region, a PolyA sequence region, and a 3′ITR sequence region. As a non-limiting example, the viral genome comprises a 5′ITR sequence region, at least one promoter sequence region, a first exon sequence region, a first intron sequence region, a second intron sequence region, a second exon sequence region, a first signal sequence region, a second signal sequence region, a tag sequence region, a PolyA sequence region, a filler sequence region, and a 3′ITR sequence region. As a non-limiting example, the viral genome comprises a 5′ITR sequence region, at least one promoter sequence region, a first exon sequence region, a first intron sequence region, a second intron sequence region, a second exon sequence region, a first signal sequence region, a second signal sequence region, a tag sequence region, a PolyA sequence region, and a 3′ITR sequence region. As a non-limiting example, the viral genome comprises a 5′ITR sequence region, at least one promoter sequence region, a first exon sequence region, a first intron sequence region, a second intron sequence region, a second exon sequence region, a first signal sequence region, a second signal sequence region, a PolyA sequence region, a filler sequence region, and a 3′ITR sequence region. As a non-limiting example, the viral genome comprises a 5′ITR sequence region, at least one promoter sequence region, a first exon sequence region, a first intron sequence region, a second intron sequence region, a second exon sequence region, a first signal sequence region, a second signal sequence region, a PolyA sequence region, and a 3′ITR sequence region. As a non-limiting example, the viral genome comprises a 5′ITR sequence region, at least one promoter sequence region, a first exon sequence region, a first intron sequence region, a second intron sequence region, a second exon sequence region, a first signal sequence region, a second signal sequence region, a tag sequence region, a PolyA sequence region, a filler sequence region, and a 3′ITR sequence region. As a non-limiting example, the viral genome comprises a 5′ITR sequence region, at least one promoter sequence region, a first exon sequence region, a first intron sequence region, a second intron sequence region, a second exon sequence region, a first signal sequence region, a second signal sequence region, a tag sequence region, a PolyA sequence region, and a 3′ITR sequence region. As a non-limiting example, the viral genome comprises a 5′ITR sequence region, at least one promoter sequence region, a first exon sequence region, a first intron sequence region, a second intron sequence region, a second exon sequence region, a first signal sequence region, a second signal sequence region, a PolyA sequence region, a filler sequence region, and a 3′ITR sequence region. As a non-limiting example, the viral genome comprises a 5′ITR sequence region, at least one promoter sequence region, a first exon sequence region, a first intron sequence region, a second intron sequence region, a second exon sequence region, a first signal sequence region, a second signal sequence region, a PolyA sequence region, and a 3′ITR sequence region. As a non-limiting example, the viral genome comprises a 5′ITR sequence region, at least one promoter sequence region, a first exon sequence region, a first intron sequence region, a second intron sequence region, a second exon sequence region, a first signal sequence region, a tag sequence region, a PolyA sequence region, a filler sequence region, and a 3′ITR sequence region. As a non-limiting example, the viral genome comprises a 5′ITR sequence region, at least one promoter sequence region, a first exon sequence region, a first intron sequence region, a second intron sequence region, a second exon sequence region, a first signal sequence region, a tag sequence region, a PolyA sequence region, and a 3′ITR sequence region. As a non-limiting example, the viral genome comprises a 5′ITR sequence region, at least one promoter sequence region, a first exon sequence region, a first intron sequence region, a second intron sequence region, a second exon sequence region, a first signal sequence region, a PolyA sequence region, a filler sequence region, and a 3′ITR sequence region. As a non-limiting example, the viral genome comprises a 5′ITR sequence region, at least one promoter sequence region, a first exon sequence region, a first intron sequence region, a second intron sequence region, a second exon sequence region, a first signal sequence region, a PolyA sequence region, and a 3′ITR sequence region. As a non-limiting example, the viral genome comprises a 5′ITR sequence region, at least one promoter sequence region, a first exon sequence region, a first intron sequence region, a second intron sequence region, a second exon sequence region, a first signal sequence region, a tag sequence region, a PolyA sequence region, a filler sequence region, and a 3′ITR sequence region. As a non-limiting example, the viral genome comprises a 5′ITR sequence region, at least one promoter sequence region, a first exon sequence region, a first intron sequence region, a second intron sequence region, a second exon sequence region, a first signal sequence region, a tag sequence region, a PolyA sequence region, and a 3′ITR sequence region. As a non-limiting example, the viral genome comprises a 5′ITR sequence region, at least one promoter sequence region, a first exon sequence region, a first intron sequence region, a second intron sequence region, a second exon sequence region, a first signal sequence region, a PolyA sequence region, a filler sequence region, and a 3′ITR sequence region. As a non-limiting example, the viral genome comprises a 5′ITR sequence region, at least one promoter sequence region, a first exon sequence region, a first intron sequence region, a second intron sequence region, a second exon sequence region, a first signal sequence region, a PolyA sequence region, and a 3′ITR sequence region. As a non-limiting example, the viral genome comprises a 5′ITR sequence region, at least one promoter sequence region, a first exon sequence region, a first intron sequence region, a second intron sequence region, a second exon sequence region, a first signal sequence region, a tag sequence region, a PolyA sequence region, a filler sequence region, and a 3′ITR sequence region. As a non-limiting example, the viral genome comprises a 5′ITR sequence region, at least one promoter sequence region, a first exon sequence region, a first intron sequence region, a second intron sequence region, a second exon sequence region, a first signal sequence region, a tag sequence region, a PolyA sequence region, and a 3′ITR sequence region. As a non-limiting example, the viral genome comprises a 5′ITR sequence region, at least one promoter sequence region, a first exon sequence region, a first intron sequence region, a second intron sequence region, a second exon sequence region, a first signal sequence region, a PolyA sequence region, a filler sequence region, and a 3′ITR sequence region. As a non-limiting example, the viral genome comprises a 5′ITR sequence region, at least one promoter sequence region, a first exon sequence region, a first intron sequence region, a second intron sequence region, a second exon sequence region, a first signal sequence region, a PolyA sequence region, and a 3′ITR sequence region. As a non-limiting example, the viral genome comprises a 5′ITR sequence region, at least one promoter sequence region, a first exon sequence region, a first intron sequence region, a second intron sequence region, a second exon sequence region, a first signal sequence region, a tag sequence region, a PolyA sequence region, a filler sequence region, and a 3′ITR sequence region. As a non-limiting example, the viral genome comprises a 5′ITR sequence region, at least one promoter sequence region, a first exon sequence region, a first intron sequence region, a second intron sequence region, a second exon sequence region, a first signal sequence region, a tag sequence region, a PolyA sequence region, and a 3′ITR sequence region. As a non-limiting example, the viral genome comprises a 5′ITR sequence region, at least one promoter sequence region, a first exon sequence region, a first intron sequence region, a second intron sequence region, a second exon sequence region, a first signal sequence region, a PolyA sequence region, a filler sequence region, and a 3′ITR sequence region. As a non-limiting example, the viral genome comprises a 5′ITR sequence region, at least one promoter sequence region, a first exon sequence region, a first intron sequence region, a second intron sequence region, a second exon sequence region, a first signal sequence region, a PolyA sequence region, and a 3′ITR sequence region. As a non-limiting example, the viral genome comprises a 5′ITR sequence region, at least one promoter sequence region, a first exon sequence region, a first intron sequence region, a second intron sequence region, a second exon sequence region, at least one linker sequence region, a first signal sequence region, a tag sequence region, a PolyA sequence region, a filler sequence region, and a 3′ITR sequence region. As a non-limiting example, the viral genome comprises a 5′ITR sequence region, at least one promoter sequence region, a first exon sequence region, a first intron sequence region, a second intron sequence region, a second exon sequence region, at least one linker sequence region, a first signal sequence region, a tag sequence region, a PolyA sequence region, and a 3′ITR sequence region. As a non-limiting example, the viral genome comprises a 5′ITR sequence region, at least one promoter sequence region, a first exon sequence region, a first intron sequence region, a second intron sequence region, a second exon sequence region, at least one linker sequence region, a first signal sequence region, a PolyA sequence region, a filler sequence region, and a 3′ITR sequence region. As a non-limiting example, the viral genome comprises a 5′ITR sequence region, at least one promoter sequence region, a first exon sequence region, a first intron sequence region, a second intron sequence region, a second exon sequence region, at least one linker sequence region, a first signal sequence region, a PolyA sequence region, and a 3′ITR sequence region. As a non-limiting example, the viral genome comprises a 5′ITR sequence region, at least one promoter sequence region, a first exon sequence region, a first intron sequence region, a second intron sequence region, a second exon sequence region, at least one linker sequence region, a first signal sequence region, a tag sequence region, a PolyA sequence region, a filler sequence region, and a 3′ITR sequence region. As a non-limiting example, the viral genome comprises a 5′ITR sequence region, at least one promoter sequence region, a first exon sequence region, a first intron sequence region, a second intron sequence region, a second exon sequence region, at least one linker sequence region, a first signal sequence region, a tag sequence region, a PolyA sequence region, and a 3′ITR sequence region. As a non-limiting example, the viral genome comprises a 5′ITR sequence region, at least one promoter sequence region, a first exon sequence region, a first intron sequence region, a second intron sequence region, a second exon sequence region, at least one linker sequence region, a first signal sequence region, a PolyA sequence region, a filler sequence region, and a 3′ITR sequence region. As a non-limiting example, the viral genome comprises a 5′ITR sequence region, at least one promoter sequence region, a first exon sequence region, a first intron sequence region, a second intron sequence region, a second exon sequence region, at least one linker sequence region, a first signal sequence region, a PolyA sequence region, and a 3′ITR sequence region. As a non-limiting example, the viral genome comprises a 5′ITR sequence region, at least one promoter sequence region, a first exon sequence region, a first intron sequence region, a second intron sequence region, a second exon sequence region, at least one linker sequence region, a first signal sequence region, a tag sequence region, a PolyA sequence region, a filler sequence region, and a 3′ITR sequence region. As a non-limiting example, the viral genome comprises a 5′ITR sequence region, at least one promoter sequence region, a first exon sequence region, a first intron sequence region, a second intron sequence region, a second exon sequence region, at least one linker sequence region, a first signal sequence region, a tag sequence region, a PolyA sequence region, and a 3′ITR sequence region. As a non-limiting example, the viral genome comprises a 5′ITR sequence region, at least one promoter sequence region, a first exon sequence region, a first intron sequence region, a second intron sequence region, a second exon sequence region, at least one linker sequence region, a first signal sequence region, a PolyA sequence region, a filler sequence region, and a 3′ITR sequence region. As a non-limiting example, the viral genome comprises a 5′ITR sequence region, at least one promoter sequence region, a first exon sequence region, a first intron sequence region, a second intron sequence region, a second exon sequence region, at least one linker sequence region, a first signal sequence region, a PolyA sequence region, and a 3′ITR sequence region. As a non-limiting example, the viral genome comprises a 5′ITR sequence region, at least one promoter sequence region, a first exon sequence region, a first intron sequence region, a second intron sequence region, a second exon sequence region, at least one linker sequence region, a first signal sequence region, a tag sequence region, a PolyA sequence region, a filler sequence region, and a 3′ITR sequence region. As a non-limiting example, the viral genome comprises a 5′ITR sequence region, at least one promoter sequence region, a first exon sequence region, a first intron sequence region, a second intron sequence region, a second exon sequence region, at least one linker sequence region, a first signal sequence region, a tag sequence region, a PolyA sequence region, and a 3′ITR sequence region. As a non-limiting example, the viral genome comprises a 5′ITR sequence region, at least one promoter sequence region, a first exon sequence region, a first intron sequence region, a second intron sequence region, a second exon sequence region, at least one linker sequence region, a first signal sequence region, a PolyA sequence region, a filler sequence region, and a 3′ITR sequence region. As a non-limiting example, the viral genome comprises a 5′ITR sequence region, at least one promoter sequence region, a first exon sequence region, a first intron sequence region, a second intron sequence region, a second exon sequence region, at least one linker sequence region, a first signal sequence region, a PolyA sequence region, and a 3′ITR sequence region. As a non-limiting example, the viral genome comprises a 5′ITR sequence region, at least one promoter sequence region, a first exon sequence region, a first intron sequence region, a second intron sequence region, a second exon sequence region, at least one linker sequence region, a tag sequence region, a PolyA sequence region, a filler sequence region, and a 3′ITR sequence region. As a non-limiting example, the viral genome comprises a 5′ITR sequence region, at least one promoter sequence region, a first exon sequence region, a first intron sequence region, a second intron sequence region, a second exon sequence region, at least one linker sequence region, a tag sequence region, a PolyA sequence region, and a 3′ITR sequence region. As a non-limiting example, the viral genome comprises a 5′ITR sequence region, at least one promoter sequence region, a first exon sequence region, a first intron sequence region, a second intron sequence region, a second exon sequence region, at least one linker sequence region, a PolyA sequence region, a filler sequence region, and a 3′ITR sequence region. As a non-limiting example, the viral genome comprises a 5′ITR sequence region, at least one promoter sequence region, a first exon sequence region, a first intron sequence region, a second intron sequence region, a second exon sequence region, at least one linker sequence region, a PolyA sequence region, and a 3′ITR sequence region. As a non-limiting example, the viral genome comprises a 5′ITR sequence region, at least one promoter sequence region, a first exon sequence region, a first intron sequence region, a second intron sequence region, a second exon sequence region, at least one linker sequence region, a tag sequence region, a PolyA sequence region, a filler sequence region, and a 3′ITR sequence region. As a non-limiting example, the viral genome comprises a 5′ITR sequence region, at least one promoter sequence region, a first exon sequence region, a first intron sequence region, a second intron sequence region, a second exon sequence region, at least one linker sequence region, a tag sequence region, a PolyA sequence region, and a 3′ITR sequence region. As a non-limiting example, the viral genome comprises a 5′ITR sequence region, at least one promoter sequence region, a first exon sequence region, a first intron sequence region, a second intron sequence region, a second exon sequence region, at least one linker sequence region, a PolyA sequence region, a filler sequence region, and a 3′ITR sequence region. As a non-limiting example, the viral genome comprises a 5′ITR sequence region, at least one promoter sequence region, a first exon sequence region, a first intron sequence region, a second intron sequence region, a second exon sequence region, at least one linker sequence region, a PolyA sequence region, and a 3′ITR sequence region. As a non-limiting example, the viral genome comprises a 5′ITR sequence region, at least one promoter sequence region, a first exon sequence region, a first intron sequence region, a second intron sequence region, a second exon sequence region, at least one linker sequence region, a tag sequence region, a PolyA sequence region, a filler sequence region, and a 3′ITR sequence region. As a non-limiting example, the viral genome comprises a 5′ITR sequence region, at least one promoter sequence region, a first exon sequence region, a first intron sequence region, a second intron sequence region, a second exon sequence region, at least one linker sequence region, a tag sequence region, a PolyA sequence region, and a 3′ITR sequence region. As a non-limiting example, the viral genome comprises a 5′ITR sequence region, at least one promoter sequence region, a first exon sequence region, a first intron sequence region, a second intron sequence region, a second exon sequence region, at least one linker sequence region, a PolyA sequence region, a filler sequence region, and a 3′ITR sequence region. As a non-limiting example, the viral genome comprises a 5′ITR sequence region, at least one promoter sequence region, a first exon sequence region, a first intron sequence region, a second intron sequence region, a second exon sequence region, at least one linker sequence region, a PolyA sequence region, and a 3′ITR sequence region. As a non-limiting example, the viral genome comprises a 5′ITR sequence region, at least one promoter sequence region, a first exon sequence region, a first intron sequence region, a second intron sequence region, a second exon sequence region, at least one linker sequence region, a tag sequence region, a PolyA sequence region, a filler sequence region, and a 3′ITR sequence region. As a non-limiting example, the viral genome comprises a 5′ITR sequence region, at least one promoter sequence region, a first exon sequence region, a first intron sequence region, a second intron sequence region, a second exon sequence region, at least one linker sequence region, a tag sequence region, a PolyA sequence region, and a 3′ITR sequence region. As a non-limiting example, the viral genome comprises a 5′ITR sequence region, at least one promoter sequence region, a first exon sequence region, a first intron sequence region, a second intron sequence region, a second exon sequence region, at least one linker sequence region, a PolyA sequence region, a filler sequence region, and a 3′ITR sequence region. As a non-limiting example, the viral genome comprises a 5′ITR sequence region, at least one promoter sequence region, a first exon sequence region, a first intron sequence region, a second intron sequence region, a second exon sequence region, at least one linker sequence region, a PolyA sequence region, and a 3′ITR sequence region. As a non-limiting example, the viral genome comprises a 5′ITR sequence region, at least one promoter sequence region, a first exon sequence region, a first intron sequence region, a second intron sequence region, a second exon sequence region, a first signal sequence region, a tag sequence region, a PolyA sequence region, a filler sequence region, and a 3′ITR sequence region. As a non-limiting example, the viral genome comprises a 5′ITR sequence region, at least one promoter sequence region, a first exon sequence region, a first intron sequence region, a second intron sequence region, a second exon sequence region, a first signal sequence region, a tag sequence region, a PolyA sequence region, and a 3′ITR sequence region. As a non-limiting example, the viral genome comprises a 5′ITR sequence region, at least one promoter sequence region, a first exon sequence region, a first intron sequence region, a second intron sequence region, a second exon sequence region, a first signal sequence region, a PolyA sequence region, a filler sequence region, and a 3′ITR sequence region. As a non-limiting example, the viral genome comprises a 5′ITR sequence region, at least one promoter sequence region, a first exon sequence region, a first intron sequence region, a second intron sequence region, a second exon sequence region, a first signal sequence region, a PolyA sequence region, and a 3′ITR sequence region. As a non-limiting example, the viral genome comprises a 5′ITR sequence region, at least one promoter sequence region, a first exon sequence region, a first intron sequence region, a second intron sequence region, a second exon sequence region, a first signal sequence region, a tag sequence region, a PolyA sequence region, a filler sequence region, and a 3′ITR sequence region. As a non-limiting example, the viral genome comprises a 5′ITR sequence region, at least one promoter sequence region, a first exon sequence region, a first intron sequence region, a second intron sequence region, a second exon sequence region, a first signal sequence region, a tag sequence region, a PolyA sequence region, and a 3′ITR sequence region. As a non-limiting example, the viral genome comprises a 5′ITR sequence region, at least one promoter sequence region, a first exon sequence region, a first intron sequence region, a second intron sequence region, a second exon sequence region, a first signal sequence region, a PolyA sequence region, a filler sequence region, and a 3′ITR sequence region. As a non-limiting example, the viral genome comprises a 5′ITR sequence region, at least one promoter sequence region, a first exon sequence region, a first intron sequence region, a second intron sequence region, a second exon sequence region, a first signal sequence region, a PolyA sequence region, and a 3′ITR sequence region. As a non-limiting example, the viral genome comprises a 5′ITR sequence region, at least one promoter sequence region, a first exon sequence region, a first intron sequence region, a second intron sequence region, a second exon sequence region, a first signal sequence region, a tag sequence region, a PolyA sequence region, a filler sequence region, and a 3′ITR sequence region. As a non-limiting example, the viral genome comprises a 5′ITR sequence region, at least one promoter sequence region, a first exon sequence region, a first intron sequence region, a second intron sequence region, a second exon sequence region, a first signal sequence region, a tag sequence region, a PolyA sequence region, and a 3′ITR sequence region. As a non-limiting example, the viral genome comprises a 5′ITR sequence region, at least one promoter sequence region, a first exon sequence region, a first intron sequence region, a second intron sequence region, a second exon sequence region, a first signal sequence region, a PolyA sequence region, a filler sequence region, and a 3′ITR sequence region. As a non-limiting example, the viral genome comprises a 5′ITR sequence region, at least one promoter sequence region, a first exon sequence region, a first intron sequence region, a second intron sequence region, a second exon sequence region, a first signal sequence region, a PolyA sequence region, and a 3′ITR sequence region. As a non-limiting example, the viral genome comprises a 5′ITR sequence region, at least one promoter sequence region, a first exon sequence region, a first intron sequence region, a second intron sequence region, a second exon sequence region, a first signal sequence region, a tag sequence region, a PolyA sequence region, a filler sequence region, and a 3′ITR sequence region. As a non-limiting example, the viral genome comprises a 5′ITR sequence region, at least one promoter sequence region, a first exon sequence region, a first intron sequence region, a second intron sequence region, a second exon sequence region, a first signal sequence region, a tag sequence region, a PolyA sequence region, and a 3′ITR sequence region. As a non-limiting example, the viral genome comprises a 5′ITR sequence region, at least one promoter sequence region, a first exon sequence region, a first intron sequence region, a second intron sequence region, a second exon sequence region, a first signal sequence region, a PolyA sequence region, a filler sequence region, and a 3′ITR sequence region. As a non-limiting example, the viral genome comprises a 5′ITR sequence region, at least one promoter sequence region, a first exon sequence region, a first intron sequence region, a second intron sequence region, a second exon sequence region, a first signal sequence region, a PolyA sequence region, and a 3′ITR sequence region. As a non-limiting example, the viral genome comprises a 5′ITR sequence region, at least one promoter sequence region, a first exon sequence region, a first intron sequence region, a second intron sequence region, a second exon sequence region, a tag sequence region, a PolyA sequence region, a filler sequence region, and a 3′ITR sequence region. As a non-limiting example, the viral genome comprises a 5′ITR sequence region, at least one promoter sequence region, a first exon sequence region, a first intron sequence region, a second intron sequence region, a second exon sequence region, a tag sequence region, a PolyA sequence region, and a 3′ITR sequence region. As a non-limiting example, the viral genome comprises a 5′ITR sequence region, at least one promoter sequence region, a first exon sequence region, a first intron sequence region, a second intron sequence region, a second exon sequence region, a PolyA sequence region, a filler sequence region, and a 3′ITR sequence region. As a non-limiting example, the viral genome comprises a 3′ITR sequence region, at least one promoter sequence region, a first exon sequence region, a first intron sequence region, a second intron sequence region, a second exon sequence region, a PolyA sequence region, and a 3′ITR sequence region. As a non-limiting example, the viral genome comprises a 5′ITR sequence region, at least one promoter sequence region, a first exon sequence region, a first intron sequence region, a second intron sequence region, a second exon sequence region, a tag sequence region, a PolyA sequence region, a filler sequence region, and a 3′ITR sequence region. As a non-limiting example, the viral genome comprises a 5′ITR sequence region, at least one promoter sequence region, a first exon sequence region, a first intron sequence region, a second intron sequence region, a second exon sequence region, a tag sequence region, a PolyA sequence region, and a 3′ITR sequence region. As a non-limiting example, the viral genome comprises a 5′ITR sequence region, at least one promoter sequence region, a first exon sequence region, a first intron sequence region, a second intron sequence region, a second exon sequence region, a PolyA sequence region, a filler sequence region, and a 3′ITR sequence region. As a non-limiting example, the viral genome comprises a 5′ITR sequence region, at least one promoter sequence region, a first exon sequence region, a first intron sequence region, a second intron sequence region, a second exon sequence region, a PolyA sequence region, and a 3′ITR sequence region. As a non-limiting example, the viral genome comprises a 5′ITR sequence region, at least one promoter sequence region, a first exon sequence region, a first intron sequence region, a second intron sequence region, a second exon sequence region, a tag sequence region, a PolyA sequence region, a filler sequence region, and a 3′ITR sequence region. As a non-limiting example, the viral genome comprises a 5′ITR sequence region, at least one promoter sequence region, a first exon sequence region, a first intron sequence region, a second intron sequence region, a second exon sequence region, a tag sequence region, a PolyA sequence region, and a 3′ITR sequence region. As a non-limiting example, the viral genome comprises a 5′ITR sequence region, at least one promoter sequence region, a first exon sequence region, a first intron sequence region, a second intron sequence region, a second exon sequence region, a PolyA sequence region, a filler sequence region, and a 3′ITR sequence region. As a non-limiting example, the viral genome comprises a 5′ITR sequence region, at least one promoter sequence region, a first exon sequence region, a first intron sequence region, a second intron sequence region, a second exon sequence region, a PolyA sequence region, and a 3′ITR sequence region. As a non-limiting example, the viral genome comprises a 5′ITR sequence region, at least one promoter sequence region, a first exon sequence region, a first intron sequence region, a second intron sequence region, a second exon sequence region, a tag sequence region, a PolyA sequence region, a filler sequence region, and a 3′ITR sequence region. As a non-limiting example, the viral genome comprises a 5′ITR sequence region, at least one promoter sequence region, a first exon sequence region, a first intron sequence region, a second intron sequence region, a second exon sequence region, a tag sequence region, a PolyA sequence region, and a 3′ITR sequence region. As a non-limiting example, the viral genome comprises a 5′ITR sequence region, at least one promoter sequence region, a first exon sequence region, a first intron sequence region, a second intron sequence region, a second exon sequence region, a PolyA sequence region, a filler sequence region, and a 3′ITR sequence region. As a non-limiting example, the viral genome comprises a 5′ITR sequence region, at least one promoter sequence region, a first exon sequence region, a first intron sequence region, a second intron sequence region, a second exon sequence region, a PolyA sequence region, and a 3′ITR sequence region. As a non-limiting example, the viral genome comprises a 5′ITR sequence region, at least one promoter sequence region, a first exon sequence region, a first intron sequence region, a second intron sequence region, a second exon sequence region, at least one linker sequence region, a first signal sequence region, a tag sequence region, a PolyA sequence region, a filler sequence region, and a 3′ITR sequence region. As a non-limiting example, the viral genome comprises a 5′ITR sequence region, at least one promoter sequence region, a first exon sequence region, a first intron sequence region, a second intron sequence region, a second exon sequence region, at least one linker sequence region, a first signal sequence region, a tag sequence region, a PolyA sequence region, and a 3′ITR sequence region. As a non-limiting example, the viral genome comprises a 5′ITR sequence region, at least one promoter sequence region, a first exon sequence region, a first intron sequence region, a second intron sequence region, a second exon sequence region, at least one linker sequence region, a first signal sequence region, a PolyA sequence region, a filler sequence region, and a 3′ITR sequence region. As a non-limiting example, the viral genome comprises a 5′ITR sequence region, at least one promoter sequence region, a first exon sequence region, a first intron sequence region, a second intron sequence region, a second exon sequence region, at least one linker sequence region, a first signal sequence region, a PolyA sequence region, and a 3′ITR sequence region. As a non-limiting example, the viral genome comprises a 5′ITR sequence region, at least one promoter sequence region, a first exon sequence region, a first intron sequence region, a second intron sequence region, a second exon sequence region, at least one linker sequence region, a first signal sequence region, a tag sequence region, a PolyA sequence region, a filler sequence region, and a 3′ITR sequence region. As a non-limiting example, the viral genome comprises a 5′ITR sequence region, at least one promoter sequence region, a first exon sequence region, a first intron sequence region, a second intron sequence region, a second exon sequence region, at least one linker sequence region, a first signal sequence region, a tag sequence region, a PolyA sequence region, and a 3′ITR sequence region. As a non-limiting example, the viral genome comprises a 5′ITR sequence region, at least one promoter sequence region, a first exon sequence region, a first intron sequence region, a second intron sequence region, a second exon sequence region, at least one linker sequence region, a first signal sequence region, a PolyA sequence region, a filler sequence region, and a 3′ITR sequence region. As a non-limiting example, the viral genome comprises a 5′ITR sequence region, at least one promoter sequence region, a first exon sequence region, a first intron sequence region, a second intron sequence region, a second exon sequence region, at least one linker sequence region, a first signal sequence region, a PolyA sequence region, and a 3′ITR sequence region. As a non-limiting example, the viral genome comprises a 5′ITR sequence region, at least one promoter sequence region, a first exon sequence region, a first intron sequence region, a second intron sequence region, a second exon sequence region, at least one linker sequence region, a first signal sequence region, a tag sequence region, a PolyA sequence region, a filler sequence region, and a 3′ITR sequence region. As a non-limiting example, the viral genome comprises a 5′ITR sequence region, at least one promoter sequence region, a first exon sequence region, a first intron sequence region, a second intron sequence region, a second exon sequence region, at least one linker sequence region, a first signal sequence region, a tag sequence region, a PolyA sequence region, and a 3′ITR sequence region. As a non-limiting example, the viral genome comprises a 5′ITR sequence region, at least one promoter sequence region, a first exon sequence region, a first intron sequence region, a second intron sequence region, a second exon sequence region, at least one linker sequence region, a first signal sequence region, a PolyA sequence region, a filler sequence region, and a 3′ITR sequence region. As a non-limiting example, the viral genome comprises a 5′ITR sequence region, at least one promoter sequence region, a first exon sequence region, a first intron sequence region, a second intron sequence region, a second exon sequence region, at least one linker sequence region, a first signal sequence region, a PolyA sequence region, and a 3′ITR sequence region. As a non-limiting example, the viral genome comprises a 5′ITR sequence region, at least one promoter sequence region, a first exon sequence region, a first intron sequence region, a second intron sequence region, a second exon sequence region, at least one linker sequence region, a first signal sequence region, a tag sequence region, a PolyA sequence region, a filler sequence region, and a 3′ITR sequence region. As a non-limiting example, the viral genome comprises a 5′ITR sequence region, at least one promoter sequence region, a first exon sequence region, a first intron sequence region, a second intron sequence region, a second exon sequence region, at least one linker sequence region, a first signal sequence region, a tag sequence region, a PolyA sequence region, and a 3′ITR sequence region. As a non-limiting example, the viral genome comprises a 5′ITR sequence region, at least one promoter sequence region, a first exon sequence region, a first intron sequence region, a second intron sequence region, a second exon sequence region, at least one linker sequence region, a first signal sequence region, a PolyA sequence region, a filler sequence region, and a 3′ITR sequence region. As a non-limiting example, the viral genome comprises a 5′ITR sequence region, at least one promoter sequence region, a first exon sequence region, a first intron sequence region, a second intron sequence region, a second exon sequence region, at least one linker sequence region, a first signal sequence region, a PolyA sequence region, and a 3′ITR sequence region. As a non-limiting example, the viral genome comprises a 5′ITR sequence region, at least one promoter sequence region, a first exon sequence region, a first intron sequence region, a second intron sequence region, a second exon sequence region, at least one linker sequence region, a tag sequence region, a PolyA sequence region, a filler sequence region, and a 3′ITR sequence region. As a non-limiting example, the viral genome comprises a 5′ITR sequence region, at least one promoter sequence region, a first exon sequence region, a first intron sequence region, a second intron sequence region, a second exon sequence region, at least one linker sequence region, a tag sequence region, a PolyA sequence region, and a 3′ITR sequence region. As a non-limiting example, the viral genome comprises a 5′ITR sequence region, at least one promoter sequence region, a first exon sequence region, a first intron sequence region, a second intron sequence region, a second exon sequence region, at least one linker sequence region, a PolyA sequence region, a filler sequence region, and a 3′ITR sequence region. As a non-limiting example, the viral genome comprises a 5′ITR sequence region, at least one promoter sequence region, a first exon sequence region, a first intron sequence region, a second intron sequence region, a second exon sequence region, at least one linker sequence region, a PolyA sequence region, and a 3′ITR sequence region. As a non-limiting example, the viral genome comprises a 5′ITR sequence region, at least one promoter sequence region, a first exon sequence region, a first intron sequence region, a second intron sequence region, a second exon sequence region, at least one linker sequence region, a tag sequence region, a PolyA sequence region, a filler sequence region, and a 3′ITR sequence region. As a non-limiting example, the viral genome comprises a 5′ITR sequence region, at least one promoter sequence region, a first exon sequence region, a first intron sequence region, a second intron sequence region, a second exon sequence region, at least one linker sequence region, a tag sequence region, a PolyA sequence region, and a 3′ITR sequence region. As a non-limiting example, the viral genome comprises a 5′ITR sequence region, at least one promoter sequence region, a first exon sequence region, a first intron sequence region, a second intron sequence region, a second exon sequence region, at least one linker sequence region, a PolyA sequence region, a filler sequence region, and a 3′ITR sequence region. As a non-limiting example, the viral genome comprises a 5′ITR sequence region, at least one promoter sequence region, a first exon sequence region, a first intron sequence region, a second intron sequence region, a second exon sequence region, at least one linker sequence region, a PolyA sequence region, and a 3′ITR sequence region. As a non-limiting example, the viral genome comprises a 5′ITR sequence region, at least one promoter sequence region, a first exon sequence region, a first intron sequence region, a second intron sequence region, a second exon sequence region, at least one linker sequence region, a tag sequence region, a PolyA sequence region, a filler sequence region, and a 3′ITR sequence region. As a non-limiting example, the viral genome comprises a 5′ITR sequence region, at least one promoter sequence region, a first exon sequence region, a first intron sequence region, a second intron sequence region, a second exon sequence region, at least one linker sequence region, a tag sequence region, a PolyA sequence region, and a 3′ITR sequence region. As a non-limiting example, the viral genome comprises a 5′ITR sequence region, at least one promoter sequence region, a first exon sequence region, a first intron sequence region, a second intron sequence region, a second exon sequence region, at least one linker sequence region, a PolyA sequence region, a filler sequence region, and a 3′ITR sequence region. As a non-limiting example, the viral genome comprises a 5′ITR sequence region, at least one promoter sequence region, a first exon sequence region, a first intron sequence region, a second intron sequence region, a second exon sequence region, at least one linker sequence region, a PolyA sequence region, and a 3′ITR sequence region. As a non-limiting example, the viral genome comprises a 5′ITR sequence region, at least one promoter sequence region, a first exon sequence region, a first intron sequence region, a second intron sequence region, a second exon sequence region, at least one linker sequence region, a tag sequence region, a PolyA sequence region, a filler sequence region, and a 3′ITR sequence region. As a non-limiting example, the viral genome comprises a 5′ITR sequence region, at least one promoter sequence region, a first exon sequence region, a first intron sequence region, a second intron sequence region, a second exon sequence region, at least one linker sequence region, a tag sequence region, a PolyA sequence region, and a 3′ITR sequence region. As a non-limiting example, the viral genome comprises a 5′ITR sequence region, at least one promoter sequence region, a first exon sequence region, a first intron sequence region, a second intron sequence region, a second exon sequence region, at least one linker sequence region, a PolyA sequence region, a filler sequence region, and a 3′ITR sequence region. As a non-limiting example, the viral genome comprises a 5′ITR sequence region, at least one promoter sequence region, a first exon sequence region, a first intron sequence region, a second intron sequence region, a second exon sequence region, at least one linker sequence region, a PolyA sequence region, and a 3′ITR sequence region. As a non-limiting example, the viral genome comprises a 5′ITR sequence region, at least one promoter sequence region, a first exon sequence region, a first intron sequence region, a second intron sequence region, a second exon sequence region, a first signal sequence region, a tag sequence region, a PolyA sequence region, a filler sequence region, and a 3′ITR sequence region. As a non-limiting example, the viral genome comprises a 5′ITR sequence region, at least one promoter sequence region, a first exon sequence region, a first intron sequence region, a second intron sequence region, a second exon sequence region, a first signal sequence region, a tag sequence region, a PolyA sequence region, and a 3′ITR sequence region. As a non-limiting example, the viral genome comprises a 5′ITR sequence region, at least one promoter sequence region, a first exon sequence region, a first intron sequence region, a second intron sequence region, a second exon sequence region, a first signal sequence region, a PolyA sequence region, a filler sequence region, and a 3′ITR sequence region. As a non-limiting example, the viral genome comprises a 5′ITR sequence region, at least one promoter sequence region, a first exon sequence region, a first intron sequence region, a second intron sequence region, a second exon sequence region, a first signal sequence region, a PolyA sequence region, and a 3′ITR sequence region. As a non-limiting example, the viral genome comprises a 5′ITR sequence region, at least one promoter sequence region, a first exon sequence region, a first intron sequence region, a second intron sequence region, a second exon sequence region, a first signal sequence region, a tag sequence region, a PolyA sequence region, a filler sequence region, and a 3′ITR sequence region. As a non-limiting example, the viral genome comprises a 5′ITR sequence region, at least one promoter sequence region, a first exon sequence region, a first intron sequence region, a second intron sequence region, a second exon sequence region, a first signal sequence region, a tag sequence region, a PolyA sequence region, and a 3′ITR sequence region. As a non-limiting example, the viral genome comprises a 5′ITR sequence region, at least one promoter sequence region, a first exon sequence region, a first intron sequence region, a second intron sequence region, a second exon sequence region, a first signal sequence region, a PolyA sequence region, a filler sequence region, and a 3′ITR sequence region. As a non-limiting example, the viral genome comprises a 5′ITR sequence region, at least one promoter sequence region, a first exon sequence region, a first intron sequence region, a second intron sequence region, a second exon sequence region, a first signal sequence region, a PolyA sequence region, and a 3′ITR sequence region. As a non-limiting example, the viral genome comprises a 5′ITR sequence region, at least one promoter sequence region, a first exon sequence region, a first intron sequence region, a second intron sequence region, a second exon sequence region, a first signal sequence region, a tag sequence region, a PolyA sequence region, a filler sequence region, and a 3′ITR sequence region. As a non-limiting example, the viral genome comprises a 5′ITR sequence region, at least one promoter sequence region, a first exon sequence region, a first intron sequence region, a second intron sequence region, a second exon sequence region, a first signal sequence region, a tag sequence region, a PolyA sequence region, and a 3′ITR sequence region. As a non-limiting example, the viral genome comprises a 5′ITR sequence region, at least one promoter sequence region, a first exon sequence region, a first intron sequence region, a second intron sequence region, a second exon sequence region, a first signal sequence region, a PolyA sequence region, a filler sequence region, and a 3′ITR sequence region. As a non-limiting example, the viral genome comprises a 5′ITR sequence region, at least one promoter sequence region, a first exon sequence region, a first intron sequence region, a second intron sequence region, a second exon sequence region, a first signal sequence region, a PolyA sequence region, and a 3′ITR sequence region. As a non-limiting example, the viral genome comprises a 5′ITR sequence region, at least one promoter sequence region, a first exon sequence region, a first intron sequence region, a second intron sequence region, a second exon sequence region, a first signal sequence region, a tag sequence region, a PolyA sequence region, a filler sequence region, and a 3′ITR sequence region. As a non-limiting example, the viral genome comprises a 5′ITR sequence region, at least one promoter sequence region, a first exon sequence region, a first intron sequence region, a second intron sequence region, a second exon sequence region, a first signal sequence region, a tag sequence region, a PolyA sequence region, and a 3′ITR sequence region. As a non-limiting example, the viral genome comprises a 5′ITR sequence region, at least one promoter sequence region, a first exon sequence region, a first intron sequence region, a second intron sequence region, a second exon sequence region, a first signal sequence region, a PolyA sequence region, a filler sequence region, and a 3′ITR sequence region. As a non-limiting example, the viral genome comprises a 5′ITR sequence region, at least one promoter sequence region, a first exon sequence region, a first intron sequence region, a second intron sequence region, a second exon sequence region, a first signal sequence region, a PolyA sequence region, and a 3′ITR sequence region. As a non-limiting example, the viral genome comprises a 5′ITR sequence region, at least one promoter sequence region, a first exon sequence region, a first intron sequence region, a second intron sequence region, a second exon sequence region, a tag sequence region, a PolyA sequence region, a filler sequence region, and a 3′ITR sequence region. As a non-limiting example, the viral genome comprises a 5′ITR sequence region, at least one promoter sequence region, a first exon sequence region, a first intron sequence region, a second intron sequence region, a second exon sequence region, a tag sequence region, a PolyA sequence region, and a 3′ITR sequence region. As a non-limiting example, the viral genome comprises a 5′ITR sequence region, at least one promoter sequence region, a first exon sequence region, a first intron sequence region, a second intron sequence region, a second exon sequence region, a PolyA sequence region, a filler sequence region, and a 3′ITR sequence region. As a non-limiting example, the viral genome comprises a 5′ITR sequence region, at least one promoter sequence region, a first exon sequence region, a first intron sequence region, a second intron sequence region, a second exon sequence region, a PolyA sequence region, and a 3′ITR sequence region. As a non-limiting example, the viral genome comprises a 5′ITR sequence region, at least one promoter sequence region, a first exon sequence region, a first intron sequence region, a second intron sequence region, a second exon sequence region, a tag sequence region, a PolyA sequence region, a filler sequence region, and a 3′ITR sequence region. As a non-limiting example, the viral genome comprises a 5′ITR sequence region, at least one promoter sequence region, a first exon sequence region, a first intron sequence region, a second intron sequence region, a second exon sequence region, a tag sequence region, a PolyA sequence region, and a 3′ITR sequence region. As a non-limiting example, the viral genome comprises a 5′ITR sequence region, at least one promoter sequence region, a first exon sequence region, a first intron sequence region, a second intron sequence region, a second exon sequence region, a PolyA sequence region, a filler sequence region, and a 3′ITR sequence region. As a non-limiting example, the viral genome comprises a 5′ITR sequence region, at least one promoter sequence region, a first exon sequence region, a first intron sequence region, a second intron sequence region, a second exon sequence region, a PolyA sequence region, and a 3′ITR sequence region. As a non-limiting example, the viral genome comprises a 5′ITR sequence region, at least one promoter sequence region, a first exon sequence region, a first intron sequence region, a second intron sequence region, a second exon sequence region, a tag sequence region, a PolyA sequence region, a filler sequence region, and a 3′ITR sequence region. As a non-limiting example, the viral genome comprises a 5′ITR sequence region, at least one promoter sequence region, a first exon sequence region, a first intron sequence region, a second intron sequence region, a second exon sequence region, a tag sequence region, a PolyA sequence region, and a 3′ITR sequence region. As a non-limiting example, the viral genome comprises a 5′ITR sequence region, at least one promoter sequence region, a first exon sequence region, a first intron sequence region, a second intron sequence region, a second exon sequence region, a PolyA sequence region, a filler sequence region, and a 3′ITR sequence region. As a non-limiting example, the viral genome comprises a 5′ITR sequence region, at least one promoter sequence region, a first exon sequence region, a first intron sequence region, a second intron sequence region, a second exon sequence region, a PolyA sequence region, and a 3′ITR sequence region. As a non-limiting example, the viral genome comprises a 5′ITR sequence region, at least one promoter sequence region, a first exon sequence region, a first intron sequence region, a second intron sequence region, a second exon sequence region, a tag sequence region, a PolyA sequence region, a filler sequence region, and a 3′ITR sequence region. As a non-limiting example, the viral genome comprises a 5′ITR sequence region, at least one promoter sequence region, a first exon sequence region, a first intron sequence region, a second intron sequence region, a second exon sequence region, a tag sequence region, a PolyA sequence region, and a 3′ITR sequence region. As a non-limiting example, the viral genome comprises a 5′ITR sequence region, at least one promoter sequence region, a first exon sequence region, a first intron sequence region, a second intron sequence region, a second exon sequence region, a PolyA sequence region, a filler sequence region, and a 3′ITR sequence region. As a non-limiting example, the viral genome comprises a 5′ITR sequence region, at least one promoter sequence region, a first exon sequence region, a first intron sequence region, a second intron sequence region, a second exon sequence region, a PolyA sequence region, and a 3′ITR sequence region. As a non-limiting example, the viral genome comprises a 5′ITR sequence region, at least one promoter sequence region, an intron sequence region, a first signal sequence region, at least one linker sequence region, a second signal sequence region, a tag sequence region, a PolyA sequence region, a filler sequence region, and a 3′ITR sequence region. As a non-limiting example, the viral genome comprises a 5′ITR sequence region, at least one promoter sequence region, an intron sequence region, a first signal sequence region, at least one linker sequence region, a second signal sequence region, a tag sequence region, a PolyA sequence region, and a 3′ITR sequence region. As a non-limiting example, the viral genome comprises a 5′ITR sequence region, at least one promoter sequence region, an intron sequence region, a first signal sequence region, at least one linker sequence region, a second signal sequence region, a PolyA sequence region, a filler sequence region, and a 3′ITR sequence region. As a non-limiting example, the viral genome comprises a 5′ITR sequence region, at least one promoter sequence region, an intron sequence region, a first signal sequence region, at least one linker sequence region, a second signal sequence region, a PolyA sequence region, and a 3′ITR sequence region. As a non-limiting example, the viral genome comprises a 5′ITR sequence region, at least one promoter sequence region, an intron sequence region, a first signal sequence region, at least one linker sequence region, a second signal sequence region, a tag sequence region, a PolyA sequence region, a filler sequence region, and a 3′ITR sequence region. As a non-limiting example, the viral genome comprises a 5′ITR sequence region, at least one promoter sequence region, an intron sequence region, a first signal sequence region, at least one linker sequence region, a second signal sequence region, a tag sequence region, a PolyA sequence region, and a 3′ITR sequence region. As a non-limiting example, the viral genome comprises a 5′ITR sequence region, at least one promoter sequence region, an intron sequence region, a first signal sequence region, at least one linker sequence region, a second signal sequence region, a PolyA sequence region, a filler sequence region, and a 3′ITR sequence region. As a non-limiting example, the viral genome comprises a 5′ITR sequence region, at least one promoter sequence region, an intron sequence region, a first signal sequence region, at least one linker sequence region, a second signal sequence region, a PolyA sequence region, and a 3′ITR sequence region. As a non-limiting example, the viral genome comprises a 5′ITR sequence region, at least one promoter sequence region, an intron sequence region, a first signal sequence region, at least one linker sequence region, a second signal sequence region, a tag sequence region, a PolyA sequence region, a filler sequence region, and a 3′ITR sequence region. As a non-limiting example, the viral genome comprises a 5′ITR sequence region, at least one promoter sequence region, an intron sequence region, a first signal sequence region, at least one linker sequence region, a second signal sequence region, a tag sequence region, a PolyA sequence region, and a 3′ITR sequence region. As a non-limiting example, the viral genome comprises a 5′ITR sequence region, at least one promoter sequence region, an intron sequence region, a first signal sequence region, at least one linker sequence region, a second signal sequence region, a PolyA sequence region, a filler sequence region, and a 3′ITR sequence region. As a non-limiting example, the viral genome comprises a 5′ITR sequence region, at least one promoter sequence region, an intron sequence region, a first signal sequence region, at least one linker sequence region, a second signal sequence region, a PolyA sequence region, and a 3′ITR sequence region. As a non-limiting example, the viral genome comprises a 5′ITR sequence region, at least one promoter sequence region, an intron sequence region, a first signal sequence region, at least one linker sequence region, a second signal sequence region, a tag sequence region, a PolyA sequence region, a filler sequence region, and a 3′ITR sequence region. As a non-limiting example, the viral genome comprises a 5′ITR sequence region, at least one promoter sequence region, an intron sequence region, a first signal sequence region, at least one linker sequence region, a second signal sequence region, a tag sequence region, a PolyA sequence region, and a 3′ITR sequence region. As a non-limiting example, the viral genome comprises a 5′ITR sequence region, at least one promoter sequence region, an intron sequence region, a first signal sequence region, at least one linker sequence region, a second signal sequence region, a PolyA sequence region, a filler sequence region, and a 3′ITR sequence region. As a non-limiting example, the viral genome comprises a 5′ITR sequence region, at least one promoter sequence region, an intron sequence region, a first signal sequence region, at least one linker sequence region, a second signal sequence region, a PolyA sequence region, and a 3′ITR sequence region. As a non-limiting example, the viral genome comprises a 5′ITR sequence region, at least one promoter sequence region, an intron sequence region, a first signal sequence region, at least one linker sequence region, a tag sequence region, a PolyA sequence region, a filler sequence region, and a 3′ITR sequence region. As a non-limiting example, the viral genome comprises a 5′ITR sequence region, at least one promoter sequence region, an intron sequence region, a first signal sequence region, at least one linker sequence region, a tag sequence region, a PolyA sequence region, and a 3′ITR sequence region. As a non-limiting example, the viral genome comprises a 5′ITR sequence region, at least one promoter sequence region, an intron sequence region, a first signal sequence region, at least one linker sequence region, a PolyA sequence region, a filler sequence region, and a 3′ITR sequence region. As a non-limiting example, the viral genome comprises a 5′ITR sequence region, at least one promoter sequence region, an intron sequence region, a first signal sequence region, at least one linker sequence region, a PolyA sequence region, and a 3′ITR sequence region. As a non-limiting example, the viral genome comprises a 5′ITR sequence region, at least one promoter sequence region, an intron sequence region, a first signal sequence region, at least one linker sequence region, a tag sequence region, a PolyA sequence region, a filler sequence region, and a 3′ITR sequence region. As a non-limiting example, the viral genome comprises a 5′ITR sequence region, at least one promoter sequence region, an intron sequence region, a first signal sequence region, at least one linker sequence region, a tag sequence region, a PolyA sequence region, and a 3′ITR sequence region. As a non-limiting example, the viral genome comprises a 5′ITR sequence region, at least one promoter sequence region, an intron sequence region, a first signal sequence region, at least one linker sequence region, a PolyA sequence region, a filler sequence region, and a 3′ITR sequence region. As a non-limiting example, the viral genome comprises a 5′ITR sequence region, at least one promoter sequence region, an intron sequence region, a first signal sequence region, at least one linker sequence region, a PolyA sequence region, and a 3′ITR sequence region. As a non-limiting example, the viral genome comprises a 5′ITR sequence region, at least one promoter sequence region, an intron sequence region, a first signal sequence region, at least one linker sequence region, a tag sequence region, a PolyA sequence region, a filler sequence region, and a 3′ITR sequence region. As a non-limiting example, the viral genome comprises a 5′ITR sequence region, at least one promoter sequence region, an intron sequence region, a first signal sequence region, at least one linker sequence region, a tag sequence region, a PolyA sequence region, and a 3′ITR sequence region. As a non-limiting example, the viral genome comprises a 5′ITR sequence region, at least one promoter sequence region, an intron sequence region, a first signal sequence region, at least one linker sequence region, a PolyA sequence region, a filler sequence region, and a 3′ITR sequence region. As a non-limiting example, the viral genome comprises a 5′ITR sequence region, at least one promoter sequence region, an intron sequence region, a first signal sequence region, at least one linker sequence region, a PolyA sequence region, and a 3′ITR sequence region. As a non-limiting example, the viral genome comprises a 5′ITR sequence region, at least one promoter sequence region, an intron sequence region, a first signal sequence region, at least one linker sequence region, a tag sequence region, a PolyA sequence region, a filler sequence region, and a 3′ITR sequence region. As a non-limiting example, the viral genome comprises a 5′ITR sequence region, at least one promoter sequence region, an intron sequence region, a first signal sequence region, at least one linker sequence region, a tag sequence region, a PolyA sequence region, and a 3′ITR sequence region. As a non-limiting example, the viral genome comprises a 5′ITR sequence region, at least one promoter sequence region, an intron sequence region, a first signal sequence region, at least one linker sequence region, a PolyA sequence region, a filler sequence region, and a 3′ITR sequence region. As a non-limiting example, the viral genome comprises a 5′ITR sequence region, at least one promoter sequence region, an intron sequence region, a first signal sequence region, at least one linker sequence region, a PolyA sequence region, and a 3′ITR sequence region. As a non-limiting example, the viral genome comprises a 5′ITR sequence region, at least one promoter sequence region, an intron sequence region, a first signal sequence region, a second signal sequence region, a tag sequence region, a PolyA sequence region, a filler sequence region, and a 3′ITR sequence region. As a non-limiting example, the viral genome comprises a 5′ITR sequence region, at least one promoter sequence region, an intron sequence region, a first signal sequence region, a second signal sequence region, a tag sequence region, a PolyA sequence region, and a 3′ITR sequence region. As a non-limiting example, the viral genome comprises a 5′ITR sequence region, at least one promoter sequence region, an intron sequence region, a first signal sequence region, a second signal sequence region, a PolyA sequence region, a filler sequence region, and a 3′ITR sequence region. As a non-limiting example, the viral genome comprises a 5′ITR sequence region, at least one promoter sequence region, an intron sequence region, a first signal sequence region, a second signal sequence region, a PolyA sequence region, and a 3′ITR sequence region. As a non-limiting example, the viral genome comprises a 5′ITR sequence region, at least one promoter sequence region, an intron sequence region, a first signal sequence region, a second signal sequence region, a tag sequence region, a PolyA sequence region, a filler sequence region, and a 3′ITR sequence region. As a non-limiting example, the viral genome comprises a 5′ITR sequence region, at least one promoter sequence region, an intron sequence region, a first signal sequence region, a second signal sequence region, a tag sequence region, a PolyA sequence region, and a 3′ITR sequence region. As a non-limiting example, the viral genome comprises a 5′ITR sequence region, at least one promoter sequence region, an intron sequence region, a first signal sequence region, a second signal sequence region, a PolyA sequence region, a filler sequence region, and a 3′ITR sequence region. As a non-limiting example, the viral genome comprises a 5′ITR sequence region, at least one promoter sequence region, an intron sequence region, a first signal sequence region, a second signal sequence region, a PolyA sequence region, and a 3′ITR sequence region. As a non-limiting example, the viral genome comprises a 5′ITR sequence region, at least one promoter sequence region, an intron sequence region, a first signal sequence region, a second signal sequence region, a tag sequence region, a PolyA sequence region, a filler sequence region, and a 3′ITR sequence region. As a non-limiting example, the viral genome comprises a 3′ITR sequence region, at least one promoter sequence region, an intron sequence region, a first signal sequence region, a second signal sequence region, a tag sequence region, a PolyA sequence region, and a 3′ITR sequence region. As a non-limiting example, the viral genome comprises a 5′ITR sequence region, at least one promoter sequence region, an intron sequence region, a first signal sequence region, a second signal sequence region, a PolyA sequence region, a filler sequence region, and a 3′ITR sequence region. As a non-limiting example, the viral genome comprises a 5′ITR sequence region, at least one promoter sequence region, an intron sequence region, a first signal sequence region, a second signal sequence region, a PolyA sequence region, and a 3′ITR sequence region. As a non-limiting example, the viral genome comprises a 5′ITR sequence region, at least one promoter sequence region, an intron sequence region, a first signal sequence region, a second signal sequence region, a tag sequence region, a PolyA sequence region, a filler sequence region, and a 3′ITR sequence region. As a non-limiting example, the viral genome comprises a 5′ITR sequence region, at least one promoter sequence region, an intron sequence region, a first signal sequence region, a second signal sequence region, a tag sequence region, a PolyA sequence region, and a 3′ITR sequence region. As a non-limiting example, the viral genome comprises a 5′ITR sequence region, at least one promoter sequence region, an intron sequence region, a first signal sequence region, a second signal sequence region, a PolyA sequence region, a filler sequence region, and a 3′ITR sequence region. As a non-limiting example, the viral genome comprises a 5′ITR sequence region, at least one promoter sequence region, an intron sequence region, a first signal sequence region, a second signal sequence region, a PolyA sequence region, and a 3′ITR sequence region. As a non-limiting example, the viral genome comprises a 5′ITR sequence region, at least one promoter sequence region, an intron sequence region, a first signal sequence region, a tag sequence region, a PolyA sequence region, a filler sequence region, and a 3′ITR sequence region. As a non-limiting example, the viral genome comprises a 5′ITR sequence region, at least one promoter sequence region, an intron sequence region, a first signal sequence region, a tag sequence region, a PolyA sequence region, and a 3′ITR sequence region. As a non-limiting example, the viral genome comprises a 5′ITR sequence region, at least one promoter sequence region, an intron sequence region, a first signal sequence region, a PolyA sequence region, a filler sequence region, and a 3′ITR sequence region. As a non-limiting example, the viral genome comprises a 5′ITR sequence region, at least one promoter sequence region, an intron sequence region, a first signal sequence region, a PolyA sequence region, and a 3′ITR sequence region. As a non-limiting example, the viral genome comprises a 5′ITR sequence region, at least one promoter sequence region, an intron sequence region, a first signal sequence region, a tag sequence region, a PolyA sequence region, a filler sequence region, and a 3′ITR sequence region. As a non-limiting example, the viral genome comprises a 5′ITR sequence region, at least one promoter sequence region, an intron sequence region, a first signal sequence region, a tag sequence region, a PolyA sequence region, and a 3′ITR sequence region. As a non-limiting example, the viral genome comprises a 5′ITR sequence region, at least one promoter sequence region, an intron sequence region, a first signal sequence region, a PolyA sequence region, a filler sequence region, and a 3′ITR sequence region. As a non-limiting example, the viral genome comprises a 5′ITR sequence region, at least one promoter sequence region, an intron sequence region, a first signal sequence region, a PolyA sequence region, and a 3′ITR sequence region. As a non-limiting example, the viral genome comprises a 5′ITR sequence region, at least one promoter sequence region, an intron sequence region, a first signal sequence region, a tag sequence region, a PolyA sequence region, a filler sequence region, and a 3′ITR sequence region. As a non-limiting example, the viral genome comprises a 5′ITR sequence region, at least one promoter sequence region, an intron sequence region, a first signal sequence region, a tag sequence region, a PolyA sequence region, and a 3′ITR sequence region. As a non-limiting example, the viral genome comprises a 5′ITR sequence region, at least one promoter sequence region, an intron sequence region, a first signal sequence region, a PolyA sequence region, a filler sequence region, and a 3′ITR sequence region. As a non-limiting example, the viral genome comprises a 5′ITR sequence region, at least one promoter sequence region, an intron sequence region, a first signal sequence region, a PolyA sequence region, and a 3′ITR sequence region. As a non-limiting example, the viral genome comprises a 5′ITR sequence region, at least one promoter sequence region, an intron sequence region, a first signal sequence region, a tag sequence region, a PolyA sequence region, a filler sequence region, and a 3′ITR sequence region. As a non-limiting example, the viral genome comprises a 5′ITR sequence region, at least one promoter sequence region, an intron sequence region, a first signal sequence region, a tag sequence region, a PolyA sequence region, and a 3′ITR sequence region. As a non-limiting example, the viral genome comprises a 5′ITR sequence region, at least one promoter sequence region, an intron sequence region, a first signal sequence region, a PolyA sequence region, a filler sequence region, and a 3′ITR sequence region. As a non-limiting example, the viral genome comprises a 5′ITR sequence region, at least one promoter sequence region, an intron sequence region, a first signal sequence region, a PolyA sequence region, and a 3′ITR sequence region. As a non-limiting example, the viral genome comprises a 5′ITR sequence region, at least one promoter sequence region, an intron sequence region, a first signal sequence region, at least one linker sequence region, a second signal sequence region, a tag sequence region, a PolyA sequence region, a filler sequence region, and a 3′ITR sequence region. As a non-limiting example, the viral genome comprises a 5′ITR sequence region, at least one promoter sequence region, an intron sequence region, a first signal sequence region, at least one linker sequence region, a second signal sequence region, a tag sequence region, a PolyA sequence region, and a 3′ITR sequence region. As a non-limiting example, the viral genome comprises a 5′ITR sequence region, at least one promoter sequence region, an intron sequence region, a first signal sequence region, at least one linker sequence region, a second signal sequence region, a PolyA sequence region, a filler sequence region, and a 3′ITR sequence region. As a non-limiting example, the viral genome comprises a 5′ITR sequence region, at least one promoter sequence region, an intron sequence region, a first signal sequence region, at least one linker sequence region, a second signal sequence region, a PolyA sequence region, and a 3′ITR sequence region. As a non-limiting example, the viral genome comprises a 5′ITR sequence region, at least one promoter sequence region, an intron sequence region, a first signal sequence region, at least one linker sequence region, a second signal sequence region, a tag sequence region, a PolyA sequence region, a filler sequence region, and a 3′ITR sequence region. As a non-limiting example, the viral genome comprises a 5′ITR sequence region, at least one promoter sequence region, an intron sequence region, a first signal sequence region, at least one linker sequence region, a second signal sequence region, a tag sequence region, a PolyA sequence region, and a 3′ITR sequence region. As a non-limiting example, the viral genome comprises a 5′ITR sequence region, at least one promoter sequence region, an intron sequence region, a first signal sequence region, at least one linker sequence region, a second signal sequence region, a PolyA sequence region, a filler sequence region, and a 3′ITR sequence region. As a non-limiting example, the viral genome comprises a 5′ITR sequence region, at least one promoter sequence region, an intron sequence region, a first signal sequence region, at least one linker sequence region, a second signal sequence region, a PolyA sequence region, and a 3′ITR sequence region. As a non-limiting example, the viral genome comprises a 5′ITR sequence region, at least one promoter sequence region, an intron sequence region, a first signal sequence region, at least one linker sequence region, a second signal sequence region, a tag sequence region, a PolyA sequence region, a filler sequence region, and a 3′ITR sequence region. As a non-limiting example, the viral genome comprises a 5′ITR sequence region, at least one promoter sequence region, an intron sequence region, a first signal sequence region, at least one linker sequence region, a second signal sequence region, a tag sequence region, a PolyA sequence region, and a 3′ITR sequence region. As a non-limiting example, the viral genome comprises a 5′ITR sequence region, at least one promoter sequence region, an intron sequence region, a first signal sequence region, at least one linker sequence region, a second signal sequence region, a PolyA sequence region, a filler sequence region, and a 3′ITR sequence region. As a non-limiting example, the viral genome comprises a 5′ITR sequence region, at least one promoter sequence region, an intron sequence region, a first signal sequence region, at least one linker sequence region, a second signal sequence region, a PolyA sequence region, and a 3′ITR sequence region. As a non-limiting example, the viral genome comprises a 5′ITR sequence region, at least one promoter sequence region, an intron sequence region, a first signal sequence region, at least one linker sequence region, a second signal sequence region, a tag sequence region, a PolyA sequence region, a filler sequence region, and a 3′ITR sequence region. As a non-limiting example, the viral genome comprises a 5′ITR sequence region, at least one promoter sequence region, an intron sequence region, a first signal sequence region, at least one linker sequence region, a second signal sequence region, a tag sequence region, a PolyA sequence region, and a 3′ITR sequence region. As a non-limiting example, the viral genome comprises a 5′ITR sequence region, at least one promoter sequence region, an intron sequence region, a first signal sequence region, at least one linker sequence region, a second signal sequence region, a PolyA sequence region, a filler sequence region, and a 3′ITR sequence region. As a non-limiting example, the viral genome comprises a 5′ITR sequence region, at least one promoter sequence region, an intron sequence region, a first signal sequence region, at least one linker sequence region, a second signal sequence region, a PolyA sequence region, and a 3′ITR sequence region. As a non-limiting example, the viral genome comprises a 5′ITR sequence region, at least one promoter sequence region, an intron sequence region, a first signal sequence region, at least one linker sequence region, a tag sequence region, a PolyA sequence region, a filler sequence region, and a 3′ITR sequence region. As a non-limiting example, the viral genome comprises a 5′ITR sequence region, at least one promoter sequence region, an intron sequence region, a first signal sequence region, at least one linker sequence region, a tag sequence region, a PolyA sequence region, and a 3′ITR sequence region. As a non-limiting example, the viral genome comprises a 5′ITR sequence region, at least one promoter sequence region, an intron sequence region, a first signal sequence region, at least one linker sequence region, a PolyA sequence region, a filler sequence region, and a 3′ITR sequence region. As a non-limiting example, the viral genome comprises a 5′ITR sequence region, at least one promoter sequence region, an intron sequence region, a first signal sequence region, at least one linker sequence region, a PolyA sequence region, and a 3′ITR sequence region. As a non-limiting example, the viral genome comprises a 5′ITR sequence region, at least one promoter sequence region, an intron sequence region, a first signal sequence region, at least one linker sequence region, a tag sequence region, a PolyA sequence region, a filler sequence region, and a 3′ITR sequence region. As a non-limiting example, the viral genome comprises a 5′ITR sequence region, at least one promoter sequence region, an intron sequence region, a first signal sequence region, at least one linker sequence region, a tag sequence region, a PolyA sequence region, and a 3′ITR sequence region. As a non-limiting example, the viral genome comprises a 5′ITR sequence region, at least one promoter sequence region, an intron sequence region, a first signal sequence region, at least one linker sequence region, a PolyA sequence region, a filler sequence region, and a 3′ITR sequence region. As a non-limiting example, the viral genome comprises a 5′ITR sequence region, at least one promoter sequence region, an intron sequence region, a first signal sequence region, at least one linker sequence region, a PolyA sequence region, and a 3′ITR sequence region. As a non-limiting example, the viral genome comprises a 5′ITR sequence region, at least one promoter sequence region, an intron sequence region, a first signal sequence region, at least one linker sequence region, a tag sequence region, a PolyA sequence region, a filler sequence region, and a 3′ITR sequence region. As a non-limiting example, the viral genome comprises a 5′ITR sequence region, at least one promoter sequence region, an intron sequence region, a first signal sequence region, at least one linker sequence region, a tag sequence region, a PolyA sequence region, and a 3′ITR sequence region. As a non-limiting example, the viral genome comprises a 5′ITR sequence region, at least one promoter sequence region, an intron sequence region, a first signal sequence region, at least one linker sequence region, a PolyA sequence region, a filler sequence region, and a 3′ITR sequence region. As a non-limiting example, the viral genome comprises a 5′ITR sequence region, at least one promoter sequence region, an intron sequence region, a first signal sequence region, at least one linker sequence region, a PolyA sequence region, and a 3′ITR sequence region. As a non-limiting example, the viral genome comprises a 5′ITR sequence region, at least one promoter sequence region, an intron sequence region, a first signal sequence region, at least one linker sequence region, a tag sequence region, a PolyA sequence region, a filler sequence region, and a 3′ITR sequence region. As a non-limiting example, the viral genome comprises a 5′ITR sequence region, at least one promoter sequence region, an intron sequence region, a first signal sequence region, at least one linker sequence region, a tag sequence region, a PolyA sequence region, and a 3′ITR sequence region. As a non-limiting example, the viral genome comprises a 5′ITR sequence region, at least one promoter sequence region, an intron sequence region, a first signal sequence region, at least one linker sequence region, a PolyA sequence region, a filler sequence region, and a 3′ITR sequence region. As a non-limiting example, the viral genome comprises a 5′ITR sequence region, at least one promoter sequence region, an intron sequence region, a first signal sequence region, at least one linker sequence region, a PolyA sequence region, and a 3′ITR sequence region. As a non-limiting example, the viral genome comprises a 5′ITR sequence region, at least one promoter sequence region, an intron sequence region, a first signal sequence region, a second signal sequence region, a tag sequence region, a PolyA sequence region, a filler sequence region, and a 3′ITR sequence region. As a non-limiting example, the viral genome comprises a 5′ITR sequence region, at least one promoter sequence region, an intron sequence region, a first signal sequence region, a second signal sequence region, a tag sequence region, a PolyA sequence region, and a 3′ITR sequence region. As a non-limiting example, the viral genome comprises a 5′ITR sequence region, at least one promoter sequence region, an intron sequence region, a first signal sequence region, a second signal sequence region, a PolyA sequence region, a filler sequence region, and a 3′ITR sequence region. As a non-limiting example, the viral genome comprises a 5′ITR sequence region, at least one promoter sequence region, an intron sequence region, a first signal sequence region, a second signal sequence region, a PolyA sequence region, and a 3′ITR sequence region. As a non-limiting example, the viral genome comprises a 5′ITR sequence region, at least one promoter sequence region, an intron sequence region, a first signal sequence region, a second signal sequence region, a tag sequence region, a PolyA sequence region, a filler sequence region, and a 3′ITR sequence region. As a non-limiting example, the viral genome comprises a 5′ITR sequence region, at least one promoter sequence region, an intron sequence region, a first signal sequence region, a second signal sequence region, a tag sequence region, a PolyA sequence region, and a 3′ITR sequence region. As a non-limiting example, the viral genome comprises a 5′ITR sequence region, at least one promoter sequence region, an intron sequence region, a first signal sequence region, a second signal sequence region, a PolyA sequence region, a filler sequence region, and a 3′ITR sequence region. As a non-limiting example, the viral genome comprises a 5′ITR sequence region, at least one promoter sequence region, an intron sequence region, a first signal sequence region, a second signal sequence region, a PolyA sequence region, and a 3′ITR sequence region. As a non-limiting example, the viral genome comprises a 5′ITR sequence region, at least one promoter sequence region, an intron sequence region, a first signal sequence region, a second signal sequence region, a tag sequence region, a PolyA sequence region, a filler sequence region, and a 3′ITR sequence region. As a non-limiting example, the viral genome comprises a 5′ITR sequence region, at least one promoter sequence region, an intron sequence region, a first signal sequence region, a second signal sequence region, a tag sequence region, a PolyA sequence region, and a 3′ITR sequence region. As a non-limiting example, the viral genome comprises a 5′ITR sequence region, at least one promoter sequence region, an intron sequence region, a first signal sequence region, a second signal sequence region, a PolyA sequence region, a filler sequence region, and a 3′ITR sequence region. As a non-limiting example, the viral genome comprises a 5′ITR sequence region, at least one promoter sequence region, an intron sequence region, a first signal sequence region, a second signal sequence region, a PolyA sequence region, and a 3′ITR sequence region. As a non-limiting example, the viral genome comprises a 5′ITR sequence region, at least one promoter sequence region, an intron sequence region, a first signal sequence region, a second signal sequence region, a tag sequence region, a PolyA sequence region, a filler sequence region, and a 3′ITR sequence region. As a non-limiting example, the viral genome comprises a 5′ITR sequence region, at least one promoter sequence region, an intron sequence region, a first signal sequence region, a second signal sequence region, a tag sequence region, a PolyA sequence region, and a 3′ITR sequence region. As a non-limiting example, the viral genome comprises a 5′ITR sequence region, at least one promoter sequence region, an intron sequence region, a first signal sequence region, a second signal sequence region, a PolyA sequence region, a filler sequence region, and a 3′ITR sequence region. As a non-limiting example, the viral genome comprises a 5′ITR sequence region, at least one promoter sequence region, an intron sequence region, a first signal sequence region, a second signal sequence region, a PolyA sequence region, and a 3′ITR sequence region. As a non-limiting example, the viral genome comprises a 5′ITR sequence region, at least one promoter sequence region, an intron sequence region, a first signal sequence region, a tag sequence region, a PolyA sequence region, a filler sequence region, and a 3′ITR sequence region. As a non-limiting example, the viral genome comprises a 5′ITR sequence region, at least one promoter sequence region, an intron sequence region, a first signal sequence region, a tag sequence region, a PolyA sequence region, and a 3′ITR sequence region. As a non-limiting example, the viral genome comprises a 5′ITR sequence region, at least one promoter sequence region, an intron sequence region, a first signal sequence region, a PolyA sequence region, a filler sequence region, and a 3′ITR sequence region. As a non-limiting example, the viral genome comprises a 5′ITR sequence region, at least one promoter sequence region, an intron sequence region, a first signal sequence region, a PolyA sequence region, and a 3′ITR sequence region. As a non-limiting example, the viral genome comprises a 5′ITR sequence region, at least one promoter sequence region, an intron sequence region, a first signal sequence region, a tag sequence region, a PolyA sequence region, a filler sequence region, and a 3′ITR sequence region. As a non-limiting example, the viral genome comprises a 5′ITR sequence region, at least one promoter sequence region, an intron sequence region, a first signal sequence region, a tag sequence region, a PolyA sequence region, and a 3′ITR sequence region. As a non-limiting example, the viral genome comprises a 5′ITR sequence region, at least one promoter sequence region, an intron sequence region, a first signal sequence region, a PolyA sequence region, a filler sequence region, and a 3′ITR sequence region. As a non-limiting example, the viral genome comprises a 5′ITR sequence region, at least one promoter sequence region, an intron sequence region, a first signal sequence region, a PolyA sequence region, and a 3′ITR sequence region. As a non-limiting example, the viral genome comprises a 5′ITR sequence region, at least one promoter sequence region, an intron sequence region, a first signal sequence region, a tag sequence region, a PolyA sequence region, a filler sequence region, and a 3′ITR sequence region. As a non-limiting example, the viral genome comprises a 5′ITR sequence region, at least one promoter sequence region, an intron sequence region, a first signal sequence region, a tag sequence region, a PolyA sequence region, and a 3′ITR sequence region. As a non-limiting example, the viral genome comprises a 5′ITR sequence region, at least one promoter sequence region, an intron sequence region, a first signal sequence region, a PolyA sequence region, a filler sequence region, and a 3′ITR sequence region. As a non-limiting example, the viral genome comprises a 5′ITR sequence region, at least one promoter sequence region, an intron sequence region, a first signal sequence region, a PolyA sequence region, and a 3′ITR sequence region. As a non-limiting example, the viral genome comprises a 5′ITR sequence region, at least one promoter sequence region, an intron sequence region, a first signal sequence region, a tag sequence region, a PolyA sequence region, a filler sequence region, and a 3′ITR sequence region. As a non-limiting example, the viral genome comprises a 5′ITR sequence region, at least one promoter sequence region, an intron sequence region, a first signal sequence region, a tag sequence region, a PolyA sequence region, and a 3′ITR sequence region. As a non-limiting example, the viral genome comprises a 5′ITR sequence region, at least one promoter sequence region, an intron sequence region, a first signal sequence region, a PolyA sequence region, a filler sequence region, and a 3′ITR sequence region. As a non-limiting example, the viral genome comprises a 5′ITR sequence region, at least one promoter sequence region, an intron sequence region, a first signal sequence region, a PolyA sequence region, and a 3′ITR sequence region. As a non-limiting example, the viral genome comprises a 5′ITR sequence region, at least one promoter sequence region, an intron sequence region, at least one linker sequence region, a first signal sequence region, a tag sequence region, a PolyA sequence region, a filler sequence region, and a 3′ITR sequence region. As a non-limiting example, the viral genome comprises a 5′ITR sequence region, at least one promoter sequence region, an intron sequence region, at least one linker sequence region, a first signal sequence region, a tag sequence region, a PolyA sequence region, and a 3′ITR sequence region. As a non-limiting example, the viral genome comprises a 5′ITR sequence region, at least one promoter sequence region, an intron sequence region, at least one linker sequence region, a first signal sequence region, a PolyA sequence region, a filler sequence region, and a 3′ITR sequence region. As a non-limiting example, the viral genome comprises a 5′ITR sequence region, at least one promoter sequence region, an intron sequence region, at least one linker sequence region, a first signal sequence region, a PolyA sequence region, and a 3′ITR sequence region. As a non-limiting example, the viral genome comprises a 5′ITR sequence region, at least one promoter sequence region, an intron sequence region, at least one linker sequence region, a first signal sequence region, a tag sequence region, a PolyA sequence region, a filler sequence region, and a 3′ITR sequence region. As a non-limiting example, the viral genome comprises a 5′ITR sequence region, at least one promoter sequence region, an intron sequence region, at least one linker sequence region, a first signal sequence region, a tag sequence region, a PolyA sequence region, and a 3′ITR sequence region. As a non-limiting example, the viral genome comprises a 5′ITR sequence region, at least one promoter sequence region, an intron sequence region, at least one linker sequence region, a first signal sequence region, a PolyA sequence region, a filler sequence region, and a 3′ITR sequence region. As a non-limiting example, the viral genome comprises a 5′ITR sequence region, at least one promoter sequence region, an intron sequence region, at least one linker sequence region, a first signal sequence region, a PolyA sequence region, and a 3′ITR sequence region. As a non-limiting example, the viral genome comprises a 5′ITR sequence region, at least one promoter sequence region, an intron sequence region, at least one linker sequence region, a first signal sequence region, a tag sequence region, a PolyA sequence region, a filler sequence region, and a 3′ITR sequence region. As a non-limiting example, the viral genome comprises a 5′ITR sequence region, at least one promoter sequence region, an intron sequence region, at least one linker sequence region, a first signal sequence region, a tag sequence region, a PolyA sequence region, and a 3′ITR sequence region. As a non-limiting example, the viral genome comprises a 5′ITR sequence region, at least one promoter sequence region, an intron sequence region, at least one linker sequence region, a first signal sequence region, a PolyA sequence region, a filler sequence region, and a 3′ITR sequence region. As a non-limiting example, the viral genome comprises a 5′ITR sequence region, at least one promoter sequence region, an intron sequence region, at least one linker sequence region, a first signal sequence region, a PolyA sequence region, and a 3′ITR sequence region. As a non-limiting example, the viral genome comprises a 5′ITR sequence region, at least one promoter sequence region, an intron sequence region, at least one linker sequence region, a first signal sequence region, a tag sequence region, a PolyA sequence region, a filler sequence region, and a 3′ITR sequence region. As a non-limiting example, the viral genome comprises a 5′ITR sequence region, at least one promoter sequence region, an intron sequence region, at least one linker sequence region, a first signal sequence region, a tag sequence region, a PolyA sequence region, and a 3′ITR sequence region. As a non-limiting example, the viral genome comprises a 5′ITR sequence region, at least one promoter sequence region, an intron sequence region, at least one linker sequence region, a first signal sequence region, a PolyA sequence region, a filler sequence region, and a 3′ITR sequence region. As a non-limiting example, the viral genome comprises a 5′ITR sequence region, at least one promoter sequence region, an intron sequence region, at least one linker sequence region, a first signal sequence region, a PolyA sequence region, and a 3′ITR sequence region. As a non-limiting example, the viral genome comprises a 5′ITR sequence region, at least one promoter sequence region, an intron sequence region, at least one linker sequence region, a tag sequence region, a PolyA sequence region, a filler sequence region, and a 3′ITR sequence region. As a non-limiting example, the viral genome comprises a 5′ITR sequence region, at least one promoter sequence region, an intron sequence region, at least one linker sequence region, a tag sequence region, a PolyA sequence region, and a 3′ITR sequence region. As a non-limiting example, the viral genome comprises a 5′ITR sequence region, at least one promoter sequence region, an intron sequence region, at least one linker sequence region, a PolyA sequence region, a filler sequence region, and a 3′ITR sequence region. As a non-limiting example, the viral genome comprises a 5′ITR sequence region, at least one promoter sequence region, an intron sequence region, at least one linker sequence region, a PolyA sequence region, and a 3′ITR sequence region. As a non-limiting example, the viral genome comprises a 5′ITR sequence region, at least one promoter sequence region, an intron sequence region, at least one linker sequence region, a tag sequence region, a PolyA sequence region, a filler sequence region, and a 3′ITR sequence region. As a non-limiting example, the viral genome comprises a 5′ITR sequence region, at least one promoter sequence region, an intron sequence region, at least one linker sequence region, a tag sequence region, a PolyA sequence region, and a 3′ITR sequence region. As a non-limiting example, the viral genome comprises a 5′ITR sequence region, at least one promoter sequence region, an intron sequence region, at least one linker sequence region, a PolyA sequence region, a filler sequence region, and a 3′ITR sequence region. As a non-limiting example, the viral genome comprises a 5′ITR sequence region, at least one promoter sequence region, an intron sequence region, at least one linker sequence region, a PolyA sequence region, and a 3′ITR sequence region. As a non-limiting example, the viral genome comprises a 5′ITR sequence region, at least one promoter sequence region, an intron sequence region, at least one linker sequence region, a tag sequence region, a PolyA sequence region, a filler sequence region, and a 3′ITR sequence region. As a non-limiting example, the viral genome comprises a 5′ITR sequence region, at least one promoter sequence region, an intron sequence region, at least one linker sequence region, a tag sequence region, a PolyA sequence region, and a 3′ITR sequence region. As a non-limiting example, the viral genome comprises a 5′ITR sequence region, at least one promoter sequence region, an intron sequence region, at least one linker sequence region, a PolyA sequence region, a filler sequence region, and a 3′ITR sequence region. As a non-limiting example, the viral genome comprises a 5′ITR sequence region, at least one promoter sequence region, an intron sequence region, at least one linker sequence region, a PolyA sequence region, and a 3′ITR sequence region. As a non-limiting example, the viral genome comprises a 5′ITR sequence region, at least one promoter sequence region, an intron sequence region, at least one linker sequence region, a tag sequence region, a PolyA sequence region, a filler sequence region, and a 3′ITR sequence region. As a non-limiting example, the viral genome comprises a 5′ITR sequence region, at least one promoter sequence region, an intron sequence region, at least one linker sequence region, a tag sequence region, a PolyA sequence region, and a 3′ITR sequence region. As a non-limiting example, the viral genome comprises a 5′ITR sequence region, at least one promoter sequence region, an intron sequence region, at least one linker sequence region, a PolyA sequence region, a filler sequence region, and a 3′ITR sequence region. As a non-limiting example, the viral genome comprises a 5′ITR sequence region, at least one promoter sequence region, an intron sequence region, at least one linker sequence region, a PolyA sequence region, and a 3′ITR sequence region. As a non-limiting example, the viral genome comprises a 5′ITR sequence region, at least one promoter sequence region, an intron sequence region, a first signal sequence region, a tag sequence region, a PolyA sequence region, a filler sequence region, and a 3′ITR sequence region. As a non-limiting example, the viral genome comprises a 5′ITR sequence region, at least one promoter sequence region, an intron sequence region, a first signal sequence region, a tag sequence region, a PolyA sequence region, and a 3′ITR sequence region. As a non-limiting example, the viral genome comprises a 5′ITR sequence region, at least one promoter sequence region, an intron sequence region, a first signal sequence region, a PolyA sequence region, a filler sequence region, and a 3′ITR sequence region. As a non-limiting example, the viral genome comprises a 5′ITR sequence region, at least one promoter sequence region, an intron sequence region, a first signal sequence region, a PolyA sequence region, and a 3′ITR sequence region. As a non-limiting example, the viral genome comprises a 5′ITR sequence region, at least one promoter sequence region, an intron sequence region, a first signal sequence region, a tag sequence region, a PolyA sequence region, a filler sequence region, and a 3′ITR sequence region. As a non-limiting example, the viral genome comprises a 5′ITR sequence region, at least one promoter sequence region, an intron sequence region, a first signal sequence region, a tag sequence region, a PolyA sequence region, and a 3′ITR sequence region. As a non-limiting example, the viral genome comprises a 5′ITR sequence region, at least one promoter sequence region, an intron sequence region, a first signal sequence region, a PolyA sequence region, a filler sequence region, and a 3′ITR sequence region. As a non-limiting example, the viral genome comprises a 5′ITR sequence region, at least one promoter sequence region, an intron sequence region, a first signal sequence region, a PolyA sequence region, and a 3′ITR sequence region. As a non-limiting example, the viral genome comprises a 5′ITR sequence region, at least one promoter sequence region, an intron sequence region, a first signal sequence region, a tag sequence region, a PolyA sequence region, a filler sequence region, and a 3′ITR sequence region. As a non-limiting example, the viral genome comprises a 5′ITR sequence region, at least one promoter sequence region, an intron sequence region, a first signal sequence region, a tag sequence region, a PolyA sequence region, and a 3′ITR sequence region. As a non-limiting example, the viral genome comprises a 5′ITR sequence region, at least one promoter sequence region, an intron sequence region, a first signal sequence region, a PolyA sequence region, a filler sequence region, and a 3′ITR sequence region. As a non-limiting example, the viral genome comprises a 5′ITR sequence region, at least one promoter sequence region, an intron sequence region, a first signal sequence region, a PolyA sequence region, and a 3′ITR sequence region. As a non-limiting example, the viral genome comprises a 5′ITR sequence region, at least one promoter sequence region, an intron sequence region, a first signal sequence region, a tag sequence region, a PolyA sequence region, a filler sequence region, and a 3′ITR sequence region. As a non-limiting example, the viral genome comprises a 5′ITR sequence region, at least one promoter sequence region, an intron sequence region, a first signal sequence region, a tag sequence region, a PolyA sequence region, and a 3′ITR sequence region. As a non-limiting example, the viral genome comprises a 5′ITR sequence region, at least one promoter sequence region, an intron sequence region, a first signal sequence region, a PolyA sequence region, a filler sequence region, and a 3′ITR sequence region. As a non-limiting example, the viral genome comprises a 5′ITR sequence region, at least one promoter sequence region, an intron sequence region, a first signal sequence region, a PolyA sequence region, and a 3′ITR sequence region. As a non-limiting example, the viral genome comprises a 5′ITR sequence region, at least one promoter sequence region, an intron sequence region, a tag sequence region, a PolyA sequence region, a filler sequence region, and a 3′ITR sequence region. As a non-limiting example, the viral genome comprises a 5′ITR sequence region, at least one promoter sequence region, an intron sequence region, a tag sequence region, a PolyA sequence region, and a 3′ITR sequence region. As a non-limiting example, the viral genome comprises a 5′ITR sequence region, at least one promoter sequence region, an intron sequence region, a PolyA sequence region, a filler sequence region, and a 3′ITR sequence region. As a non-limiting example, the viral genome comprises a 5′ITR sequence region, at least one promoter sequence region, an intron sequence region, a PolyA sequence region, and a 3′ITR sequence region. As a non-limiting example, the viral genome comprises a 5′ITR sequence region, at least one promoter sequence region, an intron sequence region, a tag sequence region, a PolyA sequence region, a filler sequence region, and a 3′ITR sequence region. As a non-limiting example, the viral genome comprises a 5′ITR sequence region, at least one promoter sequence region, an intron sequence region, a tag sequence region, a PolyA sequence region, and a 3′ITR sequence region. As a non-limiting example, the viral genome comprises a 5′ITR sequence region, at least one promoter sequence region, an intron sequence region, a PolyA sequence region, a filler sequence region, and a 3′ITR sequence region. As a non-limiting example, the viral genome comprises a 5′ITR sequence region, at least one promoter sequence region, an intron sequence region, a PolyA sequence region, and a 3′ITR sequence region. As a non-limiting example, the viral genome comprises a 5′ITR sequence region, at least one promoter sequence region, an intron sequence region, a tag sequence region, a PolyA sequence region, a filler sequence region, and a 3′ITR sequence region. As a non-limiting example, the viral genome comprises a 5′ITR sequence region, at least one promoter sequence region, an intron sequence region, a tag sequence region, a PolyA sequence region, and a 3′ITR sequence region. As a non-limiting example, the viral genome comprises a 5′ITR sequence region, at least one promoter sequence region, an intron sequence region, a PolyA sequence region, a filler sequence region, and a 3′ITR sequence region. As a non-limiting example, the viral genome comprises a 5′ITR sequence region, at least one promoter sequence region, an intron sequence region, a PolyA sequence region, and a 3′ITR sequence region. As a non-limiting example, the viral genome comprises a 5′ITR sequence region, at least one promoter sequence region, an intron sequence region, a tag sequence region, a PolyA sequence region, a filler sequence region, and a 3′ITR sequence region. As a non-limiting example, the viral genome comprises a 5′ITR sequence region, at least one promoter sequence region, an intron sequence region, a tag sequence region, a PolyA sequence region, and a 3′ITR sequence region. As a non-limiting example, the viral genome comprises a 5′ITR sequence region, at least one promoter sequence region, an intron sequence region, a PolyA sequence region, a filler sequence region, and a 3′ITR sequence region. As a non-limiting example, the viral genome comprises a 5′ITR sequence region, at least one promoter sequence region, an intron sequence region, a PolyA sequence region, and a 3′ITR sequence region. As a non-limiting example, the viral genome comprises a 5′ITR sequence region, at least one promoter sequence region, an intron sequence region, at least one linker sequence region, a first signal sequence region, a tag sequence region, a PolyA sequence region, a filler sequence region, and a 3′ITR sequence region. As a non-limiting example, the viral genome comprises a 5′ITR sequence region, at least one promoter sequence region, an intron sequence region, at least one linker sequence region, a first signal sequence region, a tag sequence region, a PolyA sequence region, and a 3′ITR sequence region. As a non-limiting example, the viral genome comprises a 5′ITR sequence region, at least one promoter sequence region, an intron sequence region, at least one linker sequence region, a first signal sequence region, a PolyA sequence region, a filler sequence region, and a 3′ITR sequence region. As a non-limiting example, the viral genome comprises a 5′ITR sequence region, at least one promoter sequence region, an intron sequence region, at least one linker sequence region, a first signal sequence region, a PolyA sequence region, and a 3′ITR sequence region. As a non-limiting example, the viral genome comprises a 5′ITR sequence region, at least one promoter sequence region, an intron sequence region, at least one linker sequence region, a first signal sequence region, a tag sequence region, a PolyA sequence region, a filler sequence region, and a 3′ITR sequence region. As a non-limiting example, the viral genome comprises a 5′ITR sequence region, at least one promoter sequence region, an intron sequence region, at least one linker sequence region, a first signal sequence region, a tag sequence region, a PolyA sequence region, and a 3′ITR sequence region. As a non-limiting example, the viral genome comprises a 5′ITR sequence region, at least one promoter sequence region, an intron sequence region, at least one linker sequence region, a first signal sequence region, a PolyA sequence region, a filler sequence region, and a 3′ITR sequence region. As a non-limiting example, the viral genome comprises a 5′ITR sequence region, at least one promoter sequence region, an intron sequence region, at least one linker sequence region, a first signal sequence region, a PolyA sequence region, and a 3′ITR sequence region. As a non-limiting example, the viral genome comprises a 5′ITR sequence region, at least one promoter sequence region, an intron sequence region, at least one linker sequence region, a first signal sequence region, a tag sequence region, a PolyA sequence region, a filler sequence region, and a 3′ITR sequence region. As a non-limiting example, the viral genome comprises a 5′ITR sequence region, at least one promoter sequence region, an intron sequence region, at least one linker sequence region, a first signal sequence region, a tag sequence region, a PolyA sequence region, and a 3′ITR sequence region. As a non-limiting example, the viral genome comprises a 5′ITR sequence region, at least one promoter sequence region, an intron sequence region, at least one linker sequence region, a first signal sequence region, a PolyA sequence region, a filler sequence region, and a 3′ITR sequence region. As a non-limiting example, the viral genome comprises a 5′ITR sequence region, at least one promoter sequence region, an intron sequence region, at least one linker sequence region, a first signal sequence region, a PolyA sequence region, and a 3′ITR sequence region. As a non-limiting example, the viral genome comprises a 5′ITR sequence region, at least one promoter sequence region, an intron sequence region, at least one linker sequence region, a first signal sequence region, a tag sequence region, a PolyA sequence region, a filler sequence region, and a 3′ITR sequence region. As a non-limiting example, the viral genome comprises a 5′ITR sequence region, at least one promoter sequence region, an intron sequence region, at least one linker sequence region, a first signal sequence region, a tag sequence region, a PolyA sequence region, and a 3′ITR sequence region. As a non-limiting example, the viral genome comprises a 5′ITR sequence region, at least one promoter sequence region, an intron sequence region, at least one linker sequence region, a first signal sequence region, a PolyA sequence region, a filler sequence region, and a 3′ITR sequence region. As a non-limiting example, the viral genome comprises a 5′ITR sequence region, at least one promoter sequence region, an intron sequence region, at least one linker sequence region, a first signal sequence region, a PolyA sequence region, and a 3′ITR sequence region. As a non-limiting example, the viral genome comprises a 5′ITR sequence region, at least one promoter sequence region, an intron sequence region, at least one linker sequence region, a tag sequence region, a PolyA sequence region, a filler sequence region, and a 3′ITR sequence region. As a non-limiting example, the viral genome comprises a 5′ITR sequence region, at least one promoter sequence region, an intron sequence region, at least one linker sequence region, a tag sequence region, a PolyA sequence region, and a 3′ITR sequence region. As a non-limiting example, the viral genome comprises a 5′ITR sequence region, at least one promoter sequence region, an intron sequence region, at least one linker sequence region, a PolyA sequence region, a filler sequence region, and a 3′ITR sequence region. As a non-limiting example, the viral genome comprises a 5′ITR sequence region, at least one promoter sequence region, an intron sequence region, at least one linker sequence region, a PolyA sequence region, and a 3′ITR sequence region. As a non-limiting example, the viral genome comprises a 5′ITR sequence region, at least one promoter sequence region, an intron sequence region, at least one linker sequence region, a tag sequence region, a PolyA sequence region, a filler sequence region, and a 3′ITR sequence region. As a non-limiting example, the viral genome comprises a 5′ITR sequence region, at least one promoter sequence region, an intron sequence region, at least one linker sequence region, a tag sequence region, a PolyA sequence region, and a 3′ITR sequence region. As a non-limiting example, the viral genome comprises a 5′ITR sequence region, at least one promoter sequence region, an intron sequence region, at least one linker sequence region, a PolyA sequence region, a filler sequence region, and a 3′ITR sequence region. As a non-limiting example, the viral genome comprises a 5′ITR sequence region, at least one promoter sequence region, an intron sequence region, at least one linker sequence region, a PolyA sequence region, and a 3′ITR sequence region. As a non-limiting example, the viral genome comprises a 5′ITR sequence region, at least one promoter sequence region, an intron sequence region, at least one linker sequence region, a tag sequence region, a PolyA sequence region, a filler sequence region, and a 3′ITR sequence region. As a non-limiting example, the viral genome comprises a 5′ITR sequence region, at least one promoter sequence region, an intron sequence region, at least one linker sequence region, a tag sequence region, a PolyA sequence region, and a 3′ITR sequence region. As a non-limiting example, the viral genome comprises a 5′ITR sequence region, at least one promoter sequence region, an intron sequence region, at least one linker sequence region, a PolyA sequence region, a filler sequence region, and a 3′ITR sequence region. As a non-limiting example, the viral genome comprises a 5′ITR sequence region, at least one promoter sequence region, an intron sequence region, at least one linker sequence region, a PolyA sequence region, and a 3′ITR sequence region. As a non-limiting example, the viral genome comprises a 5′ITR sequence region, at least one promoter sequence region, an intron sequence region, at least one linker sequence region, a tag sequence region, a PolyA sequence region, a filler sequence region, and a 3′ITR sequence region. As a non-limiting example, the viral genome comprises a 5′ITR sequence region, at least one promoter sequence region, an intron sequence region, at least one linker sequence region, a tag sequence region, a PolyA sequence region, and a 3′ITR sequence region. As a non-limiting example, the viral genome comprises a 5′ITR sequence region, at least one promoter sequence region, an intron sequence region, at least one linker sequence region, a PolyA sequence region, a filler sequence region, and a 3′ITR sequence region. As a non-limiting example, the viral genome comprises a 5′ITR sequence region, at least one promoter sequence region, an intron sequence region, at least one linker sequence region, a PolyA sequence region, and a 3′ITR sequence region. As a non-limiting example, the viral genome comprises a 5′ITR sequence region, at least one promoter sequence region, an intron sequence region, a first signal sequence region, a tag sequence region, a PolyA sequence region, a filler sequence region, and a 3′ITR sequence region. As a non-limiting example, the viral genome comprises a 5′ITR sequence region, at least one promoter sequence region, an intron sequence region, a first signal sequence region, a tag sequence region, a PolyA sequence region, and a 3′ITR sequence region. As a non-limiting example, the viral genome comprises a 5′ITR sequence region, at least one promoter sequence region, an intron sequence region, a first signal sequence region, a PolyA sequence region, a filler sequence region, and a 3′ITR sequence region. As a non-limiting example, the viral genome comprises a 5′ITR sequence region, at least one promoter sequence region, an intron sequence region, a first signal sequence region, a PolyA sequence region, and a 3′ITR sequence region. As a non-limiting example, the viral genome comprises a 5′ITR sequence region, at least one promoter sequence region, an intron sequence region, a first signal sequence region, a tag sequence region, a PolyA sequence region, a filler sequence region, and a 3′ITR sequence region. As a non-limiting example, the viral genome comprises a 5′ITR sequence region, at least one promoter sequence region, an intron sequence region, a first signal sequence region, a tag sequence region, a PolyA sequence region, and a 3′ITR sequence region. As a non-limiting example, the viral genome comprises a 5′ITR sequence region, at least one promoter sequence region, an intron sequence region, a first signal sequence region, a PolyA sequence region, a filler sequence region, and a 3′ITR sequence region. As a non-limiting example, the viral genome comprises a 5′ITR sequence region, at least one promoter sequence region, an intron sequence region, a first signal sequence region, a PolyA sequence region, and a 3′ITR sequence region. As a non-limiting example, the viral genome comprises a 5′ITR sequence region, at least one promoter sequence region, an intron sequence region, a first signal sequence region, a tag sequence region, a PolyA sequence region, a filler sequence region, and a 3′ITR sequence region. As a non-limiting example, the viral genome comprises a 5′ITR sequence region, at least one promoter sequence region, an intron sequence region, a first signal sequence region, a tag sequence region, a PolyA sequence region, and a 3′ITR sequence region. As a non-limiting example, the viral genome comprises a 5′ITR sequence region, at least one promoter sequence region, an intron sequence region, a first signal sequence region, a PolyA sequence region, a filler sequence region, and a 3′ITR sequence region. As a non-limiting example, the viral genome comprises a 5′ITR sequence region, at least one promoter sequence region, an intron sequence region, a first signal sequence region, a PolyA sequence region, and a 3′ITR sequence region. As a non-limiting example, the viral genome comprises a 5′ITR sequence region, at least one promoter sequence region, an intron sequence region, a first signal sequence region, a tag sequence region, a PolyA sequence region, a filler sequence region, and a 3′ITR sequence region. As a non-limiting example, the viral genome comprises a 5′ITR sequence region, at least one promoter sequence region, an intron sequence region, a first signal sequence region, a tag sequence region, a PolyA sequence region, and a 3′ITR sequence region. As a non-limiting example, the viral genome comprises a 5′ITR sequence region, at least one promoter sequence region, an intron sequence region, a first signal sequence region, a PolyA sequence region, a filler sequence region, and a 3′ITR sequence region. As a non-limiting example, the viral genome comprises a 5′ITR sequence region, at least one promoter sequence region, an intron sequence region, a first signal sequence region, a PolyA sequence region, and a 3′ITR sequence region. As a non-limiting example, the viral genome comprises a 5′ITR sequence region, at least one promoter sequence region, an intron sequence region, a tag sequence region, a PolyA sequence region, a filler sequence region, and a 3′ITR sequence region. As a non-limiting example, the viral genome comprises a 5′ITR sequence region, at least one promoter sequence region, an intron sequence region, a tag sequence region, a PolyA sequence region, and a 3′ITR sequence region. As a non-limiting example, the viral genome comprises a 5′ITR sequence region, at least one promoter sequence region, an intron sequence region, a PolyA sequence region, a filler sequence region, and a 3′ITR sequence region. As a non-limiting example, the viral genome comprises a 5′ITR sequence region, at least one promoter sequence region, an intron sequence region, a PolyA sequence region, and a 3′ITR sequence region. As a non-limiting example, the viral genome comprises a 5′ITR sequence region, at least one promoter sequence region, an intron sequence region, a tag sequence region, a PolyA sequence region, a filler sequence region, and a 3′ITR sequence region. As a non-limiting example, the viral genome comprises a 5′ITR sequence region, at least one promoter sequence region, an intron sequence region, a tag sequence region, a PolyA sequence region, and a 3′ITR sequence region. As a non-limiting example, the viral genome comprises a 5′ITR sequence region, at least one promoter sequence region, an intron sequence region, a PolyA sequence region, a filler sequence region, and a 3′ITR sequence region. As a non-limiting example, the viral genome comprises a 5′ITR sequence region, at least one promoter sequence region, an intron sequence region, a PolyA sequence region, and a 3′ITR sequence region. As a non-limiting example, the viral genome comprises a 5′ITR sequence region, at least one promoter sequence region, an intron sequence region, a tag sequence region, a PolyA sequence region, a filler sequence region, and a 3′ITR sequence region. As a non-limiting example, the viral genome comprises a 5′ITR sequence region, at least one promoter sequence region, an intron sequence region, a tag sequence region, a PolyA sequence region, and a 3′ITR sequence region. As a non-limiting example, the viral genome comprises a 5′ITR sequence region, at least one promoter sequence region, an intron sequence region, a PolyA sequence region, a filler sequence region, and a 3′ITR sequence region. As a non-limiting example, the viral genome comprises a 5′ITR sequence region, at least one promoter sequence region, an intron sequence region, a PolyA sequence region, and a 3′ITR sequence region. As a non-limiting example, the viral genome comprises a 5′ITR sequence region, at least one promoter sequence region, an intron sequence region, a tag sequence region, a PolyA sequence region, a filler sequence region, and a 3′ITR sequence region. As a non-limiting example, the viral genome comprises a 5′ITR sequence region, at least one promoter sequence region, an intron sequence region, a tag sequence region, a PolyA sequence region, and a 3′ITR sequence region. As a non-limiting example, the viral genome comprises a 5′ITR sequence region, at least one promoter sequence region, an intron sequence region, a PolyA sequence region, a filler sequence region, and a 3′ITR sequence region. As a non-limiting example, the viral genome comprises a 5′ITR sequence region, at least one promoter sequence region, an intron sequence region, a PolyA sequence region, and a 3′ITR sequence region. As a non-limiting example, the viral genome comprises a 5′ITR sequence region, at least one promoter sequence region, a first signal sequence region, at least one linker sequence region, a second signal sequence region, a tag sequence region, a PolyA sequence region, a filler sequence region, and a 3′ITR sequence region. As a non-limiting example, the viral genome comprises a 5′ITR sequence region, at least one promoter sequence region, a first signal sequence region, at least one linker sequence region, a second signal sequence region, a tag sequence region, a PolyA sequence region, and a 3′ITR sequence region. As a non-limiting example, the viral genome comprises a 5′ITR sequence region, at least one promoter sequence region, a first signal sequence region, at least one linker sequence region, a second signal sequence region, a PolyA sequence region, a filler sequence region, and a 3′ITR sequence region. As a non-limiting example, the viral genome comprises a 5′ITR sequence region, at least one promoter sequence region, a first signal sequence region, at least one linker sequence region, a second signal sequence region, a PolyA sequence region, and a 3′ITR sequence region. As a non-limiting example, the viral genome comprises a 5′ITR sequence region, at least one promoter sequence region, a first signal sequence region, at least one linker sequence region, a second signal sequence region, a tag sequence region, a PolyA sequence region, a filler sequence region, and a 3′ITR sequence region. As a non-limiting example, the viral genome comprises a 5′ITR sequence region, at least one promoter sequence region, a first signal sequence region, at least one linker sequence region, a second signal sequence region, a tag sequence region, a PolyA sequence region, and a 3′ITR sequence region. As a non-limiting example, the viral genome comprises a 5′ITR sequence region, at least one promoter sequence region, a first signal sequence region, at least one linker sequence region, a second signal sequence region, a PolyA sequence region, a filler sequence region, and a 3′ITR sequence region. As a non-limiting example, the viral genome comprises a 5′ITR sequence region, at least one promoter sequence region, a first signal sequence region, at least one linker sequence region, a second signal sequence region, a PolyA sequence region, and a 3′ITR sequence region. As a non-limiting example, the viral genome comprises a 5′ITR sequence region, at least one promoter sequence region, a first signal sequence region, at least one linker sequence region, a second signal sequence region, a tag sequence region, a PolyA sequence region, a filler sequence region, and a 3′ITR sequence region. As a non-limiting example, the viral genome comprises a 5′ITR sequence region, at least one promoter sequence region, a first signal sequence region, at least one linker sequence region, a second signal sequence region, a tag sequence region, a PolyA sequence region, and a 3′ITR sequence region. As a non-limiting example, the viral genome comprises a 5′ITR sequence region, at least one promoter sequence region, a first signal sequence region, at least one linker sequence region, a second signal sequence region, a PolyA sequence region, a filler sequence region, and a 3′ITR sequence region. As a non-limiting example, the viral genome comprises a 5′ITR sequence region, at least one promoter sequence region, a first signal sequence region, at least one linker sequence region, a second signal sequence region, a PolyA sequence region, and a 3′ITR sequence region. As a non-limiting example, the viral genome comprises a 5′ITR sequence region, at least one promoter sequence region, a first signal sequence region, at least one linker sequence region, a second signal sequence region, a tag sequence region, a PolyA sequence region, a filler sequence region, and a 3′ITR sequence region. As a non-limiting example, the viral genome comprises a 5′ITR sequence region, at least one promoter sequence region, a first signal sequence region, at least one linker sequence region, a second signal sequence region, a PolyA sequence region, and a 3′ITR sequence region. As a non-limiting example, the viral genome comprises a 5′ITR sequence region, at least one promoter sequence region, a first signal sequence region, at least one linker sequence region, a tag sequence region, a PolyA sequence region, a filler sequence region, and a 3′ITR sequence region. As a non-limiting example, the viral genome comprises a 5′ITR sequence region, at least one promoter sequence region, a first signal sequence region, at least one linker sequence region, a tag sequence region, a PolyA sequence region, and a 3′ITR sequence region. As a non-limiting example, the viral genome comprises a 5′ITR sequence region, at least one promoter sequence region, a first signal sequence region, at least one linker sequence region, a PolyA sequence region, a filler sequence region, and a 3′ITR sequence region. As a non-limiting example, the viral genome comprises a 5′ITR sequence region, at least one promoter sequence region, a first signal sequence region, at least one linker sequence region, a PolyA sequence region, and a 3′ITR sequence region. As a non-limiting example, the viral genome comprises a 5′ITR sequence region, at least one promoter sequence region, a first signal sequence region, at least one linker sequence region, a tag sequence region, a PolyA sequence region, a filler sequence region, and a 3′ITR sequence region. As a non-limiting example, the viral genome comprises a 5′ITR sequence region, at least one promoter sequence region, a first signal sequence region, at least one linker sequence region, a tag sequence region, a PolyA sequence region, and a 3′ITR sequence region. As a non-limiting example, the viral genome comprises a 5′ITR sequence region, at least one promoter sequence region, a first signal sequence region, at least one linker sequence region, a PolyA sequence region, a filler sequence region, and a 3′ITR sequence region. As a non-limiting example, the viral genome comprises a 5′ITR sequence region, at least one promoter sequence region, a first signal sequence region, at least one linker sequence region, a PolyA sequence region, and a 3′ITR sequence region. As a non-limiting example, the viral genome comprises a 5′ITR sequence region, at least one promoter sequence region, a first signal sequence region, at least one linker sequence region, a tag sequence region, a PolyA sequence region, a filler sequence region, and a 3′ITR sequence region. As a non-limiting example, the viral genome comprises a 5′ITR sequence region, at least one promoter sequence region, a first signal sequence region, at least one linker sequence region, a tag sequence region, a PolyA sequence region, and a 3′ITR sequence region. As a non-limiting example, the viral genome comprises a 5′ITR sequence region, at least one promoter sequence region, a first signal sequence region, at least one linker sequence region, a PolyA sequence region, a filler sequence region, and a 3′ITR sequence region. As a non-limiting example, the viral genome comprises a 5′ITR sequence region, at least one promoter sequence region, a first signal sequence region, at least one linker sequence region, a PolyA sequence region, and a 3′ITR sequence region. As a non-limiting example, the viral genome comprises a 5′ITR sequence region, at least one promoter sequence region, a first signal sequence region, at least one linker sequence region, a tag sequence region, a PolyA sequence region, a filler sequence region, and a 3′ITR sequence region. As a non-limiting example, the viral genome comprises a 5′ITR sequence region, at least one promoter sequence region, a first signal sequence region, at least one linker sequence region, a tag sequence region, a PolyA sequence region, and a 3′ITR sequence region. As a non-limiting example, the viral genome comprises a 5′ITR sequence region, at least one promoter sequence region, a first signal sequence region, at least one linker sequence region, a PolyA sequence region, a filler sequence region, and a 3′ITR sequence region. As a non-limiting example, the viral genome comprises a 5′ITR sequence region, at least one promoter sequence region, a first signal sequence region, at least one linker sequence region, a PolyA sequence region, and a 3′ITR sequence region. As a non-limiting example, the viral genome comprises a 5′ITR sequence region, at least one promoter sequence region, a first signal sequence region, a second signal sequence region, a tag sequence region, a PolyA sequence region, a filler sequence region, and a 3′ITR sequence region. As a non-limiting example, the viral genome comprises a 5′ITR sequence region, at least one promoter sequence region, a first signal sequence region, a second signal sequence region, a tag sequence region, a PolyA sequence region, and a 3′ITR sequence region. As a non-limiting example, the viral genome comprises a 5′ITR sequence region, at least one promoter sequence region, a first signal sequence region, a second signal sequence region, a PolyA sequence region, a filler sequence region, and a 3′ITR sequence region. As a non-limiting example, the viral genome comprises a 5′ITR sequence region, at least one promoter sequence region, a first signal sequence region, a second signal sequence region, a PolyA sequence region, and a 3′ITR sequence region. As a non-limiting example, the viral genome comprises a 5′ITR sequence region, at least one promoter sequence region, a first signal sequence region, a second signal sequence region, a tag sequence region, a PolyA sequence region, a filler sequence region, and a 3′ITR sequence region. As a non-limiting example, the viral genome comprises a 5′ITR sequence region, at least one promoter sequence region, a first signal sequence region, a second signal sequence region, a tag sequence region, a PolyA sequence region, and a 3′ITR sequence region. As a non-limiting example, the viral genome comprises a 5′ITR sequence region, at least one promoter sequence region, a first signal sequence region, a second signal sequence region, a PolyA sequence region, a filler sequence region, and a 3′ITR sequence region. As a non-limiting example, the viral genome comprises a 5′ITR sequence region, at least one promoter sequence region, a first signal sequence region, a second signal sequence region, a PolyA sequence region, and a 3′ITR sequence region. As a non-limiting example, the viral genome comprises a 5′ITR sequence region, at least one promoter sequence region, a first signal sequence region, a second signal sequence region, a tag sequence region, a PolyA sequence region, a filler sequence region, and a 3′ITR sequence region. As a non-limiting example, the viral genome comprises a 5′ITR sequence region, at least one promoter sequence region, a first signal sequence region, a second signal sequence region, a tag sequence region, a PolyA sequence region, and a 3′ITR sequence region. As a non-limiting example, the viral genome comprises a 5′ITR sequence region, at least one promoter sequence region, a first signal sequence region, a second signal sequence region, a PolyA sequence region, a filler sequence region, and a 3′ITR sequence region. As a non-limiting example, the viral genome comprises a 5′ITR sequence region, at least one promoter sequence region, a first signal sequence region, a second signal sequence region, a PolyA sequence region, and a 3′ITR sequence region. As a non-limiting example, the viral genome comprises a 5′ITR sequence region, at least one promoter sequence region, a first signal sequence region, a second signal sequence region, a tag sequence region, a PolyA sequence region, a filler sequence region, and a 3′ITR sequence region. As a non-limiting example, the viral genome comprises a 5′ITR sequence region, at least one promoter sequence region, a first signal sequence region, a second signal sequence region, a tag sequence region, a PolyA sequence region, and a 3′ITR sequence region. As a non-limiting example, the viral genome comprises a 5′ITR sequence region, at least one promoter sequence region, a first signal sequence region, a second signal sequence region, a PolyA sequence region, a filler sequence region, and a 3′ITR sequence region. As a non-limiting example, the viral genome comprises a 5′ITR sequence region, at least one promoter sequence region, a first signal sequence region, a second signal sequence region, a PolyA sequence region, and a 3′ITR sequence region. As a non-limiting example, the viral genome comprises a 5′ITR sequence region, at least one promoter sequence region, a first signal sequence region, a tag sequence region, a PolyA sequence region, a filler sequence region, and a 3′ITR sequence region. As a non-limiting example, the viral genome comprises a 5′ITR sequence region, at least one promoter sequence region, a first signal sequence region, a tag sequence region, a PolyA sequence region, and a 3′ITR sequence region. As a non-limiting example, the viral genome comprises a 5′ITR sequence region, at least one promoter sequence region, a first signal sequence region, a PolyA sequence region, a filler sequence region, and a 3′ITR sequence region. As a non-limiting example, the viral genome comprises a 5′ITR sequence region, at least one promoter sequence region, a first signal sequence region, a PolyA sequence region, and a 3′ITR sequence region. As a non-limiting example, the viral genome comprises a 5′ITR sequence region, at least one promoter sequence region, a first signal sequence region, a tag sequence region, a PolyA sequence region, a filler sequence region, and a 3′ITR sequence region. As a non-limiting example, the viral genome comprises a 5′ITR sequence region, at least one promoter sequence region, a first signal sequence region, a tag sequence region, a PolyA sequence region, and a 3′ITR sequence region. As a non-limiting example, the viral genome comprises a 5′ITR sequence region, at least one promoter sequence region, a first signal sequence region, a PolyA sequence region, a filler sequence region, and a 3′ITR sequence region. As a non-limiting example, the viral genome comprises a 5′ITR sequence region, at least one promoter sequence region, a first signal sequence region, a PolyA sequence region, and a 3′ITR sequence region. As a non-limiting example, the viral genome comprises a 5′ITR sequence region, at least one promoter sequence region, a first signal sequence region, a tag sequence region, a PolyA sequence region, a filler sequence region, and a 3′ITR sequence region. As a non-limiting example, the viral genome comprises a 5′ITR sequence region, at least one promoter sequence region, a first signal sequence region, a tag sequence region, a PolyA sequence region, and a 3′ITR sequence region. As a non-limiting example, the viral genome comprises a 5′ITR sequence region, at least one promoter sequence region, a first signal sequence region, a PolyA sequence region, a filler sequence region, and a 3′ITR sequence region. As a non-limiting example, the viral genome comprises a 5′ITR sequence region, at least one promoter sequence region, a first signal sequence region, a PolyA sequence region, and a 3′ITR sequence region. As a non-limiting example, the viral genome comprises a 5′ITR sequence region, at least one promoter sequence region, a first signal sequence region, a tag sequence region, a PolyA sequence region, a filler sequence region, and a 3′ITR sequence region. As a non-limiting example, the viral genome comprises a 5′ITR sequence region, at least one promoter sequence region, a first signal sequence region, a tag sequence region, a PolyA sequence region, and a 3′ITR sequence region. As a non-limiting example, the viral genome comprises a 5′ITR sequence region, at least one promoter sequence region, a first signal sequence region, a PolyA sequence region, a filler sequence region, and a 3′ITR sequence region. As a non-limiting example, the viral genome comprises a 5′ITR sequence region, at least one promoter sequence region, a first signal sequence region, a PolyA sequence region, and a 3′ITR sequence region. As a non-limiting example, the viral genome comprises a 5′ITR sequence region, at least one promoter sequence region, a first signal sequence region, at least one linker sequence region, a second signal sequence region, a tag sequence region, a PolyA sequence region, a filler sequence region, and a 3′ITR sequence region. As a non-limiting example, the viral genome comprises a 5′ITR sequence region, at least one promoter sequence region, a first signal sequence region, at least one linker sequence region, a second signal sequence region, a tag sequence region, a PolyA sequence region, and a 3′ITR sequence region. As a non-limiting example, the viral genome comprises a 5′ITR sequence region, at least one promoter sequence region, a first signal sequence region, at least one linker sequence region, a second signal sequence region, a PolyA sequence region, a filler sequence region, and a 3′ITR sequence region. As a non-limiting example, the viral genome comprises a 5′ITR sequence region, at least one promoter sequence region, a first signal sequence region, at least one linker sequence region, a second signal sequence region, a PolyA sequence region, and a 3′ITR sequence region. As a non-limiting example, the viral genome comprises a 5′ITR sequence region, at least one promoter sequence region, a first signal sequence region, at least one linker sequence region, a second signal sequence region, a tag sequence region, a PolyA sequence region, a filler sequence region, and a 3′ITR sequence region. As a non-limiting example, the viral genome comprises a 5′ITR sequence region, at least one promoter sequence region, a first signal sequence region, at least one linker sequence region, a second signal sequence region, a tag sequence region, a PolyA sequence region, and a 3′ITR sequence region. As a non-limiting example, the viral genome comprises a 5′ITR sequence region, at least one promoter sequence region, a first signal sequence region, at least one linker sequence region, a second signal sequence region, a PolyA sequence region, a filler sequence region, and a 3′ITR sequence region. As a non-limiting example, the viral genome comprises a 5′ITR sequence region, at least one promoter sequence region, a first signal sequence region, at least one linker sequence region, a second signal sequence region, a PolyA sequence region, and a 3′ITR sequence region. As a non-limiting example, the viral genome comprises a 5′ITR sequence region, at least one promoter sequence region, a first signal sequence region, at least one linker sequence region, a second signal sequence region, a tag sequence region, a PolyA sequence region, a filler sequence region, and a 3′ITR sequence region. As a non-limiting example, the viral genome comprises a 5′ITR sequence region, at least one promoter sequence region, a first signal sequence region, at least one linker sequence region, a second signal sequence region, a tag sequence region, a PolyA sequence region, and a 3′ITR sequence region. As a non-limiting example, the viral genome comprises a 5′ITR sequence region, at least one promoter sequence region, a first signal sequence region, at least one linker sequence region, a second signal sequence region, a PolyA sequence region, a filler sequence region, and a 3′ITR sequence region. As a non-limiting example, the viral genome comprises a 5′ITR sequence region, at least one promoter sequence region, a first signal sequence region, at least one linker sequence region, a second signal sequence region, a PolyA sequence region, and a 3′ITR sequence region. As a non-limiting example, the viral genome comprises a 5′ITR sequence region, at least one promoter sequence region, a first signal sequence region, at least one linker sequence region, a second signal sequence region, a tag sequence region, a PolyA sequence region, a filler sequence region, and a 3′ITR sequence region. As a non-limiting example, the viral genome comprises a 5′ITR sequence region, at least one promoter sequence region, a first signal sequence region, at least one linker sequence region, a second signal sequence region, a tag sequence region, a PolyA sequence region, and a 3′ITR sequence region. As a non-limiting example, the viral genome comprises a 5′ITR sequence region, at least one promoter sequence region, a first signal sequence region, at least one linker sequence region, a second signal sequence region, a PolyA sequence region, a filler sequence region, and a 3′ITR sequence region. As a non-limiting example, the viral genome comprises a 5′ITR sequence region, at least one promoter sequence region, a first signal sequence region, at least one linker sequence region, a second signal sequence region, a PolyA sequence region, and a 3′ITR sequence region. As a non-limiting example, the viral genome comprises a 5′ITR sequence region, at least one promoter sequence region, a first signal sequence region, at least one linker sequence region, a tag sequence region, a PolyA sequence region, a filler sequence region, and a 3′ITR sequence region. As a non-limiting example, the viral genome comprises a 5′ITR sequence region, at least one promoter sequence region, a first signal sequence region, at least one linker sequence region, a tag sequence region, a PolyA sequence region, and a 3′ITR sequence region. As a non-limiting example, the viral genome comprises a 5′ITR sequence region, at least one promoter sequence region, a first signal sequence region, at least one linker sequence region, a PolyA sequence region, a filler sequence region, and a 3′ITR sequence region. As a non-limiting example, the viral genome comprises a 5′ITR sequence region, at least one promoter sequence region, a first signal sequence region, at least one linker sequence region, a PolyA sequence region, and a 3′ITR sequence region. As a non-limiting example, the viral genome comprises a 5′ITR sequence region, at least one promoter sequence region, a first signal sequence region, at least one linker sequence region, a tag sequence region, a PolyA sequence region, a filler sequence region, and a 3′ITR sequence region. As a non-limiting example, the viral genome comprises a 5′ITR sequence region, at least one promoter sequence region, a first signal sequence region, at least one linker sequence region, a tag sequence region, a PolyA sequence region, and a 3′ITR sequence region. As a non-limiting example, the viral genome comprises a 5′ITR sequence region, at least one promoter sequence region, a first signal sequence region, at least one linker sequence region, a PolyA sequence region, a filler sequence region, and a 3′ITR sequence region. As a non-limiting example, the viral genome comprises a 5′ITR sequence region, at least one promoter sequence region, a first signal sequence region, at least one linker sequence region, a PolyA sequence region, and a 3′ITR sequence region. As a non-limiting example, the viral genome comprises a 5′ITR sequence region, at least one promoter sequence region, a first signal sequence region, at least one linker sequence region, a tag sequence region, a PolyA sequence region, a filler sequence region, and a 3′ITR sequence region. As a non-limiting example, the viral genome comprises a 5′ITR sequence region, at least one promoter sequence region, a first signal sequence region, at least one linker sequence region, a tag sequence region, a PolyA sequence region, and a 3′ITR sequence region. As a non-limiting example, the viral genome comprises a 5′ITR sequence region, at least one promoter sequence region, a first signal sequence region, at least one linker sequence region, a PolyA sequence region, a filler sequence region, and a 3′ITR sequence region. As a non-limiting example, the viral genome comprises a 5′ITR sequence region, at least one promoter sequence region, a first signal sequence region, at least one linker sequence region, a PolyA sequence region, and a 3′ITR sequence region. As a non-limiting example, the viral genome comprises a 5′ITR sequence region, at least one promoter sequence region, a first signal sequence region, at least one linker sequence region, a tag sequence region, a PolyA sequence region, a filler sequence region, and a 3′ITR sequence region. As a non-limiting example, the viral genome comprises a 5′ITR sequence region, at least one promoter sequence region, a first signal sequence region, at least one linker sequence region, a tag sequence region, a PolyA sequence region, and a 3′ITR sequence region. As a non-limiting example, the viral genome comprises a 5′ITR sequence region, at least one promoter sequence region, a first signal sequence region, at least one linker sequence region, a PolyA sequence region, a filler sequence region, and a 3′ITR sequence region. As a non-limiting example, the viral genome comprises a 5′ITR sequence region, at least one promoter sequence region, a first signal sequence region, at least one linker sequence region, a PolyA sequence region, and a 3′ITR sequence region. As a non-limiting example, the viral genome comprises a 5′ITR sequence region, at least one promoter sequence region, a first signal sequence region, a second signal sequence region, a tag sequence region, a PolyA sequence region, a filler sequence region, and a 3′ITR sequence region. As a non-limiting example, the viral genome comprises a 5′ITR sequence region, at least one promoter sequence region, a first signal sequence region, a second signal sequence region, a tag sequence region, a PolyA sequence region, and a 3′ITR sequence region. As a non-limiting example, the viral genome comprises a 5′ITR sequence region, at least one promoter sequence region, a first signal sequence region, a second signal sequence region, a PolyA sequence region, a filler sequence region, and a 3′ITR sequence region. As a non-limiting example, the viral genome comprises a 5′ITR sequence region, at least one promoter sequence region, a first signal sequence region, a second signal sequence region, a PolyA sequence region, and a 3′ITR sequence region. As a non-limiting example, the viral genome comprises a 5′ITR sequence region, at least one promoter sequence region, a first signal sequence region, a second signal sequence region, a tag sequence region, a PolyA sequence region, a filler sequence region, and a 3′ITR sequence region. As a non-limiting example, the viral genome comprises a 5′ITR sequence region, at least one promoter sequence region, a first signal sequence region, a second signal sequence region, a tag sequence region, a PolyA sequence region, and a 3′ITR sequence region. As a non-limiting example, the viral genome comprises a 5′ITR sequence region, at least one promoter sequence region, a first signal sequence region, a second signal sequence region, a PolyA sequence region, a filler sequence region, and a 3′ITR sequence region. As a non-limiting example, the viral genome comprises a 5′ITR sequence region, at least one promoter sequence region, a first signal sequence region, a second signal sequence region, a PolyA sequence region, and a 3′ITR sequence region. As a non-limiting example, the viral genome comprises a 5′ITR sequence region, at least one promoter sequence region, a first signal sequence region, a second signal sequence region, a tag sequence region, a PolyA sequence region, a filler sequence region, and a 3′ITR sequence region. As a non-limiting example, the viral genome comprises a 5′ITR sequence region, at least one promoter sequence region, a first signal sequence region, a second signal sequence region, a tag sequence region, a PolyA sequence region, and a 3′ITR sequence region. As a non-limiting example, the viral genome comprises a 5′ITR sequence region, at least one promoter sequence region, a first signal sequence region, a second signal sequence region, a PolyA sequence region, a filler sequence region, and a 3′ITR sequence region. As a non-limiting example, the viral genome comprises a 5′ITR sequence region, at least one promoter sequence region, a first signal sequence region, a second signal sequence region, a PolyA sequence region, and a 3′ITR sequence region. As a non-limiting example, the viral genome comprises a 5′ITR sequence region, at least one promoter sequence region, a first signal sequence region, a second signal sequence region, a tag sequence region, a PolyA sequence region, a filler sequence region, and a 3′ITR sequence region. As a non-limiting example, the viral genome comprises a 5′ITR sequence region, at least one promoter sequence region, a first signal sequence region, a second signal sequence region, a tag sequence region, a PolyA sequence region, and a 3′ITR sequence region. As a non-limiting example, the viral genome comprises a 5′ITR sequence region, at least one promoter sequence region, a first signal sequence region, a second signal sequence region, a PolyA sequence region, a filler sequence region, and a 3′ITR sequence region. As a non-limiting example, the viral genome comprises a 5′ITR sequence region, at least one promoter sequence region, a first signal sequence region, a second signal sequence region, a PolyA sequence region, and a 3′ITR sequence region. As a non-limiting example, the viral genome comprises a 5′ITR sequence region, at least one promoter sequence region, a first signal sequence region, a tag sequence region, a PolyA sequence region, a filler sequence region, and a 3′ITR sequence region. As a non-limiting example, the viral genome comprises a 5′ITR sequence region, at least one promoter sequence region, a first signal sequence region, a tag sequence region, a PolyA sequence region, and a 3′ITR sequence region. As a non-limiting example, the viral genome comprises a 5′ITR sequence region, at least one promoter sequence region, a first signal sequence region, a PolyA sequence region, a filler sequence region, and a 3′ITR sequence region. As a non-limiting example, the viral genome comprises a 5′ITR sequence region, at least one promoter sequence region, a first signal sequence region, a PolyA sequence region, and a 3′ITR sequence region. As a non-limiting example, the viral genome comprises a 5′ITR sequence region, at least one promoter sequence region, a first signal sequence region, a tag sequence region, a PolyA sequence region, a filler sequence region, and a 3′ITR sequence region. As a non-limiting example, the viral genome comprises a 5′ITR sequence region, at least one promoter sequence region, a first signal sequence region, a tag sequence region, a PolyA sequence region, and a 3′ITR sequence region. As a non-limiting example, the viral genome comprises a 5′ITR sequence region, at least one promoter sequence region, a first signal sequence region, a PolyA sequence region, a filler sequence region, and a 3′ITR sequence region. As a non-limiting example, the viral genome comprises a 5′ITR sequence region, at least one promoter sequence region, a first signal sequence region, a PolyA sequence region, and a 3′ITR sequence region. As a non-limiting example, the viral genome comprises a 5′ITR sequence region, at least one promoter sequence region, a first signal sequence region, a tag sequence region, a PolyA sequence region, a filler sequence region, and a 3′ITR sequence region. As a non-limiting example, the viral genome comprises a 5′ITR sequence region, at least one promoter sequence region, a first signal sequence region, a tag sequence region, a PolyA sequence region, and a 3′ITR sequence region. As a non-limiting example, the viral genome comprises a 5′ITR sequence region, at least one promoter sequence region, a first signal sequence region, a PolyA sequence region, a filler sequence region, and a 3′ITR sequence region. As a non-limiting example, the viral genome comprises a 5′ITR sequence region, at least one promoter sequence region, a first signal sequence region, a PolyA sequence region, and a 3′ITR sequence region. As a non-limiting example, the viral genome comprises a 5′ITR sequence region, at least one promoter sequence region, a first signal sequence region, a tag sequence region, a PolyA sequence region, a filler sequence region, and a 3′ITR sequence region. As a non-limiting example, the viral genome comprises a 5′ITR sequence region, at least one promoter sequence region, a first signal sequence region, a tag sequence region, a PolyA sequence region, and a 3′ITR sequence region. As a non-limiting example, the viral genome comprises a 5′ITR sequence region, at least one promoter sequence region, a first signal sequence region, a PolyA sequence region, a filler sequence region, and a 3′ITR sequence region. As a non-limiting example, the viral genome comprises a 5′ITR sequence region, at least one promoter sequence region, a first signal sequence region, a PolyA sequence region, and a 3′ITR sequence region. As a non-limiting example, the viral genome comprises a 3′ITR sequence region, at least one promoter sequence region, at least one linker sequence region, a first signal sequence region, a tag sequence region, a PolyA sequence region, a filler sequence region, and a 3′ITR sequence region. As a non-limiting example, the viral genome comprises a 5′ITR sequence region, at least one promoter sequence region, at least one linker sequence region, a first signal sequence region, a tag sequence region, a PolyA sequence region, and a 3′ITR sequence region. As a non-limiting example, the viral genome comprises a 5′ITR sequence region, at least one promoter sequence region, at least one linker sequence region, a first signal sequence region, a PolyA sequence region, a filler sequence region, and a 3′ITR sequence region. As a non-limiting example, the viral genome comprises a 5′ITR sequence region, at least one promoter sequence region, at least one linker sequence region, a first signal sequence region, a PolyA sequence region, and a 3′ITR sequence region. As a non-limiting example, the viral genome comprises a 5′ITR sequence region, at least one promoter sequence region, at least one linker sequence region, a first signal sequence region, a tag sequence region, a PolyA sequence region, a filler sequence region, and a 3′ITR sequence region. As a non-limiting example, the viral genome comprises a 5′ITR sequence region, at least one promoter sequence region, at least one linker sequence region, a first signal sequence region, a tag sequence region, a PolyA sequence region, and a 3′ITR sequence region. As a non-limiting example, the viral genome comprises a 5′ITR sequence region, at least one promoter sequence region, at least one linker sequence region, a first signal sequence region, a PolyA sequence region, a filler sequence region, and a 3′ITR sequence region. As a non-limiting example, the viral genome comprises a 5′ITR sequence region, at least one promoter sequence region, at least one linker sequence region, a first signal sequence region, a PolyA sequence region, and a 3′ITR sequence region. As a non-limiting example, the viral genome comprises a 5′ITR sequence region, at least one promoter sequence region, at least one linker sequence region, a first signal sequence region, a tag sequence region, a PolyA sequence region, a filler sequence region, and a 3′ITR sequence region. As a non-limiting example, the viral genome comprises a 5′ITR sequence region, at least one promoter sequence region, at least one linker sequence region, a first signal sequence region, a tag sequence region, a PolyA sequence region, and a 3′ITR sequence region. As a non-limiting example, the viral genome comprises a 5′ITR sequence region, at least one promoter sequence region, at least one linker sequence region, a first signal sequence region, a PolyA sequence region, a filler sequence region, and a 3′ITR sequence region. As a non-limiting example, the viral genome comprises a 5′ITR sequence region, at least one promoter sequence region, at least one linker sequence region, a first signal sequence region, a PolyA sequence region, and a 3′ITR sequence region. As a non-limiting example, the viral genome comprises a 5′ITR sequence region, at least one promoter sequence region, at least one linker sequence region, a first signal sequence region, a tag sequence region, a PolyA sequence region, a filler sequence region, and a 3′ITR sequence region. As a non-limiting example, the viral genome comprises a 5′ITR sequence region, at least one promoter sequence region, at least one linker sequence region, a first signal sequence region, a tag sequence region, a PolyA sequence region, and a 3′ITR sequence region. As a non-limiting example, the viral genome comprises a 5′ITR sequence region, at least one promoter sequence region, at least one linker sequence region, a first signal sequence region, a PolyA sequence region, a filler sequence region, and a 3′ITR sequence region. As a non-limiting example, the viral genome comprises a 5′ITR sequence region, at least one promoter sequence region, at least one linker sequence region, a first signal sequence region, a PolyA sequence region, and a 3′ITR sequence region. As a non-limiting example, the viral genome comprises a 5′ITR sequence region, at least one promoter sequence region, at least one linker sequence region, a tag sequence region, a PolyA sequence region, a filler sequence region, and a 3′ITR sequence region. As a non-limiting example, the viral genome comprises a 5′ITR sequence region, at least one promoter sequence region, at least one linker sequence region, a tag sequence region, a PolyA sequence region, and a 3′ITR sequence region. As a non-limiting example, the viral genome comprises a 5′ITR sequence region, at least one promoter sequence region, at least one linker sequence region, a PolyA sequence region, a filler sequence region, and a 3′ITR sequence region. As a non-limiting example, the viral genome comprises a 5′ITR sequence region, at least one promoter sequence region, at least one linker sequence region, a PolyA sequence region, and a 3′ITR sequence region. As a non-limiting example, the viral genome comprises a 5′ITR sequence region, at least one promoter sequence region, at least one linker sequence region, a tag sequence region, a PolyA sequence region, a filler sequence region, and a 3′ITR sequence region. As a non-limiting example, the viral genome comprises a 5′ITR sequence region, at least one promoter sequence region, at least one linker sequence region, a tag sequence region, a PolyA sequence region, and a 3′ITR sequence region. As a non-limiting example, the viral genome comprises a 5′ITR sequence region, at least one promoter sequence region, at least one linker sequence region, a PolyA sequence region, a filler sequence region, and a 3′ITR sequence region. As a non-limiting example, the viral genome comprises a 5′ITR sequence region, at least one promoter sequence region, at least one linker sequence region, a PolyA sequence region, and a 3′ITR sequence region. As a non-limiting example, the viral genome comprises a 5′ITR sequence region, at least one promoter sequence region, at least one linker sequence region, a tag sequence region, a PolyA sequence region, a filler sequence region, and a 3′ITR sequence region. As a non-limiting example, the viral genome comprises a 5′ITR sequence region, at least one promoter sequence region, at least one linker sequence region, a tag sequence region, a PolyA sequence region, and a 3′ITR sequence region. As a non-limiting example, the viral genome comprises a 5′ITR sequence region, at least one promoter sequence region, at least one linker sequence region, a PolyA sequence region, a filler sequence region, and a 3′ITR sequence region. As a non-limiting example, the viral genome comprises a 5′ITR sequence region, at least one promoter sequence region, at least one linker sequence region, a PolyA sequence region, and a 3′ITR sequence region. As a non-limiting example, the viral genome comprises a 5′ITR sequence region, at least one promoter sequence region, at least one linker sequence region, a tag sequence region, a PolyA sequence region, a filler sequence region, and a 3′ITR sequence region. As a non-limiting example, the viral genome comprises a 5′ITR sequence region, at least one promoter sequence region, at least one linker sequence region, a tag sequence region, a PolyA sequence region, and a 3′ITR sequence region. As a non-limiting example, the viral genome comprises a 5′ITR sequence region, at least one promoter sequence region, at least one linker sequence region, a PolyA sequence region, a filler sequence region, and a 3′ITR sequence region. As a non-limiting example, the viral genome comprises a 5′ITR sequence region, at least one promoter sequence region, at least one linker sequence region, a PolyA sequence region, and a 3′ITR sequence region. As a non-limiting example, the viral genome comprises a 5′ITR sequence region, at least one promoter sequence region, a first signal sequence region, a tag sequence region, a PolyA sequence region, a filler sequence region, and a 3′ITR sequence region. As a non-limiting example, the viral genome comprises a 5′ITR sequence region, at least one promoter sequence region, a first signal sequence region, a tag sequence region, a PolyA sequence region, and a 3′ITR sequence region. As a non-limiting example, the viral genome comprises a 5′ITR sequence region, at least one promoter sequence region, a first signal sequence region, a PolyA sequence region, a filler sequence region, and a 3′ITR sequence region. As a non-limiting example, the viral genome comprises a 5′ITR sequence region, at least one promoter sequence region, a first signal sequence region, a PolyA sequence region, and a 3′ITR sequence region. As a non-limiting example, the viral genome comprises a 5′ITR sequence region, at least one promoter sequence region, a first signal sequence region, a tag sequence region, a PolyA sequence region, a filler sequence region, and a 3′ITR sequence region. As a non-limiting example, the viral genome comprises a 5′ITR sequence region, at least one promoter sequence region, a first signal sequence region, a tag sequence region, a PolyA sequence region, and a 3′ITR sequence region. As a non-limiting example, the viral genome comprises a 5′ITR sequence region, at least one promoter sequence region, a first signal sequence region, a PolyA sequence region, a filler sequence region, and a 3′ITR sequence region. As a non-limiting example, the viral genome comprises a 5′ITR sequence region, at least one promoter sequence region, a first signal sequence region, a PolyA sequence region, and a 3′ITR sequence region. As a non-limiting example, the viral genome comprises a 5′ITR sequence region, at least one promoter sequence region, a first signal sequence region, a tag sequence region, a PolyA sequence region, a filler sequence region, and a 3′ITR sequence region. As a non-limiting example, the viral genome comprises a 5′ITR sequence region, at least one promoter sequence region, a first signal sequence region, a tag sequence region, a PolyA sequence region, and a 3′ITR sequence region. As a non-limiting example, the viral genome comprises a 5′ITR sequence region, at least one promoter sequence region, a first signal sequence region, a PolyA sequence region, a filler sequence region, and a 3′ITR sequence region. As a non-limiting example, the viral genome comprises a 5′ITR sequence region, at least one promoter sequence region, a first signal sequence region, a PolyA sequence region, and a 3′ITR sequence region. As a non-limiting example, the viral genome comprises a 5′ITR sequence region, at least one promoter sequence region, a first signal sequence region, a tag sequence region, a PolyA sequence region, a filler sequence region, and a 3′ITR sequence region. As a non-limiting example, the viral genome comprises a 5′ITR sequence region, at least one promoter sequence region, a first signal sequence region, a tag sequence region, a PolyA sequence region, and a 3′ITR sequence region. As a non-limiting example, the viral genome comprises a 5′ITR sequence region, at least one promoter sequence region, a first signal sequence region, a PolyA sequence region, a filler sequence region, and a 3′ITR sequence region. As a non-limiting example, the viral genome comprises a 5′ITR sequence region, at least one promoter sequence region, a first signal sequence region, a PolyA sequence region, and a 3′ITR sequence region. As a non-limiting example, the viral genome comprises a 5′ITR sequence region, at least one promoter sequence region, a tag sequence region, a PolyA sequence region, a filler sequence region, and a 3′ITR sequence region. As a non-limiting example, the viral genome comprises a 5′ITR sequence region, at least one promoter sequence region, a tag sequence region, a PolyA sequence region, and a 3′ITR sequence region. As a non-limiting example, the viral genome comprises a 5′ITR sequence region, at least one promoter sequence region, a PolyA sequence region, a filler sequence region, and a 3′ITR sequence region. As a non-limiting example, the viral genome comprises a 5′ITR sequence region, at least one promoter sequence region, a PolyA sequence region, and a 3′ITR sequence region. As a non-limiting example, the viral genome comprises a 5′ITR sequence region, at least one promoter sequence region, a tag sequence region, a PolyA sequence region, a filler sequence region, and a 3′ITR sequence region. As a non-limiting example, the viral genome comprises a 5′ITR sequence region, at least one promoter sequence region, a tag sequence region, a PolyA sequence region, and a 3′ITR sequence region. As a non-limiting example, the viral genome comprises a 5′ITR sequence region, at least one promoter sequence region, a PolyA sequence region, a filler sequence region, and a 3′ITR sequence region. As a non-limiting example, the viral genome comprises a 5′ITR sequence region, at least one promoter sequence region, a PolyA sequence region, and a 3′ITR sequence region. As a non-limiting example, the viral genome comprises a 5′ITR sequence region, at least one promoter sequence region, a tag sequence region, a PolyA sequence region, a filler sequence region, and a 3′ITR sequence region. As a non-limiting example, the viral genome comprises a 5′ITR sequence region, at least one promoter sequence region, a tag sequence region, a PolyA sequence region, and a 3′ITR sequence region. As a non-limiting example, the viral genome comprises a 5′ITR sequence region, at least one promoter sequence region, a PolyA sequence region, a filler sequence region, and a 3′ITR sequence region. As a non-limiting example, the viral genome comprises a 5′ITR sequence region, at least one promoter sequence region, a PolyA sequence region, and a 3′ITR sequence region. As a non-limiting example, the viral genome comprises a 5′ITR sequence region, at least one promoter sequence region, a tag sequence region, a PolyA sequence region, a filler sequence region, and a 3′ITR sequence region. As a non-limiting example, the viral genome comprises a 5′ITR sequence region, at least one promoter sequence region, a tag sequence region, a PolyA sequence region, and a 3′ITR sequence region. As a non-limiting example, the viral genome comprises a 5′ITR sequence region, at least one promoter sequence region, a PolyA sequence region, a filler sequence region, and a 3′ITR sequence region. As a non-limiting example, the viral genome comprises a 5′ITR sequence region, at least one promoter sequence region, a PolyA sequence region, and a 3′ITR sequence region. As a non-limiting example, the viral genome comprises a 5′ITR sequence region, at least one promoter sequence region, at least one linker sequence region, a first signal sequence region, a tag sequence region, a PolyA sequence region, a filler sequence region, and a 3′ITR sequence region. As a non-limiting example, the viral genome comprises a 5′ITR sequence region, at least one promoter sequence region, at least one linker sequence region, a first signal sequence region, a tag sequence region, a PolyA sequence region, and a 3′ITR sequence region. As a non-limiting example, the viral genome comprises a 5′ITR sequence region, at least one promoter sequence region, at least one linker sequence region, a first signal sequence region, a PolyA sequence region, a filler sequence region, and a 3′ITR sequence region. As a non-limiting example, the viral genome comprises a 5′ITR sequence region, at least one promoter sequence region, at least one linker sequence region, a first signal sequence region, a PolyA sequence region, and a 3′ITR sequence region. As a non-limiting example, the viral genome comprises a 5′ITR sequence region, at least one promoter sequence region, at least one linker sequence region, a first signal sequence region, a tag sequence region, a PolyA sequence region, a filler sequence region, and a 3′ITR sequence region. As a non-limiting example, the viral genome comprises a 5′ITR sequence region, at least one promoter sequence region, at least one linker sequence region, a first signal sequence region, a tag sequence region, a PolyA sequence region, and a 3′ITR sequence region. As a non-limiting example, the viral genome comprises a 5′ITR sequence region, at least one promoter sequence region, at least one linker sequence region, a first signal sequence region, a PolyA sequence region, a filler sequence region, and a 3′ITR sequence region. As a non-limiting example, the viral genome comprises a 5′ITR sequence region, at least one promoter sequence region, at least one linker sequence region, a first signal sequence region, a PolyA sequence region, and a 3′ITR sequence region. As a non-limiting example, the viral genome comprises a 5′ITR sequence region, at least one promoter sequence region, at least one linker sequence region, a first signal sequence region, a tag sequence region, a PolyA sequence region, a filler sequence region, and a 3′ITR sequence region. As a non-limiting example, the viral genome comprises a 5′ITR sequence region, at least one promoter sequence region, at least one linker sequence region, a first signal sequence region, a tag sequence region, a PolyA sequence region, and a 3′ITR sequence region. As a non-limiting example, the viral genome comprises a 5′ITR sequence region, at least one promoter sequence region, at least one linker sequence region, a first signal sequence region, a PolyA sequence region, a filler sequence region, and a 3′ITR sequence region. As a non-limiting example, the viral genome comprises a 5′ITR sequence region, at least one promoter sequence region, at least one linker sequence region, a first signal sequence region, a PolyA sequence region, and a 3′ITR sequence region. As a non-limiting example, the viral genome comprises a 5′ITR sequence region, at least one promoter sequence region, at least one linker sequence region, a first signal sequence region, a tag sequence region, a PolyA sequence region, a filler sequence region, and a 3′ITR sequence region. As a non-limiting example, the viral genome comprises a 5′ITR sequence region, at least one promoter sequence region, at least one linker sequence region, a first signal sequence region, a tag sequence region, a PolyA sequence region, and a 3′ITR sequence region. As a non-limiting example, the viral genome comprises a 5′ITR sequence region, at least one promoter sequence region, at least one linker sequence region, a first signal sequence region, a PolyA sequence region, a filler sequence region, and a 3′ITR sequence region. As a non-limiting example, the viral genome comprises a 5′ITR sequence region, at least one promoter sequence region, at least one linker sequence region, a first signal sequence region, a PolyA sequence region, and a 3′ITR sequence region. As a non-limiting example, the viral genome comprises a 5′ITR sequence region, at least one promoter sequence region, at least one linker sequence region, a tag sequence region, a PolyA sequence region, a filler sequence region, and a 3′ITR sequence region. As a non-limiting example, the viral genome comprises a 5′ITR sequence region, at least one promoter sequence region, at least one linker sequence region, a tag sequence region, a PolyA sequence region, and a 3′ITR sequence region. As a non-limiting example, the viral genome comprises a 5′ITR sequence region, at least one promoter sequence region, at least one linker sequence region, a PolyA sequence region, a filler sequence region, and a 3′ITR sequence region. As a non-limiting example, the viral genome comprises a 5′ITR sequence region, at least one promoter sequence region, at least one linker sequence region, a PolyA sequence region, and a 3′ITR sequence region. As a non-limiting example, the viral genome comprises a 5′ITR sequence region, at least one promoter sequence region, at least one linker sequence region, a tag sequence region, a PolyA sequence region, a filler sequence region, and a 3′ITR sequence region. As a non-limiting example, the viral genome comprises a 5′ITR sequence region, at least one promoter sequence region, at least one linker sequence region, a tag sequence region, a PolyA sequence region, and a 3′ITR sequence region. As a non-limiting example, the viral genome comprises a 5′ITR sequence region, at least one promoter sequence region, at least one linker sequence region, a PolyA sequence region, a filler sequence region, and a 3′ITR sequence region. As a non-limiting example, the viral genome comprises a 5′ITR sequence region, at least one promoter sequence region, at least one linker sequence region, a PolyA sequence region, and a 3′ITR sequence region. As a non-limiting example, the viral genome comprises a 5′ITR sequence region, at least one promoter sequence region, at least one linker sequence region, a tag sequence region, a PolyA sequence region, a filler sequence region, and a 3′ITR sequence region. As a non-limiting example, the viral genome comprises a 5′ITR sequence region, at least one promoter sequence region, at least one linker sequence region, a tag sequence region, a PolyA sequence region, and a 3′ITR sequence region. As a non-limiting example, the viral genome comprises a 5′ITR sequence region, at least one promoter sequence region, at least one linker sequence region, a PolyA sequence region, a filler sequence region, and a 3′ITR sequence region. As a non-limiting example, the viral genome comprises a 5′ITR sequence region, at least one promoter sequence region, at least one linker sequence region, a PolyA sequence region, and a 3′ITR sequence region. As a non-limiting example, the viral genome comprises a 5′ITR sequence region, at least one promoter sequence region, at least one linker sequence region, a tag sequence region, a PolyA sequence region, a filler sequence region, and a 3′ITR sequence region. As a non-limiting example, the viral genome comprises a 5′ITR sequence region, at least one promoter sequence region, at least one linker sequence region, a tag sequence region, a PolyA sequence region, and a 3′ITR sequence region. As a non-limiting example, the viral genome comprises a 5′ITR sequence region, at least one promoter sequence region, at least one linker sequence region, a PolyA sequence region, a filler sequence region, and a 3′ITR sequence region. As a non-limiting example, the viral genome comprises a 5′ITR sequence region, at least one promoter sequence region, at least one linker sequence region, a PolyA sequence region, and a 3′ITR sequence region. As a non-limiting example, the viral genome comprises a 5′ITR sequence region, at least one promoter sequence region, a first signal sequence region, a tag sequence region, a PolyA sequence region, a filler sequence region, and a 3′ITR sequence region. As a non-limiting example, the viral genome comprises a 5′ITR sequence region, at least one promoter sequence region, a first signal sequence region, a tag sequence region, a PolyA sequence region, and a 3′ITR sequence region. As a non-limiting example, the viral genome comprises a 5′ITR sequence region, at least one promoter sequence region, a first signal sequence region, a PolyA sequence region, a filler sequence region, and a 3′ITR sequence region. As a non-limiting example, the viral genome comprises a 5′ITR sequence region, at least one promoter sequence region, a first signal sequence region, a PolyA sequence region, and a 3′ITR sequence region. As a non-limiting example, the viral genome comprises a 5′ITR sequence region, at least one promoter sequence region, a first signal sequence region, a tag sequence region, a PolyA sequence region, a filler sequence region, and a 3′ITR sequence region. As a non-limiting example, the viral genome comprises a 5′ITR sequence region, at least one promoter sequence region, a first signal sequence region, a tag sequence region, a PolyA sequence region, and a 3′ITR sequence region. As a non-limiting example, the viral genome comprises a 5′ITR sequence region, at least one promoter sequence region, a first signal sequence region, a PolyA sequence region, a filler sequence region, and a 3′ITR sequence region. As a non-limiting example, the viral genome comprises a 5′ITR sequence region, at least one promoter sequence region, a first signal sequence region, a PolyA sequence region, and a 3′ITR sequence region. As a non-limiting example, the viral genome comprises a 5′ITR sequence region, at least one promoter sequence region, a first signal sequence region, a tag sequence region, a PolyA sequence region, a filler sequence region, and a 3′ITR sequence region. As a non-limiting example, the viral genome comprises a 5′ITR sequence region, at least one promoter sequence region, a first signal sequence region, a tag sequence region, a PolyA sequence region, and a 3′ITR sequence region. As a non-limiting example, the viral genome comprises a 5′ITR sequence region, at least one promoter sequence region, a first signal sequence region, a PolyA sequence region, a filler sequence region, and a 3′ITR sequence region. As a non-limiting example, the viral genome comprises a 5′ITR sequence region, at least one promoter sequence region, a first signal sequence region, a PolyA sequence region, and a 3′ITR sequence region. As a non-limiting example, the viral genome comprises a 5′ITR sequence region, at least one promoter sequence region, a first signal sequence region, a tag sequence region, a PolyA sequence region, a filler sequence region, and a 3′ITR sequence region. As a non-limiting example, the viral genome comprises a 5′ITR sequence region, at least one promoter sequence region, a first signal sequence region, a tag sequence region, a PolyA sequence region, and a 3′ITR sequence region. As a non-limiting example, the viral genome comprises a 5′ITR sequence region, at least one promoter sequence region, a first signal sequence region, a PolyA sequence region, a filler sequence region, and a 3′ITR sequence region. As a non-limiting example, the viral genome comprises a 5′ITR sequence region, at least one promoter sequence region, a first signal sequence region, a PolyA sequence region, and a 3′ITR sequence region. As a non-limiting example, the viral genome comprises a 5′ITR sequence region, at least one promoter sequence region, a tag sequence region, a PolyA sequence region, a filler sequence region, and a 3′ITR sequence region. As a non-limiting example, the viral genome comprises a 5′ITR sequence region, at least one promoter sequence region, a tag sequence region, a PolyA sequence region, and a 3′ITR sequence region. As a non-limiting example, the viral genome comprises a 5′ITR sequence region, at least one promoter sequence region, a PolyA sequence region, a filler sequence region, and a 3′ITR sequence region. As a non-limiting example, the viral genome comprises a 5′ITR sequence region, at least one promoter sequence region, a PolyA sequence region, and a 3′ITR sequence region. As a non-limiting example, the viral genome comprises a 5′ITR sequence region, at least one promoter sequence region, a tag sequence region, a PolyA sequence region, a filler sequence region, and a 3′ITR sequence region. As a non-limiting example, the viral genome comprises a 5′ITR sequence region, at least one promoter sequence region, a tag sequence region, a PolyA sequence region, and a 3′ITR sequence region. As a non-limiting example, the viral genome comprises a 5′ITR sequence region, at least one promoter sequence region, a PolyA sequence region, a filler sequence region, and a 3′ITR sequence region. As a non-limiting example, the viral genome comprises a 5′ITR sequence region, at least one promoter sequence region, a PolyA sequence region, and a 3′ITR sequence region. As a non-limiting example, the viral genome comprises a 5′ITR sequence region, at least one promoter sequence region, a tag sequence region, a PolyA sequence region, a filler sequence region, and a 3′ITR sequence region. As a non-limiting example, the viral genome comprises a 5′ITR sequence region, at least one promoter sequence region, a tag sequence region, a PolyA sequence region, and a 3′ITR sequence region. As a non-limiting example, the viral genome comprises a 5′ITR sequence region, at least one promoter sequence region, a PolyA sequence region, a filler sequence region, and a 3′ITR sequence region. As a non-limiting example, the viral genome comprises a 5′ITR sequence region, at least one promoter sequence region, a PolyA sequence region, and a 3′ITR sequence region. As a non-limiting example, the viral genome comprises a 5′ITR sequence region, at least one promoter sequence region, a tag sequence region, a PolyA sequence region, a filler sequence region, and a 3′ITR sequence region. As a non-limiting example, the viral genome comprises a 5′ITR sequence region, at least one promoter sequence region, a tag sequence region, a PolyA sequence region, and a 3′ITR sequence region. As a non-limiting example, the viral genome comprises a 5′ITR sequence region, at least one promoter sequence region, a PolyA sequence region, a filler sequence region, and a 3′ITR sequence region. As a non-limiting example, the viral genome comprises a 5′ITR sequence region, at least one promoter sequence region, a PolyA sequence region, and a 3′ITR sequence region.

[1287] In some embodiments, the viral genome comprises at least one sequence region described in Tables 17-24 and include at least one payload sequence region encoding an antibody or fragment thereof described in Tables 3-16. As a non-limiting example, the viral genome comprises a 5′ITR sequence region, at least one promoter sequence region, a first exon sequence region, a first intron sequence region, a second intron sequence region, a second exon sequence region, a first signal sequence region, a first payload region comprising a variable heavy or light chain sequence, variant or fragment thereof, a first constant region of the first payload region, at least one linker sequence region, a second signal sequence region, a second payload region comprising a variable heavy or light chain sequence, variant or fragment thereof, a second constant region of the first payload region, a tag sequence region, a PolyA sequence region, a filler sequence region, and a 3′ITR sequence region. As a non-limiting example, the viral genome comprises a 5′ITR sequence region, at least one promoter sequence region, a first exon sequence region, a first intron sequence region, a second intron sequence region, a second exon sequence region, a first signal sequence region, a first payload region comprising a variable heavy or light chain sequence, variant or fragment thereof, a first constant region of the first payload region, at least one linker sequence region, a second signal sequence region, a second payload region comprising a variable heavy or light chain sequence, variant or fragment thereof, a second constant region of the first payload region, a tag sequence region, a PolyA sequence region, and a 3′ITR sequence region. As a non-limiting example, the viral genome comprises a 5′ITR sequence region, at least one promoter sequence region, a first exon sequence region, a first intron sequence region, a second intron sequence region, a second exon sequence region, a first signal sequence region, a first payload region comprising a variable heavy or light chain sequence, variant or fragment thereof, a first constant region of the first payload region, at least one linker sequence region, a second signal sequence region, a second payload region comprising a variable heavy or light chain sequence, variant or fragment thereof, a second constant region of the first payload region, a PolyA sequence region, a filler sequence region, and a 3′ITR sequence region. As a non-limiting example, the viral genome comprises a 5′ITR sequence region, at least one promoter sequence region, a first exon sequence region, a first intron sequence region, a second intron sequence region, a second exon sequence region, a first signal sequence region, a first payload region comprising a variable heavy or light chain sequence, variant or fragment thereof, a first constant region of the first payload region, at least one linker sequence region, a second signal sequence region, a second payload region comprising a variable heavy or light chain sequence, variant or fragment thereof, a second constant region of the first payload region, a PolyA sequence region, and a 3′ITR sequence region. As a non-limiting example, the viral genome comprises a 5′ITR sequence region, at least one promoter sequence region, a first exon sequence region, a first intron sequence region, a second intron sequence region, a second exon sequence region, a first signal sequence region, a first payload region comprising a variable heavy or light chain sequence, variant or fragment thereof, a first constant region of the first payload region, at least one linker sequence region, a second signal sequence region, a second payload region comprising a variable heavy or light chain sequence, variant or fragment thereof, a tag sequence region, a PolyA sequence region, a filler sequence region, and a 3′ITR sequence region. As a non-limiting example, the viral genome comprises a 5′ITR sequence region, at least one promoter sequence region, a first exon sequence region, a first intron sequence region, a second intron sequence region, a second exon sequence region, a first signal sequence region, a first payload region comprising a variable heavy or light chain sequence, variant or fragment thereof, a first constant region of the first payload region, at least one linker sequence region, a second signal sequence region, a second payload region comprising a variable heavy or light chain sequence, variant or fragment thereof, a tag sequence region, a PolyA sequence region, and a 3′ITR sequence region. As a non-limiting example, the viral genome comprises a 5′ITR sequence region, at least one promoter sequence region, a first exon sequence region, a first intron sequence region, a second intron sequence region, a second exon sequence region, a first signal sequence region, a first payload region comprising a variable heavy or light chain sequence, variant or fragment thereof, a first constant region of the first payload region, at least one linker sequence region, a second signal sequence region, a second payload region comprising a variable heavy or light chain sequence, variant or fragment thereof, a PolyA sequence region, a filler sequence region, and a 3′ITR sequence region. As a non-limiting example, the viral genome comprises a 5′ITR sequence region, at least one promoter sequence region, a first exon sequence region, a first intron sequence region, a second intron sequence region, a second exon sequence region, a first signal sequence region, a first payload region comprising a variable heavy or light chain sequence, variant or fragment thereof, a first constant region of the first payload region, at least one linker sequence region, a second signal sequence region, a second payload region comprising a variable heavy or light chain sequence, variant or fragment thereof, a PolyA sequence region, and a 3′ITR sequence region. As a non-limiting example, the viral genome comprises a 5′ITR sequence region, at least one promoter sequence region, a first exon sequence region, a first intron sequence region, a second intron sequence region, a second exon sequence region, a first signal sequence region, a first payload region comprising a variable heavy or light chain sequence, variant or fragment thereof, a first constant region of the first payload region, at least one linker sequence region, a second signal sequence region, a second constant region of the first payload region, a tag sequence region, a PolyA sequence region, a filler sequence region, and a 3′ITR sequence region. As a non-limiting example, the viral genome comprises a 5′ITR sequence region, at least one promoter sequence region, a first exon sequence region, a first intron sequence region, a second intron sequence region, a second exon sequence region, a first signal sequence region, a first payload region comprising a variable heavy or light chain sequence, variant or fragment thereof, a first constant region of the first payload region, at least one linker sequence region, a second signal sequence region, a second constant region of the first payload region, a tag sequence region, a PolyA sequence region, and a 3′ITR sequence region. As a non-limiting example, the viral genome comprises a 5′ITR sequence region, at least one promoter sequence region, a first exon sequence region, a first intron sequence region, a second intron sequence region, a second exon sequence region, a first signal sequence region, a first payload region comprising a variable heavy or light chain sequence, variant or fragment thereof, a first constant region of the first payload region, at least one linker sequence region, a second signal sequence region, a second constant region of the first payload region, a PolyA sequence region, a filler sequence region, and a 3′ITR sequence region. As a non-limiting example, the viral genome comprises a 5′ITR sequence region, at least one promoter sequence region, a first exon sequence region, a first intron sequence region, a second intron sequence region, a second exon sequence region, a first signal sequence region, a first payload region comprising a variable heavy or light chain sequence, variant or fragment thereof, a first constant region of the first payload region, at least one linker sequence region, a second signal sequence region, a second constant region of the first payload region, a PolyA sequence region, and a 3′ITR sequence region. As a non-limiting example, the viral genome comprises a 5′ITR sequence region, at least one promoter sequence region, a first exon sequence region, a first intron sequence region, a second intron sequence region, a second exon sequence region, a first signal sequence region, a first payload region comprising a variable heavy or light chain sequence, variant or fragment thereof, a first constant region of the first payload region, at least one linker sequence region, a second signal sequence region, a tag sequence region, a PolyA sequence region, a filler sequence region, and a 3′ITR sequence region. As a non-limiting example, the viral genome comprises a 5′ITR sequence region, at least one promoter sequence region, a first exon sequence region, a first intron sequence region, a second intron sequence region, a second exon sequence region, a first signal sequence region, a first payload region comprising a variable heavy or light chain sequence, variant or fragment thereof, a first constant region of the first payload region, at least one linker sequence region, a second signal sequence region, a tag sequence region, a PolyA sequence region, and a 3′ITR sequence region. As a non-limiting example, the viral genome comprises a 5′ITR sequence region, at least one promoter sequence region, a first exon sequence region, a first intron sequence region, a second intron sequence region, a second exon sequence region, a first signal sequence region, a first payload region comprising a variable heavy or light chain sequence, variant or fragment thereof, a first constant region of the first payload region, at least one linker sequence region, a second signal sequence region, a PolyA sequence region, a filler sequence region, and a 3′ITR sequence region. As a non-limiting example, the viral genome comprises a 5′ITR sequence region, at least one promoter sequence region, a first exon sequence region, a first intron sequence region, a second intron sequence region, a second exon sequence region, a first signal sequence region, a first payload region comprising a variable heavy or light chain sequence, variant or fragment thereof, a first constant region of the first payload region, at least one linker sequence region, a second signal sequence region, a PolyA sequence region, and a 3′ITR sequence region. As a non-limiting example, the viral genome comprises a 5′ITR sequence region, at least one promoter sequence region, a first exon sequence region, a first intron sequence region, a second intron sequence region, a second exon sequence region, a first signal sequence region, a first payload region comprising a variable heavy or light chain sequence, variant or fragment thereof, a first constant region of the first payload region, at least one linker sequence region, a second payload region comprising a variable heavy or light chain sequence, variant or fragment thereof, a second constant region of the first payload region, a tag sequence region, a PolyA sequence region, a filler sequence region, and a 3′ITR sequence region. As a non-limiting example, the viral genome comprises a 5′ITR sequence region, at least one promoter sequence region, a first exon sequence region, a first intron sequence region, a second intron sequence region, a second exon sequence region, a first signal sequence region, a first payload region comprising a variable heavy or light chain sequence, variant or fragment thereof, a first constant region of the first payload region, at least one linker sequence region, a second payload region comprising a variable heavy or light chain sequence, variant or fragment thereof, a second constant region of the first payload region, a tag sequence region, a PolyA sequence region, and a 3′ITR sequence region. As a non-limiting example, the viral genome comprises a 5′ITR sequence region, at least one promoter sequence region, a first exon sequence region, a first intron sequence region, a second intron sequence region, a second exon sequence region, a first signal sequence region, a first payload region comprising a variable heavy or light chain sequence, variant or fragment thereof, a first constant region of the first payload region, at least one linker sequence region, a second payload region comprising a variable heavy or light chain sequence, variant or fragment thereof, a second constant region of the first payload region, a PolyA sequence region, a filler sequence region, and a 3′ITR sequence region. As a non-limiting example, the viral genome comprises a 5′ITR sequence region, at least one promoter sequence region, a first exon sequence region, a first intron sequence region, a second intron sequence region, a second exon sequence region, a first signal sequence region, a first payload region comprising a variable heavy or light chain sequence, variant or fragment thereof, a first constant region of the first payload region, at least one linker sequence region, a second payload region comprising a variable heavy or light chain sequence, variant or fragment thereof, a second constant region of the first payload region, a PolyA sequence region, and a 3′ITR sequence region. As a non-limiting example, the viral genome comprises a 5′ITR sequence region, at least one promoter sequence region, a first exon sequence region, a first intron sequence region, a second intron sequence region, a second exon sequence region, a first signal sequence region, a first payload region comprising a variable heavy or light chain sequence, variant or fragment thereof, a first constant region of the first payload region, at least one linker sequence region, a second payload region comprising a variable heavy or light chain sequence, variant or fragment thereof, a tag sequence region, a PolyA sequence region, a filler sequence region, and a 3′ITR sequence region. As a non-limiting example, the viral genome comprises a 5′ITR sequence region, at least one promoter sequence region, a first exon sequence region, a first intron sequence region, a second intron sequence region, a second exon sequence region, a first signal sequence region, a first payload region comprising a variable heavy or light chain sequence, variant or fragment thereof, a first constant region of the first payload region, at least one linker sequence region, a second payload region comprising a variable heavy or light chain sequence, variant or fragment thereof, a tag sequence region, a PolyA sequence region, and a 3′ITR sequence region. As a non-limiting example, the viral genome comprises a 5′ITR sequence region, at least one promoter sequence region, a first exon sequence region, a first intron sequence region, a second intron sequence region, a second exon sequence region, a first signal sequence region, a first payload region comprising a variable heavy or light chain sequence, variant or fragment thereof, a first constant region of the first payload region, at least one linker sequence region, a second payload region comprising a variable heavy or light chain sequence, variant or fragment thereof, a PolyA sequence region, a filler sequence region, and a 3′ITR sequence region. As a non-limiting example, the viral genome comprises a 5′ITR sequence region, at least one promoter sequence region, a first exon sequence region, a first intron sequence region, a second intron sequence region, a second exon sequence region, a first signal sequence region, a first payload region comprising a variable heavy or light chain sequence, variant or fragment thereof, a first constant region of the first payload region, at least one linker sequence region, a second payload region comprising a variable heavy or light chain sequence, variant or fragment thereof, a PolyA sequence region, and a 3′ITR sequence region. As a non-limiting example, the viral genome comprises a 5′ITR sequence region, at least one promoter sequence region, a first exon sequence region, a first intron sequence region, a second intron sequence region, a second exon sequence region, a first signal sequence region, a first payload region comprising a variable heavy or light chain sequence, variant or fragment thereof, a first constant region of the first payload region, at least one linker sequence region, a second constant region of the first payload region, a tag sequence region, a PolyA sequence region, a filler sequence region, and a 3′ITR sequence region. As a non-limiting example, the viral genome comprises a 5′ITR sequence region, at least one promoter sequence region, a first exon sequence region, a first intron sequence region, a second intron sequence region, a second exon sequence region, a first signal sequence region, a first payload region comprising a variable heavy or light chain sequence, variant or fragment thereof, a first constant region of the first payload region, at least one linker sequence region, a second constant region of the first payload region, a tag sequence region, a PolyA sequence region, and a 3′ITR sequence region. As a non-limiting example, the viral genome comprises a 5′ITR sequence region, at least one promoter sequence region, a first exon sequence region, a first intron sequence region, a second intron sequence region, a second exon sequence region, a first signal sequence region, a first payload region comprising a variable heavy or light chain sequence, variant or fragment thereof, a first constant region of the first payload region, at least one linker sequence region, a second constant region of the first payload region, a PolyA sequence region, a filler sequence region, and a 3′ITR sequence region. As a non-limiting example, the viral genome comprises a 5′ITR sequence region, at least one promoter sequence region, a first exon sequence region, a first intron sequence region, a second intron sequence region, a second exon sequence region, a first signal sequence region, a first payload region comprising a variable heavy or light chain sequence, variant or fragment thereof, a first constant region of the first payload region, at least one linker sequence region, a second constant region of the first payload region, a PolyA sequence region, and a 3′ITR sequence region. As a non-limiting example, the viral genome comprises a 5′ITR sequence region, at least one promoter sequence region, a first exon sequence region, a first intron sequence region, a second intron sequence region, a second exon sequence region, a first signal sequence region, a first payload region comprising a variable heavy or light chain sequence, variant or fragment thereof, a first constant region of the first payload region, at least one linker sequence region, a tag sequence region, a PolyA sequence region, a filler sequence region, and a 3′ITR sequence region. As a non-limiting example, the viral genome comprises a 5′ITR sequence region, at least one promoter sequence region, a first exon sequence region, a first intron sequence region, a second intron sequence region, a second exon sequence region, a first signal sequence region, a first payload region comprising a variable heavy or light chain sequence, variant or fragment thereof, a first constant region of the first payload region, at least one linker sequence region, a tag sequence region, a PolyA sequence region, and a 3′ITR sequence region. As a non-limiting example, the viral genome comprises a 5′ITR sequence region, at least one promoter sequence region, a first exon sequence region, a first intron sequence region, a second intron sequence region, a second exon sequence region, a first signal sequence region, a first payload region comprising a variable heavy or light chain sequence, variant or fragment thereof, a first constant region of the first payload region, at least one linker sequence region, a PolyA sequence region, a filler sequence region, and a 3′ITR sequence region. As a non-limiting example, the viral genome comprises a 5′ITR sequence region, at least one promoter sequence region, a first exon sequence region, a first intron sequence region, a second intron sequence region, a second exon sequence region, a first signal sequence region, a first payload region comprising a variable heavy or light chain sequence, variant or fragment thereof, a first constant region of the first payload region, at least one linker sequence region, a PolyA sequence region, and a 3′ITR sequence region. As a non-limiting example, the viral genome comprises a 5′ITR sequence region, at least one promoter sequence region, a first exon sequence region, a first intron sequence region, a second intron sequence region, a second exon sequence region, a first signal sequence region, a first payload region comprising a variable heavy or light chain sequence, variant or fragment thereof, a first constant region of the first payload region, a second signal sequence region, a second payload region comprising a variable heavy or light chain sequence, variant or fragment thereof, a second constant region of the first payload region, a tag sequence region, a PolyA sequence region, a filler sequence region, and a 3′ITR sequence region. As a non-limiting example, the viral genome comprises a 5′ITR sequence region, at least one promoter sequence region, a first exon sequence region, a first intron sequence region, a second intron sequence region, a second exon sequence region, a first signal sequence region, a first payload region comprising a variable heavy or light chain sequence, variant or fragment thereof, a first constant region of the first payload region, a second signal sequence region, a second payload region comprising a variable heavy or light chain sequence, variant or fragment thereof, a second constant region of the first payload region, a tag sequence region, a PolyA sequence region, and a 3′ITR sequence region. As a non-limiting example, the viral genome comprises a 5′ITR sequence region, at least one promoter sequence region, a first exon sequence region, a first intron sequence region, a second intron sequence region, a second exon sequence region, a first signal sequence region, a first payload region comprising a variable heavy or light chain sequence, variant or fragment thereof, a first constant region of the first payload region, a second signal sequence region, a second payload region comprising a variable heavy or light chain sequence, variant or fragment thereof, a second constant region of the first payload region, a PolyA sequence region, a filler sequence region, and a 3′ITR sequence region. As a non-limiting example, the viral genome comprises a 5′ITR sequence region, at least one promoter sequence region, a first exon sequence region, a first intron sequence region, a second intron sequence region, a second exon sequence region, a first signal sequence region, a first payload region comprising a variable heavy or light chain sequence, variant or fragment thereof, a first constant region of the first payload region, a second signal sequence region, a second payload region comprising a variable heavy or light chain sequence, variant or fragment thereof, a second constant region of the first payload region, a PolyA sequence region, and a 3′ITR sequence region. As a non-limiting example, the viral genome comprises a 5′ITR sequence region, at least one promoter sequence region, a first exon sequence region, a first intron sequence region, a second intron sequence region, a second exon sequence region, a first signal sequence region, a first payload region comprising a variable heavy or light chain sequence, variant or fragment thereof, a first constant region of the first payload region, a second signal sequence region, a second payload region comprising a variable heavy or light chain sequence, variant or fragment thereof, a tag sequence region, a PolyA sequence region, a filler sequence region, and a 3′ITR sequence region. As a non-limiting example, the viral genome comprises a 5′ITR sequence region, at least one promoter sequence region, a first exon sequence region, a first intron sequence region, a second intron sequence region, a second exon sequence region, a first signal sequence region, a first payload region comprising a variable heavy or light chain sequence, variant or fragment thereof, a first constant region of the first payload region, a second signal sequence region, a second payload region comprising a variable heavy or light chain sequence, variant or fragment thereof, a tag sequence region, a PolyA sequence region, and a 3′ITR sequence region. As a non-limiting example, the viral genome comprises a 5′ITR sequence region, at least one promoter sequence region, a first exon sequence region, a first intron sequence region, a second intron sequence region, a second exon sequence region, a first signal sequence region, a first payload region comprising a variable heavy or light chain sequence, variant or fragment thereof, a first constant region of the first payload region, a second signal sequence region, a second payload region comprising a variable heavy or light chain sequence, variant or fragment thereof, a PolyA sequence region, a filler sequence region, and a 3′ITR sequence region. As a non-limiting example, the viral genome comprises a 5′ITR sequence region, at least one promoter sequence region, a first exon sequence region, a first intron sequence region, a second intron sequence region, a second exon sequence region, a first signal sequence region, a first payload region comprising a variable heavy or light chain sequence, variant or fragment thereof, a first constant region of the first payload region, a second signal sequence region, a second payload region comprising a variable heavy or light chain sequence, variant or fragment thereof, a PolyA sequence region, and a 3′ITR sequence region. As a non-limiting example, the viral genome comprises a 5′ITR sequence region, at least one promoter sequence region, a first exon sequence region, a first intron sequence region, a second intron sequence region, a second exon sequence region, a first signal sequence region, a first payload region comprising a variable heavy or light chain sequence, variant or fragment thereof, a first constant region of the first payload region, a second signal sequence region, a second constant region of the first payload region, a tag sequence region, a PolyA sequence region, a filler sequence region, and a 3′ITR sequence region. As a non-limiting example, the viral genome comprises a 5′ITR sequence region, at least one promoter sequence region, a first exon sequence region, a first intron sequence region, a second intron sequence region, a second exon sequence region, a first signal sequence region, a first payload region comprising a variable heavy or light chain sequence, variant or fragment thereof, a first constant region of the first payload region, a second signal sequence region, a second constant region of the first payload region, a tag sequence region, a PolyA sequence region, and a 3′ITR sequence region. As a non-limiting example, the viral genome comprises a 5′ITR sequence region, at least one promoter sequence region, a first exon sequence region, a first intron sequence region, a second intron sequence region, a second exon sequence region, a first signal sequence region, a first payload region comprising a variable heavy or light chain sequence, variant or fragment thereof, a first constant region of the first payload region, a second signal sequence region, a second constant region of the first payload region, a PolyA sequence region, a filler sequence region, and a 3′ITR sequence region. As a non-limiting example, the viral genome comprises a 5′ITR sequence region, at least one promoter sequence region, a first exon sequence region, a first intron sequence region, a second intron sequence region, a second exon sequence region, a first signal sequence region, a first payload region comprising a variable heavy or light chain sequence, variant or fragment thereof, a first constant region of the first payload region, a second signal sequence region, a second constant region of the first payload region, a PolyA sequence region, and a 3′ITR sequence region. As a non-limiting example, the viral genome comprises a 5′ITR sequence region, at least one promoter sequence region, a first exon sequence region, a first intron sequence region, a second intron sequence region, a second exon sequence region, a first signal sequence region, a first payload region comprising a variable heavy or light chain sequence, variant or fragment thereof, a first constant region of the first payload region, a second signal sequence region, a tag sequence region, a PolyA sequence region, a filler sequence region, and a 3′ITR sequence region. As a non-limiting example, the viral genome comprises a 5′ITR sequence region, at least one promoter sequence region, a first exon sequence region, a first intron sequence region, a second intron sequence region, a second exon sequence region, a first signal sequence region, a first payload region comprising a variable heavy or light chain sequence, variant or fragment thereof, a first constant region of the first payload region, a second signal sequence region, a tag sequence region, a PolyA sequence region, and a 3′ITR sequence region. As a non-limiting example, the viral genome comprises a 5′ITR sequence region, at least one promoter sequence region, a first exon sequence region, a first intron sequence region, a second intron sequence region, a second exon sequence region, a first signal sequence region, a first payload region comprising a variable heavy or light chain sequence, variant or fragment thereof, a first constant region of the first payload region, a second signal sequence region, a PolyA sequence region, a filler sequence region, and a 3′ITR sequence region. As a non-limiting example, the viral genome comprises a 5′ITR sequence region, at least one promoter sequence region, a first exon sequence region, a first intron sequence region, a second intron sequence region, a second exon sequence region, a first signal sequence region, a first payload region comprising a variable heavy or light chain sequence, variant or fragment thereof, a first constant region of the first payload region, a second signal sequence region, a PolyA sequence region, and a 3′ITR sequence region. As a non-limiting example, the viral genome comprises a 5′ITR sequence region, at least one promoter sequence region, a first exon sequence region, a first intron sequence region, a second intron sequence region, a second exon sequence region, a first signal sequence region, a first payload region comprising a variable heavy or light chain sequence, variant or fragment thereof, a first constant region of the first payload region, a second payload region comprising a variable heavy or light chain sequence, variant or fragment thereof, a second constant region of the first payload region, a tag sequence region, a PolyA sequence region, a filler sequence region, and a 3′ITR sequence region. As a non-limiting example, the viral genome comprises a 5′ITR sequence region, at least one promoter sequence region, a first exon sequence region, a first intron sequence region, a second intron sequence region, a second exon sequence region, a first signal sequence region, a first payload region comprising a variable heavy or light chain sequence, variant or fragment thereof, a first constant region of the first payload region, a second payload region comprising a variable heavy or light chain sequence, variant or fragment thereof, a second constant region of the first payload region, a tag sequence region, a PolyA sequence region, and a 3′ITR sequence region. As a non-limiting example, the viral genome comprises a 5′ITR sequence region, at least one promoter sequence region, a first exon sequence region, a first intron sequence region, a second intron sequence region, a second exon sequence region, a first signal sequence region, a first payload region comprising a variable heavy or light chain sequence, variant or fragment thereof, a first constant region of the first payload region, a second payload region comprising a variable heavy or light chain sequence, variant or fragment thereof, a second constant region of the first payload region, a PolyA sequence region, a filler sequence region, and a 3′ITR sequence region. As a non-limiting example, the viral genome comprises a 5′ITR sequence region, at least one promoter sequence region, a first exon sequence region, a first intron sequence region, a second intron sequence region, a second exon sequence region, a first signal sequence region, a first payload region comprising a variable heavy or light chain sequence, variant or fragment thereof, a first constant region of the first payload region, a second payload region comprising a variable heavy or light chain sequence, variant or fragment thereof, a second constant region of the first payload region, a PolyA sequence region, and a 3′ITR sequence region. As a non-limiting example, the viral genome comprises a 5′ITR sequence region, at least one promoter sequence region, a first exon sequence region, a first intron sequence region, a second intron sequence region, a second exon sequence region, a first signal sequence region, a first payload region comprising a variable heavy or light chain sequence, variant or fragment thereof, a first constant region of the first payload region, a second payload region comprising a variable heavy or light chain sequence, variant or fragment thereof, a tag sequence region, a PolyA sequence region, a filler sequence region, and a 3′ITR sequence region. As a non-limiting example, the viral genome comprises a 5′ITR sequence region, at least one promoter sequence region, a first exon sequence region, a first intron sequence region, a second intron sequence region, a second exon sequence region, a first signal sequence region, a first payload region comprising a variable heavy or light chain sequence, variant or fragment thereof, a first constant region of the first payload region, a second payload region comprising a variable heavy or light chain sequence, variant or fragment thereof, a tag sequence region, a PolyA sequence region, and a 3′ITR sequence region. As a non-limiting example, the viral genome comprises a 5′ITR sequence region, at least one promoter sequence region, a first exon sequence region, a first intron sequence region, a second intron sequence region, a second exon sequence region, a first signal sequence region, a first payload region comprising a variable heavy or light chain sequence, variant or fragment thereof, a first constant region of the first payload region, a second payload region comprising a variable heavy or light chain sequence, variant or fragment thereof, a PolyA sequence region, a filler sequence region, and a 3′ITR sequence region. As a non-limiting example, the viral genome comprises a 5′ITR sequence region, at least one promoter sequence region, a first exon sequence region, a first intron sequence region, a second intron sequence region, a second exon sequence region, a first signal sequence region, a first payload region comprising a variable heavy or light chain sequence, variant or fragment thereof, a first constant region of the first payload region, a second payload region comprising a variable heavy or light chain sequence, variant or fragment thereof, a PolyA sequence region, and a 3′ITR sequence region. As a non-limiting example, the viral genome comprises a 5′ITR sequence region, at least one promoter sequence region, a first exon sequence region, a first intron sequence region, a second intron sequence region, a second exon sequence region, a first signal sequence region, a first payload region comprising a variable heavy or light chain sequence, variant or fragment thereof, a first constant region of the first payload region, a second constant region of the first payload region, a tag sequence region, a PolyA sequence region, a filler sequence region, and a 3′ITR sequence region. As a non-limiting example, the viral genome comprises a 5′ITR sequence region, at least one promoter sequence region, a first exon sequence region, a first intron sequence region, a second intron sequence region, a second exon sequence region, a first signal sequence region, a first payload region comprising a variable heavy or light chain sequence, variant or fragment thereof, a first constant region of the first payload region, a second constant region of the first payload region, a tag sequence region, a PolyA sequence region, and a 3′ITR sequence region. As a non-limiting example, the viral genome comprises a 5′ITR sequence region, at least one promoter sequence region, a first exon sequence region, a first intron sequence region, a second intron sequence region, a second exon sequence region, a first signal sequence region, a first payload region comprising a variable heavy or light chain sequence, variant or fragment thereof, a first constant region of the first payload region, a second constant region of the first payload region, a PolyA sequence region, a filler sequence region, and a 3′ITR sequence region. As a non-limiting example, the viral genome comprises a 5′ITR sequence region, at least one promoter sequence region, a first exon sequence region, a first intron sequence region, a second intron sequence region, a second exon sequence region, a first signal sequence region, a first payload region comprising a variable heavy or light chain sequence, variant or fragment thereof, a first constant region of the first payload region, a second constant region of the first payload region, a PolyA sequence region, and a 3′ITR sequence region. As a non-limiting example, the viral genome comprises a 5′ITR sequence region, at least one promoter sequence region, a first exon sequence region, a first intron sequence region, a second intron sequence region, a second exon sequence region, a first signal sequence region, a first payload region comprising a variable heavy or light chain sequence, variant or fragment thereof, a first constant region of the first payload region, a tag sequence region, a PolyA sequence region, a filler sequence region, and a 3′ITR sequence region. As a non-limiting example, the viral genome comprises a 5′ITR sequence region, at least one promoter sequence region, a first exon sequence region, a first intron sequence region, a second intron sequence region, a second exon sequence region, a first signal sequence region, a first payload region comprising a variable heavy or light chain sequence, variant or fragment thereof, a first constant region of the first payload region, a tag sequence region, a PolyA sequence region, and a 3′ITR sequence region. As a non-limiting example, the viral genome comprises a 5′ITR sequence region, at least one promoter sequence region, a first exon sequence region, a first intron sequence region, a second intron sequence region, a second exon sequence region, a first signal sequence region, a first payload region comprising a variable heavy or light chain sequence, variant or fragment thereof, a first constant region of the first payload region, a PolyA sequence region, a filler sequence region, and a 3′ITR sequence region. As a non-limiting example, the viral genome comprises a 5′ITR sequence region, at least one promoter sequence region, a first exon sequence region, a first intron sequence region, a second intron sequence region, a second exon sequence region, a first signal sequence region, a first payload region comprising a variable heavy or light chain sequence, variant or fragment thereof, a first constant region of the first payload region, a PolyA sequence region, and a 3′ITR sequence region. As a non-limiting example, the viral genome comprises a 5′ITR sequence region, at least one promoter sequence region, a first exon sequence region, a first intron sequence region, a second intron sequence region, a second exon sequence region, a first signal sequence region, a first payload region comprising a variable heavy or light chain sequence, variant or fragment thereof, at least one linker sequence region, a second signal sequence region, a second payload region comprising a variable heavy or light chain sequence, variant or fragment thereof, a first constant region of the first payload region, a tag sequence region, a PolyA sequence region, a filler sequence region, and a 3′ITR sequence region. As a non-limiting example, the viral genome comprises a 5′ITR sequence region, at least one promoter sequence region, a first exon sequence region, a first intron sequence region, a second intron sequence region, a second exon sequence region, a first signal sequence region, a first payload region comprising a variable heavy or light chain sequence, variant or fragment thereof, at least one linker sequence region, a second signal sequence region, a second payload region comprising a variable heavy or light chain sequence, variant or fragment thereof, a first constant region of the first payload region, a tag sequence region, a PolyA sequence region, and a 3′ITR sequence region. As a non-limiting example, the viral genome comprises a 5′ITR sequence region, at least one promoter sequence region, a first exon sequence region, a first intron sequence region, a second intron sequence region, a second exon sequence region, a first signal sequence region, a first payload region comprising a variable heavy or light chain sequence, variant or fragment thereof, at least one linker sequence region, a second signal sequence region, a second payload region comprising a variable heavy or light chain sequence, variant or fragment thereof, a first constant region of the first payload region, a PolyA sequence region, a filler sequence region, and a 3′ITR sequence region. As a non-limiting example, the viral genome comprises a 5′ITR sequence region, at least one promoter sequence region, a first exon sequence region, a first intron sequence region, a second intron sequence region, a second exon sequence region, a first signal sequence region, a first payload region comprising a variable heavy or light chain sequence, variant or fragment thereof, at least one linker sequence region, a second signal sequence region, a second payload region comprising a variable heavy or light chain sequence, variant or fragment thereof, a first constant region of the first payload region, a PolyA sequence region, and a 3′ITR sequence region. As a non-limiting example, the viral genome comprises a 5′ITR sequence region, at least one promoter sequence region, a first exon sequence region, a first intron sequence region, a second intron sequence region, a second exon sequence region, a first signal sequence region, a first payload region comprising a variable heavy or light chain sequence, variant or fragment thereof, at least one linker sequence region, a second signal sequence region, a second payload region comprising a variable heavy or light chain sequence, variant or fragment thereof, a tag sequence region, a PolyA sequence region, a filler sequence region, and a 3′ITR sequence region. As a non-limiting example, the viral genome comprises a 5′ITR sequence region, at least one promoter sequence region, a first exon sequence region, a first intron sequence region, a second intron sequence region, a second exon sequence region, a first signal sequence region, a first payload region comprising a variable heavy or light chain sequence, variant or fragment thereof, at least one linker sequence region, a second signal sequence region, a second payload region comprising a variable heavy or light chain sequence, variant or fragment thereof, a tag sequence region, a PolyA sequence region, and a 3′ITR sequence region. As a non-limiting example, the viral genome comprises a 5′ITR sequence region, at least one promoter sequence region, a first exon sequence region, a first intron sequence region, a second intron sequence region, a second exon sequence region, a first signal sequence region, a first payload region comprising a variable heavy or light chain sequence, variant or fragment thereof, at least one linker sequence region, a second signal sequence region, a second payload region comprising a variable heavy or light chain sequence, variant or fragment thereof, a PolyA sequence region, a filler sequence region, and a 3′ITR sequence region. As a non-limiting example, the viral genome comprises a 5′ITR sequence region, at least one promoter sequence region, a first exon sequence region, a first intron sequence region, a second intron sequence region, a second exon sequence region, a first signal sequence region, a first payload region comprising a variable heavy or light chain sequence, variant or fragment thereof, at least one linker sequence region, a second signal sequence region, a second payload region comprising a variable heavy or light chain sequence, variant or fragment thereof, a PolyA sequence region, and a 3′ITR sequence region. As a non-limiting example, the viral genome comprises a 5′ITR sequence region, at least one promoter sequence region, a first exon sequence region, a first intron sequence region, a second intron sequence region, a second exon sequence region, a first signal sequence region, a first payload region comprising a variable heavy or light chain sequence, variant or fragment thereof, at least one linker sequence region, a second signal sequence region, a first constant region of the first payload region, a tag sequence region, a PolyA sequence region, a filler sequence region, and a 3′ITR sequence region. As a non-limiting example, the viral genome comprises a 5′ITR sequence region, at least one promoter sequence region, a first exon sequence region, a first intron sequence region, a second intron sequence region, a second exon sequence region, a first signal sequence region, a first payload region comprising a variable heavy or light chain sequence, variant or fragment thereof, at least one linker sequence region, a second signal sequence region, a first constant region of the first payload region, a tag sequence region, a PolyA sequence region, and a 3′ITR sequence region. As a non-limiting example, the viral genome comprises a 5′ITR sequence region, at least one promoter sequence region, a first exon sequence region, a first intron sequence region, a second intron sequence region, a second exon sequence region, a first signal sequence region, a first payload region comprising a variable heavy or light chain sequence, variant or fragment thereof, at least one linker sequence region, a second signal sequence region, a first constant region of the first payload region, a PolyA sequence region, a filler sequence region, and a 3′ITR sequence region. As a non-limiting example, the viral genome comprises a 5′ITR sequence region, at least one promoter sequence region, a first exon sequence region, a first intron sequence region, a second intron sequence region, a second exon sequence region, a first signal sequence region, a first payload region comprising a variable heavy or light chain sequence, variant or fragment thereof, at least one linker sequence region, a second signal sequence region, a first constant region of the first payload region, a PolyA sequence region, and a 3′ITR sequence region. As a non-limiting example, the viral genome comprises a 5′ITR sequence region, at least one promoter sequence region, a first exon sequence region, a first intron sequence region, a second intron sequence region, a second exon sequence region, a first signal sequence region, a first payload region comprising a variable heavy or light chain sequence, variant or fragment thereof, at least one linker sequence region, a second signal sequence region, a tag sequence region, a PolyA sequence region, a filler sequence region, and a 3′ITR sequence region. As a non-limiting example, the viral genome comprises a 5′ITR sequence region, at least one promoter sequence region, a first exon sequence region, a first intron sequence region, a second intron sequence region, a second exon sequence region, a first signal sequence region, a first payload region comprising a variable heavy or light chain sequence, variant or fragment thereof, at least one linker sequence region, a second signal sequence region, a tag sequence region, a PolyA sequence region, and a 3′ITR sequence region. As a non-limiting example, the viral genome comprises a 5′ITR sequence region, at least one promoter sequence region, a first exon sequence region, a first intron sequence region, a second intron sequence region, a second exon sequence region, a first signal sequence region, a first payload region comprising a variable heavy or light chain sequence, variant or fragment thereof, at least one linker sequence region, a second signal sequence region, a PolyA sequence region, a filler sequence region, and a 3′ITR sequence region. As a non-limiting example, the viral genome comprises a 5′ITR sequence region, at least one promoter sequence region, a first exon sequence region, a first intron sequence region, a second intron sequence region, a second exon sequence region, a first signal sequence region, a first payload region comprising a variable heavy or light chain sequence, variant or fragment thereof, at least one linker sequence region, a second signal sequence region, a PolyA sequence region, and a 3′ITR sequence region. As a non-limiting example, the viral genome comprises a 5′ITR sequence region, at least one promoter sequence region, a first exon sequence region, a first intron sequence region, a second intron sequence region, a second exon sequence region, a first signal sequence region, a first payload region comprising a variable heavy or light chain sequence, variant or fragment thereof, at least one linker sequence region, a second payload region comprising a variable heavy or light chain sequence, variant or fragment thereof, a first constant region of the first payload region, a tag sequence region, a PolyA sequence region, a filler sequence region, and a 3′ITR sequence region. As a non-limiting example, the viral genome comprises a 5′ITR sequence region, at least one promoter sequence region, a first exon sequence region, a first intron sequence region, a second intron sequence region, a second exon sequence region, a first signal sequence region, a first payload region comprising a variable heavy or light chain sequence, variant or fragment thereof, at least one linker sequence region, a second payload region comprising a variable heavy or light chain sequence, variant or fragment thereof, a first constant region of the first payload region, a tag sequence region, a PolyA sequence region, and a 3′ITR sequence region. As a non-limiting example, the viral genome comprises a 5′ITR sequence region, at least one promoter sequence region, a first exon sequence region, a first intron sequence region, a second intron sequence region, a second exon sequence region, a first signal sequence region, a first payload region comprising a variable heavy or light chain sequence, variant or fragment thereof, at least one linker sequence region, a second payload region comprising a variable heavy or light chain sequence, variant or fragment thereof, a first constant region of the first payload region, a PolyA sequence region, a filler sequence region, and a 3′ITR sequence region. As a non-limiting example, the viral genome comprises a 5′ITR sequence region, at least one promoter sequence region, a first exon sequence region, a first intron sequence region, a second intron sequence region, a second exon sequence region, a first signal sequence region, a first payload region comprising a variable heavy or light chain sequence, variant or fragment thereof, at least one linker sequence region, a second payload region comprising a variable heavy or light chain sequence, variant or fragment thereof, a first constant region of the first payload region, a PolyA sequence region, and a 3′ITR sequence region. As a non-limiting example, the viral genome comprises a 5′ITR sequence region, at least one promoter sequence region, a first exon sequence region, a first intron sequence region, a second intron sequence region, a second exon sequence region, a first signal sequence region, a first payload region comprising a variable heavy or light chain sequence, variant or fragment thereof, at least one linker sequence region, a second payload region comprising a variable heavy or light chain sequence, variant or fragment thereof, a tag sequence region, a PolyA sequence region, a filler sequence region, and a 3′ITR sequence region. As a non-limiting example, the viral genome comprises a 5′ITR sequence region, at least one promoter sequence region, a first exon sequence region, a first intron sequence region, a second intron sequence region, a second exon sequence region, a first signal sequence region, a first payload region comprising a variable heavy or light chain sequence, variant or fragment thereof, at least one linker sequence region, a second payload region comprising a variable heavy or light chain sequence, variant or fragment thereof, a tag sequence region, a PolyA sequence region, and a 3′ITR sequence region. As a non-limiting example, the viral genome comprises a 5′ITR sequence region, at least one promoter sequence region, a first exon sequence region, a first intron sequence region, a second intron sequence region, a second exon sequence region, a first signal sequence region, a first payload region comprising a variable heavy or light chain sequence, variant or fragment thereof, at least one linker sequence region, a second payload region comprising a variable heavy or light chain sequence, variant or fragment thereof, a PolyA sequence region, a filler sequence region, and a 3′ITR sequence region. As a non-limiting example, the viral genome comprises a 5′ITR sequence region, at least one promoter sequence region, a first exon sequence region, a first intron sequence region, a second intron sequence region, a second exon sequence region, a first signal sequence region, a first payload region comprising a variable heavy or light chain sequence, variant or fragment thereof, at least one linker sequence region, a second payload region comprising a variable heavy or light chain sequence, variant or fragment thereof, a PolyA sequence region, and a 3′ITR sequence region. As a non-limiting example, the viral genome comprises a 5′ITR sequence region, at least one promoter sequence region, a first exon sequence region, a first intron sequence region, a second intron sequence region, a second exon sequence region, a first signal sequence region, a first payload region comprising a variable heavy or light chain sequence, variant or fragment thereof, at least one linker sequence region, a first constant region of the first payload region, a tag sequence region, a PolyA sequence region, a filler sequence region, and a 3′ITR sequence region. As a non-limiting example, the viral genome comprises a 5′ITR sequence region, at least one promoter sequence region, a first exon sequence region, a first intron sequence region, a second intron sequence region, a second exon sequence region, a first signal sequence region, a first payload region comprising a variable heavy or light chain sequence, variant or fragment thereof, at least one linker sequence region, a first constant region of the first payload region, a tag sequence region, a PolyA sequence region, and a 3′ITR sequence region. As a non-limiting example, the viral genome comprises a 5′ITR sequence region, at least one promoter sequence region, a first exon sequence region, a first intron sequence region, a second intron sequence region, a second exon sequence region, a first signal sequence region, a first payload region comprising a variable heavy or light chain sequence, variant or fragment thereof, at least one linker sequence region, a first constant region of the first payload region, a PolyA sequence region, a filler sequence region, and a 3′ITR sequence region. As a non-limiting example, the viral genome comprises a 5′ITR sequence region, at least one promoter sequence region, a first exon sequence region, a first intron sequence region, a second intron sequence region, a second exon sequence region, a first signal sequence region, a first payload region comprising a variable heavy or light chain sequence, variant or fragment thereof, at least one linker sequence region, a first constant region of the first payload region, a PolyA sequence region, and a 3′ITR sequence region. As a non-limiting example, the viral genome comprises a 5′ITR sequence region, at least one promoter sequence region, a first exon sequence region, a first intron sequence region, a second intron sequence region, a second exon sequence region, a first signal sequence region, a first payload region comprising a variable heavy or light chain sequence, variant or fragment thereof, at least one linker sequence region, a tag sequence region, a PolyA sequence region, a filler sequence region, and a 3′ITR sequence region. As a non-limiting example, the viral genome comprises a 5′ITR sequence region, at least one promoter sequence region, a first exon sequence region, a first intron sequence region, a second intron sequence region, a second exon sequence region, a first signal sequence region, a first payload region comprising a variable heavy or light chain sequence, variant or fragment thereof, at least one linker sequence region, a tag sequence region, a PolyA sequence region, and a 3′ITR sequence region. As a non-limiting example, the viral genome comprises a 5′ITR sequence region, at least one promoter sequence region, a first exon sequence region, a first intron sequence region, a second intron sequence region, a second exon sequence region, a first signal sequence region, a first payload region comprising a variable heavy or light chain sequence, variant or fragment thereof, at least one linker sequence region, a PolyA sequence region, a filler sequence region, and a 3′ITR sequence region. As a non-limiting example, the viral genome comprises a 5′ITR sequence region, at least one promoter sequence region, a first exon sequence region, a first intron sequence region, a second intron sequence region, a second exon sequence region, a first signal sequence region, a first payload region comprising a variable heavy or light chain sequence, variant or fragment thereof, at least one linker sequence region, a PolyA sequence region, and a 3′ITR sequence region. As a non-limiting example, the viral genome comprises a 5′ITR sequence region, at least one promoter sequence region, a first exon sequence region, a first intron sequence region, a second intron sequence region, a second exon sequence region, a first signal sequence region, a first payload region comprising a variable heavy or light chain sequence, variant or fragment thereof, a second signal sequence region, a second payload region comprising a variable heavy or light chain sequence, variant or fragment thereof, a first constant region of the first payload region, a tag sequence region, a PolyA sequence region, a filler sequence region, and a 3′ITR sequence region. As a non-limiting example, the viral genome comprises a 5′ITR sequence region, at least one promoter sequence region, a first exon sequence region, a first intron sequence region, a second intron sequence region, a second exon sequence region, a first signal sequence region, a first payload region comprising a variable heavy or light chain sequence, variant or fragment thereof, a second signal sequence region, a second payload region comprising a variable heavy or light chain sequence, variant or fragment thereof, a first constant region of the first payload region, a tag sequence region, a PolyA sequence region, and a 3′ITR sequence region. As a non-limiting example, the viral genome comprises a 5′ITR sequence region, at least one promoter sequence region, a first exon sequence region, a first intron sequence region, a second intron sequence region, a second exon sequence region, a first signal sequence region, a first payload region comprising a variable heavy or light chain sequence, variant or fragment thereof, a second signal sequence region, a second payload region comprising a variable heavy or light chain sequence, variant or fragment thereof, a first constant region of the first payload region, a PolyA sequence region, a filler sequence region, and a 3′ITR sequence region. As a non-limiting example, the viral genome comprises a 5′ITR sequence region, at least one promoter sequence region, a first exon sequence region, a first intron sequence region, a second intron sequence region, a second exon sequence region, a first signal sequence region, a first payload region comprising a variable heavy or light chain sequence, variant or fragment thereof, a second signal sequence region, a second payload region comprising a variable heavy or light chain sequence, variant or fragment thereof, a first constant region of the first payload region, a PolyA sequence region, and a 3′ITR sequence region. As a non-limiting example, the viral genome comprises a 5′ITR sequence region, at least one promoter sequence region, a first exon sequence region, a first intron sequence region, a second intron sequence region, a second exon sequence region, a first signal sequence region, a first payload region comprising a variable heavy or light chain sequence, variant or fragment thereof, a second signal sequence region, a second payload region comprising a variable heavy or light chain sequence, variant or fragment thereof, a tag sequence region, a PolyA sequence region, a filler sequence region, and a 3′ITR sequence region. As a non-limiting example, the viral genome comprises a 5′ITR sequence region, at least one promoter sequence region, a first exon sequence region, a first intron sequence region, a second intron sequence region, a second exon sequence region, a first signal sequence region, a first payload region comprising a variable heavy or light chain sequence, variant or fragment thereof, a second signal sequence region, a second payload region comprising a variable heavy or light chain sequence, variant or fragment thereof, a tag sequence region, a PolyA sequence region, and a 3′ITR sequence region. As a non-limiting example, the viral genome comprises a 5′ITR sequence region, at least one promoter sequence region, a first exon sequence region, a first intron sequence region, a second intron sequence region, a second exon sequence region, a first signal sequence region, a first payload region comprising a variable heavy or light chain sequence, variant or fragment thereof, a second signal sequence region, a second payload region comprising a variable heavy or light chain sequence, variant or fragment thereof, a PolyA sequence region, a filler sequence region, and a 3′ITR sequence region. As a non-limiting example, the viral genome comprises a 5′ITR sequence region, at least one promoter sequence region, a first exon sequence region, a first intron sequence region, a second intron sequence region, a second exon sequence region, a first signal sequence region, a first payload region comprising a variable heavy or light chain sequence, variant or fragment thereof, a second signal sequence region, a second payload region comprising a variable heavy or light chain sequence, variant or fragment thereof, a PolyA sequence region, and a 3′ITR sequence region. As a non-limiting example, the viral genome comprises a 5′ITR sequence region, at least one promoter sequence region, a first exon sequence region, a first intron sequence region, a second intron sequence region, a second exon sequence region, a first signal sequence region, a first payload region comprising a variable heavy or light chain sequence, variant or fragment thereof, a second signal sequence region, a first constant region of the first payload region, a tag sequence region, a PolyA sequence region, a filler sequence region, and a 3′ITR sequence region. As a non-limiting example, the viral genome comprises a 5′ITR sequence region, at least one promoter sequence region, a first exon sequence region, a first intron sequence region, a second intron sequence region, a second exon sequence region, a first signal sequence region, a first payload region comprising a variable heavy or light chain sequence, variant or fragment thereof, a second signal sequence region, a first constant region of the first payload region, a tag sequence region, a PolyA sequence region, and a 3′ITR sequence region. As a non-limiting example, the viral genome comprises a 5′ITR sequence region, at least one promoter sequence region, a first exon sequence region, a first intron sequence region, a second intron sequence region, a second exon sequence region, a first signal sequence region, a first payload region comprising a variable heavy or light chain sequence, variant or fragment thereof, a second signal sequence region, a first constant region of the first payload region, a PolyA sequence region, a filler sequence region, and a 3′ITR sequence region. As a non-limiting example, the viral genome comprises a 5′ITR sequence region, at least one promoter sequence region, a first exon sequence region, a first intron sequence region, a second intron sequence region, a second exon sequence region, a first signal sequence region, a first payload region comprising a variable heavy or light chain sequence, variant or fragment thereof, a second signal sequence region, a first constant region of the first payload region, a PolyA sequence region, and a 3′ITR sequence region. As a non-limiting example, the viral genome comprises a 5′ITR sequence region, at least one promoter sequence region, a first exon sequence region, a first intron sequence region, a second intron sequence region, a second exon sequence region, a first signal sequence region, a first payload region comprising a variable heavy or light chain sequence, variant or fragment thereof, a second signal sequence region, a tag sequence region, a PolyA sequence region, a filler sequence region, and a 3′ITR sequence region. As a non-limiting example, the viral genome comprises a 5′ITR sequence region, at least one promoter sequence region, a first exon sequence region, a first intron sequence region, a second intron sequence region, a second exon sequence region, a first signal sequence region, a first payload region comprising a variable heavy or light chain sequence, variant or fragment thereof, a second signal sequence region, a tag sequence region, a PolyA sequence region, and a 3′ITR sequence region. As a non-limiting example, the viral genome comprises a 5′ITR sequence region, at least one promoter sequence region, a first exon sequence region, a first intron sequence region, a second intron sequence region, a second exon sequence region, a first signal sequence region, a first payload region comprising a variable heavy or light chain sequence, variant or fragment thereof, a second signal sequence region, a PolyA sequence region, a filler sequence region, and a 3′ITR sequence region. As a non-limiting example, the viral genome comprises a 5′ITR sequence region, at least one promoter sequence region, a first exon sequence region, a first intron sequence region, a second intron sequence region, a second exon sequence region, a first signal sequence region, a first payload region comprising a variable heavy or light chain sequence, variant or fragment thereof, a second signal sequence region, a PolyA sequence region, and a 3′ITR sequence region. As a non-limiting example, the viral genome comprises a 5′ITR sequence region, at least one promoter sequence region, a first exon sequence region, a first intron sequence region, a second intron sequence region, a second exon sequence region, a first signal sequence region, a first payload region comprising a variable heavy or light chain sequence, variant or fragment thereof, a second payload region comprising a variable heavy or light chain sequence, variant or fragment thereof, a first constant region of the first payload region, a tag sequence region, a PolyA sequence region, a filler sequence region, and a 3′ITR sequence region. As a non-limiting example, the viral genome comprises a 5′ITR sequence region, at least one promoter sequence region, a first exon sequence region, a first intron sequence region, a second intron sequence region, a second exon sequence region, a first signal sequence region, a first payload region comprising a variable heavy or light chain sequence, variant or fragment thereof, a second payload region comprising a variable heavy or light chain sequence, variant or fragment thereof, a first constant region of the first payload region, a tag sequence region, a PolyA sequence region, and a 3′ITR sequence region. As a non-limiting example, the viral genome comprises a 5′ITR sequence region, at least one promoter sequence region, a first exon sequence region, a first intron sequence region, a second intron sequence region, a second exon sequence region, a first signal sequence region, a first payload region comprising a variable heavy or light chain sequence, variant or fragment thereof, a second payload region comprising a variable heavy or light chain sequence, variant or fragment thereof, a first constant region of the first payload region, a PolyA sequence region, a filler sequence region, and a 3′ITR sequence region. As a non-limiting example, the viral genome comprises a 5′ITR sequence region, at least one promoter sequence region, a first exon sequence region, a first intron sequence region, a second intron sequence region, a second exon sequence region, a first signal sequence region, a first payload region comprising a variable heavy or light chain sequence, variant or fragment thereof, a second payload region comprising a variable heavy or light chain sequence, variant or fragment thereof, a first constant region of the first payload region, a PolyA sequence region, and a 3′ITR sequence region. As a non-limiting example, the viral genome comprises a 5′ITR sequence region, at least one promoter sequence region, a first exon sequence region, a first intron sequence region, a second intron sequence region, a second exon sequence region, a first signal sequence region, a first payload region comprising a variable heavy or light chain sequence, variant or fragment thereof, a second payload region comprising a variable heavy or light chain sequence, variant or fragment thereof, a tag sequence region, a PolyA sequence region, a filler sequence region, and a 3′ITR sequence region. As a non-limiting example, the viral genome comprises a 5′ITR sequence region, at least one promoter sequence region, a first exon sequence region, a first intron sequence region, a second intron sequence region, a second exon sequence region, a first signal sequence region, a first payload region comprising a variable heavy or light chain sequence, variant or fragment thereof, a second payload region comprising a variable heavy or light chain sequence, variant or fragment thereof, a tag sequence region, a PolyA sequence region, and a 3′ITR sequence region. As a non-limiting example, the viral genome comprises a 5′ITR sequence region, at least one promoter sequence region, a first exon sequence region, a first intron sequence region, a second intron sequence region, a second exon sequence region, a first signal sequence region, a first payload region comprising a variable heavy or light chain sequence, variant or fragment thereof, a second payload region comprising a variable heavy or light chain sequence, variant or fragment thereof, a PolyA sequence region, a filler sequence region, and a 3′ITR sequence region. As a non-limiting example, the viral genome comprises a 5′ITR sequence region, at least one promoter sequence region, a first exon sequence region, a first intron sequence region, a second intron sequence region, a second exon sequence region, a first signal sequence region, a first payload region comprising a variable heavy or light chain sequence, variant or fragment thereof, a second payload region comprising a variable heavy or light chain sequence, variant or fragment thereof, a PolyA sequence region, and a 3′ITR sequence region. As a non-limiting example, the viral genome comprises a 5′ITR sequence region, at least one promoter sequence region, a first exon sequence region, a first intron sequence region, a second intron sequence region, a second exon sequence region, a first signal sequence region, a first payload region comprising a variable heavy or light chain sequence, variant or fragment thereof, a first constant region of the first payload region, a tag sequence region, a PolyA sequence region, a filler sequence region, and a 3′ITR sequence region. As a non-limiting example, the viral genome comprises a 5′ITR sequence region, at least one promoter sequence region, a first exon sequence region, a first intron sequence region, a second intron sequence region, a second exon sequence region, a first signal sequence region, a first payload region comprising a variable heavy or light chain sequence, variant or fragment thereof, a first constant region of the first payload region, a tag sequence region, a PolyA sequence region, and a 3′ITR sequence region. As a non-limiting example, the viral genome comprises a 5′ITR sequence region, at least one promoter sequence region, a first exon sequence region, a first intron sequence region, a second intron sequence region, a second exon sequence region, a first signal sequence region, a first payload region comprising a variable heavy or light chain sequence, variant or fragment thereof, a first constant region of the first payload region, a PolyA sequence region, a filler sequence region, and a 3′ITR sequence region. As a non-limiting example, the viral genome comprises a 5′ITR sequence region, at least one promoter sequence region, a first exon sequence region, a first intron sequence region, a second intron sequence region, a second exon sequence region, a first signal sequence region, a first payload region comprising a variable heavy or light chain sequence, variant or fragment thereof, a first constant region of the first payload region, a PolyA sequence region, and a 3′ITR sequence region. As a non-limiting example, the viral genome comprises a 5′ITR sequence region, at least one promoter sequence region, a first exon sequence region, a first intron sequence region, a second intron sequence region, a second exon sequence region, a first signal sequence region, a first payload region comprising a variable heavy or light chain sequence, variant or fragment thereof, a tag sequence region, a PolyA sequence region, a filler sequence region, and a 3′ITR sequence region. As a non-limiting example, the viral genome comprises a 5′ITR sequence region, at least one promoter sequence region, a first exon sequence region, a first intron sequence region, a second intron sequence region, a second exon sequence region, a first signal sequence region, a first payload region comprising a variable heavy or light chain sequence, variant or fragment thereof, a tag sequence region, a PolyA sequence region, and a 3′ITR sequence region. As a non-limiting example, the viral genome comprises a 5′ITR sequence region, at least one promoter sequence region, a first exon sequence region, a first intron sequence region, a second intron sequence region, a second exon sequence region, a first signal sequence region, a first payload region comprising a variable heavy or light chain sequence, variant or fragment thereof, a PolyA sequence region, a filler sequence region, and a 3′ITR sequence region. As a non-limiting example, the viral genome comprises a 5′ITR sequence region, at least one promoter sequence region, a first exon sequence region, a first intron sequence region, a second intron sequence region, a second exon sequence region, a first signal sequence region, a first payload region comprising a variable heavy or light chain sequence, variant or fragment thereof, a PolyA sequence region, and a 3′ITR sequence region. As a non-limiting example, the viral genome comprises a 5′ITR sequence region, at least one promoter sequence region, a first exon sequence region, a first intron sequence region, a second intron sequence region, a second exon sequence region, a first payload region comprising a variable heavy or light chain sequence, variant or fragment thereof, a first constant region of the first payload region, at least one linker sequence region, a first signal sequence region, a second payload region comprising a variable heavy or light chain sequence, variant or fragment thereof, a second constant region of the first payload region, a tag sequence region, a PolyA sequence region, a filler sequence region, and a 3′ITR sequence region. As a non-limiting example, the viral genome comprises a 5′ITR sequence region, at least one promoter sequence region, a first exon sequence region, a first intron sequence region, a second intron sequence region, a second exon sequence region, a first payload region comprising a variable heavy or light chain sequence, variant or fragment thereof, a first constant region of the first payload region, at least one linker sequence region, a first signal sequence region, a second payload region comprising a variable heavy or light chain sequence, variant or fragment thereof, a second constant region of the first payload region, a tag sequence region, a PolyA sequence region, and a 3′ITR sequence region. As a non-limiting example, the viral genome comprises a 5′ITR sequence region, at least one promoter sequence region, a first exon sequence region, a first intron sequence region, a second intron sequence region, a second exon sequence region, a first payload region comprising a variable heavy or light chain sequence, variant or fragment thereof, a first constant region of the first payload region, at least one linker sequence region, a first signal sequence region, a second payload region comprising a variable heavy or light chain sequence, variant or fragment thereof, a second constant region of the first payload region, a PolyA sequence region, a filler sequence region, and a 3′ITR sequence region. As a non-limiting example, the viral genome comprises a 5′ITR sequence region, at least one promoter sequence region, a first exon sequence region, a first intron sequence region, a second intron sequence region, a second exon sequence region, a first payload region comprising a variable heavy or light chain sequence, variant or fragment thereof, a first constant region of the first payload region, at least one linker sequence region, a first signal sequence region, a second payload region comprising a variable heavy or light chain sequence, variant or fragment thereof, a second constant region of the first payload region, a PolyA sequence region, and a 3′ITR sequence region. As a non-limiting example, the viral genome comprises a 5′ITR sequence region, at least one promoter sequence region, a first exon sequence region, a first intron sequence region, a second intron sequence region, a second exon sequence region, a first payload region comprising a variable heavy or light chain sequence, variant or fragment thereof, a first constant region of the first payload region, at least one linker sequence region, a first signal sequence region, a second payload region comprising a variable heavy or light chain sequence, variant or fragment thereof, a tag sequence region, a PolyA sequence region, a filler sequence region, and a 3′ITR sequence region. As a non-limiting example, the viral genome comprises a 5′ITR sequence region, at least one promoter sequence region, a first exon sequence region, a first intron sequence region, a second intron sequence region, a second exon sequence region, a first payload region comprising a variable heavy or light chain sequence, variant or fragment thereof, a first constant region of the first payload region, at least one linker sequence region, a first signal sequence region, a second payload region comprising a variable heavy or light chain sequence, variant or fragment thereof, a tag sequence region, a PolyA sequence region, and a 3′ITR sequence region. As a non-limiting example, the viral genome comprises a 5′ITR sequence region, at least one promoter sequence region, a first exon sequence region, a first intron sequence region, a second intron sequence region, a second exon sequence region, a first payload region comprising a variable heavy or light chain sequence, variant or fragment thereof, a first constant region of the first payload region, at least one linker sequence region, a first signal sequence region, a second payload region comprising a variable heavy or light chain sequence, variant or fragment thereof, a PolyA sequence region, a filler sequence region, and a 3′ITR sequence region. As a non-limiting example, the viral genome comprises a 5′ITR sequence region, at least one promoter sequence region, a first exon sequence region, a first intron sequence region, a second intron sequence region, a second exon sequence region, a first payload region comprising a variable heavy or light chain sequence, variant or fragment thereof, a first constant region of the first payload region, at least one linker sequence region, a first signal sequence region, a second payload region comprising a variable heavy or light chain sequence, variant or fragment thereof, a PolyA sequence region, and a 3′ITR sequence region. As a non-limiting example, the viral genome comprises a 5′ITR sequence region, at least one promoter sequence region, a first exon sequence region, a first intron sequence region, a second intron sequence region, a second exon sequence region, a first payload region comprising a variable heavy or light chain sequence, variant or fragment thereof, a first constant region of the first payload region, at least one linker sequence region, a first signal sequence region, a second constant region of the first payload region, a tag sequence region, a PolyA sequence region, a filler sequence region, and a 3′ITR sequence region. As a non-limiting example, the viral genome comprises a 5′ITR sequence region, at least one promoter sequence region, a first exon sequence region, a first intron sequence region, a second intron sequence region, a second exon sequence region, a first payload region comprising a variable heavy or light chain sequence, variant or fragment thereof, a first constant region of the first payload region, at least one linker sequence region, a first signal sequence region, a second constant region of the first payload region, a tag sequence region, a PolyA sequence region, and a 3′ITR sequence region. As a non-limiting example, the viral genome comprises a 5′ITR sequence region, at least one promoter sequence region, a first exon sequence region, a first intron sequence region, a second intron sequence region, a second exon sequence region, a first payload region comprising a variable heavy or light chain sequence, variant or fragment thereof, a first constant region of the first payload region, at least one linker sequence region, a first signal sequence region, a second constant region of the first payload region, a PolyA sequence region, a filler sequence region, and a 3′ITR sequence region. As a non-limiting example, the viral genome comprises a 5′ITR sequence region, at least one promoter sequence region, a first exon sequence region, a first intron sequence region, a second intron sequence region, a second exon sequence region, a first payload region comprising a variable heavy or light chain sequence, variant or fragment thereof, a first constant region of the first payload region, at least one linker sequence region, a first signal sequence region, a second constant region of the first payload region, a PolyA sequence region, and a 3′ITR sequence region. As a non-limiting example, the viral genome comprises a 5′ITR sequence region, at least one promoter sequence region, a first exon sequence region, a first intron sequence region, a second intron sequence region, a second exon sequence region, a first payload region comprising a variable heavy or light chain sequence, variant or fragment thereof, a first constant region of the first payload region, at least one linker sequence region, a first signal sequence region, a tag sequence region, a PolyA sequence region, a filler sequence region, and a 3′ITR sequence region. As a non-limiting example, the viral genome comprises a 5′ITR sequence region, at least one promoter sequence region, a first exon sequence region, a first intron sequence region, a second intron sequence region, a second exon sequence region, a first payload region comprising a variable heavy or light chain sequence, variant or fragment thereof, a first constant region of the first payload region, at least one linker sequence region, a first signal sequence region, a tag sequence region, a PolyA sequence region, and a 3′ITR sequence region. As a non-limiting example, the viral genome comprises a 5′ITR sequence region, at least one promoter sequence region, a first exon sequence region, a first intron sequence region, a second intron sequence region, a second exon sequence region, a first payload region comprising a variable heavy or light chain sequence, variant or fragment thereof, a first constant region of the first payload region, at least one linker sequence region, a first signal sequence region, a PolyA sequence region, a filler sequence region, and a 3′ITR sequence region. As a non-limiting example, the viral genome comprises a 5′ITR sequence region, at least one promoter sequence region, a first exon sequence region, a first intron sequence region, a second intron sequence region, a second exon sequence region, a first payload region comprising a variable heavy or light chain sequence, variant or fragment thereof, a first constant region of the first payload region, at least one linker sequence region, a first signal sequence region, a PolyA sequence region, and a 3′ITR sequence region. As a non-limiting example, the viral genome comprises a 5′ITR sequence region, at least one promoter sequence region, a first exon sequence region, a first intron sequence region, a second intron sequence region, a second exon sequence region, a first payload region comprising a variable heavy or light chain sequence, variant or fragment thereof, a first constant region of the first payload region, at least one linker sequence region, a second payload region comprising a variable heavy or light chain sequence, variant or fragment thereof, a second constant region of the first payload region, a tag sequence region, a PolyA sequence region, a filler sequence region, and a 3′ITR sequence region. As a non-limiting example, the viral genome comprises a 5′ITR sequence region, at least one promoter sequence region, a first exon sequence region, a first intron sequence region, a second intron sequence region, a second exon sequence region, a first payload region comprising a variable heavy or light chain sequence, variant or fragment thereof, a first constant region of the first payload region, at least one linker sequence region, a second payload region comprising a variable heavy or light chain sequence, variant or fragment thereof, a second constant region of the first payload region, a tag sequence region, a PolyA sequence region, and a 3′ITR sequence region. As a non-limiting example, the viral genome comprises a 5′ITR sequence region, at least one promoter sequence region, a first exon sequence region, a first intron sequence region, a second intron sequence region, a second exon sequence region, a first payload region comprising a variable heavy or light chain sequence, variant or fragment thereof, a first constant region of the first payload region, at least one linker sequence region, a second payload region comprising a variable heavy or light chain sequence, variant or fragment thereof, a second constant region of the first payload region, a PolyA sequence region, a filler sequence region, and a 3′ITR sequence region. As a non-limiting example, the viral genome comprises a 5′ITR sequence region, at least one promoter sequence region, a first exon sequence region, a first intron sequence region, a second intron sequence region, a second exon sequence region, a first payload region comprising a variable heavy or light chain sequence, variant or fragment thereof, a first constant region of the first payload region, at least one linker sequence region, a second payload region comprising a variable heavy or light chain sequence, variant or fragment thereof, a second constant region of the first payload region, a PolyA sequence region, and a 3′ITR sequence region. As a non-limiting example, the viral genome comprises a 5′ITR sequence region, at least one promoter sequence region, a first exon sequence region, a first intron sequence region, a second intron sequence region, a second exon sequence region, a first payload region comprising a variable heavy or light chain sequence, variant or fragment thereof, a first constant region of the first payload region, at least one linker sequence region, a second payload region comprising a variable heavy or light chain sequence, variant or fragment thereof, a tag sequence region, a PolyA sequence region, a filler sequence region, and a 3′ITR sequence region. As a non-limiting example, the viral genome comprises a 5′ITR sequence region, at least one promoter sequence region, a first exon sequence region, a first intron sequence region, a second intron sequence region, a second exon sequence region, a first payload region comprising a variable heavy or light chain sequence, variant or fragment thereof, a first constant region of the first payload region, at least one linker sequence region, a second payload region comprising a variable heavy or light chain sequence, variant or fragment thereof, a tag sequence region, a PolyA sequence region, and a 3′ITR sequence region. As a non-limiting example, the viral genome comprises a 5′ITR sequence region, at least one promoter sequence region, a first exon sequence region, a first intron sequence region, a second intron sequence region, a second exon sequence region, a first payload region comprising a variable heavy or light chain sequence, variant or fragment thereof, a first constant region of the first payload region, at least one linker sequence region, a second payload region comprising a variable heavy or light chain sequence, variant or fragment thereof, a PolyA sequence region, a filler sequence region, and a 3′ITR sequence region. As a non-limiting example, the viral genome comprises a 5′ITR sequence region, at least one promoter sequence region, a first exon sequence region, a first intron sequence region, a second intron sequence region, a second exon sequence region, a first payload region comprising a variable heavy or light chain sequence, variant or fragment thereof, a first constant region of the first payload region, at least one linker sequence region, a second payload region comprising a variable heavy or light chain sequence, variant or fragment thereof, a PolyA sequence region, and a 3′ITR sequence region. As a non-limiting example, the viral genome comprises a 5′ITR sequence region, at least one promoter sequence region, a first exon sequence region, a first intron sequence region, a second intron sequence region, a second exon sequence region, a first payload region comprising a variable heavy or light chain sequence, variant or fragment thereof, a first constant region of the first payload region, at least one linker sequence region, a second constant region of the first payload region, a tag sequence region, a PolyA sequence region, a filler sequence region, and a 3′ITR sequence region. As a non-limiting example, the viral genome comprises a 5′ITR sequence region, at least one promoter sequence region, a first exon sequence region, a first intron sequence region, a second intron sequence region, a second exon sequence region, a first payload region comprising a variable heavy or light chain sequence, variant or fragment thereof, a first constant region of the first payload region, at least one linker sequence region, a second constant region of the first payload region, a tag sequence region, a PolyA sequence region, and a 3′ITR sequence region. As a non-limiting example, the viral genome comprises a 5′ITR sequence region, at least one promoter sequence region, a first exon sequence region, a first intron sequence region, a second intron sequence region, a second exon sequence region, a first payload region comprising a variable heavy or light chain sequence, variant or fragment thereof, a first constant region of the first payload region, at least one linker sequence region, a second constant region of the first payload region, a PolyA sequence region, a filler sequence region, and a 3′ITR sequence region. As a non-limiting example, the viral genome comprises a 5′ITR sequence region, at least one promoter sequence region, a first exon sequence region, a first intron sequence region, a second intron sequence region, a second exon sequence region, a first payload region comprising a variable heavy or light chain sequence, variant or fragment thereof, a first constant region of the first payload region, at least one linker sequence region, a second constant region of the first payload region, a PolyA sequence region, and a 3′ITR sequence region. As a non-limiting example, the viral genome comprises a 5′ITR sequence region, at least one promoter sequence region, a first exon sequence region, a first intron sequence region, a second intron sequence region, a second exon sequence region, a first payload region comprising a variable heavy or light chain sequence, variant or fragment thereof, a first constant region of the first payload region, at least one linker sequence region, a tag sequence region, a PolyA sequence region, a filler sequence region, and a 3′ITR sequence region. As a non-limiting example, the viral genome comprises a 5′ITR sequence region, at least one promoter sequence region, a first exon sequence region, a first intron sequence region, a second intron sequence region, a second exon sequence region, a first payload region comprising a variable heavy or light chain sequence, variant or fragment thereof, a first constant region of the first payload region, at least one linker sequence region, a tag sequence region, a PolyA sequence region, and a 3′ITR sequence region. As a non-limiting example, the viral genome comprises a 5′ITR sequence region, at least one promoter sequence region, a first exon sequence region, a first intron sequence region, a second intron sequence region, a second exon sequence region, a first payload region comprising a variable heavy or light chain sequence, variant or fragment thereof, a first constant region of the first payload region, at least one linker sequence region, a PolyA sequence region, a filler sequence region, and a 3′ITR sequence region. As a non-limiting example, the viral genome comprises a 5′ITR sequence region, at least one promoter sequence region, a first exon sequence region, a first intron sequence region, a second intron sequence region, a second exon sequence region, a first payload region comprising a variable heavy or light chain sequence, variant or fragment thereof, a first constant region of the first payload region, at least one linker sequence region, a PolyA sequence region, and a 3′ITR sequence region. As a non-limiting example, the viral genome comprises a 5′ITR sequence region, at least one promoter sequence region, a first exon sequence region, a first intron sequence region, a second intron sequence region, a second exon sequence region, a first payload region comprising a variable heavy or light chain sequence, variant or fragment thereof, a first constant region of the first payload region, a first signal sequence region, a second payload region comprising a variable heavy or light chain sequence, variant or fragment thereof, a second constant region of the first payload region, a tag sequence region, a PolyA sequence region, a filler sequence region, and a 3′ITR sequence region. As a non-limiting example, the viral genome comprises a 5′ITR sequence region, at least one promoter sequence region, a first exon sequence region, a first intron sequence region, a second intron sequence region, a second exon sequence region, a first payload region comprising a variable heavy or light chain sequence, variant or fragment thereof, a first constant region of the first payload region, a first signal sequence region, a second payload region comprising a variable heavy or light chain sequence, variant or fragment thereof, a second constant region of the first payload region, a tag sequence region, a PolyA sequence region, and a 3′ITR sequence region. As a non-limiting example, the viral genome comprises a 5′ITR sequence region, at least one promoter sequence region, a first exon sequence region, a first intron sequence region, a second intron sequence region, a second exon sequence region, a first payload region comprising a variable heavy or light chain sequence, variant or fragment thereof, a first constant region of the first payload region, a first signal sequence region, a second payload region comprising a variable heavy or light chain sequence, variant or fragment thereof, a second constant region of the first payload region, a PolyA sequence region, a filler sequence region, and a 3′ITR sequence region. As a non-limiting example, the viral genome comprises a 5′ITR sequence region, at least one promoter sequence region, a first exon sequence region, a first intron sequence region, a second intron sequence region, a second exon sequence region, a first payload region comprising a variable heavy or light chain sequence, variant or fragment thereof, a first constant region of the first payload region, a first signal sequence region, a second payload region comprising a variable heavy or light chain sequence, variant or fragment thereof, a second constant region of the first payload region, a PolyA sequence region, and a 3′ITR sequence region. As a non-limiting example, the viral genome comprises a 5′ITR sequence region, at least one promoter sequence region, a first exon sequence region, a first intron sequence region, a second intron sequence region, a second exon sequence region, a first payload region comprising a variable heavy or light chain sequence, variant or fragment thereof, a first constant region of the first payload region, a first signal sequence region, a second payload region comprising a variable heavy or light chain sequence, variant or fragment thereof, a tag sequence region, a PolyA sequence region, a filler sequence region, and a 3′ITR sequence region. As a non-limiting example, the viral genome comprises a 5′ITR sequence region, at least one promoter sequence region, a first exon sequence region, a first intron sequence region, a second intron sequence region, a second exon sequence region, a first payload region comprising a variable heavy or light chain sequence, variant or fragment thereof, a first constant region of the first payload region, a first signal sequence region, a second payload region comprising a variable heavy or light chain sequence, variant or fragment thereof, a tag sequence region, a PolyA sequence region, and a 3′ITR sequence region. As a non-limiting example, the viral genome comprises a 5′ITR sequence region, at least one promoter sequence region, a first exon sequence region, a first intron sequence region, a second intron sequence region, a second exon sequence region, a first payload region comprising a variable heavy or light chain sequence, variant or fragment thereof, a first constant region of the first payload region, a first signal sequence region, a second payload region comprising a variable heavy or light chain sequence, variant or fragment thereof, a PolyA sequence region, a filler sequence region, and a 3′ITR sequence region. As a non-limiting example, the viral genome comprises a 5′ITR sequence region, at least one promoter sequence region, a first exon sequence region, a first intron sequence region, a second intron sequence region, a second exon sequence region, a first payload region comprising a variable heavy or light chain sequence, variant or fragment thereof, a first constant region of the first payload region, a first signal sequence region, a second payload region comprising a variable heavy or light chain sequence, variant or fragment thereof, a PolyA sequence region, and a 3′ITR sequence region. As a non-limiting example, the viral genome comprises a 5′ITR sequence region, at least one promoter sequence region, a first exon sequence region, a first intron sequence region, a second intron sequence region, a second exon sequence region, a first payload region comprising a variable heavy or light chain sequence, variant or fragment thereof, a first constant region of the first payload region, a first signal sequence region, a second constant region of the first payload region, a tag sequence region, a PolyA sequence region, a filler sequence region, and a 3′ITR sequence region. As a non-limiting example, the viral genome comprises a 5′ITR sequence region, at least one promoter sequence region, a first exon sequence region, a first intron sequence region, a second intron sequence region, a second exon sequence region, a first payload region comprising a variable heavy or light chain sequence, variant or fragment thereof, a first constant region of the first payload region, a first signal sequence region, a second constant region of the first payload region, a tag sequence region, a PolyA sequence region, and a 3′ITR sequence region. As a non-limiting example, the viral genome comprises a 5′ITR sequence region, at least one promoter sequence region, a first exon sequence region, a first intron sequence region, a second intron sequence region, a second exon sequence region, a first payload region comprising a variable heavy or light chain sequence, variant or fragment thereof, a first constant region of the first payload region, a first signal sequence region, a second constant region of the first payload region, a PolyA sequence region, a filler sequence region, and a 3′ITR sequence region. As a non-limiting example, the viral genome comprises a 5′ITR sequence region, at least one promoter sequence region, a first exon sequence region, a first intron sequence region, a second intron sequence region, a second exon sequence region, a first payload region comprising a variable heavy or light chain sequence, variant or fragment thereof, a first constant region of the first payload region, a first signal sequence region, a second constant region of the first payload region, a PolyA sequence region, and a 3′ITR sequence region. As a non-limiting example, the viral genome comprises a 5′ITR sequence region, at least one promoter sequence region, a first exon sequence region, a first intron sequence region, a second intron sequence region, a second exon sequence region, a first payload region comprising a variable heavy or light chain sequence, variant or fragment thereof, a first constant region of the first payload region, a first signal sequence region, a tag sequence region, a PolyA sequence region, a filler sequence region, and a 3′ITR sequence region. As a non-limiting example, the viral genome comprises a 5′ITR sequence region, at least one promoter sequence region, a first exon sequence region, a first intron sequence region, a second intron sequence region, a second exon sequence region, a first payload region comprising a variable heavy or light chain sequence, variant or fragment thereof, a first constant region of the first payload region, a first signal sequence region, a tag sequence region, a PolyA sequence region, and a 3′ITR sequence region. As a non-limiting example, the viral genome comprises a 5′ITR sequence region, at least one promoter sequence region, a first exon sequence region, a first intron sequence region, a second intron sequence region, a second exon sequence region, a first payload region comprising a variable heavy or light chain sequence, variant or fragment thereof, a first constant region of the first payload region, a first signal sequence region, a PolyA sequence region, a filler sequence region, and a 3′ITR sequence region. As a non-limiting example, the viral genome comprises a 5′ITR sequence region, at least one promoter sequence region, a first exon sequence region, a first intron sequence region, a second intron sequence region, a second exon sequence region, a first payload region comprising a variable heavy or light chain sequence, variant or fragment thereof, a first constant region of the first payload region, a first signal sequence region, a PolyA sequence region, and a 3′ITR sequence region. As a non-limiting example, the viral genome comprises a 5′ITR sequence region, at least one promoter sequence region, a first exon sequence region, a first intron sequence region, a second intron sequence region, a second exon sequence region, a first payload region comprising a variable heavy or light chain sequence, variant or fragment thereof, a first constant region of the first payload region, a second payload region comprising a variable heavy or light chain sequence, variant or fragment thereof, a second constant region of the first payload region, a tag sequence region, a PolyA sequence region, a filler sequence region, and a 3′ITR sequence region. As a non-limiting example, the viral genome comprises a 5′ITR sequence region, at least one promoter sequence region, a first exon sequence region, a first intron sequence region, a second intron sequence region, a second exon sequence region, a first payload region comprising a variable heavy or light chain sequence, variant or fragment thereof, a first constant region of the first payload region, a second payload region comprising a variable heavy or light chain sequence, variant or fragment thereof, a second constant region of the first payload region, a tag sequence region, a PolyA sequence region, and a 3′ITR sequence region. As a non-limiting example, the viral genome comprises a 5′ITR sequence region, at least one promoter sequence region, a first exon sequence region, a first intron sequence region, a second intron sequence region, a second exon sequence region, a first payload region comprising a variable heavy or light chain sequence, variant or fragment thereof, a first constant region of the first payload region, a second payload region comprising a variable heavy or light chain sequence, variant or fragment thereof, a second constant region of the first payload region, a PolyA sequence region, a filler sequence region, and a 3′ITR sequence region. As a non-limiting example, the viral genome comprises a 5′ITR sequence region, at least one promoter sequence region, a first exon sequence region, a first intron sequence region, a second intron sequence region, a second exon sequence region, a first payload region comprising a variable heavy or light chain sequence, variant or fragment thereof, a first constant region of the first payload region, a second payload region comprising a variable heavy or light chain sequence, variant or fragment thereof, a second constant region of the first payload region, a PolyA sequence region, and a 3′ITR sequence region. As a non-limiting example, the viral genome comprises a 5′ITR sequence region, at least one promoter sequence region, a first exon sequence region, a first intron sequence region, a second intron sequence region, a second exon sequence region, a first payload region comprising a variable heavy or light chain sequence, variant or fragment thereof, a first constant region of the first payload region, a second payload region comprising a variable heavy or light chain sequence, variant or fragment thereof, a tag sequence region, a PolyA sequence region, a filler sequence region, and a 3′ITR sequence region. As a non-limiting example, the viral genome comprises a 5′ITR sequence region, at least one promoter sequence region, a first exon sequence region, a first intron sequence region, a second intron sequence region, a second exon sequence region, a first payload region comprising a variable heavy or light chain sequence, variant or fragment thereof, a first constant region of the first payload region, a second payload region comprising a variable heavy or light chain sequence, variant or fragment thereof, a tag sequence region, a PolyA sequence region, and a 3′ITR sequence region. As a non-limiting example, the viral genome comprises a 5′ITR sequence region, at least one promoter sequence region, a first exon sequence region, a first intron sequence region, a second intron sequence region, a second exon sequence region, a first payload region comprising a variable heavy or light chain sequence, variant or fragment thereof, a first constant region of the first payload region, a second payload region comprising a variable heavy or light chain sequence, variant or fragment thereof, a PolyA sequence region, a filler sequence region, and a 3′ITR sequence region. As a non-limiting example, the viral genome comprises a 5′ITR sequence region, at least one promoter sequence region, a first exon sequence region, a first intron sequence region, a second intron sequence region, a second exon sequence region, a first payload region comprising a variable heavy or light chain sequence, variant or fragment thereof, a first constant region of the first payload region, a second payload region comprising a variable heavy or light chain sequence, variant or fragment thereof, a PolyA sequence region, and a 3′ITR sequence region. As a non-limiting example, the viral genome comprises a 5′ITR sequence region, at least one promoter sequence region, a first exon sequence region, a first intron sequence region, a second intron sequence region, a second exon sequence region, a first payload region comprising a variable heavy or light chain sequence, variant or fragment thereof, a first constant region of the first payload region, a second constant region of the first payload region, a tag sequence region, a PolyA sequence region, a filler sequence region, and a 3′ITR sequence region. As a non-limiting example, the viral genome comprises a 5′ITR sequence region, at least one promoter sequence region, a first exon sequence region, a first intron sequence region, a second intron sequence region, a second exon sequence region, a first payload region comprising a variable heavy or light chain sequence, variant or fragment thereof, a first constant region of the first payload region, a second constant region of the first payload region, a tag sequence region, a PolyA sequence region, and a 3′ITR sequence region. As a non-limiting example, the viral genome comprises a 5′ITR sequence region, at least one promoter sequence region, a first exon sequence region, a first intron sequence region, a second intron sequence region, a second exon sequence region, a first payload region comprising a variable heavy or light chain sequence, variant or fragment thereof, a first constant region of the first payload region, a second constant region of the first payload region, a PolyA sequence region, a filler sequence region, and a 3′ITR sequence region. As a non-limiting example, the viral genome comprises a 5′ITR sequence region, at least one promoter sequence region, a first exon sequence region, a first intron sequence region, a second intron sequence region, a second exon sequence region, a first payload region comprising a variable heavy or light chain sequence, variant or fragment thereof, a first constant region of the first payload region, a second constant region of the first payload region, a PolyA sequence region, and a 3′ITR sequence region. As a non-limiting example, the viral genome comprises a 5′ITR sequence region, at least one promoter sequence region, a first exon sequence region, a first intron sequence region, a second intron sequence region, a second exon sequence region, a first payload region comprising a variable heavy or light chain sequence, variant or fragment thereof, a first constant region of the first payload region, a tag sequence region, a PolyA sequence region, a filler sequence region, and a 3′ITR sequence region. As a non-limiting example, the viral genome comprises a 5′ITR sequence region, at least one promoter sequence region, a first exon sequence region, a first intron sequence region, a second intron sequence region, a second exon sequence region, a first payload region comprising a variable heavy or light chain sequence, variant or fragment thereof, a first constant region of the first payload region, a tag sequence region, a PolyA sequence region, and a 3′ITR sequence region. As a non-limiting example, the viral genome comprises a 5′ITR sequence region, at least one promoter sequence region, a first exon sequence region, a first intron sequence region, a second intron sequence region, a second exon sequence region, a first payload region comprising a variable heavy or light chain sequence, variant or fragment thereof, a first constant region of the first payload region, a PolyA sequence region, a filler sequence region, and a 3′ITR sequence region. As a non-limiting example, the viral genome comprises a 5′ITR sequence region, at least one promoter sequence region, a first exon sequence region, a first intron sequence region, a second intron sequence region, a second exon sequence region, a first payload region comprising a variable heavy or light chain sequence, variant or fragment thereof, a first constant region of the first payload region, a PolyA sequence region, and a 3′ITR sequence region. As a non-limiting example, the viral genome comprises a 5′ITR sequence region, at least one promoter sequence region, a first exon sequence region, a first intron sequence region, a second intron sequence region, a second exon sequence region, a first payload region comprising a variable heavy or light chain sequence, variant or fragment thereof, at least one linker sequence region, a first signal sequence region, a second payload region comprising a variable heavy or light chain sequence, variant or fragment thereof, a first constant region of the first payload region, a tag sequence region, a PolyA sequence region, a filler sequence region, and a 3′ITR sequence region. As a non-limiting example, the viral genome comprises a 5′ITR sequence region, at least one promoter sequence region, a first exon sequence region, a first intron sequence region, a second intron sequence region, a second exon sequence region, a first payload region comprising a variable heavy or light chain sequence, variant or fragment thereof, at least one linker sequence region, a first signal sequence region, a second payload region comprising a variable heavy or light chain sequence, variant or fragment thereof, a first constant region of the first payload region, a tag sequence region, a PolyA sequence region, and a 3′ITR sequence region. As a non-limiting example, the viral genome comprises a 5′ITR sequence region, at least one promoter sequence region, a first exon sequence region, a first intron sequence region, a second intron sequence region, a second exon sequence region, a first payload region comprising a variable heavy or light chain sequence, variant or fragment thereof, at least one linker sequence region, a first signal sequence region, a second payload region comprising a variable heavy or light chain sequence, variant or fragment thereof, a first constant region of the first payload region, a PolyA sequence region, a filler sequence region, and a 3′ITR sequence region. As a non-limiting example, the viral genome comprises a 5′ITR sequence region, at least one promoter sequence region, a first exon sequence region, a first intron sequence region, a second intron sequence region, a second exon sequence region, a first payload region comprising a variable heavy or light chain sequence, variant or fragment thereof, at least one linker sequence region, a first signal sequence region, a second payload region comprising a variable heavy or light chain sequence, variant or fragment thereof, a first constant region of the first payload region, a PolyA sequence region, and a 3′ITR sequence region. As a non-limiting example, the viral genome comprises a 5′ITR sequence region, at least one promoter sequence region, a first exon sequence region, a first intron sequence region, a second intron sequence region, a second exon sequence region, a first payload region comprising a variable heavy or light chain sequence, variant or fragment thereof, at least one linker sequence region, a first signal sequence region, a second payload region comprising a variable heavy or light chain sequence, variant or fragment thereof, a tag sequence region, a PolyA sequence region, a filler sequence region, and a 3′ITR sequence region. As a non-limiting example, the viral genome comprises a 5′ITR sequence region, at least one promoter sequence region, a first exon sequence region, a first intron sequence region, a second intron sequence region, a second exon sequence region, a first payload region comprising a variable heavy or light chain sequence, variant or fragment thereof, at least one linker sequence region, a first signal sequence region, a second payload region comprising a variable heavy or light chain sequence, variant or fragment thereof, a tag sequence region, a PolyA sequence region, and a 3′ITR sequence region. As a non-limiting example, the viral genome comprises a 5′ITR sequence region, at least one promoter sequence region, a first exon sequence region, a first intron sequence region, a second intron sequence region, a second exon sequence region, a first payload region comprising a variable heavy or light chain sequence, variant or fragment thereof, at least one linker sequence region, a first signal sequence region, a second payload region comprising a variable heavy or light chain sequence, variant or fragment thereof, a PolyA sequence region, a filler sequence region, and a 3′ITR sequence region. As a non-limiting example, the viral genome comprises a 5′ITR sequence region, at least one promoter sequence region, a first exon sequence region, a first intron sequence region, a second intron sequence region, a second exon sequence region, a first payload region comprising a variable heavy or light chain sequence, variant or fragment thereof, at least one linker sequence region, a first signal sequence region, a second payload region comprising a variable heavy or light chain sequence, variant or fragment thereof, a PolyA sequence region, and a 3′ITR sequence region. As a non-limiting example, the viral genome comprises a 5′ITR sequence region, at least one promoter sequence region, a first exon sequence region, a first intron sequence region, a second intron sequence region, a second exon sequence region, a first payload region comprising a variable heavy or light chain sequence, variant or fragment thereof, at least one linker sequence region, a first signal sequence region, a first constant region of the first payload region, a tag sequence region, a PolyA sequence region, a filler sequence region, and a 3′ITR sequence region. As a non-limiting example, the viral genome comprises a 5′ITR sequence region, at least one promoter sequence region, a first exon sequence region, a first intron sequence region, a second intron sequence region, a second exon sequence region, a first payload region comprising a variable heavy or light chain sequence, variant or fragment thereof, at least one linker sequence region, a first signal sequence region, a first constant region of the first payload region, a tag sequence region, a PolyA sequence region, and a 3′ITR sequence region. As a non-limiting example, the viral genome comprises a 5′ITR sequence region, at least one promoter sequence region, a first exon sequence region, a first intron sequence region, a second intron sequence region, a second exon sequence region, a first payload region comprising a variable heavy or light chain sequence, variant or fragment thereof, at least one linker sequence region, a first signal sequence region, a first constant region of the first payload region, a PolyA sequence region, a filler sequence region, and a 3′ITR sequence region. As a non-limiting example, the viral genome comprises a 5′ITR sequence region, at least one promoter sequence region, a first exon sequence region, a first intron sequence region, a second intron sequence region, a second exon sequence region, a first payload region comprising a variable heavy or light chain sequence, variant or fragment thereof, at least one linker sequence region, a first signal sequence region, a first constant region of the first payload region, a PolyA sequence region, and a 3′ITR sequence region. As a non-limiting example, the viral genome comprises a 5′ITR sequence region, at least one promoter sequence region, a first exon sequence region, a first intron sequence region, a second intron sequence region, a second exon sequence region, a first payload region comprising a variable heavy or light chain sequence, variant or fragment thereof, at least one linker sequence region, a first signal sequence region, a tag sequence region, a PolyA sequence region, a filler sequence region, and a 3′ITR sequence region. As a non-limiting example, the viral genome comprises a 5′ITR sequence region, at least one promoter sequence region, a first exon sequence region, a first intron sequence region, a second intron sequence region, a second exon sequence region, a first payload region comprising a variable heavy or light chain sequence, variant or fragment thereof, at least one linker sequence region, a first signal sequence region, a tag sequence region, a PolyA sequence region, and a 3′ITR sequence region. As a non-limiting example, the viral genome comprises a 5′ITR sequence region, at least one promoter sequence region, a first exon sequence region, a first intron sequence region, a second intron sequence region, a second exon sequence region, a first payload region comprising a variable heavy or light chain sequence, variant or fragment thereof, at least one linker sequence region, a first signal sequence region, a PolyA sequence region, a filler sequence region, and a 3′ITR sequence region. As a non-limiting example, the viral genome comprises a 5′ITR sequence region, at least one promoter sequence region, a first exon sequence region, a first intron sequence region, a second intron sequence region, a second exon sequence region, a first payload region comprising a variable heavy or light chain sequence, variant or fragment thereof, at least one linker sequence region, a first signal sequence region, a PolyA sequence region, and a 3′ITR sequence region. As a non-limiting example, the viral genome comprises a 5′ITR sequence region, at least one promoter sequence region, a first exon sequence region, a first intron sequence region, a second intron sequence region, a second exon sequence region, a first payload region comprising a variable heavy or light chain sequence, variant or fragment thereof, at least one linker sequence region, a second payload region comprising a variable heavy or light chain sequence, variant or fragment thereof, a first constant region of the first payload region, a tag sequence region, a PolyA sequence region, a filler sequence region, and a 3′ITR sequence region. As a non-limiting example, the viral genome comprises a 5′ITR sequence region, at least one promoter sequence region, a first exon sequence region, a first intron sequence region, a second intron sequence region, a second exon sequence region, a first payload region comprising a variable heavy or light chain sequence, variant or fragment thereof, at least one linker sequence region, a second payload region comprising a variable heavy or light chain sequence, variant or fragment thereof, a first constant region of the first payload region, a tag sequence region, a PolyA sequence region, and a 3′ITR sequence region. As a non-limiting example, the viral genome comprises a 5′ITR sequence region, at least one promoter sequence region, a first exon sequence region, a first intron sequence region, a second intron sequence region, a second exon sequence region, a first payload region comprising a variable heavy or light chain sequence, variant or fragment thereof, at least one linker sequence region, a second payload region comprising a variable heavy or light chain sequence, variant or fragment thereof, a first constant region of the first payload region, a PolyA sequence region, a filler sequence region, and a 3′ITR sequence region. As a non-limiting example, the viral genome comprises a 5′ITR sequence region, at least one promoter sequence region, a first exon sequence region, a first intron sequence region, a second intron sequence region, a second exon sequence region, a first payload region comprising a variable heavy or light chain sequence, variant or fragment thereof, at least one linker sequence region, a second payload region comprising a variable heavy or light chain sequence, variant or fragment thereof, a first constant region of the first payload region, a PolyA sequence region, and a 3′ITR sequence region. As a non-limiting example, the viral genome comprises a 5′ITR sequence region, at least one promoter sequence region, a first exon sequence region, a first intron sequence region, a second intron sequence region, a second exon sequence region, a first payload region comprising a variable heavy or light chain sequence, variant or fragment thereof, at least one linker sequence region, a second payload region comprising a variable heavy or light chain sequence, variant or fragment thereof, a tag sequence region, a PolyA sequence region, a filler sequence region, and a 3′ITR sequence region. As a non-limiting example, the viral genome comprises a 5′ITR sequence region, at least one promoter sequence region, a first exon sequence region, a first intron sequence region, a second intron sequence region, a second exon sequence region, a first payload region comprising a variable heavy or light chain sequence, variant or fragment thereof, at least one linker sequence region, a second payload region comprising a variable heavy or light chain sequence, variant or fragment thereof, a tag sequence region, a PolyA sequence region, and a 3′ITR sequence region. As a non-limiting example, the viral genome comprises a 5′ITR sequence region, at least one promoter sequence region, a first exon sequence region, a first intron sequence region, a second intron sequence region, a second exon sequence region, a first payload region comprising a variable heavy or light chain sequence, variant or fragment thereof, at least one linker sequence region, a second payload region comprising a variable heavy or light chain sequence, variant or fragment thereof, a PolyA sequence region, a filler sequence region, and a 3′ITR sequence region. As a non-limiting example, the viral genome comprises a 5′ITR sequence region, at least one promoter sequence region, a first exon sequence region, a first intron sequence region, a second intron sequence region, a second exon sequence region, a first payload region comprising a variable heavy or light chain sequence, variant or fragment thereof, at least one linker sequence region, a second payload region comprising a variable heavy or light chain sequence, variant or fragment thereof, a PolyA sequence region, and a 3′ITR sequence region. As a non-limiting example, the viral genome comprises a 5′ITR sequence region, at least one promoter sequence region, a first exon sequence region, a first intron sequence region, a second intron sequence region, a second exon sequence region, a first payload region comprising a variable heavy or light chain sequence, variant or fragment thereof, at least one linker sequence region, a first constant region of the first payload region, a tag sequence region, a PolyA sequence region, a filler sequence region, and a 3′ITR sequence region. As a non-limiting example, the viral genome comprises a 5′ITR sequence region, at least one promoter sequence region, a first exon sequence region, a first intron sequence region, a second intron sequence region, a second exon sequence region, a first payload region comprising a variable heavy or light chain sequence, variant or fragment thereof, at least one linker sequence region, a first constant region of the first payload region, a tag sequence region, a PolyA sequence region, and a 3′ITR sequence region. As a non-limiting example, the viral genome comprises a 5′ITR sequence region, at least one promoter sequence region, a first exon sequence region, a first intron sequence region, a second intron sequence region, a second exon sequence region, a first payload region comprising a variable heavy or light chain sequence, variant or fragment thereof, at least one linker sequence region, a first constant region of the first payload region, a PolyA sequence region, a filler sequence region, and a 3′ITR sequence region. As a non-limiting example, the viral genome comprises a 5′ITR sequence region, at least one promoter sequence region, a first exon sequence region, a first intron sequence region, a second intron sequence region, a second exon sequence region, a first payload region comprising a variable heavy or light chain sequence, variant or fragment thereof, at least one linker sequence region, a first constant region of the first payload region, a PolyA sequence region, and a 3′ITR sequence region. As a non-limiting example, the viral genome comprises a 5′ITR sequence region, at least one promoter sequence region, a first exon sequence region, a first intron sequence region, a second intron sequence region, a second exon sequence region, a first payload region comprising a variable heavy or light chain sequence, variant or fragment thereof, at least one linker sequence region, a tag sequence region, a PolyA sequence region, a filler sequence region, and a 3′ITR sequence region. As a non-limiting example, the viral genome comprises a 5′ITR sequence region, at least one promoter sequence region, a first exon sequence region, a first intron sequence region, a second intron sequence region, a second exon sequence region, a first payload region comprising a variable heavy or light chain sequence, variant or fragment thereof, at least one linker sequence region, a tag sequence region, a PolyA sequence region, and a 3′ITR sequence region. As a non-limiting example, the viral genome comprises a 5′ITR sequence region, at least one promoter sequence region, a first exon sequence region, a first intron sequence region, a second intron sequence region, a second exon sequence region, a first payload region comprising a variable heavy or light chain sequence, variant or fragment thereof, at least one linker sequence region, a PolyA sequence region, a filler sequence region, and a 3′ITR sequence region. As a non-limiting example, the viral genome comprises a 5′ITR sequence region, at least one promoter sequence region, a first exon sequence region, a first intron sequence region, a second intron sequence region, a second exon sequence region, a first payload region comprising a variable heavy or light chain sequence, variant or fragment thereof, at least one linker sequence region, a PolyA sequence region, and a 3′ITR sequence region. As a non-limiting example, the viral genome comprises a 5′ITR sequence region, at least one promoter sequence region, a first exon sequence region, a first intron sequence region, a second intron sequence region, a second exon sequence region, a first payload region comprising a variable heavy or light chain sequence, variant or fragment thereof, a first signal sequence region, a second payload region comprising a variable heavy or light chain sequence, variant or fragment thereof, a first constant region of the first payload region, a tag sequence region, a PolyA sequence region, a filler sequence region, and a 3′ITR sequence region. As a non-limiting example, the viral genome comprises a 5′ITR sequence region, at least one promoter sequence region, a first exon sequence region, a first intron sequence region, a second intron sequence region, a second exon sequence region, a first payload region comprising a variable heavy or light chain sequence, variant or fragment thereof, a first signal sequence region, a second payload region comprising a variable heavy or light chain sequence, variant or fragment thereof, a first constant region of the first payload region, a tag sequence region, a PolyA sequence region, and a 3′ITR sequence region. As a non-limiting example, the viral genome comprises a 5′ITR sequence region, at least one promoter sequence region, a first exon sequence region, a first intron sequence region, a second intron sequence region, a second exon sequence region, a first payload region comprising a variable heavy or light chain sequence, variant or fragment thereof, a first signal sequence region, a second payload region comprising a variable heavy or light chain sequence, variant or fragment thereof, a first constant region of the first payload region, a PolyA sequence region, a filler sequence region, and a 3′ITR sequence region. As a non-limiting example, the viral genome comprises a 5′ITR sequence region, at least one promoter sequence region, a first exon sequence region, a first intron sequence region, a second intron sequence region, a second exon sequence region, a first payload region comprising a variable heavy or light chain sequence, variant or fragment thereof, a first signal sequence region, a second payload region comprising a variable heavy or light chain sequence, variant or fragment thereof, a first constant region of the first payload region, a PolyA sequence region, and a 3′ITR sequence region. As a non-limiting example, the viral genome comprises a 5′ITR sequence region, at least one promoter sequence region, a first exon sequence region, a first intron sequence region, a second intron sequence region, a second exon sequence region, a first payload region comprising a variable heavy or light chain sequence, variant or fragment thereof, a first signal sequence region, a second payload region comprising a variable heavy or light chain sequence, variant or fragment thereof, a tag sequence region, a PolyA sequence region, a filler sequence region, and a 3′ITR sequence region. As a non-limiting example, the viral genome comprises a 5′ITR sequence region, at least one promoter sequence region, a first exon sequence region, a first intron sequence region, a second intron sequence region, a second exon sequence region, a first payload region comprising a variable heavy or light chain sequence, variant or fragment thereof, a first signal sequence region, a second payload region comprising a variable heavy or light chain sequence, variant or fragment thereof, a tag sequence region, a PolyA sequence region, and a 3′ITR sequence region. As a non-limiting example, the viral genome comprises a 5′ITR sequence region, at least one promoter sequence region, a first exon sequence region, a first intron sequence region, a second intron sequence region, a second exon sequence region, a first payload region comprising a variable heavy or light chain sequence, variant or fragment thereof, a first signal sequence region, a second payload region comprising a variable heavy or light chain sequence, variant or fragment thereof, a PolyA sequence region, a filler sequence region, and a 3′ITR sequence region. As a non-limiting example, the viral genome comprises a 5′ITR sequence region, at least one promoter sequence region, a first exon sequence region, a first intron sequence region, a second intron sequence region, a second exon sequence region, a first payload region comprising a variable heavy or light chain sequence, variant or fragment thereof, a first signal sequence region, a second payload region comprising a variable heavy or light chain sequence, variant or fragment thereof, a PolyA sequence region, and a 3′ITR sequence region. As a non-limiting example, the viral genome comprises a 5′ITR sequence region, at least one promoter sequence region, a first exon sequence region, a first intron sequence region, a second intron sequence region, a second exon sequence region, a first payload region comprising a variable heavy or light chain sequence, variant or fragment thereof, a first signal sequence region, a first constant region of the first payload region, a tag sequence region, a PolyA sequence region, a filler sequence region, and a 3′ITR sequence region. As a non-limiting example, the viral genome comprises a 5′ITR sequence region, at least one promoter sequence region, a first exon sequence region, a first intron sequence region, a second intron sequence region, a second exon sequence region, a first payload region comprising a variable heavy or light chain sequence, variant or fragment thereof, a first signal sequence region, a first constant region of the first payload region, a tag sequence region, a PolyA sequence region, and a 3′ITR sequence region. As a non-limiting example, the viral genome comprises a 5′ITR sequence region, at least one promoter sequence region, a first exon sequence region, a first intron sequence region, a second intron sequence region, a second exon sequence region, a first payload region comprising a variable heavy or light chain sequence, variant or fragment thereof, a first signal sequence region, a first constant region of the first payload region, a PolyA sequence region, a filler sequence region, and a 3′ITR sequence region. As a non-limiting example, the viral genome comprises a 5′ITR sequence region, at least one promoter sequence region, a first exon sequence region, a first intron sequence region, a second intron sequence region, a second exon sequence region, a first payload region comprising a variable heavy or light chain sequence, variant or fragment thereof, a first signal sequence region, a first constant region of the first payload region, a PolyA sequence region, and a 3′ITR sequence region. As a non-limiting example, the viral genome comprises a 5′ITR sequence region, at least one promoter sequence region, a first exon sequence region, a first intron sequence region, a second intron sequence region, a second exon sequence region, a first payload region comprising a variable heavy or light chain sequence, variant or fragment thereof, a first signal sequence region, a tag sequence region, a PolyA sequence region, a filler sequence region, and a 3′ITR sequence region. As a non-limiting example, the viral genome comprises a 5′ITR sequence region, at least one promoter sequence region, a first exon sequence region, a first intron sequence region, a second intron sequence region, a second exon sequence region, a first payload region comprising a variable heavy or light chain sequence, variant or fragment thereof, a first signal sequence region, a tag sequence region, a PolyA sequence region, and a 3′ITR sequence region. As a non-limiting example, the viral genome comprises a 5′ITR sequence region, at least one promoter sequence region, a first exon sequence region, a first intron sequence region, a second intron sequence region, a second exon sequence region, a first payload region comprising a variable heavy or light chain sequence, variant or fragment thereof, a first signal sequence region, a PolyA sequence region, a filler sequence region, and a 3′ITR sequence region. As a non-limiting example, the viral genome comprises a 5′ITR sequence region, at least one promoter sequence region, a first exon sequence region, a first intron sequence region, a second intron sequence region, a second exon sequence region, a first payload region comprising a variable heavy or light chain sequence, variant or fragment thereof, a first signal sequence region, a PolyA sequence region, and a 3′ITR sequence region. As a non-limiting example, the viral genome comprises a 5′ITR sequence region, at least one promoter sequence region, a first exon sequence region, a first intron sequence region, a second intron sequence region, a second exon sequence region, a first payload region comprising a variable heavy or light chain sequence, variant or fragment thereof, a second payload region comprising a variable heavy or light chain sequence, variant or fragment thereof, a first constant region of the first payload region, a tag sequence region, a PolyA sequence region, a filler sequence region, and a 3′ITR sequence region. As a non-limiting example, the viral genome comprises a 5′ITR sequence region, at least one promoter sequence region, a first exon sequence region, a first intron sequence region, a second intron sequence region, a second exon sequence region, a first payload region comprising a variable heavy or light chain sequence, variant or fragment thereof, a second payload region comprising a variable heavy or light chain sequence, variant or fragment thereof, a first constant region of the first payload region, a tag sequence region, a PolyA sequence region, and a 3′ITR sequence region. As a non-limiting example, the viral genome comprises a 5′ITR sequence region, at least one promoter sequence region, a first exon sequence region, a first intron sequence region, a second intron sequence region, a second exon sequence region, a first payload region comprising a variable heavy or light chain sequence, variant or fragment thereof, a second payload region comprising a variable heavy or light chain sequence, variant or fragment thereof, a first constant region of the first payload region, a PolyA sequence region, a filler sequence region, and a 3′ITR sequence region. As a non-limiting example, the viral genome comprises a 5′ITR sequence region, at least one promoter sequence region, a first exon sequence region, a first intron sequence region, a second intron sequence region, a second exon sequence region, a first payload region comprising a variable heavy or light chain sequence, variant or fragment thereof, a second payload region comprising a variable heavy or light chain sequence, variant or fragment thereof, a first constant region of the first payload region, a PolyA sequence region, and a 3′ITR sequence region. As a non-limiting example, the viral genome comprises a 5′ITR sequence region, at least one promoter sequence region, a first exon sequence region, a first intron sequence region, a second intron sequence region, a second exon sequence region, a first payload region comprising a variable heavy or light chain sequence, variant or fragment thereof, a second payload region comprising a variable heavy or light chain sequence, variant or fragment thereof, a tag sequence region, a PolyA sequence region, a filler sequence region, and a 3′ITR sequence region. As a non-limiting example, the viral genome comprises a 5′ITR sequence region, at least one promoter sequence region, a first exon sequence region, a first intron sequence region, a second intron sequence region, a second exon sequence region, a first payload region comprising a variable heavy or light chain sequence, variant or fragment thereof, a second payload region comprising a variable heavy or light chain sequence, variant or fragment thereof, a tag sequence region, a PolyA sequence region, and a 3′ITR sequence region. As a non-limiting example, the viral genome comprises a 5′ITR sequence region, at least one promoter sequence region, a first exon sequence region, a first intron sequence region, a second intron sequence region, a second exon sequence region, a first payload region comprising a variable heavy or light chain sequence, variant or fragment thereof, a second payload region comprising a variable heavy or light chain sequence, variant or fragment thereof, a PolyA sequence region, a filler sequence region, and a 3′ITR sequence region. As a non-limiting example, the viral genome comprises a 5′ITR sequence region, at least one promoter sequence region, a first exon sequence region, a first intron sequence region, a second intron sequence region, a second exon sequence region, a first payload region comprising a variable heavy or light chain sequence, variant or fragment thereof, a second payload region comprising a variable heavy or light chain sequence, variant or fragment thereof, a PolyA sequence region, and a 3′ITR sequence region. As a non-limiting example, the viral genome comprises a 5′ITR sequence region, at least one promoter sequence region, a first exon sequence region, a first intron sequence region, a second intron sequence region, a second exon sequence region, a first payload region comprising a variable heavy or light chain sequence, variant or fragment thereof, a first constant region of the first payload region, a tag sequence region, a PolyA sequence region, a filler sequence region, and a 3′ITR sequence region. As a non-limiting example, the viral genome comprises a 5′ITR sequence region, at least one promoter sequence region, a first exon sequence region, a first intron sequence region, a second intron sequence region, a second exon sequence region, a first payload region comprising a variable heavy or light chain sequence, variant or fragment thereof, a first constant region of the first payload region, a tag sequence region, a PolyA sequence region, and a 3′ITR sequence region. As a non-limiting example, the viral genome comprises a 5′ITR sequence region, at least one promoter sequence region, a first exon sequence region, a first intron sequence region, a second intron sequence region, a second exon sequence region, a first payload region comprising a variable heavy or light chain sequence, variant or fragment thereof, a first constant region of the first payload region, a PolyA sequence region, a filler sequence region, and a 3′ITR sequence region. As a non-limiting example, the viral genome comprises a 5′ITR sequence region, at least one promoter sequence region, a first exon sequence region, a first intron sequence region, a second intron sequence region, a second exon sequence region, a first payload region comprising a variable heavy or light chain sequence, variant or fragment thereof, a first constant region of the first payload region, a PolyA sequence region, and a 3′ITR sequence region. As a non-limiting example, the viral genome comprises a 5′ITR sequence region, at least one promoter sequence region, a first exon sequence region, a first intron sequence region, a second intron sequence region, a second exon sequence region, a first payload region comprising a variable heavy or light chain sequence, variant or fragment thereof, a tag sequence region, a PolyA sequence region, a filler sequence region, and a 3′ITR sequence region. As a non-limiting example, the viral genome comprises a 5′ITR sequence region, at least one promoter sequence region, a first exon sequence region, a first intron sequence region, a second intron sequence region, a second exon sequence region, a first payload region comprising a variable heavy or light chain sequence, variant or fragment thereof, a tag sequence region, a PolyA sequence region, and a 3′ITR sequence region. As a non-limiting example, the viral genome comprises a 5′ITR sequence region, at least one promoter sequence region, a first exon sequence region, a first intron sequence region, a second intron sequence region, a second exon sequence region, a first payload region comprising a variable heavy or light chain sequence, variant or fragment thereof, a PolyA sequence region, a filler sequence region, and a 3′ITR sequence region. As a non-limiting example, the viral genome comprises a 5′ITR sequence region, at least one promoter sequence region, a first exon sequence region, a first intron sequence region, a second intron sequence region, a second exon sequence region, a first payload region comprising a variable heavy or light chain sequence, variant or fragment thereof, a PolyA sequence region, and a 3′ITR sequence region. As a non-limiting example, the viral genome comprises a 5′ITR sequence region, at least one promoter sequence region, an intron sequence region, a first signal sequence region, a first payload region comprising a variable heavy or light chain sequence, variant or fragment thereof, a first constant region of the first payload region, at least one linker sequence region, a second signal sequence region, a second payload region comprising a variable heavy or light chain sequence, variant or fragment thereof, a second constant region of the first payload region, a tag sequence region, a PolyA sequence region, a filler sequence region, and a 3′ITR sequence region. As a non-limiting example, the viral genome comprises a 5′ITR sequence region, at least one promoter sequence region, an intron sequence region, a first signal sequence region, a first payload region comprising a variable heavy or light chain sequence, variant or fragment thereof, a first constant region of the first payload region, at least one linker sequence region, a second signal sequence region, a second payload region comprising a variable heavy or light chain sequence, variant or fragment thereof, a second constant region of the first payload region, a tag sequence region, a PolyA sequence region, and a 3′ITR sequence region. As a non-limiting example, the viral genome comprises a 5′ITR sequence region, at least one promoter sequence region, an intron sequence region, a first signal sequence region, a first payload region comprising a variable heavy or light chain sequence, variant or fragment thereof, a first constant region of the first payload region, at least one linker sequence region, a second signal sequence region, a second payload region comprising a variable heavy or light chain sequence, variant or fragment thereof, a second constant region of the first payload region, a PolyA sequence region, a filler sequence region, and a 3′ITR sequence region. As a non-limiting example, the viral genome comprises a 5′ITR sequence region, at least one promoter sequence region, an intron sequence region, a first signal sequence region, a first payload region comprising a variable heavy or light chain sequence, variant or fragment thereof, a first constant region of the first payload region, at least one linker sequence region, a second signal sequence region, a second payload region comprising a variable heavy or light chain sequence, variant or fragment thereof, a second constant region of the first payload region, a PolyA sequence region, and a 3′ITR sequence region. As a non-limiting example, the viral genome comprises a 5′ITR sequence region, at least one promoter sequence region, an intron sequence region, a first signal sequence region, a first payload region comprising a variable heavy or light chain sequence, variant or fragment thereof, a first constant region of the first payload region, at least one linker sequence region, a second signal sequence region, a second payload region comprising a variable heavy or light chain sequence, variant or fragment thereof, a tag sequence region, a PolyA sequence region, a filler sequence region, and a 3′ITR sequence region. As a non-limiting example, the viral genome comprises a 5′ITR sequence region, at least one promoter sequence region, an intron sequence region, a first signal sequence region, a first payload region comprising a variable heavy or light chain sequence, variant or fragment thereof, a first constant region of the first payload region, at least one linker sequence region, a second signal sequence region, a second payload region comprising a variable heavy or light chain sequence, variant or fragment thereof, a tag sequence region, a PolyA sequence region, and a 3′ITR sequence region. As a non-limiting example, the viral genome comprises a 5′ITR sequence region, at least one promoter sequence region, an intron sequence region, a first signal sequence region, a first payload region comprising a variable heavy or light chain sequence, variant or fragment thereof, a first constant region of the first payload region, at least one linker sequence region, a second signal sequence region, a second payload region comprising a variable heavy or light chain sequence, variant or fragment thereof, a PolyA sequence region, a filler sequence region, and a 3′ITR sequence region. As a non-limiting example, the viral genome comprises a 5′ITR sequence region, at least one promoter sequence region, an intron sequence region, a first signal sequence region, a first payload region comprising a variable heavy or light chain sequence, variant or fragment thereof, a first constant region of the first payload region, at least one linker sequence region, a second signal sequence region, a second payload region comprising a variable heavy or light chain sequence, variant or fragment thereof, a PolyA sequence region, and a 3′ITR sequence region. As a non-limiting example, the viral genome comprises a 5′ITR sequence region, at least one promoter sequence region, an intron sequence region, a first signal sequence region, a first payload region comprising a variable heavy or light chain sequence, variant or fragment thereof, a first constant region of the first payload region, at least one linker sequence region, a second signal sequence region, a second constant region of the first payload region, a tag sequence region, a PolyA sequence region, a filler sequence region, and a 3′ITR sequence region. As a non-limiting example, the viral genome comprises a 5′ITR sequence region, at least one promoter sequence region, an intron sequence region, a first signal sequence region, a first payload region comprising a variable heavy or light chain sequence, variant or fragment thereof, a first constant region of the first payload region, at least one linker sequence region, a second signal sequence region, a second constant region of the first payload region, a tag sequence region, a PolyA sequence region, and a 3′ITR sequence region. As a non-limiting example, the viral genome comprises a 5′ITR sequence region, at least one promoter sequence region, an intron sequence region, a first signal sequence region, a first payload region comprising a variable heavy or light chain sequence, variant or fragment thereof, a first constant region of the first payload region, at least one linker sequence region, a second signal sequence region, a second constant region of the first payload region, a PolyA sequence region, a filler sequence region, and a 3′ITR sequence region. As a non-limiting example, the viral genome comprises a 5′ITR sequence region, at least one promoter sequence region, an intron sequence region, a first signal sequence region, a first payload region comprising a variable heavy or light chain sequence, variant or fragment thereof, a first constant region of the first payload region, at least one linker sequence region, a second signal sequence region, a second constant region of the first payload region, a PolyA sequence region, and a 3′ITR sequence region. As a non-limiting example, the viral genome comprises a 5′ITR sequence region, at least one promoter sequence region, an intron sequence region, a first signal sequence region, a first payload region comprising a variable heavy or light chain sequence, variant or fragment thereof, a first constant region of the first payload region, at least one linker sequence region, a second signal sequence region, a tag sequence region, a PolyA sequence region, a filler sequence region, and a 3′ITR sequence region. As a non-limiting example, the viral genome comprises a 5′ITR sequence region, at least one promoter sequence region, an intron sequence region, a first signal sequence region, a first payload region comprising a variable heavy or light chain sequence, variant or fragment thereof, a first constant region of the first payload region, at least one linker sequence region, a second signal sequence region, a tag sequence region, a PolyA sequence region, and a 3′ITR sequence region. As a non-limiting example, the viral genome comprises a 5′ITR sequence region, at least one promoter sequence region, an intron sequence region, a first signal sequence region, a first payload region comprising a variable heavy or light chain sequence, variant or fragment thereof, a first constant region of the first payload region, at least one linker sequence region, a second signal sequence region, a PolyA sequence region, a filler sequence region, and a 3′ITR sequence region. As a non-limiting example, the viral genome comprises a 5′ITR sequence region, at least one promoter sequence region, an intron sequence region, a first signal sequence region, a first payload region comprising a variable heavy or light chain sequence, variant or fragment thereof, a first constant region of the first payload region, at least one linker sequence region, a second signal sequence region, a PolyA sequence region, and a 3′ITR sequence region. As a non-limiting example, the viral genome comprises a 5′ITR sequence region, at least one promoter sequence region, an intron sequence region, a first signal sequence region, a first payload region comprising a variable heavy or light chain sequence, variant or fragment thereof, a first constant region of the first payload region, at least one linker sequence region, a second payload region comprising a variable heavy or light chain sequence, variant or fragment thereof, a second constant region of the first payload region, a tag sequence region, a PolyA sequence region, a filler sequence region, and a 3′ITR sequence region. As a non-limiting example, the viral genome comprises a 5′ITR sequence region, at least one promoter sequence region, an intron sequence region, a first signal sequence region, a first payload region comprising a variable heavy or light chain sequence, variant or fragment thereof, a first constant region of the first payload region, at least one linker sequence region, a second payload region comprising a variable heavy or light chain sequence, variant or fragment thereof, a second constant region of the first payload region, a tag sequence region, a PolyA sequence region, and a 3′ITR sequence region. As a non-limiting example, the viral genome comprises a 5′ITR sequence region, at least one promoter sequence region, an intron sequence region, a first signal sequence region, a first payload region comprising a variable heavy or light chain sequence, variant or fragment thereof, a first constant region of the first payload region, at least one linker sequence region, a second payload region comprising a variable heavy or light chain sequence, variant or fragment thereof, a second constant region of the first payload region, a PolyA sequence region, a filler sequence region, and a 3′ITR sequence region. As a non-limiting example, the viral genome comprises a 5′ITR sequence region, at least one promoter sequence region, an intron sequence region, a first signal sequence region, a first payload region comprising a variable heavy or light chain sequence, variant or fragment thereof, a first constant region of the first payload region, at least one linker sequence region, a second payload region comprising a variable heavy or light chain sequence, variant or fragment thereof, a second constant region of the first payload region, a PolyA sequence region, and a 3′ITR sequence region. As a non-limiting example, the viral genome comprises a 5′ITR sequence region, at least one promoter sequence region, an intron sequence region, a first signal sequence region, a first payload region comprising a variable heavy or light chain sequence, variant or fragment thereof, a first constant region of the first payload region, at least one linker sequence region, a second payload region comprising a variable heavy or light chain sequence, variant or fragment thereof, a tag sequence region, a PolyA sequence region, a filler sequence region, and a 3′ITR sequence region. As a non-limiting example, the viral genome comprises a 5′ITR sequence region, at least one promoter sequence region, an intron sequence region, a first signal sequence region, a first payload region comprising a variable heavy or light chain sequence, variant or fragment thereof, a first constant region of the first payload region, at least one linker sequence region, a second payload region comprising a variable heavy or light chain sequence, variant or fragment thereof, a tag sequence region, a PolyA sequence region, and a 3′ITR sequence region. As a non-limiting example, the viral genome comprises a 5′ITR sequence region, at least one promoter sequence region, an intron sequence region, a first signal sequence region, a first payload region comprising a variable heavy or light chain sequence, variant or fragment thereof, a first constant region of the first payload region, at least one linker sequence region, a second payload region comprising a variable heavy or light chain sequence, variant or fragment thereof, a PolyA sequence region, a filler sequence region, and a 3′ITR sequence region. As a non-limiting example, the viral genome comprises a 5′ITR sequence region, at least one promoter sequence region, an intron sequence region, a first signal sequence region, a first payload region comprising a variable heavy or light chain sequence, variant or fragment thereof, a first constant region of the first payload region, at least one linker sequence region, a second payload region comprising a variable heavy or light chain sequence, variant or fragment thereof, a PolyA sequence region, and a 3′ITR sequence region. As a non-limiting example, the viral genome comprises a 5′ITR sequence region, at least one promoter sequence region, an intron sequence region, a first signal sequence region, a first payload region comprising a variable heavy or light chain sequence, variant or fragment thereof, a first constant region of the first payload region, at least one linker sequence region, a second constant region of the first payload region, a tag sequence region, a PolyA sequence region, a filler sequence region, and a 3′ITR sequence region. As a non-limiting example, the viral genome comprises a 5′ITR sequence region, at least one promoter sequence region, an intron sequence region, a first signal sequence region, a first payload region comprising a variable heavy or light chain sequence, variant or fragment thereof, a first constant region of the first payload region, at least one linker sequence region, a second constant region of the first payload region, a tag sequence region, a PolyA sequence region, and a 3′ITR sequence region. As a non-limiting example, the viral genome comprises a 5′ITR sequence region, at least one promoter sequence region, an intron sequence region, a first signal sequence region, a first payload region comprising a variable heavy or light chain sequence, variant or fragment thereof, a first constant region of the first payload region, at least one linker sequence region, a second constant region of the first payload region, a PolyA sequence region, a filler sequence region, and a 3′ITR sequence region. As a non-limiting example, the viral genome comprises a 5′ITR sequence region, at least one promoter sequence region, an intron sequence region, a first signal sequence region, a first payload region comprising a variable heavy or light chain sequence, variant or fragment thereof, a first constant region of the first payload region, at least one linker sequence region, a second constant region of the first payload region, a PolyA sequence region, and a 3′ITR sequence region. As a non-limiting example, the viral genome comprises a 5′ITR sequence region, at least one promoter sequence region, an intron sequence region, a first signal sequence region, a first payload region comprising a variable heavy or light chain sequence, variant or fragment thereof, a first constant region of the first payload region, at least one linker sequence region, a tag sequence region, a PolyA sequence region, a filler sequence region, and a 3′ITR sequence region. As a non-limiting example, the viral genome comprises a 5′ITR sequence region, at least one promoter sequence region, an intron sequence region, a first signal sequence region, a first payload region comprising a variable heavy or light chain sequence, variant or fragment thereof, a first constant region of the first payload region, at least one linker sequence region, a tag sequence region, a PolyA sequence region, and a 3′ITR sequence region. As a non-limiting example, the viral genome comprises a 5′ITR sequence region, at least one promoter sequence region, an intron sequence region, a first signal sequence region, a first payload region comprising a variable heavy or light chain sequence, variant or fragment thereof, a first constant region of the first payload region, at least one linker sequence region, a PolyA sequence region, a filler sequence region, and a 3′ITR sequence region. As a non-limiting example, the viral genome comprises a 5′ITR sequence region, at least one promoter sequence region, an intron sequence region, a first signal sequence region, a first payload region comprising a variable heavy or light chain sequence, variant or fragment thereof, a first constant region of the first payload region, at least one linker sequence region, a PolyA sequence region, and a 3′ITR sequence region. As a non-limiting example, the viral genome comprises a 5′ITR sequence region, at least one promoter sequence region, an intron sequence region, a first signal sequence region, a first payload region comprising a variable heavy or light chain sequence, variant or fragment thereof, a first constant region of the first payload region, a second signal sequence region, a second payload region comprising a variable heavy or light chain sequence, variant or fragment thereof, a second constant region of the first payload region, a tag sequence region, a PolyA sequence region, a filler sequence region, and a 3′ITR sequence region. As a non-limiting example, the viral genome comprises a 5′ITR sequence region, at least one promoter sequence region, an intron sequence region, a first signal sequence region, a first payload region comprising a variable heavy or light chain sequence, variant or fragment thereof, a first constant region of the first payload region, a second signal sequence region, a second payload region comprising a variable heavy or light chain sequence, variant or fragment thereof, a second constant region of the first payload region, a tag sequence region, a PolyA sequence region, and a 3′ITR sequence region. As a non-limiting example, the viral genome comprises a 5′ITR sequence region, at least one promoter sequence region, an intron sequence region, a first signal sequence region, a first payload region comprising a variable heavy or light chain sequence, variant or fragment thereof, a first constant region of the first payload region, a second signal sequence region, a second payload region comprising a variable heavy or light chain sequence, variant or fragment thereof, a second constant region of the first payload region, a PolyA sequence region, a filler sequence region, and a 3′ITR sequence region. As a non-limiting example, the viral genome comprises a 5′ITR sequence region, at least one promoter sequence region, an intron sequence region, a first signal sequence region, a first payload region comprising a variable heavy or light chain sequence, variant or fragment thereof, a first constant region of the first payload region, a second signal sequence region, a second payload region comprising a variable heavy or light chain sequence, variant or fragment thereof, a second constant region of the first payload region, a PolyA sequence region, and a 3′ITR sequence region. As a non-limiting example, the viral genome comprises a 5′ITR sequence region, at least one promoter sequence region, an intron sequence region, a first signal sequence region, a first payload region comprising a variable heavy or light chain sequence, variant or fragment thereof, a first constant region of the first payload region, a second signal sequence region, a second payload region comprising a variable heavy or light chain sequence, variant or fragment thereof, a tag sequence region, a PolyA sequence region, a filler sequence region, and a 3′ITR sequence region. As a non-limiting example, the viral genome comprises a 5′ITR sequence region, at least one promoter sequence region, an intron sequence region, a first signal sequence region, a first payload region comprising a variable heavy or light chain sequence, variant or fragment thereof, a first constant region of the first payload region, a second signal sequence region, a second payload region comprising a variable heavy or light chain sequence, variant or fragment thereof, a tag sequence region, a PolyA sequence region, and a 3′ITR sequence region. As a non-limiting example, the viral genome comprises a 5′ITR sequence region, at least one promoter sequence region, an intron sequence region, a first signal sequence region, a first payload region comprising a variable heavy or light chain sequence, variant or fragment thereof, a first constant region of the first payload region, a second signal sequence region, a second payload region comprising a variable heavy or light chain sequence, variant or fragment thereof, a PolyA sequence region, a filler sequence region, and a 3′ITR sequence region. As a non-limiting example, the viral genome comprises a 5′ITR sequence region, at least one promoter sequence region, an intron sequence region, a first signal sequence region, a first payload region comprising a variable heavy or light chain sequence, variant or fragment thereof, a first constant region of the first payload region, a second signal sequence region, a second payload region comprising a variable heavy or light chain sequence, variant or fragment thereof, a PolyA sequence region, and a 3′ITR sequence region. As a non-limiting example, the viral genome comprises a 5′ITR sequence region, at least one promoter sequence region, an intron sequence region, a first signal sequence region, a first payload region comprising a variable heavy or light chain sequence, variant or fragment thereof, a first constant region of the first payload region, a second signal sequence region, a second constant region of the first payload region, a tag sequence region, a PolyA sequence region, a filler sequence region, and a 3′ITR sequence region. As a non-limiting example, the viral genome comprises a 5′ITR sequence region, at least one promoter sequence region, an intron sequence region, a first signal sequence region, a first payload region comprising a variable heavy or light chain sequence, variant or fragment thereof, a first constant region of the first payload region, a second signal sequence region, a second constant region of the first payload region, a tag sequence region, a PolyA sequence region, and a 3′ITR sequence region. As a non-limiting example, the viral genome comprises a 5′ITR sequence region, at least one promoter sequence region, an intron sequence region, a first signal sequence region, a first payload region comprising a variable heavy or light chain sequence, variant or fragment thereof, a first constant region of the first payload region, a second signal sequence region, a second constant region of the first payload region, a PolyA sequence region, a filler sequence region, and a 3′ITR sequence region. As a non-limiting example, the viral genome comprises a 5′ITR sequence region, at least one promoter sequence region, an intron sequence region, a first signal sequence region, a first payload region comprising a variable heavy or light chain sequence, variant or fragment thereof, a first constant region of the first payload region, a second signal sequence region, a second constant region of the first payload region, a PolyA sequence region, and a 3′ITR sequence region. As a non-limiting example, the viral genome comprises a 5′ITR sequence region, at least one promoter sequence region, an intron sequence region, a first signal sequence region, a first payload region comprising a variable heavy or light chain sequence, variant or fragment thereof, a first constant region of the first payload region, a second signal sequence region, a tag sequence region, a PolyA sequence region, a filler sequence region, and a 3′ITR sequence region. As a non-limiting example, the viral genome comprises a 5′ITR sequence region, at least one promoter sequence region, an intron sequence region, a first signal sequence region, a first payload region comprising a variable heavy or light chain sequence, variant or fragment thereof, a first constant region of the first payload region, a second signal sequence region, a tag sequence region, a PolyA sequence region, and a 3′ITR sequence region. As a non-limiting example, the viral genome comprises a 5′ITR sequence region, at least one promoter sequence region, an intron sequence region, a first signal sequence region, a first payload region comprising a variable heavy or light chain sequence, variant or fragment thereof, a first constant region of the first payload region, a second signal sequence region, a PolyA sequence region, a filler sequence region, and a 3′ITR sequence region. As a non-limiting example, the viral genome comprises a 5′ITR sequence region, at least one promoter sequence region, an intron sequence region, a first signal sequence region, a first payload region comprising a variable heavy or light chain sequence, variant or fragment thereof, a first constant region of the first payload region, a second signal sequence region, a PolyA sequence region, and a 3′ITR sequence region. As a non-limiting example, the viral genome comprises a 5′ITR sequence region, at least one promoter sequence region, an intron sequence region, a first signal sequence region, a first payload region comprising a variable heavy or light chain sequence, variant or fragment thereof, a first constant region of the first payload region, a second payload region comprising a variable heavy or light chain sequence, variant or fragment thereof, a second constant region of the first payload region, a tag sequence region, a PolyA sequence region, a filler sequence region, and a 3′ITR sequence region. As a non-limiting example, the viral genome comprises a 5′ITR sequence region, at least one promoter sequence region, an intron sequence region, a first signal sequence region, a first payload region comprising a variable heavy or light chain sequence, variant or fragment thereof, a first constant region of the first payload region, a second payload region comprising a variable heavy or light chain sequence, variant or fragment thereof, a second constant region of the first payload region, a tag sequence region, a PolyA sequence region, and a 3′ITR sequence region. As a non-limiting example, the viral genome comprises a 5′ITR sequence region, at least one promoter sequence region, an intron sequence region, a first signal sequence region, a first payload region comprising a variable heavy or light chain sequence, variant or fragment thereof, a first constant region of the first payload region, a second payload region comprising a variable heavy or light chain sequence, variant or fragment thereof, a second constant region of the first payload region, a PolyA sequence region, a filler sequence region, and a 3′ITR sequence region. As a non-limiting example, the viral genome comprises a 5′ITR sequence region, at least one promoter sequence region, an intron sequence region, a first signal sequence region, a first payload region comprising a variable heavy or light chain sequence, variant or fragment thereof, a first constant region of the first payload region, a second payload region comprising a variable heavy or light chain sequence, variant or fragment thereof, a second constant region of the first payload region, a PolyA sequence region, and a 3′ITR sequence region. As a non-limiting example, the viral genome comprises a 5′ITR sequence region, at least one promoter sequence region, an intron sequence region, a first signal sequence region, a first payload region comprising a variable heavy or light chain sequence, variant or fragment thereof, a first constant region of the first payload region, a second payload region comprising a variable heavy or light chain sequence, variant or fragment thereof, a tag sequence region, a PolyA sequence region, a filler sequence region, and a 3′ITR sequence region. As a non-limiting example, the viral genome comprises a 5′ITR sequence region, at least one promoter sequence region, an intron sequence region, a first signal sequence region, a first payload region comprising a variable heavy or light chain sequence, variant or fragment thereof, a first constant region of the first payload region, a second payload region comprising a variable heavy or light chain sequence, variant or fragment thereof, a tag sequence region, a PolyA sequence region, and a 3′ITR sequence region. As a non-limiting example, the viral genome comprises a 5′ITR sequence region, at least one promoter sequence region, an intron sequence region, a first signal sequence region, a first payload region comprising a variable heavy or light chain sequence, variant or fragment thereof, a first constant region of the first payload region, a second payload region comprising a variable heavy or light chain sequence, variant or fragment thereof, a PolyA sequence region, a filler sequence region, and a 3′ITR sequence region. As a non-limiting example, the viral genome comprises a 5′ITR sequence region, at least one promoter sequence region, an intron sequence region, a first signal sequence region, a first payload region comprising a variable heavy or light chain sequence, variant or fragment thereof, a first constant region of the first payload region, a second payload region comprising a variable heavy or light chain sequence, variant or fragment thereof, a PolyA sequence region, and a 3′ITR sequence region. As a non-limiting example, the viral genome comprises a 5′ITR sequence region, at least one promoter sequence region, an intron sequence region, a first signal sequence region, a first payload region comprising a variable heavy or light chain sequence, variant or fragment thereof, a first constant region of the first payload region, a second constant region of the first payload region, a tag sequence region, a PolyA sequence region, a filler sequence region, and a 3′ITR sequence region. As a non-limiting example, the viral genome comprises a 5′ITR sequence region, at least one promoter sequence region, an intron sequence region, a first signal sequence region, a first payload region comprising a variable heavy or light chain sequence, variant or fragment thereof, a first constant region of the first payload region, a second constant region of the first payload region, a tag sequence region, a PolyA sequence region, and a 3′ITR sequence region. As a non-limiting example, the viral genome comprises a 5′ITR sequence region, at least one promoter sequence region, an intron sequence region, a first signal sequence region, a first payload region comprising a variable heavy or light chain sequence, variant or fragment thereof, a first constant region of the first payload region, a second constant region of the first payload region, a PolyA sequence region, a filler sequence region, and a 3′ITR sequence region. As a non-limiting example, the viral genome comprises a 5′ITR sequence region, at least one promoter sequence region, an intron sequence region, a first signal sequence region, a first payload region comprising a variable heavy or light chain sequence, variant or fragment thereof, a first constant region of the first payload region, a second constant region of the first payload region, a PolyA sequence region, and a 3′ITR sequence region. As a non-limiting example, the viral genome comprises a 5′ITR sequence region, at least one promoter sequence region, an intron sequence region, a first signal sequence region, a first payload region comprising a variable heavy or light chain sequence, variant or fragment thereof, a first constant region of the first payload region, a tag sequence region, a PolyA sequence region, a filler sequence region, and a 3′ITR sequence region. As a non-limiting example, the viral genome comprises a 5′ITR sequence region, at least one promoter sequence region, an intron sequence region, a first signal sequence region, a first payload region comprising a variable heavy or light chain sequence, variant or fragment thereof, a first constant region of the first payload region, a tag sequence region, a PolyA sequence region, and a 3′ITR sequence region. As a non-limiting example, the viral genome comprises a 5′ITR sequence region, at least one promoter sequence region, an intron sequence region, a first signal sequence region, a first payload region comprising a variable heavy or light chain sequence, variant or fragment thereof, a first constant region of the first payload region, a PolyA sequence region, a filler sequence region, and a 3′ITR sequence region. As a non-limiting example, the viral genome comprises a 5′ITR sequence region, at least one promoter sequence region, an intron sequence region, a first signal sequence region, a first payload region comprising a variable heavy or light chain sequence, variant or fragment thereof, a first constant region of the first payload region, a PolyA sequence region, and a 3′ITR sequence region. As a non-limiting example, the viral genome comprises a 5′ITR sequence region, at least one promoter sequence region, an intron sequence region, a first signal sequence region, a first payload region comprising a variable heavy or light chain sequence, variant or fragment thereof, at least one linker sequence region, a second signal sequence region, a second payload region comprising a variable heavy or light chain sequence, variant or fragment thereof, a first constant region of the first payload region, a tag sequence region, a PolyA sequence region, a filler sequence region, and a 3′ITR sequence region. As a non-limiting example, the viral genome comprises a 5′ITR sequence region, at least one promoter sequence region, an intron sequence region, a first signal sequence region, a first payload region comprising a variable heavy or light chain sequence, variant or fragment thereof, at least one linker sequence region, a second signal sequence region, a second payload region comprising a variable heavy or light chain sequence, variant or fragment thereof, a first constant region of the first payload region, a tag sequence region, a PolyA sequence region, and a 3′ITR sequence region. As a non-limiting example, the viral genome comprises a 5′ITR sequence region, at least one promoter sequence region, an intron sequence region, a first signal sequence region, a first payload region comprising a variable heavy or light chain sequence, variant or fragment thereof, at least one linker sequence region, a second signal sequence region, a second payload region comprising a variable heavy or light chain sequence, variant or fragment thereof, a first constant region of the first payload region, a PolyA sequence region, a filler sequence region, and a 3′ITR sequence region. As a non-limiting example, the viral genome comprises a 5′ITR sequence region, at least one promoter sequence region, an intron sequence region, a first signal sequence region, a first payload region comprising a variable heavy or light chain sequence, variant or fragment thereof, at least one linker sequence region, a second signal sequence region, a second payload region comprising a variable heavy or light chain sequence, variant or fragment thereof, a first constant region of the first payload region, a PolyA sequence region, and a 3′ITR sequence region. As a non-limiting example, the viral genome comprises a 3′ITR sequence region, at least one promoter sequence region, an intron sequence region, a first signal sequence region, a first payload region comprising a variable heavy or light chain sequence, variant or fragment thereof, at least one linker sequence region, a second signal sequence region, a second payload region comprising a variable heavy or light chain sequence, variant or fragment thereof, a tag sequence region, a PolyA sequence region, a filler sequence region, and a 3′ITR sequence region. As a non-limiting example, the viral genome comprises a 5′ITR sequence region, at least one promoter sequence region, an intron sequence region, a first signal sequence region, a first payload region comprising a variable heavy or light chain sequence, variant or fragment thereof, at least one linker sequence region, a second signal sequence region, a second payload region comprising a variable heavy or light chain sequence, variant or fragment thereof, a tag sequence region, a PolyA sequence region, and a 3′ITR sequence region. As a non-limiting example, the viral genome comprises a 5′ITR sequence region, at least one promoter sequence region, an intron sequence region, a first signal sequence region, a first payload region comprising a variable heavy or light chain sequence, variant or fragment thereof, at least one linker sequence region, a second signal sequence region, a second payload region comprising a variable heavy or light chain sequence, variant or fragment thereof, a PolyA sequence region, a filler sequence region, and a 3′ITR sequence region. As a non-limiting example, the viral genome comprises a 5′ITR sequence region, at least one promoter sequence region, an intron sequence region, a first signal sequence region, a first payload region comprising a variable heavy or light chain sequence, variant or fragment thereof, at least one linker sequence region, a second signal sequence region, a second payload region comprising a variable heavy or light chain sequence, variant or fragment thereof, a PolyA sequence region, and a 3′ITR sequence region. As a non-limiting example, the viral genome comprises a 5′ITR sequence region, at least one promoter sequence region, an intron sequence region, a first signal sequence region, a first payload region comprising a variable heavy or light chain sequence, variant or fragment thereof, at least one linker sequence region, a second signal sequence region, a first constant region of the first payload region, a tag sequence region, a PolyA sequence region, a filler sequence region, and a 3′ITR sequence region. As a non-limiting example, the viral genome comprises a 5′ITR sequence region, at least one promoter sequence region, an intron sequence region, a first signal sequence region, a first payload region comprising a variable heavy or light chain sequence, variant or fragment thereof, at least one linker sequence region, a second signal sequence region, a first constant region of the first payload region, a tag sequence region, a PolyA sequence region, and a 3′ITR sequence region. As a non-limiting example, the viral genome comprises a 5′ITR sequence region, at least one promoter sequence region, an intron sequence region, a first signal sequence region, a first payload region comprising a variable heavy or light chain sequence, variant or fragment thereof, at least one linker sequence region, a second signal sequence region, a first constant region of the first payload region, a PolyA sequence region, a filler sequence region, and a 3′ITR sequence region. As a non-limiting example, the viral genome comprises a 5′ITR sequence region, at least one promoter sequence region, an intron sequence region, a first signal sequence region, a first payload region comprising a variable heavy or light chain sequence, variant or fragment thereof, at least one linker sequence region, a second signal sequence region, a first constant region of the first payload region, a PolyA sequence region, and a 3′ITR sequence region. As a non-limiting example, the viral genome comprises a 5′ITR sequence region, at least one promoter sequence region, an intron sequence region, a first signal sequence region, a first payload region comprising a variable heavy or light chain sequence, variant or fragment thereof, at least one linker sequence region, a second signal sequence region, a tag sequence region, a PolyA sequence region, a filler sequence region, and a 3′ITR sequence region. As a non-limiting example, the viral genome comprises a 5′ITR sequence region, at least one promoter sequence region, an intron sequence region, a first signal sequence region, a first payload region comprising a variable heavy or light chain sequence, variant or fragment thereof, at least one linker sequence region, a second signal sequence region, a tag sequence region, a PolyA sequence region, and a 3′ITR sequence region. As a non-limiting example, the viral genome comprises a 5′ITR sequence region, at least one promoter sequence region, an intron sequence region, a first signal sequence region, a first payload region comprising a variable heavy or light chain sequence, variant or fragment thereof, at least one linker sequence region, a second signal sequence region, a PolyA sequence region, a filler sequence region, and a 3′ITR sequence region. As a non-limiting example, the viral genome comprises a 5′ITR sequence region, at least one promoter sequence region, an intron sequence region, a first signal sequence region, a first payload region comprising a variable heavy or light chain sequence, variant or fragment thereof, at least one linker sequence region, a second signal sequence region, a PolyA sequence region, and a 3′ITR sequence region. As a non-limiting example, the viral genome comprises a 5′ITR sequence region, at least one promoter sequence region, an intron sequence region, a first signal sequence region, a first payload region comprising a variable heavy or light chain sequence, variant or fragment thereof, at least one linker sequence region, a second payload region comprising a variable heavy or light chain sequence, variant or fragment thereof, a first constant region of the first payload region, a tag sequence region, a PolyA sequence region, a filler sequence region, and a 3′ITR sequence region. As a non-limiting example, the viral genome comprises a 5′ITR sequence region, at least one promoter sequence region, an intron sequence region, a first signal sequence region, a first payload region comprising a variable heavy or light chain sequence, variant or fragment thereof, at least one linker sequence region, a second payload region comprising a variable heavy or light chain sequence, variant or fragment thereof, a first constant region of the first payload region, a tag sequence region, a PolyA sequence region, and a 3′ITR sequence region. As a non-limiting example, the viral genome comprises a 5′ITR sequence region, at least one promoter sequence region, an intron sequence region, a first signal sequence region, a first payload region comprising a variable heavy or light chain sequence, variant or fragment thereof, at least one linker sequence region, a second payload region comprising a variable heavy or light chain sequence, variant or fragment thereof, a first constant region of the first payload region, a PolyA sequence region, a filler sequence region, and a 3′ITR sequence region. As a non-limiting example, the viral genome comprises a 5′ITR sequence region, at least one promoter sequence region, an intron sequence region, a first signal sequence region, a first payload region comprising a variable heavy or light chain sequence, variant or fragment thereof, at least one linker sequence region, a second payload region comprising a variable heavy or light chain sequence, variant or fragment thereof, a first constant region of the first payload region, a PolyA sequence region, and a 3′ITR sequence region. As a non-limiting example, the viral genome comprises a 5′ITR sequence region, at least one promoter sequence region, an intron sequence region, a first signal sequence region, a first payload region comprising a variable heavy or light chain sequence, variant or fragment thereof, at least one linker sequence region, a second payload region comprising a variable heavy or light chain sequence, variant or fragment thereof, a tag sequence region, a PolyA sequence region, a filler sequence region, and a 3′ITR sequence region. As a non-limiting example, the viral genome comprises a 5′ITR sequence region, at least one promoter sequence region, an intron sequence region, a first signal sequence region, a first payload region comprising a variable heavy or light chain sequence, variant or fragment thereof, at least one linker sequence region, a second payload region comprising a variable heavy or light chain sequence, variant or fragment thereof, a tag sequence region, a PolyA sequence region, and a 3′ITR sequence region. As a non-limiting example, the viral genome comprises a 5′ITR sequence region, at least one promoter sequence region, an intron sequence region, a first signal sequence region, a first payload region comprising a variable heavy or light chain sequence, variant or fragment thereof, at least one linker sequence region, a second payload region comprising a variable heavy or light chain sequence, variant or fragment thereof, a PolyA sequence region, a filler sequence region, and a 3′ITR sequence region. As a non-limiting example, the viral genome comprises a 5′ITR sequence region, at least one promoter sequence region, an intron sequence region, a first signal sequence region, a first payload region comprising a variable heavy or light chain sequence, variant or fragment thereof, at least one linker sequence region, a second payload region comprising a variable heavy or light chain sequence, variant or fragment thereof, a PolyA sequence region, and a 3′ITR sequence region. As a non-limiting example, the viral genome comprises a 5′ITR sequence region, at least one promoter sequence region, an intron sequence region, a first signal sequence region, a first payload region comprising a variable heavy or light chain sequence, variant or fragment thereof, at least one linker sequence region, a first constant region of the first payload region, a tag sequence region, a PolyA sequence region, a filler sequence region, and a 3′ITR sequence region. As a non-limiting example, the viral genome comprises a 5′ITR sequence region, at least one promoter sequence region, an intron sequence region, a first signal sequence region, a first payload region comprising a variable heavy or light chain sequence, variant or fragment thereof, at least one linker sequence region, a first constant region of the first payload region, a tag sequence region, a PolyA sequence region, and a 3′ITR sequence region. As a non-limiting example, the viral genome comprises a 5′ITR sequence region, at least one promoter sequence region, an intron sequence region, a first signal sequence region, a first payload region comprising a variable heavy or light chain sequence, variant or fragment thereof, at least one linker sequence region, a first constant region of the first payload region, a PolyA sequence region, a filler sequence region, and a 3′ITR sequence region. As a non-limiting example, the viral genome comprises a 5′ITR sequence region, at least one promoter sequence region, an intron sequence region, a first signal sequence region, a first payload region comprising a variable heavy or light chain sequence, variant or fragment thereof, at least one linker sequence region, a first constant region of the first payload region, a PolyA sequence region, and a 3′ITR sequence region. As a non-limiting example, the viral genome comprises a 5′ITR sequence region, at least one promoter sequence region, an intron sequence region, a first signal sequence region, a first payload region comprising a variable heavy or light chain sequence, variant or fragment thereof, at least one linker sequence region, a tag sequence region, a PolyA sequence region, a filler sequence region, and a 3′ITR sequence region. As a non-limiting example, the viral genome comprises a 5′ITR sequence region, at least one promoter sequence region, an intron sequence region, a first signal sequence region, a first payload region comprising a variable heavy or light chain sequence, variant or fragment thereof, at least one linker sequence region, a tag sequence region, a PolyA sequence region, and a 3′ITR sequence region. As a non-limiting example, the viral genome comprises a 5′ITR sequence region, at least one promoter sequence region, an intron sequence region, a first signal sequence region, a first payload region comprising a variable heavy or light chain sequence, variant or fragment thereof, at least one linker sequence region, a PolyA sequence region, a filler sequence region, and a 3′ITR sequence region. As a non-limiting example, the viral genome comprises a 5′ITR sequence region, at least one promoter sequence region, an intron sequence region, a first signal sequence region, a first payload region comprising a variable heavy or light chain sequence, variant or fragment thereof, at least one linker sequence region, a PolyA sequence region, and a 3′ITR sequence region. As a non-limiting example, the viral genome comprises a 5′ITR sequence region, at least one promoter sequence region, an intron sequence region, a first signal sequence region, a first payload region comprising a variable heavy or light chain sequence, variant or fragment thereof, a second signal sequence region, a second payload region comprising a variable heavy or light chain sequence, variant or fragment thereof, a first constant region of the first payload region, a tag sequence region, a PolyA sequence region, a filler sequence region, and a 3′ITR sequence region. As a non-limiting example, the viral genome comprises a 5′ITR sequence region, at least one promoter sequence region, an intron sequence region, a first signal sequence region, a first payload region comprising a variable heavy or light chain sequence, variant or fragment thereof, a second signal sequence region, a second payload region comprising a variable heavy or light chain sequence, variant or fragment thereof, a first constant region of the first payload region, a tag sequence region, a PolyA sequence region, and a 3′ITR sequence region. As a non-limiting example, the viral genome comprises a 5′ITR sequence region, at least one promoter sequence region, an intron sequence region, a first signal sequence region, a first payload region comprising a variable heavy or light chain sequence, variant or fragment thereof, a second signal sequence region, a second payload region comprising a variable heavy or light chain sequence, variant or fragment thereof, a first constant region of the first payload region, a PolyA sequence region, a filler sequence region, and a 3′ITR sequence region. As a non-limiting example, the viral genome comprises a 5′ITR sequence region, at least one promoter sequence region, an intron sequence region, a first signal sequence region, a first payload region comprising a variable heavy or light chain sequence, variant or fragment thereof, a second signal sequence region, a second payload region comprising a variable heavy or light chain sequence, variant or fragment thereof, a first constant region of the first payload region, a PolyA sequence region, and a 3′ITR sequence region. As a non-limiting example, the viral genome comprises a 5′ITR sequence region, at least one promoter sequence region, an intron sequence region, a first signal sequence region, a first payload region comprising a variable heavy or light chain sequence, variant or fragment thereof, a second signal sequence region, a second payload region comprising a variable heavy or light chain sequence, variant or fragment thereof, a tag sequence region, a PolyA sequence region, a filler sequence region, and a 3′ITR sequence region. As a non-limiting example, the viral genome comprises a 5′ITR sequence region, at least one promoter sequence region, an intron sequence region, a first signal sequence region, a first payload region comprising a variable heavy or light chain sequence, variant or fragment thereof, a second signal sequence region, a second payload region comprising a variable heavy or light chain sequence, variant or fragment thereof, a tag sequence region, a PolyA sequence region, and a 3′ITR sequence region. As a non-limiting example, the viral genome comprises a 5′ITR sequence region, at least one promoter sequence region, an intron sequence region, a first signal sequence region, a first payload region comprising a variable heavy or light chain sequence, variant or fragment thereof, a second signal sequence region, a second payload region comprising a variable heavy or light chain sequence, variant or fragment thereof, a PolyA sequence region, a filler sequence region, and a 3′ITR sequence region. As a non-limiting example, the viral genome comprises a 5′ITR sequence region, at least one promoter sequence region, an intron sequence region, a first signal sequence region, a first payload region comprising a variable heavy or light chain sequence, variant or fragment thereof, a second signal sequence region, a second payload region comprising a variable heavy or light chain sequence, variant or fragment thereof, a PolyA sequence region, and a 3′ITR sequence region. As a non-limiting example, the viral genome comprises a 5′ITR sequence region, at least one promoter sequence region, an intron sequence region, a first signal sequence region, a first payload region comprising a variable heavy or light chain sequence, variant or fragment thereof, a second signal sequence region, a first constant region of the first payload region, a tag sequence region, a PolyA sequence region, a filler sequence region, and a 3′ITR sequence region. As a non-limiting example, the viral genome comprises a 5′ITR sequence region, at least one promoter sequence region, an intron sequence region, a first signal sequence region, a first payload region comprising a variable heavy or light chain sequence, variant or fragment thereof, a second signal sequence region, a first constant region of the first payload region, a tag sequence region, a PolyA sequence region, and a 3′ITR sequence region. As a non-limiting example, the viral genome comprises a 5′ITR sequence region, at least one promoter sequence region, an intron sequence region, a first signal sequence region, a first payload region comprising a variable heavy or light chain sequence, variant or fragment thereof, a second signal sequence region, a first constant region of the first payload region, a PolyA sequence region, a filler sequence region, and a 3′ITR sequence region. As a non-limiting example, the viral genome comprises a 5′ITR sequence region, at least one promoter sequence region, an intron sequence region, a first signal sequence region, a first payload region comprising a variable heavy or light chain sequence, variant or fragment thereof, a second signal sequence region, a first constant region of the first payload region, a PolyA sequence region, and a 3′ITR sequence region. As a non-limiting example, the viral genome comprises a 5′ITR sequence region, at least one promoter sequence region, an intron sequence region, a first signal sequence region, a first payload region comprising a variable heavy or light chain sequence, variant or fragment thereof, a second signal sequence region, a tag sequence region, a PolyA sequence region, a filler sequence region, and a 3′ITR sequence region. As a non-limiting example, the viral genome comprises a 5′ITR sequence region, at least one promoter sequence region, an intron sequence region, a first signal sequence region, a first payload region comprising a variable heavy or light chain sequence, variant or fragment thereof, a second signal sequence region, a tag sequence region, a PolyA sequence region, and a 3′ITR sequence region. As a non-limiting example, the viral genome comprises a 5′ITR sequence region, at least one promoter sequence region, an intron sequence region, a first signal sequence region, a first payload region comprising a variable heavy or light chain sequence, variant or fragment thereof, a second signal sequence region, a PolyA sequence region, a filler sequence region, and a 3′ITR sequence region. As a non-limiting example, the viral genome comprises a 5′ITR sequence region, at least one promoter sequence region, an intron sequence region, a first signal sequence region, a first payload region comprising a variable heavy or light chain sequence, variant or fragment thereof, a second signal sequence region, a PolyA sequence region, and a 3′ITR sequence region. As a non-limiting example, the viral genome comprises a 5′ITR sequence region, at least one promoter sequence region, an intron sequence region, a first signal sequence region, a first payload region comprising a variable heavy or light chain sequence, variant or fragment thereof, a second payload region comprising a variable heavy or light chain sequence, variant or fragment thereof, a first constant region of the first payload region, a tag sequence region, a PolyA sequence region, a filler sequence region, and a 3′ITR sequence region. As a non-limiting example, the viral genome comprises a 5′ITR sequence region, at least one promoter sequence region, an intron sequence region, a first signal sequence region, a first payload region comprising a variable heavy or light chain sequence, variant or fragment thereof, a second payload region comprising a variable heavy or light chain sequence, variant or fragment thereof, a first constant region of the first payload region, a tag sequence region, a PolyA sequence region, and a 3′ITR sequence region. As a non-limiting example, the viral genome comprises a 5′ITR sequence region, at least one promoter sequence region, an intron sequence region, a first signal sequence region, a first payload region comprising a variable heavy or light chain sequence, variant or fragment thereof, a second payload region comprising a variable heavy or light chain sequence, variant or fragment thereof, a first constant region of the first payload region, a PolyA sequence region, a filler sequence region, and a 3′ITR sequence region. As a non-limiting example, the viral genome comprises a 5′ITR sequence region, at least one promoter sequence region, an intron sequence region, a first signal sequence region, a first payload region comprising a variable heavy or light chain sequence, variant or fragment thereof, a second payload region comprising a variable heavy or light chain sequence, variant or fragment thereof, a first constant region of the first payload region, a PolyA sequence region, and a 3′ITR sequence region. As a non-limiting example, the viral genome comprises a 5′ITR sequence region, at least one promoter sequence region, an intron sequence region, a first signal sequence region, a first payload region comprising a variable heavy or light chain sequence, variant or fragment thereof, a second payload region comprising a variable heavy or light chain sequence, variant or fragment thereof, a tag sequence region, a PolyA sequence region, a filler sequence region, and a 3′ITR sequence region. As a non-limiting example, the viral genome comprises a 5′ITR sequence region, at least one promoter sequence region, an intron sequence region, a first signal sequence region, a first payload region comprising a variable heavy or light chain sequence, variant or fragment thereof, a second payload region comprising a variable heavy or light chain sequence, variant or fragment thereof, a tag sequence region, a PolyA sequence region, and a 3′ITR sequence region. As a non-limiting example, the viral genome comprises a 5′ITR sequence region, at least one promoter sequence region, an intron sequence region, a first signal sequence region, a first payload region comprising a variable heavy or light chain sequence, variant or fragment thereof, a second payload region comprising a variable heavy or light chain sequence, variant or fragment thereof, a PolyA sequence region, a filler sequence region, and a 3′ITR sequence region. As a non-limiting example, the viral genome comprises a 5′ITR sequence region, at least one promoter sequence region, an intron sequence region, a first signal sequence region, a first payload region comprising a variable heavy or light chain sequence, variant or fragment thereof, a second payload region comprising a variable heavy or light chain sequence, variant or fragment thereof, a PolyA sequence region, and a 3′ITR sequence region. As a non-limiting example, the viral genome comprises a 5′ITR sequence region, at least one promoter sequence region, an intron sequence region, a first signal sequence region, a first payload region comprising a variable heavy or light chain sequence, variant or fragment thereof, a first constant region of the first payload region, a tag sequence region, a PolyA sequence region, a filler sequence region, and a 3′ITR sequence region. As a non-limiting example, the viral genome comprises a 5′ITR sequence region, at least one promoter sequence region, an intron sequence region, a first signal sequence region, a first payload region comprising a variable heavy or light chain sequence, variant or fragment thereof, a first constant region of the first payload region, a tag sequence region, a PolyA sequence region, and a 3′ITR sequence region. As a non-limiting example, the viral genome comprises a 5′ITR sequence region, at least one promoter sequence region, an intron sequence region, a first signal sequence region, a first payload region comprising a variable heavy or light chain sequence, variant or fragment thereof, a first constant region of the first payload region, a PolyA sequence region, a filler sequence region, and a 3′ITR sequence region. As a non-limiting example, the viral genome comprises a 5′ITR sequence region, at least one promoter sequence region, an intron sequence region, a first signal sequence region, a first payload region comprising a variable heavy or light chain sequence, variant or fragment thereof, a first constant region of the first payload region, a PolyA sequence region, and a 3′ITR sequence region. As a non-limiting example, the viral genome comprises a 5′ITR sequence region, at least one promoter sequence region, an intron sequence region, a first signal sequence region, a first payload region comprising a variable heavy or light chain sequence, variant or fragment thereof, a tag sequence region, a PolyA sequence region, a filler sequence region, and a 3′ITR sequence region. As a non-limiting example, the viral genome comprises a 5′ITR sequence region, at least one promoter sequence region, an intron sequence region, a first signal sequence region, a first payload region comprising a variable heavy or light chain sequence, variant or fragment thereof, a tag sequence region, a PolyA sequence region, and a 3′ITR sequence region. As a non-limiting example, the viral genome comprises a 5′ITR sequence region, at least one promoter sequence region, an intron sequence region, a first signal sequence region, a first payload region comprising a variable heavy or light chain sequence, variant or fragment thereof, a PolyA sequence region, a filler sequence region, and a 3′ITR sequence region. As a non-limiting example, the viral genome comprises a 5′ITR sequence region, at least one promoter sequence region, an intron sequence region, a first signal sequence region, a first payload region comprising a variable heavy or light chain sequence, variant or fragment thereof, a PolyA sequence region, and a 3′ITR sequence region. As a non-limiting example, the viral genome comprises a 5′ITR sequence region, at least one promoter sequence region, an intron sequence region, a first payload region comprising a variable heavy or light chain sequence, variant or fragment thereof, a first constant region of the first payload region, at least one linker sequence region, a first signal sequence region, a second payload region comprising a variable heavy or light chain sequence, variant or fragment thereof, a second constant region of the first payload region, a tag sequence region, a PolyA sequence region, a filler sequence region, and a 3′ITR sequence region. As a non-limiting example, the viral genome comprises a 5′ITR sequence region, at least one promoter sequence region, an intron sequence region, a first payload region comprising a variable heavy or light chain sequence, variant or fragment thereof, a first constant region of the first payload region, at least one linker sequence region, a first signal sequence region, a second payload region comprising a variable heavy or light chain sequence, variant or fragment thereof, a second constant region of the first payload region, a tag sequence region, a PolyA sequence region, and a 3′ITR sequence region. As a non-limiting example, the viral genome comprises a 5′ITR sequence region, at least one promoter sequence region, an intron sequence region, a first payload region comprising a variable heavy or light chain sequence, variant or fragment thereof, a first constant region of the first payload region, at least one linker sequence region, a first signal sequence region, a second payload region comprising a variable heavy or light chain sequence, variant or fragment thereof, a second constant region of the first payload region, a PolyA sequence region, a filler sequence region, and a 3′ITR sequence region. As a non-limiting example, the viral genome comprises a 5′ITR sequence region, at least one promoter sequence region, an intron sequence region, a first payload region comprising a variable heavy or light chain sequence, variant or fragment thereof, a first constant region of the first payload region, at least one linker sequence region, a first signal sequence region, a second payload region comprising a variable heavy or light chain sequence, variant or fragment thereof, a second constant region of the first payload region, a PolyA sequence region, and a 3′ITR sequence region. As a non-limiting example, the viral genome comprises a 5′ITR sequence region, at least one promoter sequence region, an intron sequence region, a first payload region comprising a variable heavy or light chain sequence, variant or fragment thereof, a first constant region of the first payload region, at least one linker sequence region, a first signal sequence region, a second payload region comprising a variable heavy or light chain sequence, variant or fragment thereof, a tag sequence region, a PolyA sequence region, a filler sequence region, and a 3′ITR sequence region. As a non-limiting example, the viral genome comprises a 5′ITR sequence region, at least one promoter sequence region, an intron sequence region, a first payload region comprising a variable heavy or light chain sequence, variant or fragment thereof, a first constant region of the first payload region, at least one linker sequence region, a first signal sequence region, a second payload region comprising a variable heavy or light chain sequence, variant or fragment thereof, a tag sequence region, a PolyA sequence region, and a 3′ITR sequence region. As a non-limiting example, the viral genome comprises a 5′ITR sequence region, at least one promoter sequence region, an intron sequence region, a first payload region comprising a variable heavy or light chain sequence, variant or fragment thereof, a first constant region of the first payload region, at least one linker sequence region, a first signal sequence region, a second payload region comprising a variable heavy or light chain sequence, variant or fragment thereof, a PolyA sequence region, a filler sequence region, and a 3′ITR sequence region. As a non-limiting example, the viral genome comprises a 5′ITR sequence region, at least one promoter sequence region, an intron sequence region, a first payload region comprising a variable heavy or light chain sequence, variant or fragment thereof, a first constant region of the first payload region, at least one linker sequence region, a first signal sequence region, a second payload region comprising a variable heavy or light chain sequence, variant or fragment thereof, a PolyA sequence region, and a 3′ITR sequence region. As a non-limiting example, the viral genome comprises a 5′ITR sequence region, at least one promoter sequence region, an intron sequence region, a first payload region comprising a variable heavy or light chain sequence, variant or fragment thereof, a first constant region of the first payload region, at least one linker sequence region, a first signal sequence region, a second constant region of the first payload region, a tag sequence region, a PolyA sequence region, a filler sequence region, and a 3′ITR sequence region. As a non-limiting example, the viral genome comprises a 5′ITR sequence region, at least one promoter sequence region, an intron sequence region, a first payload region comprising a variable heavy or light chain sequence, variant or fragment thereof, a first constant region of the first payload region, at least one linker sequence region, a first signal sequence region, a second constant region of the first payload region, a tag sequence region, a PolyA sequence region, and a 3′ITR sequence region. As a non-limiting example, the viral genome comprises a 5′ITR sequence region, at least one promoter sequence region, an intron sequence region, a first payload region comprising a variable heavy or light chain sequence, variant or fragment thereof, a first constant region of the first payload region, at least one linker sequence region, a first signal sequence region, a second constant region of the first payload region, a PolyA sequence region, a filler sequence region, and a 3′ITR sequence region. As a non-limiting example, the viral genome comprises a 5′ITR sequence region, at least one promoter sequence region, an intron sequence region, a first payload region comprising a variable heavy or light chain sequence, variant or fragment thereof, a first constant region of the first payload region, at least one linker sequence region, a first signal sequence region, a second constant region of the first payload region, a PolyA sequence region, and a 3′ITR sequence region. As a non-limiting example, the viral genome comprises a 5′ITR sequence region, at least one promoter sequence region, an intron sequence region, a first payload region comprising a variable heavy or light chain sequence, variant or fragment thereof, a first constant region of the first payload region, at least one linker sequence region, a first signal sequence region, a tag sequence region, a PolyA sequence region, a filler sequence region, and a 3′ITR sequence region. As a non-limiting example, the viral genome comprises a 5′ITR sequence region, at least one promoter sequence region, an intron sequence region, a first payload region comprising a variable heavy or light chain sequence, variant or fragment thereof, a first constant region of the first payload region, at least one linker sequence region, a first signal sequence region, a tag sequence region, a PolyA sequence region, and a 3′ITR sequence region. As a non-limiting example, the viral genome comprises a 5′ITR sequence region, at least one promoter sequence region, an intron sequence region, a first payload region comprising a variable heavy or light chain sequence, variant or fragment thereof, a first constant region of the first payload region, at least one linker sequence region, a first signal sequence region, a PolyA sequence region, a filler sequence region, and a 3′ITR sequence region. As a non-limiting example, the viral genome comprises a 5′ITR sequence region, at least one promoter sequence region, an intron sequence region, a first payload region comprising a variable heavy or light chain sequence, variant or fragment thereof, a first constant region of the first payload region, at least one linker sequence region, a first signal sequence region, a PolyA sequence region, and a 3′ITR sequence region. As a non-limiting example, the viral genome comprises a 5′ITR sequence region, at least one promoter sequence region, an intron sequence region, a first payload region comprising a variable heavy or light chain sequence, variant or fragment thereof, a first constant region of the first payload region, at least one linker sequence region, a second payload region comprising a variable heavy or light chain sequence, variant or fragment thereof, a second constant region of the first payload region, a tag sequence region, a PolyA sequence region, a filler sequence region, and a 3′ITR sequence region. As a non-limiting example, the viral genome comprises a 5′ITR sequence region, at least one promoter sequence region, an intron sequence region, a first payload region comprising a variable heavy or light chain sequence, variant or fragment thereof, a first constant region of the first payload region, at least one linker sequence region, a second payload region comprising a variable heavy or light chain sequence, variant or fragment thereof, a second constant region of the first payload region, a tag sequence region, a PolyA sequence region, and a 3′ITR sequence region. As a non-limiting example, the viral genome comprises a 5′ITR sequence region, at least one promoter sequence region, an intron sequence region, a first payload region comprising a variable heavy or light chain sequence, variant or fragment thereof, a first constant region of the first payload region, at least one linker sequence region, a second payload region comprising a variable heavy or light chain sequence, variant or fragment thereof, a second constant region of the first payload region, a PolyA sequence region, a filler sequence region, and a 3′ITR sequence region. As a non-limiting example, the viral genome comprises a 5′ITR sequence region, at least one promoter sequence region, an intron sequence region, a first payload region comprising a variable heavy or light chain sequence, variant or fragment thereof, a first constant region of the first payload region, at least one linker sequence region, a second payload region comprising a variable heavy or light chain sequence, variant or fragment thereof, a second constant region of the first payload region, a PolyA sequence region, and a 3′ITR sequence region. As a non-limiting example, the viral genome comprises a 5′ITR sequence region, at least one promoter sequence region, an intron sequence region, a first payload region comprising a variable heavy or light chain sequence, variant or fragment thereof, a first constant region of the first payload region, at least one linker sequence region, a second payload region comprising a variable heavy or light chain sequence, variant or fragment thereof, a tag sequence region, a PolyA sequence region, a filler sequence region, and a 3′ITR sequence region. As a non-limiting example, the viral genome comprises a 5′ITR sequence region, at least one promoter sequence region, an intron sequence region, a first payload region comprising a variable heavy or light chain sequence, variant or fragment thereof, a first constant region of the first payload region, at least one linker sequence region, a second payload region comprising a variable heavy or light chain sequence, variant or fragment thereof, a tag sequence region, a PolyA sequence region, and a 3′ITR sequence region. As a non-limiting example, the viral genome comprises a 5′ITR sequence region, at least one promoter sequence region, an intron sequence region, a first payload region comprising a variable heavy or light chain sequence, variant or fragment thereof, a first constant region of the first payload region, at least one linker sequence region, a second payload region comprising a variable heavy or light chain sequence, variant or fragment thereof, a PolyA sequence region, a filler sequence region, and a 3′ITR sequence region. As a non-limiting example, the viral genome comprises a 5′ITR sequence region, at least one promoter sequence region, an intron sequence region, a first payload region comprising a variable heavy or light chain sequence, variant or fragment thereof, a first constant region of the first payload region, at least one linker sequence region, a second payload region comprising a variable heavy or light chain sequence, variant or fragment thereof, a PolyA sequence region, and a 3′ITR sequence region. As a non-limiting example, the viral genome comprises a 5′ITR sequence region, at least one promoter sequence region, an intron sequence region, a first payload region comprising a variable heavy or light chain sequence, variant or fragment thereof, a first constant region of the first payload region, at least one linker sequence region, a second constant region of the first payload region, a tag sequence region, a PolyA sequence region, a filler sequence region, and a 3′ITR sequence region. As a non-limiting example, the viral genome comprises a 5′ITR sequence region, at least one promoter sequence region, an intron sequence region, a first payload region comprising a variable heavy or light chain sequence, variant or fragment thereof, a first constant region of the first payload region, at least one linker sequence region, a second constant region of the first payload region, a tag sequence region, a PolyA sequence region, and a 3′ITR sequence region. As a non-limiting example, the viral genome comprises a 5′ITR sequence region, at least one promoter sequence region, an intron sequence region, a first payload region comprising a variable heavy or light chain sequence, variant or fragment thereof, a first constant region of the first payload region, at least one linker sequence region, a second constant region of the first payload region, a PolyA sequence region, a filler sequence region, and a 3′ITR sequence region. As a non-limiting example, the viral genome comprises a 5′ITR sequence region, at least one promoter sequence region, an intron sequence region, a first payload region comprising a variable heavy or light chain sequence, variant or fragment thereof, a first constant region of the first payload region, at least one linker sequence region, a second constant region of the first payload region, a PolyA sequence region, and a 3′ITR sequence region. As a non-limiting example, the viral genome comprises a 5′ITR sequence region, at least one promoter sequence region, an intron sequence region, a first payload region comprising a variable heavy or light chain sequence, variant or fragment thereof, a first constant region of the first payload region, at least one linker sequence region, a tag sequence region, a PolyA sequence region, a filler sequence region, and a 3′ITR sequence region. As a non-limiting example, the viral genome comprises a 5′ITR sequence region, at least one promoter sequence region, an intron sequence region, a first payload region comprising a variable heavy or light chain sequence, variant or fragment thereof, a first constant region of the first payload region, at least one linker sequence region, a tag sequence region, a PolyA sequence region, and a 3′ITR sequence region. As a non-limiting example, the viral genome comprises a 5′ITR sequence region, at least one promoter sequence region, an intron sequence region, a first payload region comprising a variable heavy or light chain sequence, variant or fragment thereof, a first constant region of the first payload region, at least one linker sequence region, a PolyA sequence region, a filler sequence region, and a 3′ITR sequence region. As a non-limiting example, the viral genome comprises a 5′ITR sequence region, at least one promoter sequence region, an intron sequence region, a first payload region comprising a variable heavy or light chain sequence, variant or fragment thereof, a first constant region of the first payload region, at least one linker sequence region, a PolyA sequence region, and a 3′ITR sequence region. As a non-limiting example, the viral genome comprises a 5′ITR sequence region, at least one promoter sequence region, an intron sequence region, a first payload region comprising a variable heavy or light chain sequence, variant or fragment thereof, a first constant region of the first payload region, a first signal sequence region, a second payload region comprising a variable heavy or light chain sequence, variant or fragment thereof, a second constant region of the first payload region, a tag sequence region, a PolyA sequence region, a filler sequence region, and a 3′ITR sequence region. As a non-limiting example, the viral genome comprises a 5′ITR sequence region, at least one promoter sequence region, an intron sequence region, a first payload region comprising a variable heavy or light chain sequence, variant or fragment thereof, a first constant region of the first payload region, a first signal sequence region, a second payload region comprising a variable heavy or light chain sequence, variant or fragment thereof, a second constant region of the first payload region, a tag sequence region, a PolyA sequence region, and a 3′ITR sequence region. As a non-limiting example, the viral genome comprises a 5′ITR sequence region, at least one promoter sequence region, an intron sequence region, a first payload region comprising a variable heavy or light chain sequence, variant or fragment thereof, a first constant region of the first payload region, a first signal sequence region, a second payload region comprising a variable heavy or light chain sequence, variant or fragment thereof, a second constant region of the first payload region, a PolyA sequence region, a filler sequence region, and a 3′ITR sequence region. As a non-limiting example, the viral genome comprises a 5′ITR sequence region, at least one promoter sequence region, an intron sequence region, a first payload region comprising a variable heavy or light chain sequence, variant or fragment thereof, a first constant region of the first payload region, a first signal sequence region, a second payload region comprising a variable heavy or light chain sequence, variant or fragment thereof, a second constant region of the first payload region, a PolyA sequence region, and a 3′ITR sequence region. As a non-limiting example, the viral genome comprises a 5′ITR sequence region, at least one promoter sequence region, an intron sequence region, a first payload region comprising a variable heavy or light chain sequence, variant or fragment thereof, a first constant region of the first payload region, a first signal sequence region, a second payload region comprising a variable heavy or light chain sequence, variant or fragment thereof, a tag sequence region, a PolyA sequence region, a filler sequence region, and a 3′ITR sequence region. As a non-limiting example, the viral genome comprises a 5′ITR sequence region, at least one promoter sequence region, an intron sequence region, a first payload region comprising a variable heavy or light chain sequence, variant or fragment thereof, a first constant region of the first payload region, a first signal sequence region, a second payload region comprising a variable heavy or light chain sequence, variant or fragment thereof, a tag sequence region, a PolyA sequence region, and a 3′ITR sequence region. As a non-limiting example, the viral genome comprises a 5′ITR sequence region, at least one promoter sequence region, an intron sequence region, a first payload region comprising a variable heavy or light chain sequence, variant or fragment thereof, a first constant region of the first payload region, a first signal sequence region, a second payload region comprising a variable heavy or light chain sequence, variant or fragment thereof, a PolyA sequence region, a filler sequence region, and a 3′ITR sequence region. As a non-limiting example, the viral genome comprises a 5′ITR sequence region, at least one promoter sequence region, an intron sequence region, a first payload region comprising a variable heavy or light chain sequence, variant or fragment thereof, a first constant region of the first payload region, a first signal sequence region, a second payload region comprising a variable heavy or light chain sequence, variant or fragment thereof, a PolyA sequence region, and a 3′ITR sequence region. As a non-limiting example, the viral genome comprises a 5′ITR sequence region, at least one promoter sequence region, an intron sequence region, a first payload region comprising a variable heavy or light chain sequence, variant or fragment thereof, a first constant region of the first payload region, a first signal sequence region, a second constant region of the first payload region, a tag sequence region, a PolyA sequence region, a filler sequence region, and a 3′ITR sequence region. As a non-limiting example, the viral genome comprises a 5′ITR sequence region, at least one promoter sequence region, an intron sequence region, a first payload region comprising a variable heavy or light chain sequence, variant or fragment thereof, a first constant region of the first payload region, a first signal sequence region, a second constant region of the first payload region, a tag sequence region, a PolyA sequence region, and a 3′ITR sequence region. As a non-limiting example, the viral genome comprises a 5′ITR sequence region, at least one promoter sequence region, an intron sequence region, a first payload region comprising a variable heavy or light chain sequence, variant or fragment thereof, a first constant region of the first payload region, a first signal sequence region, a second constant region of the first payload region, a PolyA sequence region, a filler sequence region, and a 3′ITR sequence region. As a non-limiting example, the viral genome comprises a 5′ITR sequence region, at least one promoter sequence region, an intron sequence region, a first payload region comprising a variable heavy or light chain sequence, variant or fragment thereof, a first constant region of the first payload region, a first signal sequence region, a second constant region of the first payload region, a PolyA sequence region, and a 3′ITR sequence region. As a non-limiting example, the viral genome comprises a 5′ITR sequence region, at least one promoter sequence region, an intron sequence region, a first payload region comprising a variable heavy or light chain sequence, variant or fragment thereof, a first constant region of the first payload region, a first signal sequence region, a tag sequence region, a PolyA sequence region, a filler sequence region, and a 3′ITR sequence region. As a non-limiting example, the viral genome comprises a 5′ITR sequence region, at least one promoter sequence region, an intron sequence region, a first payload region comprising a variable heavy or light chain sequence, variant or fragment thereof, a first constant region of the first payload region, a first signal sequence region, a tag sequence region, a PolyA sequence region, and a 3′ITR sequence region. As a non-limiting example, the viral genome comprises a 5′ITR sequence region, at least one promoter sequence region, an intron sequence region, a first payload region comprising a variable heavy or light chain sequence, variant or fragment thereof, a first constant region of the first payload region, a first signal sequence region, a PolyA sequence region, a filler sequence region, and a 3′ITR sequence region. As a non-limiting example, the viral genome comprises a 5′ITR sequence region, at least one promoter sequence region, an intron sequence region, a first payload region comprising a variable heavy or light chain sequence, variant or fragment thereof, a first constant region of the first payload region, a first signal sequence region, a PolyA sequence region, and a 3′ITR sequence region. As a non-limiting example, the viral genome comprises a 5′ITR sequence region, at least one promoter sequence region, an intron sequence region, a first payload region comprising a variable heavy or light chain sequence, variant or fragment thereof, a first constant region of the first payload region, a second payload region comprising a variable heavy or light chain sequence, variant or fragment thereof, a second constant region of the first payload region, a tag sequence region, a PolyA sequence region, a filler sequence region, and a 3′ITR sequence region. As a non-limiting example, the viral genome comprises a 5′ITR sequence region, at least one promoter sequence region, an intron sequence region, a first payload region comprising a variable heavy or light chain sequence, variant or fragment thereof, a first constant region of the first payload region, a second payload region comprising a variable heavy or light chain sequence, variant or fragment thereof, a second constant region of the first payload region, a tag sequence region, a PolyA sequence region, and a 3′ITR sequence region. As a non-limiting example, the viral genome comprises a 5′ITR sequence region, at least one promoter sequence region, an intron sequence region, a first payload region comprising a variable heavy or light chain sequence, variant or fragment thereof, a first constant region of the first payload region, a second payload region comprising a variable heavy or light chain sequence, variant or fragment thereof, a second constant region of the first payload region, a PolyA sequence region, a filler sequence region, and a 3′ITR sequence region. As a non-limiting example, the viral genome comprises a 5′ITR sequence region, at least one promoter sequence region, an intron sequence region, a first payload region comprising a variable heavy or light chain sequence, variant or fragment thereof, a first constant region of the first payload region, a second payload region comprising a variable heavy or light chain sequence, variant or fragment thereof, a second constant region of the first payload region, a PolyA sequence region, and a 3′ITR sequence region. As a non-limiting example, the viral genome comprises a 5′ITR sequence region, at least one promoter sequence region, an intron sequence region, a first payload region comprising a variable heavy or light chain sequence, variant or fragment thereof, a first constant region of the first payload region, a second payload region comprising a variable heavy or light chain sequence, variant or fragment thereof, a tag sequence region, a PolyA sequence region, a filler sequence region, and a 3′ITR sequence region. As a non-limiting example, the viral genome comprises a 5′ITR sequence region, at least one promoter sequence region, an intron sequence region, a first payload region comprising a variable heavy or light chain sequence, variant or fragment thereof, a first constant region of the first payload region, a second payload region comprising a variable heavy or light chain sequence, variant or fragment thereof, a tag sequence region, a PolyA sequence region, and a 3′ITR sequence region. As a non-limiting example, the viral genome comprises a 5′ITR sequence region, at least one promoter sequence region, an intron sequence region, a first payload region comprising a variable heavy or light chain sequence, variant or fragment thereof, a first constant region of the first payload region, a second payload region comprising a variable heavy or light chain sequence, variant or fragment thereof, a PolyA sequence region, a filler sequence region, and a 3′ITR sequence region. As a non-limiting example, the viral genome comprises a 5′ITR sequence region, at least one promoter sequence region, an intron sequence region, a first payload region comprising a variable heavy or light chain sequence, variant or fragment thereof, a first constant region of the first payload region, a second payload region comprising a variable heavy or light chain sequence, variant or fragment thereof, a PolyA sequence region, and a 3′ITR sequence region. As a non-limiting example, the viral genome comprises a 5′ITR sequence region, at least one promoter sequence region, an intron sequence region, a first payload region comprising a variable heavy or light chain sequence, variant or fragment thereof, a first constant region of the first payload region, a second constant region of the first payload region, a tag sequence region, a PolyA sequence region, a filler sequence region, and a 3′ITR sequence region. As a non-limiting example, the viral genome comprises a 5′ITR sequence region, at least one promoter sequence region, an intron sequence region, a first payload region comprising a variable heavy or light chain sequence, variant or fragment thereof, a first constant region of the first payload region, a second constant region of the first payload region, a tag sequence region, a PolyA sequence region, and a 3′ITR sequence region. As a non-limiting example, the viral genome comprises a 5′ITR sequence region, at least one promoter sequence region, an intron sequence region, a first payload region comprising a variable heavy or light chain sequence, variant or fragment thereof, a first constant region of the first payload region, a second constant region of the first payload region, a PolyA sequence region, a filler sequence region, and a 3′ITR sequence region. As a non-limiting example, the viral genome comprises a 5′ITR sequence region, at least one promoter sequence region, an intron sequence region, a first payload region comprising a variable heavy or light chain sequence, variant or fragment thereof, a first constant region of the first payload region, a second constant region of the first payload region, a PolyA sequence region, and a 3′ITR sequence region. As a non-limiting example, the viral genome comprises a 5′ITR sequence region, at least one promoter sequence region, an intron sequence region, a first payload region comprising a variable heavy or light chain sequence, variant or fragment thereof, a first constant region of the first payload region, a tag sequence region, a PolyA sequence region, a filler sequence region, and a 3′ITR sequence region. As a non-limiting example, the viral genome comprises a 5′ITR sequence region, at least one promoter sequence region, an intron sequence region, a first payload region comprising a variable heavy or light chain sequence, variant or fragment thereof, a first constant region of the first payload region, a tag sequence region, a PolyA sequence region, and a 3′ITR sequence region. As a non-limiting example, the viral genome comprises a 5′ITR sequence region, at least one promoter sequence region, an intron sequence region, a first payload region comprising a variable heavy or light chain sequence, variant or fragment thereof, a first constant region of the first payload region, a PolyA sequence region, a filler sequence region, and a 3′ITR sequence region. As a non-limiting example, the viral genome comprises a 5′ITR sequence region, at least one promoter sequence region, an intron sequence region, a first payload region comprising a variable heavy or light chain sequence, variant or fragment thereof, a first constant region of the first payload region, a PolyA sequence region, and a 3′ITR sequence region. As a non-limiting example, the viral genome comprises a 5′ITR sequence region, at least one promoter sequence region, an intron sequence region, a first payload region comprising a variable heavy or light chain sequence, variant or fragment thereof, at least one linker sequence region, a first signal sequence region, a second payload region comprising a variable heavy or light chain sequence, variant or fragment thereof, a first constant region of the first payload region, a tag sequence region, a PolyA sequence region, a filler sequence region, and a 3′ITR sequence region. As a non-limiting example, the viral genome comprises a 5′ITR sequence region, at least one promoter sequence region, an intron sequence region, a first payload region comprising a variable heavy or light chain sequence, variant or fragment thereof, at least one linker sequence region, a first signal sequence region, a second payload region comprising a variable heavy or light chain sequence, variant or fragment thereof, a first constant region of the first payload region, a tag sequence region, a PolyA sequence region, and a 3′ITR sequence region. As a non-limiting example, the viral genome comprises a 5′ITR sequence region, at least one promoter sequence region, an intron sequence region, a first payload region comprising a variable heavy or light chain sequence, variant or fragment thereof, at least one linker sequence region, a first signal sequence region, a second payload region comprising a variable heavy or light chain sequence, variant or fragment thereof, a first constant region of the first payload region, a PolyA sequence region, a filler sequence region, and a 3′ITR sequence region. As a non-limiting example, the viral genome comprises a 5′ITR sequence region, at least one promoter sequence region, an intron sequence region, a first payload region comprising a variable heavy or light chain sequence, variant or fragment thereof, at least one linker sequence region, a first signal sequence region, a second payload region comprising a variable heavy or light chain sequence, variant or fragment thereof, a first constant region of the first payload region, a PolyA sequence region, and a 3′ITR sequence region. As a non-limiting example, the viral genome comprises a 5′ITR sequence region, at least one promoter sequence region, an intron sequence region, a first payload region comprising a variable heavy or light chain sequence, variant or fragment thereof, at least one linker sequence region, a first signal sequence region, a second payload region comprising a variable heavy or light chain sequence, variant or fragment thereof, a tag sequence region, a PolyA sequence region, a filler sequence region, and a 3′ITR sequence region. As a non-limiting example, the viral genome comprises a 5′ITR sequence region, at least one promoter sequence region, an intron sequence region, a first payload region comprising a variable heavy or light chain sequence, variant or fragment thereof, at least one linker sequence region, a first signal sequence region, a second payload region comprising a variable heavy or light chain sequence, variant or fragment thereof, a tag sequence region, a PolyA sequence region, and a 3′ITR sequence region. As a non-limiting example, the viral genome comprises a 5′ITR sequence region, at least one promoter sequence region, an intron sequence region, a first payload region comprising a variable heavy or light chain sequence, variant or fragment thereof, at least one linker sequence region, a first signal sequence region, a second payload region comprising a variable heavy or light chain sequence, variant or fragment thereof, a PolyA sequence region, a filler sequence region, and a 3′ITR sequence region. As a non-limiting example, the viral genome comprises a 5′ITR sequence region, at least one promoter sequence region, an intron sequence region, a first payload region comprising a variable heavy or light chain sequence, variant or fragment thereof, at least one linker sequence region, a first signal sequence region, a second payload region comprising a variable heavy or light chain sequence, variant or fragment thereof, a PolyA sequence region, and a 3′ITR sequence region. As a non-limiting example, the viral genome comprises a 5′ITR sequence region, at least one promoter sequence region, an intron sequence region, a first payload region comprising a variable heavy or light chain sequence, variant or fragment thereof, at least one linker sequence region, a first signal sequence region, a first constant region of the first payload region, a tag sequence region, a PolyA sequence region, a filler sequence region, and a 3′ITR sequence region. As a non-limiting example, the viral genome comprises a 5′ITR sequence region, at least one promoter sequence region, an intron sequence region, a first payload region comprising a variable heavy or light chain sequence, variant or fragment thereof, at least one linker sequence region, a first signal sequence region, a first constant region of the first payload region, a tag sequence region, a PolyA sequence region, and a 3′ITR sequence region. As a non-limiting example, the viral genome comprises a 5′ITR sequence region, at least one promoter sequence region, an intron sequence region, a first payload region comprising a variable heavy or light chain sequence, variant or fragment thereof, at least one linker sequence region, a first signal sequence region, a first constant region of the first payload region, a PolyA sequence region, a filler sequence region, and a 3′ITR sequence region. As a non-limiting example, the viral genome comprises a 5′ITR sequence region, at least one promoter sequence region, an intron sequence region, a first payload region comprising a variable heavy or light chain sequence, variant or fragment thereof, at least one linker sequence region, a first signal sequence region, a first constant region of the first payload region, a PolyA sequence region, and a 3′ITR sequence region. As a non-limiting example, the viral genome comprises a 5′ITR sequence region, at least one promoter sequence region, an intron sequence region, a first payload region comprising a variable heavy or light chain sequence, variant or fragment thereof, at least one linker sequence region, a first signal sequence region, a tag sequence region, a PolyA sequence region, a filler sequence region, and a 3′ITR sequence region. As a non-limiting example, the viral genome comprises a 5′ITR sequence region, at least one promoter sequence region, an intron sequence region, a first payload region comprising a variable heavy or light chain sequence, variant or fragment thereof, at least one linker sequence region, a first signal sequence region, a tag sequence region, a PolyA sequence region, and a 3′ITR sequence region. As a non-limiting example, the viral genome comprises a 5′ITR sequence region, at least one promoter sequence region, an intron sequence region, a first payload region comprising a variable heavy or light chain sequence, variant or fragment thereof, at least one linker sequence region, a first signal sequence region, a PolyA sequence region, a filler sequence region, and a 3′ITR sequence region. As a non-limiting example, the viral genome comprises a 5′ITR sequence region, at least one promoter sequence region, an intron sequence region, a first payload region comprising a variable heavy or light chain sequence, variant or fragment thereof, at least one linker sequence region, a first signal sequence region, a PolyA sequence region, and a 3′ITR sequence region. As a non-limiting example, the viral genome comprises a 5′ITR sequence region, at least one promoter sequence region, an intron sequence region, a first payload region comprising a variable heavy or light chain sequence, variant or fragment thereof, at least one linker sequence region, a second payload region comprising a variable heavy or light chain sequence, variant or fragment thereof, a first constant region of the first payload region, a tag sequence region, a PolyA sequence region, a filler sequence region, and a 3′ITR sequence region. As a non-limiting example, the viral genome comprises a 5′ITR sequence region, at least one promoter sequence region, an intron sequence region, a first payload region comprising a variable heavy or light chain sequence, variant or fragment thereof, at least one linker sequence region, a second payload region comprising a variable heavy or light chain sequence, variant or fragment thereof, a first constant region of the first payload region, a tag sequence region, a PolyA sequence region, and a 3′ITR sequence region. As a non-limiting example, the viral genome comprises a 5′ITR sequence region, at least one promoter sequence region, an intron sequence region, a first payload region comprising a variable heavy or light chain sequence, variant or fragment thereof, at least one linker sequence region, a second payload region comprising a variable heavy or light chain sequence, variant or fragment thereof, a first constant region of the first payload region, a PolyA sequence region, a filler sequence region, and a 3′ITR sequence region. As a non-limiting example, the viral genome comprises a 5′ITR sequence region, at least one promoter sequence region, an intron sequence region, a first payload region comprising a variable heavy or light chain sequence, variant or fragment thereof, at least one linker sequence region, a second payload region comprising a variable heavy or light chain sequence, variant or fragment thereof, a first constant region of the first payload region, a PolyA sequence region, and a 3′ITR sequence region. As a non-limiting example, the viral genome comprises a 5′ITR sequence region, at least one promoter sequence region, an intron sequence region, a first payload region comprising a variable heavy or light chain sequence, variant or fragment thereof, at least one linker sequence region, a second payload region comprising a variable heavy or light chain sequence, variant or fragment thereof, a tag sequence region, a PolyA sequence region, a filler sequence region, and a 3′ITR sequence region. As a non-limiting example, the viral genome comprises a 5′ITR sequence region, at least one promoter sequence region, an intron sequence region, a first payload region comprising a variable heavy or light chain sequence, variant or fragment thereof, at least one linker sequence region, a second payload region comprising a variable heavy or light chain sequence, variant or fragment thereof, a tag sequence region, a PolyA sequence region, and a 3′ITR sequence region. As a non-limiting example, the viral genome comprises a 5′ITR sequence region, at least one promoter sequence region, an intron sequence region, a first payload region comprising a variable heavy or light chain sequence, variant or fragment thereof, at least one linker sequence region, a second payload region comprising a variable heavy or light chain sequence, variant or fragment thereof, a PolyA sequence region, a filler sequence region, and a 3′ITR sequence region. As a non-limiting example, the viral genome comprises a 5′ITR sequence region, at least one promoter sequence region, an intron sequence region, a first payload region comprising a variable heavy or light chain sequence, variant or fragment thereof, at least one linker sequence region, a second payload region comprising a variable heavy or light chain sequence, variant or fragment thereof, a PolyA sequence region, and a 3′ITR sequence region. As a non-limiting example, the viral genome comprises a 5′ITR sequence region, at least one promoter sequence region, an intron sequence region, a first payload region comprising a variable heavy or light chain sequence, variant or fragment thereof, at least one linker sequence region, a first constant region of the first payload region, a tag sequence region, a PolyA sequence region, a filler sequence region, and a 3′ITR sequence region. As a non-limiting example, the viral genome comprises a 5′ITR sequence region, at least one promoter sequence region, an intron sequence region, a first payload region comprising a variable heavy or light chain sequence, variant or fragment thereof, at least one linker sequence region, a first constant region of the first payload region, a tag sequence region, a PolyA sequence region, and a 3′ITR sequence region. As a non-limiting example, the viral genome comprises a 5′ITR sequence region, at least one promoter sequence region, an intron sequence region, a first payload region comprising a variable heavy or light chain sequence, variant or fragment thereof, at least one linker sequence region, a first constant region of the first payload region, a PolyA sequence region, a filler sequence region, and a 3′ITR sequence region. As a non-limiting example, the viral genome comprises a 5′ITR sequence region, at least one promoter sequence region, an intron sequence region, a first payload region comprising a variable heavy or light chain sequence, variant or fragment thereof, at least one linker sequence region, a first constant region of the first payload region, a PolyA sequence region, and a 3′ITR sequence region. As a non-limiting example, the viral genome comprises a 5′ITR sequence region, at least one promoter sequence region, an intron sequence region, a first payload region comprising a variable heavy or light chain sequence, variant or fragment thereof, at least one linker sequence region, a tag sequence region, a PolyA sequence region, a filler sequence region, and a 3′ITR sequence region. As a non-limiting example, the viral genome comprises a 5′ITR sequence region, at least one promoter sequence region, an intron sequence region, a first payload region comprising a variable heavy or light chain sequence, variant or fragment thereof, at least one linker sequence region, a tag sequence region, a PolyA sequence region, and a 3′ITR sequence region. As a non-limiting example, the viral genome comprises a 5′ITR sequence region, at least one promoter sequence region, an intron sequence region, a first payload region comprising a variable heavy or light chain sequence, variant or fragment thereof, at least one linker sequence region, a PolyA sequence region, a filler sequence region, and a 3′ITR sequence region. As a non-limiting example, the viral genome comprises a 5′ITR sequence region, at least one promoter sequence region, an intron sequence region, a first payload region comprising a variable heavy or light chain sequence, variant or fragment thereof, at least one linker sequence region, a PolyA sequence region, and a 3′ITR sequence region. As a non-limiting example, the viral genome comprises a 5′ITR sequence region, at least one promoter sequence region, an intron sequence region, a first payload region comprising a variable heavy or light chain sequence, variant or fragment thereof, a first signal sequence region, a second payload region comprising a variable heavy or light chain sequence, variant or fragment thereof, a first constant region of the first payload region, a tag sequence region, a PolyA sequence region, a filler sequence region, and a 3′ITR sequence region. As a non-limiting example, the viral genome comprises a 5′ITR sequence region, at least one promoter sequence region, an intron sequence region, a first payload region comprising a variable heavy or light chain sequence, variant or fragment thereof, a first signal sequence region, a second payload region comprising a variable heavy or light chain sequence, variant or fragment thereof, a first constant region of the first payload region, a tag sequence region, a PolyA sequence region, and a 3′ITR sequence region. As a non-limiting example, the viral genome comprises a 5′ITR sequence region, at least one promoter sequence region, an intron sequence region, a first payload region comprising a variable heavy or light chain sequence, variant or fragment thereof, a first signal sequence region, a second payload region comprising a variable heavy or light chain sequence, variant or fragment thereof, a first constant region of the first payload region, a PolyA sequence region, a filler sequence region, and a 3′ITR sequence region. As a non-limiting example, the viral genome comprises a 5′ITR sequence region, at least one promoter sequence region, an intron sequence region, a first payload region comprising a variable heavy or light chain sequence, variant or fragment thereof, a first signal sequence region, a second payload region comprising a variable heavy or light chain sequence, variant or fragment thereof, a first constant region of the first payload region, a PolyA sequence region, and a 3′ITR sequence region. As a non-limiting example, the viral genome comprises a 5′ITR sequence region, at least one promoter sequence region, an intron sequence region, a first payload region comprising a variable heavy or light chain sequence, variant or fragment thereof, a first signal sequence region, a second payload region comprising a variable heavy or light chain sequence, variant or fragment thereof, a tag sequence region, a PolyA sequence region, a filler sequence region, and a 3′ITR sequence region. As a non-limiting example, the viral genome comprises a 5′ITR sequence region, at least one promoter sequence region, an intron sequence region, a first payload region comprising a variable heavy or light chain sequence, variant or fragment thereof, a first signal sequence region, a second payload region comprising a variable heavy or light chain sequence, variant or fragment thereof, a tag sequence region, a PolyA sequence region, and a 3′ITR sequence region. As a non-limiting example, the viral genome comprises a 5′ITR sequence region, at least one promoter sequence region, an intron sequence region, a first payload region comprising a variable heavy or light chain sequence, variant or fragment thereof, a first signal sequence region, a second payload region comprising a variable heavy or light chain sequence, variant or fragment thereof, a PolyA sequence region, a filler sequence region, and a 3′ITR sequence region. As a non-limiting example, the viral genome comprises a 5′ITR sequence region, at least one promoter sequence region, an intron sequence region, a first payload region comprising a variable heavy or light chain sequence, variant or fragment thereof, a first signal sequence region, a second payload region comprising a variable heavy or light chain sequence, variant or fragment thereof, a PolyA sequence region, and a 3′ITR sequence region. As a non-limiting example, the viral genome comprises a 5′ITR sequence region, at least one promoter sequence region, an intron sequence region, a first payload region comprising a variable heavy or light chain sequence, variant or fragment thereof, a first signal sequence region, a first constant region of the first payload region, a tag sequence region, a PolyA sequence region, a filler sequence region, and a 3′ITR sequence region. As a non-limiting example, the viral genome comprises a 5′ITR sequence region, at least one promoter sequence region, an intron sequence region, a first payload region comprising a variable heavy or light chain sequence, variant or fragment thereof, a first signal sequence region, a first constant region of the first payload region, a tag sequence region, a PolyA sequence region, and a 3′ITR sequence region. As a non-limiting example, the viral genome comprises a 5′ITR sequence region, at least one promoter sequence region, an intron sequence region, a first payload region comprising a variable heavy or light chain sequence, variant or fragment thereof, a first signal sequence region, a first constant region of the first payload region, a PolyA sequence region, a filler sequence region, and a 3′ITR sequence region. As a non-limiting example, the viral genome comprises a 5′ITR sequence region, at least one promoter sequence region, an intron sequence region, a first payload region comprising a variable heavy or light chain sequence, variant or fragment thereof, a first signal sequence region, a first constant region of the first payload region, a PolyA sequence region, and a 3′ITR sequence region. As a non-limiting example, the viral genome comprises a 5′ITR sequence region, at least one promoter sequence region, an intron sequence region, a first payload region comprising a variable heavy or light chain sequence, variant or fragment thereof, a first signal sequence region, a tag sequence region, a PolyA sequence region, a filler sequence region, and a 3′ITR sequence region. As a non-limiting example, the viral genome comprises a 5′ITR sequence region, at least one promoter sequence region, an intron sequence region, a first payload region comprising a variable heavy or light chain sequence, variant or fragment thereof, a first signal sequence region, a tag sequence region, a PolyA sequence region, and a 3′ITR sequence region. As a non-limiting example, the viral genome comprises a 5′ITR sequence region, at least one promoter sequence region, an intron sequence region, a first payload region comprising a variable heavy or light chain sequence, variant or fragment thereof, a first signal sequence region, a PolyA sequence region, a filler sequence region, and a 3′ITR sequence region. As a non-limiting example, the viral genome comprises a 5′ITR sequence region, at least one promoter sequence region, an intron sequence region, a first payload region comprising a variable heavy or light chain sequence, variant or fragment thereof, a first signal sequence region, a PolyA sequence region, and a 3′ITR sequence region. As a non-limiting example, the viral genome comprises a 5′ITR sequence region, at least one promoter sequence region, an intron sequence region, a first payload region comprising a variable heavy or light chain sequence, variant or fragment thereof, a second payload region comprising a variable heavy or light chain sequence, variant or fragment thereof, a first constant region of the first payload region, a tag sequence region, a PolyA sequence region, a filler sequence region, and a 3′ITR sequence region. As a non-limiting example, the viral genome comprises a 5′ITR sequence region, at least one promoter sequence region, an intron sequence region, a first payload region comprising a variable heavy or light chain sequence, variant or fragment thereof, a second payload region comprising a variable heavy or light chain sequence, variant or fragment thereof, a first constant region of the first payload region, a tag sequence region, a PolyA sequence region, and a 3′ITR sequence region. As a non-limiting example, the viral genome comprises a 5′ITR sequence region, at least one promoter sequence region, an intron sequence region, a first payload region comprising a variable heavy or light chain sequence, variant or fragment thereof, a second payload region comprising a variable heavy or light chain sequence, variant or fragment thereof, a first constant region of the first payload region, a PolyA sequence region, a filler sequence region, and a 3′ITR sequence region. As a non-limiting example, the viral genome comprises a 5′ITR sequence region, at least one promoter sequence region, an intron sequence region, a first payload region comprising a variable heavy or light chain sequence, variant or fragment thereof, a second payload region comprising a variable heavy or light chain sequence, variant or fragment thereof, a first constant region of the first payload region, a PolyA sequence region, and a 3′ITR sequence region. As a non-limiting example, the viral genome comprises a 5′ITR sequence region, at least one promoter sequence region, an intron sequence region, a first payload region comprising a variable heavy or light chain sequence, variant or fragment thereof, a second payload region comprising a variable heavy or light chain sequence, variant or fragment thereof, a tag sequence region, a PolyA sequence region, a filler sequence region, and a 3′ITR sequence region. As a non-limiting example, the viral genome comprises a 5′ITR sequence region, at least one promoter sequence region, an intron sequence region, a first payload region comprising a variable heavy or light chain sequence, variant or fragment thereof, a second payload region comprising a variable heavy or light chain sequence, variant or fragment thereof, a tag sequence region, a PolyA sequence region, and a 3′ITR sequence region. As a non-limiting example, the viral genome comprises a 5′ITR sequence region, at least one promoter sequence region, an intron sequence region, a first payload region comprising a variable heavy or light chain sequence, variant or fragment thereof, a second payload region comprising a variable heavy or light chain sequence, variant or fragment thereof, a PolyA sequence region, a filler sequence region, and a 3′ITR sequence region. As a non-limiting example, the viral genome comprises a 5′ITR sequence region, at least one promoter sequence region, an intron sequence region, a first payload region comprising a variable heavy or light chain sequence, variant or fragment thereof, a second payload region comprising a variable heavy or light chain sequence, variant or fragment thereof, a PolyA sequence region, and a 3′ITR sequence region. As a non-limiting example, the viral genome comprises a 5′ITR sequence region, at least one promoter sequence region, an intron sequence region, a first payload region comprising a variable heavy or light chain sequence, variant or fragment thereof, a first constant region of the first payload region, a tag sequence region, a PolyA sequence region, a filler sequence region, and a 3′ITR sequence region. As a non-limiting example, the viral genome comprises a 5′ITR sequence region, at least one promoter sequence region, an intron sequence region, a first payload region comprising a variable heavy or light chain sequence, variant or fragment thereof, a first constant region of the first payload region, a tag sequence region, a PolyA sequence region, and a 3′ITR sequence region. As a non-limiting example, the viral genome comprises a 5′ITR sequence region, at least one promoter sequence region, an intron sequence region, a first payload region comprising a variable heavy or light chain sequence, variant or fragment thereof, a first constant region of the first payload region, a PolyA sequence region, a filler sequence region, and a 3′ITR sequence region. As a non-limiting example, the viral genome comprises a 5′ITR sequence region, at least one promoter sequence region, an intron sequence region, a first payload region comprising a variable heavy or light chain sequence, variant or fragment thereof, a first constant region of the first payload region, a PolyA sequence region, and a 3′ITR sequence region. As a non-limiting example, the viral genome comprises a 5′ITR sequence region, at least one promoter sequence region, an intron sequence region, a first payload region comprising a variable heavy or light chain sequence, variant or fragment thereof, a tag sequence region, a PolyA sequence region, a filler sequence region, and a 3′ITR sequence region. As a non-limiting example, the viral genome comprises a 5′ITR sequence region, at least one promoter sequence region, an intron sequence region, a first payload region comprising a variable heavy or light chain sequence, variant or fragment thereof, a tag sequence region, a PolyA sequence region, and a 3′ITR sequence region. As a non-limiting example, the viral genome comprises a 5′ITR sequence region, at least one promoter sequence region, an intron sequence region, a first payload region comprising a variable heavy or light chain sequence, variant or fragment thereof, a PolyA sequence region, a filler sequence region, and a 3′ITR sequence region. As a non-limiting example, the viral genome comprises a 5′ITR sequence region, at least one promoter sequence region, an intron sequence region, a first payload region comprising a variable heavy or light chain sequence, variant or fragment thereof, a PolyA sequence region, and a 3′ITR sequence region. As a non-limiting example, the viral genome comprises a 5′ITR sequence region, at least one promoter sequence region, a first signal sequence region, a first payload region comprising a variable heavy or light chain sequence, variant or fragment thereof, a first constant region of the first payload region, at least one linker sequence region, a second signal sequence region, a second payload region comprising a variable heavy or light chain sequence, variant or fragment thereof, a second constant region of the first payload region, a tag sequence region, a PolyA sequence region, a filler sequence region, and a 3′ITR sequence region. As a non-limiting example, the viral genome comprises a 5′ITR sequence region, at least one promoter sequence region, a first signal sequence region, a first payload region comprising a variable heavy or light chain sequence, variant or fragment thereof, a first constant region of the first payload region, at least one linker sequence region, a second signal sequence region, a second payload region comprising a variable heavy or light chain sequence, variant or fragment thereof, a second constant region of the first payload region, a tag sequence region, a PolyA sequence region, and a 3′ITR sequence region. As a non-limiting example, the viral genome comprises a 5′ITR sequence region, at least one promoter sequence region, a first signal sequence region, a first payload region comprising a variable heavy or light chain sequence, variant or fragment thereof, a first constant region of the first payload region, at least one linker sequence region, a second signal sequence region, a second payload region comprising a variable heavy or light chain sequence, variant or fragment thereof, a second constant region of the first payload region, a PolyA sequence region, a filler sequence region, and a 3′ITR sequence region. As a non-limiting example, the viral genome comprises a 5′ITR sequence region, at least one promoter sequence region, a first signal sequence region, a first payload region comprising a variable heavy or light chain sequence, variant or fragment thereof, a first constant region of the first payload region, at least one linker sequence region, a second signal sequence region, a second payload region comprising a variable heavy or light chain sequence, variant or fragment thereof, a second constant region of the first payload region, a PolyA sequence region, and a 3′ITR sequence region. As a non-limiting example, the viral genome comprises a 5′ITR sequence region, at least one promoter sequence region, a first signal sequence region, a first payload region comprising a variable heavy or light chain sequence, variant or fragment thereof, a first constant region of the first payload region, at least one linker sequence region, a second signal sequence region, a second payload region comprising a variable heavy or light chain sequence, variant or fragment thereof, a tag sequence region, a PolyA sequence region, a filler sequence region, and a 3′ITR sequence region. As a non-limiting example, the viral genome comprises a 5′ITR sequence region, at least one promoter sequence region, a first signal sequence region, a first payload region comprising a variable heavy or light chain sequence, variant or fragment thereof, a first constant region of the first payload region, at least one linker sequence region, a second signal sequence region, a second payload region comprising a variable heavy or light chain sequence, variant or fragment thereof, a tag sequence region, a PolyA sequence region, and a 3′ITR sequence region. As a non-limiting example, the viral genome comprises a 5′ITR sequence region, at least one promoter sequence region, a first signal sequence region, a first payload region comprising a variable heavy or light chain sequence, variant or fragment thereof, a first constant region of the first payload region, at least one linker sequence region, a second signal sequence region, a second payload region comprising a variable heavy or light chain sequence, variant or fragment thereof, a PolyA sequence region, a filler sequence region, and a 3′ITR sequence region. As a non-limiting example, the viral genome comprises a 5′ITR sequence region, at least one promoter sequence region, a first signal sequence region, a first payload region comprising a variable heavy or light chain sequence, variant or fragment thereof, a first constant region of the first payload region, at least one linker sequence region, a second signal sequence region, a second payload region comprising a variable heavy or light chain sequence, variant or fragment thereof, a PolyA sequence region, and a 3′ITR sequence region. As a non-limiting example, the viral genome comprises a 5′ITR sequence region, at least one promoter sequence region, a first signal sequence region, a first payload region comprising a variable heavy or light chain sequence, variant or fragment thereof, a first constant region of the first payload region, at least one linker sequence region, a second signal sequence region, a second constant region of the first payload region, a tag sequence region, a PolyA sequence region, a filler sequence region, and a 3′ITR sequence region. As a non-limiting example, the viral genome comprises a 5′ITR sequence region, at least one promoter sequence region, a first signal sequence region, a first payload region comprising a variable heavy or light chain sequence, variant or fragment thereof, a first constant region of the first payload region, at least one linker sequence region, a second signal sequence region, a second constant region of the first payload region, a tag sequence region, a PolyA sequence region, and a 3′ITR sequence region. As a non-limiting example, the viral genome comprises a 5′ITR sequence region, at least one promoter sequence region, a first signal sequence region, a first payload region comprising a variable heavy or light chain sequence, variant or fragment thereof, a first constant region of the first payload region, at least one linker sequence region, a second signal sequence region, a second constant region of the first payload region, a PolyA sequence region, a filler sequence region, and a 3′ITR sequence region. As a non-limiting example, the viral genome comprises a 5′ITR sequence region, at least one promoter sequence region, a first signal sequence region, a first payload region comprising a variable heavy or light chain sequence, variant or fragment thereof, a first constant region of the first payload region, at least one linker sequence region, a second signal sequence region, a second constant region of the first payload region, a PolyA sequence region, and a 3′ITR sequence region. As a non-limiting example, the viral genome comprises a 5′ITR sequence region, at least one promoter sequence region, a first signal sequence region, a first payload region comprising a variable heavy or light chain sequence, variant or fragment thereof, a first constant region of the first payload region, at least one linker sequence region, a second signal sequence region, a tag sequence region, a PolyA sequence region, a filler sequence region, and a 3′ITR sequence region. As a non-limiting example, the viral genome comprises a 5′ITR sequence region, at least one promoter sequence region, a first signal sequence region, a first payload region comprising a variable heavy or light chain sequence, variant or fragment thereof, a first constant region of the first payload region, at least one linker sequence region, a second signal sequence region, a PolyA sequence region, and a 3′ITR sequence region. As a non-limiting example, the viral genome comprises a 5′ITR sequence region, at least one promoter sequence region, a first signal sequence region, a first payload region comprising a variable heavy or light chain sequence, variant or fragment thereof, a first constant region of the first payload region, at least one linker sequence region, a second payload region comprising a variable heavy or light chain sequence, variant or fragment thereof, a second constant region of the first payload region, a tag sequence region, a PolyA sequence region, a filler sequence region, and a 3′ITR sequence region. As a non-limiting example, the viral genome comprises a 5′ITR sequence region, at least one promoter sequence region, a first signal sequence region, a first payload region comprising a variable heavy or light chain sequence, variant or fragment thereof, a first constant region of the first payload region, at least one linker sequence region, a second payload region comprising a variable heavy or light chain sequence, variant or fragment thereof, a second constant region of the first payload region, a tag sequence region, a PolyA sequence region, and a 3′ITR sequence region. As a non-limiting example, the viral genome comprises a 5′ITR sequence region, at least one promoter sequence region, a first signal sequence region, a first payload region comprising a variable heavy or light chain sequence, variant or fragment thereof, a first constant region of the first payload region, at least one linker sequence region, a second payload region comprising a variable heavy or light chain sequence, variant or fragment thereof, a second constant region of the first payload region, a PolyA sequence region, a filler sequence region, and a 3′ITR sequence region. As a non-limiting example, the viral genome comprises a 5′ITR sequence region, at least one promoter sequence region, a first signal sequence region, a first payload region comprising a variable heavy or light chain sequence, variant or fragment thereof, a first constant region of the first payload region, at least one linker sequence region, a second payload region comprising a variable heavy or light chain sequence, variant or fragment thereof, a second constant region of the first payload region, a PolyA sequence region, and a 3′ITR sequence region. As a non-limiting example, the viral genome comprises a 5′ITR sequence region, at least one promoter sequence region, a first signal sequence region, a first payload region comprising a variable heavy or light chain sequence, variant or fragment thereof, a first constant region of the first payload region, at least one linker sequence region, a second payload region comprising a variable heavy or light chain sequence, variant or fragment thereof, a tag sequence region, a PolyA sequence region, a filler sequence region, and a 3′ITR sequence region. As a non-limiting example, the viral genome comprises a 5′ITR sequence region, at least one promoter sequence region, a first signal sequence region, a first payload region comprising a variable heavy or light chain sequence, variant or fragment thereof, a first constant region of the first payload region, at least one linker sequence region, a second payload region comprising a variable heavy or light chain sequence, variant or fragment thereof, a tag sequence region, a PolyA sequence region, and a 3′ITR sequence region. As a non-limiting example, the viral genome comprises a 5′ITR sequence region, at least one promoter sequence region, a first signal sequence region, a first payload region comprising a variable heavy or light chain sequence, variant or fragment thereof, a first constant region of the first payload region, at least one linker sequence region, a second payload region comprising a variable heavy or light chain sequence, variant or fragment thereof, a PolyA sequence region, a filler sequence region, and a 3′ITR sequence region. As a non-limiting example, the viral genome comprises a 5′ITR sequence region, at least one promoter sequence region, a first signal sequence region, a first payload region comprising a variable heavy or light chain sequence, variant or fragment thereof, a first constant region of the first payload region, at least one linker sequence region, a second payload region comprising a variable heavy or light chain sequence, variant or fragment thereof, a PolyA sequence region, and a 3′ITR sequence region. As a non-limiting example, the viral genome comprises a 5′ITR sequence region, at least one promoter sequence region, a first signal sequence region, a first payload region comprising a variable heavy or light chain sequence, variant or fragment thereof, a first constant region of the first payload region, at least one linker sequence region, a second constant region of the first payload region, a tag sequence region, a PolyA sequence region, a filler sequence region, and a 3′ITR sequence region. As a non-limiting example, the viral genome comprises a 5′ITR sequence region, at least one promoter sequence region, a first signal sequence region, a first payload region comprising a variable heavy or light chain sequence, variant or fragment thereof, a first constant region of the first payload region, at least one linker sequence region, a second constant region of the first payload region, a tag sequence region, a PolyA sequence region, and a 3′ITR sequence region. As a non-limiting example, the viral genome comprises a 5′ITR sequence region, at least one promoter sequence region, a first signal sequence region, a first payload region comprising a variable heavy or light chain sequence, variant or fragment thereof, a first constant region of the first payload region, at least one linker sequence region, a second constant region of the first payload region, a PolyA sequence region, a filler sequence region, and a 3′ITR sequence region. As a non-limiting example, the viral genome comprises a 5′ITR sequence region, at least one promoter sequence region, a first signal sequence region, a first payload region comprising a variable heavy or light chain sequence, variant or fragment thereof, a first constant region of the first payload region, at least one linker sequence region, a second constant region of the first payload region, a PolyA sequence region, and a 3′ITR sequence region. As a non-limiting example, the viral genome comprises a 5′ITR sequence region, at least one promoter sequence region, a first signal sequence region, a first payload region comprising a variable heavy or light chain sequence, variant or fragment thereof, a first constant region of the first payload region, at least one linker sequence region, a tag sequence region, a PolyA sequence region, a filler sequence region, and a 3′ITR sequence region. As a non-limiting example, the viral genome comprises a 5′ITR sequence region, at least one promoter sequence region, a first signal sequence region, a first payload region comprising a variable heavy or light chain sequence, variant or fragment thereof, a first constant region of the first payload region, at least one linker sequence region, a tag sequence region, a PolyA sequence region, and a 3′ITR sequence region. As a non-limiting example, the viral genome comprises a 5′ITR sequence region, at least one promoter sequence region, a first signal sequence region, a first payload region comprising a variable heavy or light chain sequence, variant or fragment thereof, a first constant region of the first payload region, at least one linker sequence region, a PolyA sequence region, a filler sequence region, and a 3′ITR sequence region. As a non-limiting example, the viral genome comprises a 5′ITR sequence region, at least one promoter sequence region, a first signal sequence region, a first payload region comprising a variable heavy or light chain sequence, variant or fragment thereof, a first constant region of the first payload region, at least one linker sequence region, a PolyA sequence region, and a 3′ITR sequence region. As a non-limiting example, the viral genome comprises a 5′ITR sequence region, at least one promoter sequence region, a first signal sequence region, a first payload region comprising a variable heavy or light chain sequence, variant or fragment thereof, a first constant region of the first payload region, a second signal sequence region, a second payload region comprising a variable heavy or light chain sequence, variant or fragment thereof, a second constant region of the first payload region, a tag sequence region, a PolyA sequence region, a filler sequence region, and a 3′ITR sequence region. As a non-limiting example, the viral genome comprises a 5′ITR sequence region, at least one promoter sequence region, a first signal sequence region, a first payload region comprising a variable heavy or light chain sequence, variant or fragment thereof, a first constant region of the first payload region, a second signal sequence region, a second payload region comprising a variable heavy or light chain sequence, variant or fragment thereof, a second constant region of the first payload region, a tag sequence region, a PolyA sequence region, and a 3′ITR sequence region. As a non-limiting example, the viral genome comprises a 5′ITR sequence region, at least one promoter sequence region, a first signal sequence region, a first payload region comprising a variable heavy or light chain sequence, variant or fragment thereof, a first constant region of the first payload region, a second signal sequence region, a second payload region comprising a variable heavy or light chain sequence, variant or fragment thereof, a second constant region of the first payload region, a PolyA sequence region, a filler sequence region, and a 3′ITR sequence region. As a non-limiting example, the viral genome comprises a 5′ITR sequence region, at least one promoter sequence region, a first signal sequence region, a first payload region comprising a variable heavy or light chain sequence, variant or fragment thereof, a first constant region of the first payload region, a second signal sequence region, a second payload region comprising a variable heavy or light chain sequence, variant or fragment thereof, a second constant region of the first payload region, a PolyA sequence region, and a 3′ITR sequence region. As a non-limiting example, the viral genome comprises a 5′ITR sequence region, at least one promoter sequence region, a first signal sequence region, a first payload region comprising a variable heavy or light chain sequence, variant or fragment thereof, a first constant region of the first payload region, a second signal sequence region, a second payload region comprising a variable heavy or light chain sequence, variant or fragment thereof, a tag sequence region, a PolyA sequence region, a filler sequence region, and a 3′ITR sequence region. As a non-limiting example, the viral genome comprises a 5′ITR sequence region, at least one promoter sequence region, a first signal sequence region, a first payload region comprising a variable heavy or light chain sequence, variant or fragment thereof, a first constant region of the first payload region, a second signal sequence region, a second payload region comprising a variable heavy or light chain sequence, variant or fragment thereof, a tag sequence region, a PolyA sequence region, and a 3′ITR sequence region. As a non-limiting example, the viral genome comprises a 5′ITR sequence region, at least one promoter sequence region, a first signal sequence region, a first payload region comprising a variable heavy or light chain sequence, variant or fragment thereof, a first constant region of the first payload region, a second signal sequence region, a second payload region comprising a variable heavy or light chain sequence, variant or fragment thereof, a PolyA sequence region, a filler sequence region, and a 3′ITR sequence region. As a non-limiting example, the viral genome comprises a 5′ITR sequence region, at least one promoter sequence region, a first signal sequence region, a first payload region comprising a variable heavy or light chain sequence, variant or fragment thereof, a first constant region of the first payload region, a second signal sequence region, a second payload region comprising a variable heavy or light chain sequence, variant or fragment thereof, a PolyA sequence region, and a 3′ITR sequence region. As a non-limiting example, the viral genome comprises a 5′ITR sequence region, at least one promoter sequence region, a first signal sequence region, a first payload region comprising a variable heavy or light chain sequence, variant or fragment thereof, a first constant region of the first payload region, a second signal sequence region, a second constant region of the first payload region, a tag sequence region, a PolyA sequence region, a filler sequence region, and a 3′ITR sequence region. As a non-limiting example, the viral genome comprises a 5′ITR sequence region, at least one promoter sequence region, a first signal sequence region, a first payload region comprising a variable heavy or light chain sequence, variant or fragment thereof, a first constant region of the first payload region, a second signal sequence region, a second constant region of the first payload region, a tag sequence region, a PolyA sequence region, and a 3′ITR sequence region. As a non-limiting example, the viral genome comprises a 5′ITR sequence region, at least one promoter sequence region, a first signal sequence region, a first payload region comprising a variable heavy or light chain sequence, variant or fragment thereof, a first constant region of the first payload region, a second signal sequence region, a second constant region of the first payload region, a PolyA sequence region, a filler sequence region, and a 3′ITR sequence region. As a non-limiting example, the viral genome comprises a 5′ITR sequence region, at least one promoter sequence region, a first signal sequence region, a first payload region comprising a variable heavy or light chain sequence, variant or fragment thereof, a first constant region of the first payload region, a second signal sequence region, a second constant region of the first payload region, a PolyA sequence region, and a 3′ITR sequence region. As a non-limiting example, the viral genome comprises a 5′ITR sequence region, at least one promoter sequence region, a first signal sequence region, a first payload region comprising a variable heavy or light chain sequence, variant or fragment thereof, a first constant region of the first payload region, a second signal sequence region, a tag sequence region, a PolyA sequence region, a filler sequence region, and a 3′ITR sequence region. As a non-limiting example, the viral genome comprises a 5′ITR sequence region, at least one promoter sequence region, a first signal sequence region, a first payload region comprising a variable heavy or light chain sequence, variant or fragment thereof, a first constant region of the first payload region, a second signal sequence region, a tag sequence region, a PolyA sequence region, and a 3′ITR sequence region. As a non-limiting example, the viral genome comprises a 5′ITR sequence region, at least one promoter sequence region, a first signal sequence region, a first payload region comprising a variable heavy or light chain sequence, variant or fragment thereof, a first constant region of the first payload region, a second signal sequence region, a PolyA sequence region, a filler sequence region, and a 3′ITR sequence region. As a non-limiting example, the viral genome comprises a 5′ITR sequence region, at least one promoter sequence region, a first signal sequence region, a first payload region comprising a variable heavy or light chain sequence, variant or fragment thereof, a first constant region of the first payload region, a second signal sequence region, a PolyA sequence region, and a 3′ITR sequence region. As a non-limiting example, the viral genome comprises a 5′ITR sequence region, at least one promoter sequence region, a first signal sequence region, a first payload region comprising a variable heavy or light chain sequence, variant or fragment thereof, a first constant region of the first payload region, a second payload region comprising a variable heavy or light chain sequence, variant or fragment thereof, a second constant region of the first payload region, a tag sequence region, a PolyA sequence region, a filler sequence region, and a 3′ITR sequence region. As a non-limiting example, the viral genome comprises a 5′ITR sequence region, at least one promoter sequence region, a first signal sequence region, a first payload region comprising a variable heavy or light chain sequence, variant or fragment thereof, a first constant region of the first payload region, a second payload region comprising a variable heavy or light chain sequence, variant or fragment thereof, a second constant region of the first payload region, a tag sequence region, a PolyA sequence region, and a 3′ITR sequence region. As a non-limiting example, the viral genome comprises a 5′ITR sequence region, at least one promoter sequence region, a first signal sequence region, a first payload region comprising a variable heavy or light chain sequence, variant or fragment thereof, a first constant region of the first payload region, a second payload region comprising a variable heavy or light chain sequence, variant or fragment thereof, a second constant region of the first payload region, a PolyA sequence region, a filler sequence region, and a 3′ITR sequence region. As a non-limiting example, the viral genome comprises a 5′ITR sequence region, at least one promoter sequence region, a first signal sequence region, a first payload region comprising a variable heavy or light chain sequence, variant or fragment thereof, a first constant region of the first payload region, a second payload region comprising a variable heavy or light chain sequence, variant or fragment thereof, a second constant region of the first payload region, a PolyA sequence region, and a 3′ITR sequence region. As a non-limiting example, the viral genome comprises a 5′ITR sequence region, at least one promoter sequence region, a first signal sequence region, a first payload region comprising a variable heavy or light chain sequence, variant or fragment thereof, a first constant region of the first payload region, a second payload region comprising a variable heavy or light chain sequence, variant or fragment thereof, a tag sequence region, a PolyA sequence region, a filler sequence region, and a 3′ITR sequence region. As a non-limiting example, the viral genome comprises a 5′ITR sequence region, at least one promoter sequence region, a first signal sequence region, a first payload region comprising a variable heavy or light chain sequence, variant or fragment thereof, a first constant region of the first payload region, a second payload region comprising a variable heavy or light chain sequence, variant or fragment thereof, a tag sequence region, a PolyA sequence region, and a 3′ITR sequence region. As a non-limiting example, the viral genome comprises a 5′ITR sequence region, at least one promoter sequence region, a first signal sequence region, a first payload region comprising a variable heavy or light chain sequence, variant or fragment thereof, a first constant region of the first payload region, a second payload region comprising a variable heavy or light chain sequence, variant or fragment thereof, a PolyA sequence region, a filler sequence region, and a 3′ITR sequence region. As a non-limiting example, the viral genome comprises a 5′ITR sequence region, at least one promoter sequence region, a first signal sequence region, a first payload region comprising a variable heavy or light chain sequence, variant or fragment thereof, a first constant region of the first payload region, a second payload region comprising a variable heavy or light chain sequence, variant or fragment thereof, a PolyA sequence region, and a 3′ITR sequence region. As a non-limiting example, the viral genome comprises a 5′ITR sequence region, at least one promoter sequence region, a first signal sequence region, a first payload region comprising a variable heavy or light chain sequence, variant or fragment thereof, a first constant region of the first payload region, a second constant region of the first payload region, a tag sequence region, a PolyA sequence region, a filler sequence region, and a 3′ITR sequence region. As a non-limiting example, the viral genome comprises a 5′ITR sequence region, at least one promoter sequence region, a first signal sequence region, a first payload region comprising a variable heavy or light chain sequence, variant or fragment thereof, a first constant region of the first payload region, a second constant region of the first payload region, a tag sequence region, a PolyA sequence region, and a 3′ITR sequence region. As a non-limiting example, the viral genome comprises a 5′ITR sequence region, at least one promoter sequence region, a first signal sequence region, a first payload region comprising a variable heavy or light chain sequence, variant or fragment thereof, a first constant region of the first payload region, a second constant region of the first payload region, a PolyA sequence region, a filler sequence region, and a 3′ITR sequence region. As a non-limiting example, the viral genome comprises a 5′ITR sequence region, at least one promoter sequence region, a first signal sequence region, a first payload region comprising a variable heavy or light chain sequence, variant or fragment thereof, a first constant region of the first payload region, a second constant region of the first payload region, a PolyA sequence region, and a 3′ITR sequence region. As a non-limiting example, the viral genome comprises a 5′ITR sequence region, at least one promoter sequence region, a first signal sequence region, a first payload region comprising a variable heavy or light chain sequence, variant or fragment thereof, a first constant region of the first payload region, a tag sequence region, a PolyA sequence region, a filler sequence region, and a 3′ITR sequence region. As a non-limiting example, the viral genome comprises a 5′ITR sequence region, at least one promoter sequence region, a first signal sequence region, a first payload region comprising a variable heavy or light chain sequence, variant or fragment thereof, a first constant region of the first payload region, a tag sequence region, a PolyA sequence region, and a 3′ITR sequence region. As a non-limiting example, the viral genome comprises a 5′ITR sequence region, at least one promoter sequence region, a first signal sequence region, a first payload region comprising a variable heavy or light chain sequence, variant or fragment thereof, a first constant region of the first payload region, a PolyA sequence region, a filler sequence region, and a 3′ITR sequence region. As a non-limiting example, the viral genome comprises a 5′ITR sequence region, at least one promoter sequence region, a first signal sequence region, a first payload region comprising a variable heavy or light chain sequence, variant or fragment thereof, a first constant region of the first payload region, a PolyA sequence region, and a 3′ITR sequence region. As a non-limiting example, the viral genome comprises a 5′ITR sequence region, at least one promoter sequence region, a first signal sequence region, a first payload region comprising a variable heavy or light chain sequence, variant or fragment thereof, at least one linker sequence region, a second signal sequence region, a second payload region comprising a variable heavy or light chain sequence, variant or fragment thereof, a first constant region of the first payload region, a tag sequence region, a PolyA sequence region, a filler sequence region, and a 3′ITR sequence region. As a non-limiting example, the viral genome comprises a 5′ITR sequence region, at least one promoter sequence region, a first signal sequence region, a first payload region comprising a variable heavy or light chain sequence, variant or fragment thereof, at least one linker sequence region, a second signal sequence region, a second payload region comprising a variable heavy or light chain sequence, variant or fragment thereof, a first constant region of the first payload region, a tag sequence region, a PolyA sequence region, and a 3′ITR sequence region. As a non-limiting example, the viral genome comprises a 5′ITR sequence region, at least one promoter sequence region, a first signal sequence region, a first payload region comprising a variable heavy or light chain sequence, variant or fragment thereof, at least one linker sequence region, a second signal sequence region, a second payload region comprising a variable heavy or light chain sequence, variant or fragment thereof, a first constant region of the first payload region, a PolyA sequence region, a filler sequence region, and a 3′ITR sequence region. As a non-limiting example, the viral genome comprises a 5′ITR sequence region, at least one promoter sequence region, a first signal sequence region, a first payload region comprising a variable heavy or light chain sequence, variant or fragment thereof, at least one linker sequence region, a second signal sequence region, a second payload region comprising a variable heavy or light chain sequence, variant or fragment thereof, a first constant region of the first payload region, a PolyA sequence region, and a 3′ITR sequence region. As a non-limiting example, the viral genome comprises a 5′ITR sequence region, at least one promoter sequence region, a first signal sequence region, a first payload region comprising a variable heavy or light chain sequence, variant or fragment thereof, at least one linker sequence region, a second signal sequence region, a second payload region comprising a variable heavy or light chain sequence, variant or fragment thereof, a tag sequence region, a PolyA sequence region, a filler sequence region, and a 3′ITR sequence region. As a non-limiting example, the viral genome comprises a 5′ITR sequence region, at least one promoter sequence region, a first signal sequence region, a first payload region comprising a variable heavy or light chain sequence, variant or fragment thereof, at least one linker sequence region, a second signal sequence region, a second payload region comprising a variable heavy or light chain sequence, variant or fragment thereof, a tag sequence region, a PolyA sequence region, and a 3′ITR sequence region. As a non-limiting example, the viral genome comprises a 5′ITR sequence region, at least one promoter sequence region, a first signal sequence region, a first payload region comprising a variable heavy or light chain sequence, variant or fragment thereof, at least one linker sequence region, a second signal sequence region, a second payload region comprising a variable heavy or light chain sequence, variant or fragment thereof, a PolyA sequence region, a filler sequence region, and a 3′ITR sequence region. As a non-limiting example, the viral genome comprises a 5′ITR sequence region, at least one promoter sequence region, a first signal sequence region, a first payload region comprising a variable heavy or light chain sequence, variant or fragment thereof, at least one linker sequence region, a second signal sequence region, a second payload region comprising a variable heavy or light chain sequence, variant or fragment thereof, a PolyA sequence region, and a 3′ITR sequence region. As a non-limiting example, the viral genome comprises a 5′ITR sequence region, at least one promoter sequence region, a first signal sequence region, a first payload region comprising a variable heavy or light chain sequence, variant or fragment thereof, at least one linker sequence region, a second signal sequence region, a first constant region of the first payload region, a tag sequence region, a PolyA sequence region, a filler sequence region, and a 3′ITR sequence region. As a non-limiting example, the viral genome comprises a 5′ITR sequence region, at least one promoter sequence region, a first signal sequence region, a first payload region comprising a variable heavy or light chain sequence, variant or fragment thereof, at least one linker sequence region, a second signal sequence region, a first constant region of the first payload region, a tag sequence region, a PolyA sequence region, and a 3′ITR sequence region. As a non-limiting example, the viral genome comprises a 5′ITR sequence region, at least one promoter sequence region, a first signal sequence region, a first payload region comprising a variable heavy or light chain sequence, variant or fragment thereof, at least one linker sequence region, a second signal sequence region, a first constant region of the first payload region, a PolyA sequence region, a filler sequence region, and a 3′ITR sequence region. As a non-limiting example, the viral genome comprises a 5′ITR sequence region, at least one promoter sequence region, a first signal sequence region, a first payload region comprising a variable heavy or light chain sequence, variant or fragment thereof, at least one linker sequence region, a second signal sequence region, a first constant region of the first payload region, a PolyA sequence region, and a 3′ITR sequence region. As a non-limiting example, the viral genome comprises a 5′ITR sequence region, at least one promoter sequence region, a first signal sequence region, a first payload region comprising a variable heavy or light chain sequence, variant or fragment thereof, at least one linker sequence region, a second signal sequence region, a tag sequence region, a PolyA sequence region, a filler sequence region, and a 3′ITR sequence region. As a non-limiting example, the viral genome comprises a 5′ITR sequence region, at least one promoter sequence region, a first signal sequence region, a first payload region comprising a variable heavy or light chain sequence, variant or fragment thereof, at least one linker sequence region, a second signal sequence region, a tag sequence region, a PolyA sequence region, and a 3′ITR sequence region. As a non-limiting example, the viral genome comprises a 5′ITR sequence region, at least one promoter sequence region, a first signal sequence region, a first payload region comprising a variable heavy or light chain sequence, variant or fragment thereof, at least one linker sequence region, a second signal sequence region, a PolyA sequence region, a filler sequence region, and a 3′ITR sequence region. As a non-limiting example, the viral genome comprises a 5′ITR sequence region, at least one promoter sequence region, a first signal sequence region, a first payload region comprising a variable heavy or light chain sequence, variant or fragment thereof, at least one linker sequence region, a second signal sequence region, a PolyA sequence region, and a 3′ITR sequence region. As a non-limiting example, the viral genome comprises a 5′ITR sequence region, at least one promoter sequence region, a first signal sequence region, a first payload region comprising a variable heavy or light chain sequence, variant or fragment thereof, at least one linker sequence region, a second payload region comprising a variable heavy or light chain sequence, variant or fragment thereof, a first constant region of the first payload region, a tag sequence region, a PolyA sequence region, a filler sequence region, and a 3′ITR sequence region. As a non-limiting example, the viral genome comprises a 5′ITR sequence region, at least one promoter sequence region, a first signal sequence region, a first payload region comprising a variable heavy or light chain sequence, variant or fragment thereof, at least one linker sequence region, a second payload region comprising a variable heavy or light chain sequence, variant or fragment thereof, a first constant region of the first payload region, a tag sequence region, a PolyA sequence region, and a 3′ITR sequence region. As a non-limiting example, the viral genome comprises a 5′ITR sequence region, at least one promoter sequence region, a first signal sequence region, a first payload region comprising a variable heavy or light chain sequence, variant or fragment thereof, at least one linker sequence region, a second payload region comprising a variable heavy or light chain sequence, variant or fragment thereof, a first constant region of the first payload region, a PolyA sequence region, a filler sequence region, and a 3′ITR sequence region. As a non-limiting example, the viral genome comprises a 5′ITR sequence region, at least one promoter sequence region, a first signal sequence region, a first payload region comprising a variable heavy or light chain sequence, variant or fragment thereof, at least one linker sequence region, a second payload region comprising a variable heavy or light chain sequence, variant or fragment thereof, a first constant region of the first payload region, a PolyA sequence region, and a 3′ITR sequence region. As a non-limiting example, the viral genome comprises a 5′ITR sequence region, at least one promoter sequence region, a first signal sequence region, a first payload region comprising a variable heavy or light chain sequence, variant or fragment thereof, at least one linker sequence region, a second payload region comprising a variable heavy or light chain sequence, variant or fragment thereof, a tag sequence region, a PolyA sequence region, a filler sequence region, and a 3′ITR sequence region. As a non-limiting example, the viral genome comprises a 5′ITR sequence region, at least one promoter sequence region, a first signal sequence region, a first payload region comprising a variable heavy or light chain sequence, variant or fragment thereof, at least one linker sequence region, a second payload region comprising a variable heavy or light chain sequence, variant or fragment thereof, a tag sequence region, a PolyA sequence region, and a 3′ITR sequence region. As a non-limiting example, the viral genome comprises a 5′ITR sequence region, at least one promoter sequence region, a first signal sequence region, a first payload region comprising a variable heavy or light chain sequence, variant or fragment thereof, at least one linker sequence region, a second payload region comprising a variable heavy or light chain sequence, variant or fragment thereof, a PolyA sequence region, a filler sequence region, and a 3′ITR sequence region. As a non-limiting example, the viral genome comprises a 5′ITR sequence region, at least one promoter sequence region, a first signal sequence region, a first payload region comprising a variable heavy or light chain sequence, variant or fragment thereof, at least one linker sequence region, a second payload region comprising a variable heavy or light chain sequence, variant or fragment thereof, a PolyA sequence region, and a 3′ITR sequence region. As a non-limiting example, the viral genome comprises a 5′ITR sequence region, at least one promoter sequence region, a first signal sequence region, a first payload region comprising a variable heavy or light chain sequence, variant or fragment thereof, at least one linker sequence region, a first constant region of the first payload region, a tag sequence region, a PolyA sequence region, a filler sequence region, and a 3′ITR sequence region. As a non-limiting example, the viral genome comprises a 5′ITR sequence region, at least one promoter sequence region, a first signal sequence region, a first payload region comprising a variable heavy or light chain sequence, variant or fragment thereof, at least one linker sequence region, a first constant region of the first payload region, a tag sequence region, a PolyA sequence region, and a 3′ITR sequence region. As a non-limiting example, the viral genome comprises a 5′ITR sequence region, at least one promoter sequence region, a first signal sequence region, a first payload region comprising a variable heavy or light chain sequence, variant or fragment thereof, at least one linker sequence region, a first constant region of the first payload region, a PolyA sequence region, a filler sequence region, and a 3′ITR sequence region. As a non-limiting example, the viral genome comprises a 5′ITR sequence region, at least one promoter sequence region, a first signal sequence region, a first payload region comprising a variable heavy or light chain sequence, variant or fragment thereof, at least one linker sequence region, a first constant region of the first payload region, a PolyA sequence region, and a 3′ITR sequence region. As a non-limiting example, the viral genome comprises a 5′ITR sequence region, at least one promoter sequence region, a first signal sequence region, a first payload region comprising a variable heavy or light chain sequence, variant or fragment thereof, at least one linker sequence region, a tag sequence region, a PolyA sequence region, a filler sequence region, and a 3′ITR sequence region. As a non-limiting example, the viral genome comprises a 5′ITR sequence region, at least one promoter sequence region, a first signal sequence region, a first payload region comprising a variable heavy or light chain sequence, variant or fragment thereof, at least one linker sequence region, a tag sequence region, a PolyA sequence region, and a 3′ITR sequence region. As a non-limiting example, the viral genome comprises a 5′ITR sequence region, at least one promoter sequence region, a first signal sequence region, a first payload region comprising a variable heavy or light chain sequence, variant or fragment thereof, at least one linker sequence region, a PolyA sequence region, a filler sequence region, and a 3′ITR sequence region. As a non-limiting example, the viral genome comprises a 5′ITR sequence region, at least one promoter sequence region, a first signal sequence region, a first payload region comprising a variable heavy or light chain sequence, variant or fragment thereof, at least one linker sequence region, a PolyA sequence region, and a 3′ITR sequence region. As a non-limiting example, the viral genome comprises a 5′ITR sequence region, at least one promoter sequence region, a first signal sequence region, a first payload region comprising a variable heavy or light chain sequence, variant or fragment thereof, a second signal sequence region, a second payload region comprising a variable heavy or light chain sequence, variant or fragment thereof, a first constant region of the first payload region, a tag sequence region, a PolyA sequence region, a filler sequence region, and a 3′ITR sequence region. As a non-limiting example, the viral genome comprises a 5′ITR sequence region, at least one promoter sequence region, a first signal sequence region, a first payload region comprising a variable heavy or light chain sequence, variant or fragment thereof, a second signal sequence region, a second payload region comprising a variable heavy or light chain sequence, variant or fragment thereof, a first constant region of the first payload region, a tag sequence region, a PolyA sequence region, and a 3′ITR sequence region. As a non-limiting example, the viral genome comprises a 5′ITR sequence region, at least one promoter sequence region, a first signal sequence region, a first payload region comprising a variable heavy or light chain sequence, variant or fragment thereof, a second signal sequence region, a second payload region comprising a variable heavy or light chain sequence, variant or fragment thereof, a first constant region of the first payload region, a PolyA sequence region, a filler sequence region, and a 3′ITR sequence region. As a non-limiting example, the viral genome comprises a 5′ITR sequence region, at least one promoter sequence region, a first signal sequence region, a first payload region comprising a variable heavy or light chain sequence, variant or fragment thereof, a second signal sequence region, a second payload region comprising a variable heavy or light chain sequence, variant or fragment thereof, a first constant region of the first payload region, a PolyA sequence region, and a 3′ITR sequence region. As a non-limiting example, the viral genome comprises a 5′ITR sequence region, at least one promoter sequence region, a first signal sequence region, a first payload region comprising a variable heavy or light chain sequence, variant or fragment thereof, a second signal sequence region, a second payload region comprising a variable heavy or light chain sequence, variant or fragment thereof, a tag sequence region, a PolyA sequence region, a filler sequence region, and a 3′ITR sequence region. As a non-limiting example, the viral genome comprises a 5′ITR sequence region, at least one promoter sequence region, a first signal sequence region, a first payload region comprising a variable heavy or light chain sequence, variant or fragment thereof, a second signal sequence region, a second payload region comprising a variable heavy or light chain sequence, variant or fragment thereof, a tag sequence region, a PolyA sequence region, and a 3′ITR sequence region. As a non-limiting example, the viral genome comprises a 5′ITR sequence region, at least one promoter sequence region, a first signal sequence region, a first payload region comprising a variable heavy or light chain sequence, variant or fragment thereof, a second signal sequence region, a second payload region comprising a variable heavy or light chain sequence, variant or fragment thereof, a PolyA sequence region, a filler sequence region, and a 3′ITR sequence region. As a non-limiting example, the viral genome comprises a 5′ITR sequence region, at least one promoter sequence region, a first signal sequence region, a first payload region comprising a variable heavy or light chain sequence, variant or fragment thereof, a second signal sequence region, a second payload region comprising a variable heavy or light chain sequence, variant or fragment thereof, a PolyA sequence region, and a 3′ITR sequence region. As a non-limiting example, the viral genome comprises a 5′ITR sequence region, at least one promoter sequence region, a first signal sequence region, a first payload region comprising a variable heavy or light chain sequence, variant or fragment thereof, a second signal sequence region, a first constant region of the first payload region, a tag sequence region, a PolyA sequence region, a filler sequence region, and a 3′ITR sequence region. As a non-limiting example, the viral genome comprises a 5′ITR sequence region, at least one promoter sequence region, a first signal sequence region, a first payload region comprising a variable heavy or light chain sequence, variant or fragment thereof, a second signal sequence region, a first constant region of the first payload region, a tag sequence region, a PolyA sequence region, and a 3′ITR sequence region. As a non-limiting example, the viral genome comprises a 5′ITR sequence region, at least one promoter sequence region, a first signal sequence region, a first payload region comprising a variable heavy or light chain sequence, variant or fragment thereof, a second signal sequence region, a first constant region of the first payload region, a PolyA sequence region, a filler sequence region, and a 3′ITR sequence region. As a non-limiting example, the viral genome comprises a 5′ITR sequence region, at least one promoter sequence region, a first signal sequence region, a first payload region comprising a variable heavy or light chain sequence, variant or fragment thereof, a second signal sequence region, a first constant region of the first payload region, a PolyA sequence region, and a 3′ITR sequence region. As a non-limiting example, the viral genome comprises a 5′ITR sequence region, at least one promoter sequence region, a first signal sequence region, a first payload region comprising a variable heavy or light chain sequence, variant or fragment thereof, a second signal sequence region, a tag sequence region, a PolyA sequence region, a filler sequence region, and a 3′ITR sequence region. As a non-limiting example, the viral genome comprises a 5′ITR sequence region, at least one promoter sequence region, a first signal sequence region, a first payload region comprising a variable heavy or light chain sequence, variant or fragment thereof, a second signal sequence region, a tag sequence region, a PolyA sequence region, and a 3′ITR sequence region. As a non-limiting example, the viral genome comprises a 5′ITR sequence region, at least one promoter sequence region, a first signal sequence region, a first payload region comprising a variable heavy or light chain sequence, variant or fragment thereof, a second signal sequence region, a PolyA sequence region, a filler sequence region, and a 3′ITR sequence region. As a non-limiting example, the viral genome comprises a 5′ITR sequence region, at least one promoter sequence region, a first signal sequence region, a first payload region comprising a variable heavy or light chain sequence, variant or fragment thereof, a second signal sequence region, a PolyA sequence region, and a 3′ITR sequence region. As a non-limiting example, the viral genome comprises a 5′ITR sequence region, at least one promoter sequence region, a first signal sequence region, a first payload region comprising a variable heavy or light chain sequence, variant or fragment thereof, a second payload region comprising a variable heavy or light chain sequence, variant or fragment thereof, a first constant region of the first payload region, a tag sequence region, a PolyA sequence region, a filler sequence region, and a 3′ITR sequence region. As a non-limiting example, the viral genome comprises a 5′ITR sequence region, at least one promoter sequence region, a first signal sequence region, a first payload region comprising a variable heavy or light chain sequence, variant or fragment thereof, a second payload region comprising a variable heavy or light chain sequence, variant or fragment thereof, a first constant region of the first payload region, a tag sequence region, a PolyA sequence region, and a 3′ITR sequence region. As a non-limiting example, the viral genome comprises a 5′ITR sequence region, at least one promoter sequence region, a first signal sequence region, a first payload region comprising a variable heavy or light chain sequence, variant or fragment thereof, a second payload region comprising a variable heavy or light chain sequence, variant or fragment thereof, a first constant region of the first payload region, a PolyA sequence region, a filler sequence region, and a 3′ITR sequence region. As a non-limiting example, the viral genome comprises a 5′ITR sequence region, at least one promoter sequence region, a first signal sequence region, a first payload region comprising a variable heavy or light chain sequence, variant or fragment thereof, a second payload region comprising a variable heavy or light chain sequence, variant or fragment thereof, a first constant region of the first payload region, a PolyA sequence region, and a 3′ITR sequence region. As a non-limiting example, the viral genome comprises a 5′ITR sequence region, at least one promoter sequence region, a first signal sequence region, a first payload region comprising a variable heavy or light chain sequence, variant or fragment thereof, a second payload region comprising a variable heavy or light chain sequence, variant or fragment thereof, a tag sequence region, a PolyA sequence region, a filler sequence region, and a 3′ITR sequence region. As a non-limiting example, the viral genome comprises a 5′ITR sequence region, at least one promoter sequence region, a first signal sequence region, a first payload region comprising a variable heavy or light chain sequence, variant or fragment thereof, a second payload region comprising a variable heavy or light chain sequence, variant or fragment thereof, a tag sequence region, a PolyA sequence region, and a 3′ITR sequence region. As a non-limiting example, the viral genome comprises a 5′ITR sequence region, at least one promoter sequence region, a first signal sequence region, a first payload region comprising a variable heavy or light chain sequence, variant or fragment thereof, a second payload region comprising a variable heavy or light chain sequence, variant or fragment thereof, a PolyA sequence region, a filler sequence region, and a 3′ITR sequence region. As a non-limiting example, the viral genome comprises a 5′ITR sequence region, at least one promoter sequence region, a first signal sequence region, a first payload region comprising a variable heavy or light chain sequence, variant or fragment thereof, a second payload region comprising a variable heavy or light chain sequence, variant or fragment thereof, a PolyA sequence region, and a 3′ITR sequence region. As a non-limiting example, the viral genome comprises a 5′ITR sequence region, at least one promoter sequence region, a first signal sequence region, a first payload region comprising a variable heavy or light chain sequence, variant or fragment thereof, a first constant region of the first payload region, a tag sequence region, a PolyA sequence region, a filler sequence region, and a 3′ITR sequence region. As a non-limiting example, the viral genome comprises a 5′ITR sequence region, at least one promoter sequence region, a first signal sequence region, a first payload region comprising a variable heavy or light chain sequence, variant or fragment thereof, a first constant region of the first payload region, a tag sequence region, a PolyA sequence region, and a 3′ITR sequence region. As a non-limiting example, the viral genome comprises a 5′ITR sequence region, at least one promoter sequence region, a first signal sequence region, a first payload region comprising a variable heavy or light chain sequence, variant or fragment thereof, a first constant region of the first payload region, a PolyA sequence region, a filler sequence region, and a 3′ITR sequence region. As a non-limiting example, the viral genome comprises a 5′ITR sequence region, at least one promoter sequence region, a first signal sequence region, a first payload region comprising a variable heavy or light chain sequence, variant or fragment thereof, a first constant region of the first payload region, a PolyA sequence region, and a 3′ITR sequence region. As a non-limiting example, the viral genome comprises a 5′ITR sequence region, at least one promoter sequence region, a first signal sequence region, a first payload region comprising a variable heavy or light chain sequence, variant or fragment thereof, a tag sequence region, a PolyA sequence region, a filler sequence region, and a 3′ITR sequence region. As a non-limiting example, the viral genome comprises a 5′ITR sequence region, at least one promoter sequence region, a first signal sequence region, a first payload region comprising a variable heavy or light chain sequence, variant or fragment thereof, a tag sequence region, a PolyA sequence region, and a 3′ITR sequence region. As a non-limiting example, the viral genome comprises a 5′ITR sequence region, at least one promoter sequence region, a first signal sequence region, a first payload region comprising a variable heavy or light chain sequence, variant or fragment thereof, a PolyA sequence region, a filler sequence region, and a 3′ITR sequence region. As a non-limiting example, the viral genome comprises a 5′ITR sequence region, at least one promoter sequence region, a first signal sequence region, a first payload region comprising a variable heavy or light chain sequence, variant or fragment thereof, a PolyA sequence region, and a 3′ITR sequence region. As a non-limiting example, the viral genome comprises a 5′ITR sequence region, at least one promoter sequence region, a first payload region comprising a variable heavy or light chain sequence, variant or fragment thereof, a first constant region of the first payload region, at least one linker sequence region, a first signal sequence region, a second payload region comprising a variable heavy or light chain sequence, variant or fragment thereof, a second constant region of the first payload region, a tag sequence region, a PolyA sequence region, a filler sequence region, and a 3′ITR sequence region. As a non-limiting example, the viral genome comprises a 5′ITR sequence region, at least one promoter sequence region, a first payload region comprising a variable heavy or light chain sequence, variant or fragment thereof, a first constant region of the first payload region, at least one linker sequence region, a first signal sequence region, a second payload region comprising a variable heavy or light chain sequence, variant or fragment thereof, a second constant region of the first payload region, a tag sequence region, a PolyA sequence region, and a 3′ITR sequence region. As a non-limiting example, the viral genome comprises a 5′ITR sequence region, at least one promoter sequence region, a first payload region comprising a variable heavy or light chain sequence, variant or fragment thereof, a first constant region of the first payload region, at least one linker sequence region, a first signal sequence region, a second payload region comprising a variable heavy or light chain sequence, variant or fragment thereof, a second constant region of the first payload region, a PolyA sequence region, a filler sequence region, and a 3′ITR sequence region. As a non-limiting example, the viral genome comprises a 5′ITR sequence region, at least one promoter sequence region, a first payload region comprising a variable heavy or light chain sequence, variant or fragment thereof, a first constant region of the first payload region, at least one linker sequence region, a first signal sequence region, a second payload region comprising a variable heavy or light chain sequence, variant or fragment thereof, a second constant region of the first payload region, a PolyA sequence region, and a 3′ITR sequence region. As a non-limiting example, the viral genome comprises a 5′ITR sequence region, at least one promoter sequence region, a first payload region comprising a variable heavy or light chain sequence, variant or fragment thereof, a first constant region of the first payload region, at least one linker sequence region, a first signal sequence region, a second payload region comprising a variable heavy or light chain sequence, variant or fragment thereof, a tag sequence region, a PolyA sequence region, a filler sequence region, and a 3′ITR sequence region. As a non-limiting example, the viral genome comprises a 5′ITR sequence region, at least one promoter sequence region, a first payload region comprising a variable heavy or light chain sequence, variant or fragment thereof, a first constant region of the first payload region, at least one linker sequence region, a first signal sequence region, a second payload region comprising a variable heavy or light chain sequence, variant or fragment thereof, a tag sequence region, a PolyA sequence region, and a 3′ITR sequence region. As a non-limiting example, the viral genome comprises a 5′ITR sequence region, at least one promoter sequence region, a first payload region comprising a variable heavy or light chain sequence, variant or fragment thereof, a first constant region of the first payload region, at least one linker sequence region, a first signal sequence region, a second payload region comprising a variable heavy or light chain sequence, variant or fragment thereof, a PolyA sequence region, a filler sequence region, and a 3′ITR sequence region. As a non-limiting example, the viral genome comprises a 5′ITR sequence region, at least one promoter sequence region, a first payload region comprising a variable heavy or light chain sequence, variant or fragment thereof, a first constant region of the first payload region, at least one linker sequence region, a first signal sequence region, a second payload region comprising a variable heavy or light chain sequence, variant or fragment thereof, a PolyA sequence region, and a 3′ITR sequence region. As a non-limiting example, the viral genome comprises a 5′ITR sequence region, at least one promoter sequence region, a first payload region comprising a variable heavy or light chain sequence, variant or fragment thereof, a first constant region of the first payload region, at least one linker sequence region, a first signal sequence region, a second constant region of the first payload region, a tag sequence region, a PolyA sequence region, a filler sequence region, and a 3′ITR sequence region. As a non-limiting example, the viral genome comprises a 5′ITR sequence region, at least one promoter sequence region, a first payload region comprising a variable heavy or light chain sequence, variant or fragment thereof, a first constant region of the first payload region, at least one linker sequence region, a first signal sequence region, a second constant region of the first payload region, a tag sequence region, a PolyA sequence region, and a 3′ITR sequence region. As a non-limiting example, the viral genome comprises a 5′ITR sequence region, at least one promoter sequence region, a first payload region comprising a variable heavy or light chain sequence, variant or fragment thereof, a first constant region of the first payload region, at least one linker sequence region, a first signal sequence region, a second constant region of the first payload region, a PolyA sequence region, a filler sequence region, and a 3′ITR sequence region. As a non-limiting example, the viral genome comprises a 5′ITR sequence region, at least one promoter sequence region, a first payload region comprising a variable heavy or light chain sequence, variant or fragment thereof, a first constant region of the first payload region, at least one linker sequence region, a first signal sequence region, a second constant region of the first payload region, a PolyA sequence region, and a 3′ITR sequence region. As a non-limiting example, the viral genome comprises a 5′ITR sequence region, at least one promoter sequence region, a first payload region comprising a variable heavy or light chain sequence, variant or fragment thereof, a first constant region of the first payload region, at least one linker sequence region, a first signal sequence region, a tag sequence region, a PolyA sequence region, a filler sequence region, and a 3′ITR sequence region. As a non-limiting example, the viral genome comprises a 5′ITR sequence region, at least one promoter sequence region, a first payload region comprising a variable heavy or light chain sequence, variant or fragment thereof, a first constant region of the first payload region, at least one linker sequence region, a first signal sequence region, a tag sequence region, a PolyA sequence region, and a 3′ITR sequence region. As a non-limiting example, the viral genome comprises a 5′ITR sequence region, at least one promoter sequence region, a first payload region comprising a variable heavy or light chain sequence, variant or fragment thereof, a first constant region of the first payload region, at least one linker sequence region, a first signal sequence region, a PolyA sequence region, a filler sequence region, and a 3′ITR sequence region. As a non-limiting example, the viral genome comprises a 5′ITR sequence region, at least one promoter sequence region, a first payload region comprising a variable heavy or light chain sequence, variant or fragment thereof, a first constant region of the first payload region, at least one linker sequence region, a first signal sequence region, a PolyA sequence region, and a 3′ITR sequence region. As a non-limiting example, the viral genome comprises a 5′ITR sequence region, at least one promoter sequence region, a first payload region comprising a variable heavy or light chain sequence, variant or fragment thereof, a first constant region of the first payload region, at least one linker sequence region, a second payload region comprising a variable heavy or light chain sequence, variant or fragment thereof, a second constant region of the first payload region, a tag sequence region, a PolyA sequence region, a filler sequence region, and a 3′ITR sequence region. As a non-limiting example, the viral genome comprises a 5′ITR sequence region, at least one promoter sequence region, a first payload region comprising a variable heavy or light chain sequence, variant or fragment thereof, a first constant region of the first payload region, at least one linker sequence region, a second payload region comprising a variable heavy or light chain sequence, variant or fragment thereof, a second constant region of the first payload region, a tag sequence region, a PolyA sequence region, and a 3′ITR sequence region. As a non-limiting example, the viral genome comprises a 5′ITR sequence region, at least one promoter sequence region, a first payload region comprising a variable heavy or light chain sequence, variant or fragment thereof, a first constant region of the first payload region, at least one linker sequence region, a second payload region comprising a variable heavy or light chain sequence, variant or fragment thereof, a second constant region of the first payload region, a PolyA sequence region, a filler sequence region, and a 3′ITR sequence region. As a non-limiting example, the viral genome comprises a 5′ITR sequence region, at least one promoter sequence region, a first payload region comprising a variable heavy or light chain sequence, variant or fragment thereof, a first constant region of the first payload region, at least one linker sequence region, a second payload region comprising a variable heavy or light chain sequence, variant or fragment thereof, a second constant region of the first payload region, a PolyA sequence region, and a 3′ITR sequence region. As a non-limiting example, the viral genome comprises a 5′ITR sequence region, at least one promoter sequence region, a first payload region comprising a variable heavy or light chain sequence, variant or fragment thereof, a first constant region of the first payload region, at least one linker sequence region, a second payload region comprising a variable heavy or light chain sequence, variant or fragment thereof, a tag sequence region, a PolyA sequence region, a filler sequence region, and a 3′ITR sequence region. As a non-limiting example, the viral genome comprises a 5′ITR sequence region, at least one promoter sequence region, a first payload region comprising a variable heavy or light chain sequence, variant or fragment thereof, a first constant region of the first payload region, at least one linker sequence region, a second payload region comprising a variable heavy or light chain sequence, variant or fragment thereof, a tag sequence region, a PolyA sequence region, and a 3′ITR sequence region. As a non-limiting example, the viral genome comprises a 5′ITR sequence region, at least one promoter sequence region, a first payload region comprising a variable heavy or light chain sequence, variant or fragment thereof, a first constant region of the first payload region, at least one linker sequence region, a second payload region comprising a variable heavy or light chain sequence, variant or fragment thereof, a PolyA sequence region, a filler sequence region, and a 3′ITR sequence region. As a non-limiting example, the viral genome comprises a 5′ITR sequence region, at least one promoter sequence region, a first payload region comprising a variable heavy or light chain sequence, variant or fragment thereof, a first constant region of the first payload region, at least one linker sequence region, a second payload region comprising a variable heavy or light chain sequence, variant or fragment thereof, a PolyA sequence region, and a 3′ITR sequence region. As a non-limiting example, the viral genome comprises a 5′ITR sequence region, at least one promoter sequence region, a first payload region comprising a variable heavy or light chain sequence, variant or fragment thereof, a first constant region of the first payload region, at least one linker sequence region, a second constant region of the first payload region, a tag sequence region, a PolyA sequence region, a filler sequence region, and a 3′ITR sequence region. As a non-limiting example, the viral genome comprises a 5′ITR sequence region, at least one promoter sequence region, a first payload region comprising a variable heavy or light chain sequence, variant or fragment thereof, a first constant region of the first payload region, at least one linker sequence region, a second constant region of the first payload region, a tag sequence region, a PolyA sequence region, and a 3′ITR sequence region. As a non-limiting example, the viral genome comprises a 5′ITR sequence region, at least one promoter sequence region, a first payload region comprising a variable heavy or light chain sequence, variant or fragment thereof, a first constant region of the first payload region, at least one linker sequence region, a second constant region of the first payload region, a PolyA sequence region, a filler sequence region, and a 3′ITR sequence region. As a non-limiting example, the viral genome comprises a 5′ITR sequence region, at least one promoter sequence region, a first payload region comprising a variable heavy or light chain sequence, variant or fragment thereof, a first constant region of the first payload region, at least one linker sequence region, a second constant region of the first payload region, a PolyA sequence region, and a 3′ITR sequence region. As a non-limiting example, the viral genome comprises a 5′ITR sequence region, at least one promoter sequence region, a first payload region comprising a variable heavy or light chain sequence, variant or fragment thereof, a first constant region of the first payload region, at least one linker sequence region, a tag sequence region, a PolyA sequence region, a filler sequence region, and a 3′ITR sequence region. As a non-limiting example, the viral genome comprises a 5′ITR sequence region, at least one promoter sequence region, a first payload region comprising a variable heavy or light chain sequence, variant or fragment thereof, a first constant region of the first payload region, at least one linker sequence region, a tag sequence region, a PolyA sequence region, and a 3′ITR sequence region. As a non-limiting example, the viral genome comprises a 5′ITR sequence region, at least one promoter sequence region, a first payload region comprising a variable heavy or light chain sequence, variant or fragment thereof, a first constant region of the first payload region, at least one linker sequence region, a PolyA sequence region, a filler sequence region, and a 3′ITR sequence region. As a non-limiting example, the viral genome comprises a 5′ITR sequence region, at least one promoter sequence region, a first payload region comprising a variable heavy or light chain sequence, variant or fragment thereof, a first constant region of the first payload region, at least one linker sequence region, a PolyA sequence region, and a 3′ITR sequence region. As a non-limiting example, the viral genome comprises a 5′ITR sequence region, at least one promoter sequence region, a first payload region comprising a variable heavy or light chain sequence, variant or fragment thereof, a first constant region of the first payload region, a first signal sequence region, a second payload region comprising a variable heavy or light chain sequence, variant or fragment thereof, a second constant region of the first payload region, a tag sequence region, a PolyA sequence region, a filler sequence region, and a 3′ITR sequence region. As a non-limiting example, the viral genome comprises a 5′ITR sequence region, at least one promoter sequence region, a first payload region comprising a variable heavy or light chain sequence, variant or fragment thereof, a first constant region of the first payload region, a first signal sequence region, a second payload region comprising a variable heavy or light chain sequence, variant or fragment thereof, a second constant region of the first payload region, a tag sequence region, a PolyA sequence region, and a 3′ITR sequence region. As a non-limiting example, the viral genome comprises a 5′ITR sequence region, at least one promoter sequence region, a first payload region comprising a variable heavy or light chain sequence, variant or fragment thereof, a first constant region of the first payload region, a first signal sequence region, a second payload region comprising a variable heavy or light chain sequence, variant or fragment thereof, a second constant region of the first payload region, a PolyA sequence region, a filler sequence region, and a 3′ITR sequence region. As a non-limiting example, the viral genome comprises a 5′ITR sequence region, at least one promoter sequence region, a first payload region comprising a variable heavy or light chain sequence, variant or fragment thereof, a first constant region of the first payload region, a first signal sequence region, a second payload region comprising a variable heavy or light chain sequence, variant or fragment thereof, a second constant region of the first payload region, a PolyA sequence region, and a 3′ITR sequence region. As a non-limiting example, the viral genome comprises a 5′ITR sequence region, at least one promoter sequence region, a first payload region comprising a variable heavy or light chain sequence, variant or fragment thereof, a first constant region of the first payload region, a first signal sequence region, a second payload region comprising a variable heavy or light chain sequence, variant or fragment thereof, a tag sequence region, a PolyA sequence region, a filler sequence region, and a 3′ITR sequence region. As a non-limiting example, the viral genome comprises a 5′ITR sequence region, at least one promoter sequence region, a first payload region comprising a variable heavy or light chain sequence, variant or fragment thereof, a first constant region of the first payload region, a first signal sequence region, a second payload region comprising a variable heavy or light chain sequence, variant or fragment thereof, a tag sequence region, a PolyA sequence region, and a 3′ITR sequence region. As a non-limiting example, the viral genome comprises a 5′ITR sequence region, at least one promoter sequence region, a first payload region comprising a variable heavy or light chain sequence, variant or fragment thereof, a first constant region of the first payload region, a first signal sequence region, a second payload region comprising a variable heavy or light chain sequence, variant or fragment thereof, a PolyA sequence region, a filler sequence region, and a 3′ITR sequence region. As a non-limiting example, the viral genome comprises a 5′ITR sequence region, at least one promoter sequence region, a first payload region comprising a variable heavy or light chain sequence, variant or fragment thereof, a first constant region of the first payload region, a first signal sequence region, a second payload region comprising a variable heavy or light chain sequence, variant or fragment thereof, a PolyA sequence region, and a 3′ITR sequence region. As a non-limiting example, the viral genome comprises a 5′ITR sequence region, at least one promoter sequence region, a first payload region comprising a variable heavy or light chain sequence, variant or fragment thereof, a first constant region of the first payload region, a first signal sequence region, a second constant region of the first payload region, a tag sequence region, a PolyA sequence region, a filler sequence region, and a 3′ITR sequence region. As a non-limiting example, the viral genome comprises a 5′ITR sequence region, at least one promoter sequence region, a first payload region comprising a variable heavy or light chain sequence, variant or fragment thereof, a first constant region of the first payload region, a first signal sequence region, a second constant region of the first payload region, a tag sequence region, a PolyA sequence region, and a 3′ITR sequence region. As a non-limiting example, the viral genome comprises a 5′ITR sequence region, at least one promoter sequence region, a first payload region comprising a variable heavy or light chain sequence, variant or fragment thereof, a first constant region of the first payload region, a first signal sequence region, a second constant region of the first payload region, a PolyA sequence region, a filler sequence region, and a 3′ITR sequence region. As a non-limiting example, the viral genome comprises a 5′ITR sequence region, at least one promoter sequence region, a first payload region comprising a variable heavy or light chain sequence, variant or fragment thereof, a first constant region of the first payload region, a first signal sequence region, a second constant region of the first payload region, a PolyA sequence region, and a 3′ITR sequence region. As a non-limiting example, the viral genome comprises a 5′ITR sequence region, at least one promoter sequence region, a first payload region comprising a variable heavy or light chain sequence, variant or fragment thereof, a first constant region of the first payload region, a first signal sequence region, a tag sequence region, a PolyA sequence region, a filler sequence region, and a 3′ITR sequence region. As a non-limiting example, the viral genome comprises a 5′ITR sequence region, at least one promoter sequence region, a first payload region comprising a variable heavy or light chain sequence, variant or fragment thereof, a first constant region of the first payload region, a first signal sequence region, a tag sequence region, a PolyA sequence region, and a 3′ITR sequence region. As a non-limiting example, the viral genome comprises a 5′ITR sequence region, at least one promoter sequence region, a first payload region comprising a variable heavy or light chain sequence, variant or fragment thereof, a first constant region of the first payload region, a first signal sequence region, a PolyA sequence region, a filler sequence region, and a 3′ITR sequence region. As a non-limiting example, the viral genome comprises a 5′ITR sequence region, at least one promoter sequence region, a first payload region comprising a variable heavy or light chain sequence, variant or fragment thereof, a first constant region of the first payload region, a first signal sequence region, a PolyA sequence region, and a 3′ITR sequence region. As a non-limiting example, the viral genome comprises a 5′ITR sequence region, at least one promoter sequence region, a first payload region comprising a variable heavy or light chain sequence, variant or fragment thereof, a first constant region of the first payload region, a second payload region comprising a variable heavy or light chain sequence, variant or fragment thereof, a second constant region of the first payload region, a tag sequence region, a PolyA sequence region, a filler sequence region, and a 3′ITR sequence region. As a non-limiting example, the viral genome comprises a 5′ITR sequence region, at least one promoter sequence region, a first payload region comprising a variable heavy or light chain sequence, variant or fragment thereof, a first constant region of the first payload region, a second payload region comprising a variable heavy or light chain sequence, variant or fragment thereof, a second constant region of the first payload region, a tag sequence region, a PolyA sequence region, and a 3′ITR sequence region. As a non-limiting example, the viral genome comprises a 5′ITR sequence region, at least one promoter sequence region, a first payload region comprising a variable heavy or light chain sequence, variant or fragment thereof, a first constant region of the first payload region, a second payload region comprising a variable heavy or light chain sequence, variant or fragment thereof, a second constant region of the first payload region, a PolyA sequence region, a filler sequence region, and a 3′ITR sequence region. As a non-limiting example, the viral genome comprises a 5′ITR sequence region, at least one promoter sequence region, a first payload region comprising a variable heavy or light chain sequence, variant or fragment thereof, a first constant region of the first payload region, a second payload region comprising a variable heavy or light chain sequence, variant or fragment thereof, a second constant region of the first payload region, a PolyA sequence region, and a 3′ITR sequence region. As a non-limiting example, the viral genome comprises a 5′ITR sequence region, at least one promoter sequence region, a first payload region comprising a variable heavy or light chain sequence, variant or fragment thereof, a first constant region of the first payload region, a second payload region comprising a variable heavy or light chain sequence, variant or fragment thereof, a tag sequence region, a PolyA sequence region, a filler sequence region, and a 3′ITR sequence region. As a non-limiting example, the viral genome comprises a 5′ITR sequence region, at least one promoter sequence region, a first payload region comprising a variable heavy or light chain sequence, variant or fragment thereof, a first constant region of the first payload region, a second payload region comprising a variable heavy or light chain sequence, variant or fragment thereof, a tag sequence region, a PolyA sequence region, and a 3′ITR sequence region. As a non-limiting example, the viral genome comprises a 5′ITR sequence region, at least one promoter sequence region, a first payload region comprising a variable heavy or light chain sequence, variant or fragment thereof, a first constant region of the first payload region, a second payload region comprising a variable heavy or light chain sequence, variant or fragment thereof, a PolyA sequence region, a filler sequence region, and a 3′ITR sequence region. As a non-limiting example, the viral genome comprises a 5′ITR sequence region, at least one promoter sequence region, a first payload region comprising a variable heavy or light chain sequence, variant or fragment thereof, a first constant region of the first payload region, a second payload region comprising a variable heavy or light chain sequence, variant or fragment thereof, a PolyA sequence region, and a 3′ITR sequence region. As a non-limiting example, the viral genome comprises a 5′ITR sequence region, at least one promoter sequence region, a first payload region comprising a variable heavy or light chain sequence, variant or fragment thereof, a first constant region of the first payload region, a second constant region of the first payload region, a tag sequence region, a PolyA sequence region, a filler sequence region, and a 3′ITR sequence region. As a non-limiting example, the viral genome comprises a 5′ITR sequence region, at least one promoter sequence region, a first payload region comprising a variable heavy or light chain sequence, variant or fragment thereof, a first constant region of the first payload region, a second constant region of the first payload region, a tag sequence region, a PolyA sequence region, and a 3′ITR sequence region. As a non-limiting example, the viral genome comprises a 5′ITR sequence region, at least one promoter sequence region, a first payload region comprising a variable heavy or light chain sequence, variant or fragment thereof, a first constant region of the first payload region, a second constant region of the first payload region, a PolyA sequence region, a filler sequence region, and a 3′ITR sequence region. As a non-limiting example, the viral genome comprises a 5′ITR sequence region, at least one promoter sequence region, a first payload region comprising a variable heavy or light chain sequence, variant or fragment thereof, a first constant region of the first payload region, a second constant region of the first payload region, a PolyA sequence region, and a 3′ITR sequence region. As a non-limiting example, the viral genome comprises a 5′ITR sequence region, at least one promoter sequence region, a first payload region comprising a variable heavy or light chain sequence, variant or fragment thereof, a first constant region of the first payload region, a tag sequence region, a PolyA sequence region, a filler sequence region, and a 3′ITR sequence region. As a non-limiting example, the viral genome comprises a 5′ITR sequence region, at least one promoter sequence region, a first payload region comprising a variable heavy or light chain sequence, variant or fragment thereof, a first constant region of the first payload region, a tag sequence region, a PolyA sequence region, and a 3′ITR sequence region. As a non-limiting example, the viral genome comprises a 5′ITR sequence region, at least one promoter sequence region, a first payload region comprising a variable heavy or light chain sequence, variant or fragment thereof, a first constant region of the first payload region, a PolyA sequence region, a filler sequence region, and a 3′ITR sequence region. As a non-limiting example, the viral genome comprises a 5′ITR sequence region, at least one promoter sequence region, a first payload region comprising a variable heavy or light chain sequence, variant or fragment thereof, a first constant region of the first payload region, a PolyA sequence region, and a 3′ITR sequence region. As a non-limiting example, the viral genome comprises a 5′ITR sequence region, at least one promoter sequence region, a first payload region comprising a variable heavy or light chain sequence, variant or fragment thereof, at least one linker sequence region, a first signal sequence region, a second payload region comprising a variable heavy or light chain sequence, variant or fragment thereof, a first constant region of the first payload region, a tag sequence region, a PolyA sequence region, a filler sequence region, and a 3′ITR sequence region. As a non-limiting example, the viral genome comprises a 5′ITR sequence region, at least one promoter sequence region, a first payload region comprising a variable heavy or light chain sequence, variant or fragment thereof, at least one linker sequence region, a first signal sequence region, a second payload region comprising a variable heavy or light chain sequence, variant or fragment thereof, a first constant region of the first payload region, a tag sequence region, a PolyA sequence region, and a 3′ITR sequence region. As a non-limiting example, the viral genome comprises a 5′ITR sequence region, at least one promoter sequence region, a first payload region comprising a variable heavy or light chain sequence, variant or fragment thereof, at least one linker sequence region, a first signal sequence region, a second payload region comprising a variable heavy or light chain sequence, variant or fragment thereof, a first constant region of the first payload region, a PolyA sequence region, a filler sequence region, and a 3′ITR sequence region. As a non-limiting example, the viral genome comprises a 5′ITR sequence region, at least one promoter sequence region, a first payload region comprising a variable heavy or light chain sequence, variant or fragment thereof, at least one linker sequence region, a first signal sequence region, a second payload region comprising a variable heavy or light chain sequence, variant or fragment thereof, a first constant region of the first payload region, a PolyA sequence region, and a 3′ITR sequence region. As a non-limiting example, the viral genome comprises a 5′ITR sequence region, at least one promoter sequence region, a first payload region comprising a variable heavy or light chain sequence, variant or fragment thereof, at least one linker sequence region, a first signal sequence region, a second payload region comprising a variable heavy or light chain sequence, variant or fragment thereof, a tag sequence region, a PolyA sequence region, a filler sequence region, and a 3′ITR sequence region. As a non-limiting example, the viral genome comprises a 5′ITR sequence region, at least one promoter sequence region, a first payload region comprising a variable heavy or light chain sequence, variant or fragment thereof, at least one linker sequence region, a first signal sequence region, a second payload region comprising a variable heavy or light chain sequence, variant or fragment thereof, a tag sequence region, a PolyA sequence region, and a 3′ITR sequence region. As a non-limiting example, the viral genome comprises a 5′ITR sequence region, at least one promoter sequence region, a first payload region comprising a variable heavy or light chain sequence, variant or fragment thereof, at least one linker sequence region, a first signal sequence region, a second payload region comprising a variable heavy or light chain sequence, variant or fragment thereof, a PolyA sequence region, a filler sequence region, and a 3′ITR sequence region. As a non-limiting example, the viral genome comprises a 5′ITR sequence region, at least one promoter sequence region, a first payload region comprising a variable heavy or light chain sequence, variant or fragment thereof, at least one linker sequence region, a first signal sequence region, a second payload region comprising a variable heavy or light chain sequence, variant or fragment thereof, a PolyA sequence region, and a 3′ITR sequence region. As a non-limiting example, the viral genome comprises a 5′ITR sequence region, at least one promoter sequence region, a first payload region comprising a variable heavy or light chain sequence, variant or fragment thereof, at least one linker sequence region, a first signal sequence region, a first constant region of the first payload region, a tag sequence region, a PolyA sequence region, a filler sequence region, and a 3′ITR sequence region. As a non-limiting example, the viral genome comprises a 5′ITR sequence region, at least one promoter sequence region, a first payload region comprising a variable heavy or light chain sequence, variant or fragment thereof, at least one linker sequence region, a first signal sequence region, a first constant region of the first payload region, a tag sequence region, a PolyA sequence region, and a 3′ITR sequence region. As a non-limiting example, the viral genome comprises a 5′ITR sequence region, at least one promoter sequence region, a first payload region comprising a variable heavy or light chain sequence, variant or fragment thereof, at least one linker sequence region, a first signal sequence region, a first constant region of the first payload region, a PolyA sequence region, a filler sequence region, and a 3′ITR sequence region. As a non-limiting example, the viral genome comprises a 5′ITR sequence region, at least one promoter sequence region, a first payload region comprising a variable heavy or light chain sequence, variant or fragment thereof, at least one linker sequence region, a first signal sequence region, a first constant region of the first payload region, a PolyA sequence region, and a 3′ITR sequence region. As a non-limiting example, the viral genome comprises a 5′ITR sequence region, at least one promoter sequence region, a first payload region comprising a variable heavy or light chain sequence, variant or fragment thereof, at least one linker sequence region, a first signal sequence region, a tag sequence region, a PolyA sequence region, a filler sequence region, and a 3′ITR sequence region. As a non-limiting example, the viral genome comprises a 5′ITR sequence region, at least one promoter sequence region, a first payload region comprising a variable heavy or light chain sequence, variant or fragment thereof, at least one linker sequence region, a first signal sequence region, a tag sequence region, a PolyA sequence region, and a 3′ITR sequence region. As a non-limiting example, the viral genome comprises a 5′ITR sequence region, at least one promoter sequence region, a first payload region comprising a variable heavy or light chain sequence, variant or fragment thereof, at least one linker sequence region, a first signal sequence region, a PolyA sequence region, a filler sequence region, and a 3′ITR sequence region. As a non-limiting example, the viral genome comprises a 5′ITR sequence region, at least one promoter sequence region, a first payload region comprising a variable heavy or light chain sequence, variant or fragment thereof, at least one linker sequence region, a first signal sequence region, a PolyA sequence region, and a 3′ITR sequence region. As a non-limiting example, the viral genome comprises a 5′ITR sequence region, at least one promoter sequence region, a first payload region comprising a variable heavy or light chain sequence, variant or fragment thereof, at least one linker sequence region, a second payload region comprising a variable heavy or light chain sequence, variant or fragment thereof, a first constant region of the first payload region, a tag sequence region, a PolyA sequence region, a filler sequence region, and a 3′ITR sequence region. As a non-limiting example, the viral genome comprises a 5′ITR sequence region, at least one promoter sequence region, a first payload region comprising a variable heavy or light chain sequence, variant or fragment thereof, at least one linker sequence region, a second payload region comprising a variable heavy or light chain sequence, variant or fragment thereof, a first constant region of the first payload region, a tag sequence region, a PolyA sequence region, and a 3′ITR sequence region. As a non-limiting example, the viral genome comprises a 5′ITR sequence region, at least one promoter sequence region, a first payload region comprising a variable heavy or light chain sequence, variant or fragment thereof, at least one linker sequence region, a second payload region comprising a variable heavy or light chain sequence, variant or fragment thereof, a first constant region of the first payload region, a PolyA sequence region, a filler sequence region, and a 3′ITR sequence region. As a non-limiting example, the viral genome comprises a 5′ITR sequence region, at least one promoter sequence region, a first payload region comprising a variable heavy or light chain sequence, variant or fragment thereof, at least one linker sequence region, a second payload region comprising a variable heavy or light chain sequence, variant or fragment thereof, a first constant region of the first payload region, a PolyA sequence region, and a 3′ITR sequence region. As a non-limiting example, the viral genome comprises a 5′ITR sequence region, at least one promoter sequence region, a first payload region comprising a variable heavy or light chain sequence, variant or fragment thereof, at least one linker sequence region, a second payload region comprising a variable heavy or light chain sequence, variant or fragment thereof, a tag sequence region, a PolyA sequence region, a filler sequence region, and a 3′ITR sequence region. As a non-limiting example, the viral genome comprises a 5′ITR sequence region, at least one promoter sequence region, a first payload region comprising a variable heavy or light chain sequence, variant or fragment thereof, at least one linker sequence region, a second payload region comprising a variable heavy or light chain sequence, variant or fragment thereof, a tag sequence region, a PolyA sequence region, and a 3′ITR sequence region. As a non-limiting example, the viral genome comprises a 5′ITR sequence region, at least one promoter sequence region, a first payload region comprising a variable heavy or light chain sequence, variant or fragment thereof, at least one linker sequence region, a second payload region comprising a variable heavy or light chain sequence, variant or fragment thereof, a PolyA sequence region, a filler sequence region, and a 3′ITR sequence region. As a non-limiting example, the viral genome comprises a 5′ITR sequence region, at least one promoter sequence region, a first payload region comprising a variable heavy or light chain sequence, variant or fragment thereof, at least one linker sequence region, a second payload region comprising a variable heavy or light chain sequence, variant or fragment thereof, a PolyA sequence region, and a 3′ITR sequence region. As a non-limiting example, the viral genome comprises a 5′ITR sequence region, at least one promoter sequence region, a first payload region comprising a variable heavy or light chain sequence, variant or fragment thereof, at least one linker sequence region, a first constant region of the first payload region, a tag sequence region, a PolyA sequence region, a filler sequence region, and a 3′ITR sequence region. As a non-limiting example, the viral genome comprises a 5′ITR sequence region, at least one promoter sequence region, a first payload region comprising a variable heavy or light chain sequence, variant or fragment thereof, at least one linker sequence region, a first constant region of the first payload region, a tag sequence region, a PolyA sequence region, and a 3′ITR sequence region. As a non-limiting example, the viral genome comprises a 5′ITR sequence region, at least one promoter sequence region, a first payload region comprising a variable heavy or light chain sequence, variant or fragment thereof, at least one linker sequence region, a first constant region of the first payload region, a PolyA sequence region, a filler sequence region, and a 3′ITR sequence region. As a non-limiting example, the viral genome comprises a 5′ITR sequence region, at least one promoter sequence region, a first payload region comprising a variable heavy or light chain sequence, variant or fragment thereof, at least one linker sequence region, a first constant region of the first payload region, a PolyA sequence region, and a 3′ITR sequence region. As a non-limiting example, the viral genome comprises a 5′ITR sequence region, at least one promoter sequence region, a first payload region comprising a variable heavy or light chain sequence, variant or fragment thereof, at least one linker sequence region, a tag sequence region, a PolyA sequence region, a filler sequence region, and a 3′ITR sequence region. As a non-limiting example, the viral genome comprises a 5′ITR sequence region, at least one promoter sequence region, a first payload region comprising a variable heavy or light chain sequence, variant or fragment thereof, at least one linker sequence region, a tag sequence region, a PolyA sequence region, and a 3′ITR sequence region. As a non-limiting example, the viral genome comprises a 5′ITR sequence region, at least one promoter sequence region, a first payload region comprising a variable heavy or light chain sequence, variant or fragment thereof, at least one linker sequence region, a PolyA sequence region, a filler sequence region, and a 3′ITR sequence region. As a non-limiting example, the viral genome comprises a 5′ITR sequence region, at least one promoter sequence region, a first payload region comprising a variable heavy or light chain sequence, variant or fragment thereof, at least one linker sequence region, a PolyA sequence region, and a 3′ITR sequence region. As a non-limiting example, the viral genome comprises a 5′ITR sequence region, at least one promoter sequence region, a first payload region comprising a variable heavy or light chain sequence, variant or fragment thereof, a first signal sequence region, a second payload region comprising a variable heavy or light chain sequence, variant or fragment thereof, a first constant region of the first payload region, a tag sequence region, a PolyA sequence region, a filler sequence region, and a 3′ITR sequence region. As a non-limiting example, the viral genome comprises a 5′ITR sequence region, at least one promoter sequence region, a first payload region comprising a variable heavy or light chain sequence, variant or fragment thereof, a first signal sequence region, a second payload region comprising a variable heavy or light chain sequence, variant or fragment thereof, a first constant region of the first payload region, a tag sequence region, a PolyA sequence region, and a 3′ITR sequence region. As a non-limiting example, the viral genome comprises a 5′ITR sequence region, at least one promoter sequence region, a first payload region comprising a variable heavy or light chain sequence, variant or fragment thereof, a first signal sequence region, a second payload region comprising a variable heavy or light chain sequence, variant or fragment thereof, a first constant region of the first payload region, a PolyA sequence region, a filler sequence region, and a 3′ITR sequence region. As a non-limiting example, the viral genome comprises a 5′ITR sequence region, at least one promoter sequence region, a first payload region comprising a variable heavy or light chain sequence, variant or fragment thereof, a first signal sequence region, a second payload region comprising a variable heavy or light chain sequence, variant or fragment thereof, a first constant region of the first payload region, a PolyA sequence region, and a 3′ITR sequence region. As a non-limiting example, the viral genome comprises a 5′ITR sequence region, at least one promoter sequence region, a first payload region comprising a variable heavy or light chain sequence, variant or fragment thereof, a first signal sequence region, a second payload region comprising a variable heavy or light chain sequence, variant or fragment thereof, a tag sequence region, a PolyA sequence region, a filler sequence region, and a 3′ITR sequence region. As a non-limiting example, the viral genome comprises a 5′ITR sequence region, at least one promoter sequence region, a first payload region comprising a variable heavy or light chain sequence, variant or fragment thereof, a first signal sequence region, a second payload region comprising a variable heavy or light chain sequence, variant or fragment thereof, a tag sequence region, a PolyA sequence region, and a 3′ITR sequence region. As a non-limiting example, the viral genome comprises a 5′ITR sequence region, at least one promoter sequence region, a first payload region comprising a variable heavy or light chain sequence, variant or fragment thereof, a first signal sequence region, a second payload region comprising a variable heavy or light chain sequence, variant or fragment thereof, a PolyA sequence region, a filler sequence region, and a 3′ITR sequence region. As a non-limiting example, the viral genome comprises a 5′ITR sequence region, at least one promoter sequence region, a first payload region comprising a variable heavy or light chain sequence, variant or fragment thereof, a first signal sequence region, a second payload region comprising a variable heavy or light chain sequence, variant or fragment thereof, a PolyA sequence region, and a 3′ITR sequence region. As a non-limiting example, the viral genome comprises a 5′ITR sequence region, at least one promoter sequence region, a first payload region comprising a variable heavy or light chain sequence, variant or fragment thereof, a first signal sequence region, a first constant region of the first payload region, a tag sequence region, a PolyA sequence region, a filler sequence region, and a 3′ITR sequence region. As a non-limiting example, the viral genome comprises a 5′ITR sequence region, at least one promoter sequence region, a first payload region comprising a variable heavy or light chain sequence, variant or fragment thereof, a first signal sequence region, a first constant region of the first payload region, a tag sequence region, a PolyA sequence region, and a 3′ITR sequence region. As a non-limiting example, the viral genome comprises a 5′ITR sequence region, at least one promoter sequence region, a first payload region comprising a variable heavy or light chain sequence, variant or fragment thereof, a first signal sequence region, a first constant region of the first payload region, a PolyA sequence region, a filler sequence region, and a 3′ITR sequence region. As a non-limiting example, the viral genome comprises a 5′ITR sequence region, at least one promoter sequence region, a first payload region comprising a variable heavy or light chain sequence, variant or fragment thereof, a first signal sequence region, a first constant region of the first payload region, a PolyA sequence region, and a 3′ITR sequence region. As a non-limiting example, the viral genome comprises a 5′ITR sequence region, at least one promoter sequence region, a first payload region comprising a variable heavy or light chain sequence, variant or fragment thereof, a first signal sequence region, a tag sequence region, a PolyA sequence region, a filler sequence region, and a 3′ITR sequence region. As a non-limiting example, the viral genome comprises a 5′ITR sequence region, at least one promoter sequence region, a first payload region comprising a variable heavy or light chain sequence, variant or fragment thereof, a first signal sequence region, a tag sequence region, a PolyA sequence region, and a 3′ITR sequence region. As a non-limiting example, the viral genome comprises a 5′ITR sequence region, at least one promoter sequence region, a first payload region comprising a variable heavy or light chain sequence, variant or fragment thereof, a first signal sequence region, a PolyA sequence region, a filler sequence region, and a 3′ITR sequence region. As a non-limiting example, the viral genome comprises a 5′ITR sequence region, at least one promoter sequence region, a first payload region comprising a variable heavy or light chain sequence, variant or fragment thereof, a first signal sequence region, a PolyA sequence region, and a 3′ITR sequence region. As a non-limiting example, the viral genome comprises a 5′ITR sequence region, at least one promoter sequence region, a first payload region comprising a variable heavy or light chain sequence, variant or fragment thereof, a second payload region comprising a variable heavy or light chain sequence, variant or fragment thereof, a first constant region of the first payload region, a tag sequence region, a PolyA sequence region, a filler sequence region, and a 3′ITR sequence region. As a non-limiting example, the viral genome comprises a 5′ITR sequence region, at least one promoter sequence region, a first payload region comprising a variable heavy or light chain sequence, variant or fragment thereof, a second payload region comprising a variable heavy or light chain sequence, variant or fragment thereof, a first constant region of the first payload region, a tag sequence region, a PolyA sequence region, and a 3′ITR sequence region. As a non-limiting example, the viral genome comprises a 5′ITR sequence region, at least one promoter sequence region, a first payload region comprising a variable heavy or light chain sequence, variant or fragment thereof, a second payload region comprising a variable heavy or light chain sequence, variant or fragment thereof, a first constant region of the first payload region, a PolyA sequence region, a filler sequence region, and a 3′ITR sequence region. As a non-limiting example, the viral genome comprises a 5′ITR sequence region, at least one promoter sequence region, a first payload region comprising a variable heavy or light chain sequence, variant or fragment thereof, a second payload region comprising a variable heavy or light chain sequence, variant or fragment thereof, a first constant region of the first payload region, a PolyA sequence region, and a 3′ITR sequence region. As a non-limiting example, the viral genome comprises a 5′ITR sequence region, at least one promoter sequence region, a first payload region comprising a variable heavy or light chain sequence, variant or fragment thereof, a second payload region comprising a variable heavy or light chain sequence, variant or fragment thereof, a tag sequence region, a PolyA sequence region, a filler sequence region, and a 3′ITR sequence region. As a non-limiting example, the viral genome comprises a 5′ITR sequence region, at least one promoter sequence region, a first payload region comprising a variable heavy or light chain sequence, variant or fragment thereof, a second payload region comprising a variable heavy or light chain sequence, variant or fragment thereof, a tag sequence region, a PolyA sequence region, and a 3′ITR sequence region. As a non-limiting example, the viral genome comprises a 5′ITR sequence region, at least one promoter sequence region, a first payload region comprising a variable heavy or light chain sequence, variant or fragment thereof, a second payload region comprising a variable heavy or light chain sequence, variant or fragment thereof, a PolyA sequence region, a filler sequence region, and a 3′ITR sequence region. As a non-limiting example, the viral genome comprises a 5′ITR sequence region, at least one promoter sequence region, a first payload region comprising a variable heavy or light chain sequence, variant or fragment thereof, a second payload region comprising a variable heavy or light chain sequence, variant or fragment thereof, a PolyA sequence region, and a 3′ITR sequence region. As a non-limiting example, the viral genome comprises a 5′ITR sequence region, at least one promoter sequence region, a first payload region comprising a variable heavy or light chain sequence, variant or fragment thereof, a first constant region of the first payload region, a tag sequence region, a PolyA sequence region, a filler sequence region, and a 3′ITR sequence region. As a non-limiting example, the viral genome comprises a 5′ITR sequence region, at least one promoter sequence region, a first payload region comprising a variable heavy or light chain sequence, variant or fragment thereof, a first constant region of the first payload region, a tag sequence region, a PolyA sequence region, and a 3′ITR sequence region. As a non-limiting example, the viral genome comprises a 5′ITR sequence region, at least one promoter sequence region, a first payload region comprising a variable heavy or light chain sequence, variant or fragment thereof, a first constant region of the first payload region, a PolyA sequence region, a filler sequence region, and a 3′ITR sequence region. As a non-limiting example, the viral genome comprises a 5′ITR sequence region, at least one promoter sequence region, a first payload region comprising a variable heavy or light chain sequence, variant or fragment thereof, a first constant region of the first payload region, a PolyA sequence region, and a 3′ITR sequence region. As a non-limiting example, the viral genome comprises a 5′ITR sequence region, at least one promoter sequence region, a first payload region comprising a variable heavy or light chain sequence, variant or fragment thereof, a tag sequence region, a PolyA sequence region, a filler sequence region, and a 3′ITR sequence region. As a non-limiting example, the viral genome comprises a 5′ITR sequence region, at least one promoter sequence region, a first payload region comprising a variable heavy or light chain sequence, variant or fragment thereof, a tag sequence region, a PolyA sequence region, and a 3′ITR sequence region. As a non-limiting example, the viral genome comprises a 5′ITR sequence region, at least one promoter sequence region, a first payload region comprising a variable heavy or light chain sequence, variant or fragment thereof, a PolyA sequence region, a filler sequence region, and a 3′ITR sequence region. As a non-limiting example, the viral genome comprises a 5′ITR sequence region, at least one promoter sequence region, a first payload region comprising a variable heavy or light chain sequence, variant or fragment thereof, a PolyA sequence region, and a 3′ITR sequence region.

[1288] In some embodiments, the AAV particle viral genome may comprise any of the viral genome cassettes (VGC) shown in Tables 25-91. In Tables 25-91, possible locations in the VGCs for the variable and/or constant sequence regions of the payload region are also described.

TABLE 25
Viral Genome Cassettes Sequence Regions

| | VGC1 | | VGC2 | |
|---|---|---|---|---|
| | Region SEQ | Region | Region SEQ | Region |
| Sequence Regions | ID NO | length | ID NO | length |
| 5′ ITR | 13519 | 130 | 13519 | 130 |
| CAG promoter | 13523 | 1715 | 13523 | 1715 |
| CMVie | 13524 | 299 | 13524 | 299 |
| CBA min. | 13525 | 283 | 13525 | 283 |
| Signal | 13567 | 57 | 13567 | 57 |
| Variable and/or Constant | — | — | — | — |
| Linker | 1724 | 12 | 1725 | 12 |
| Linker | 1726 | 54 | 1727 | 75 |
| Signal | 13569 | 57 | 13569 | 57 |
| Variable and/or Constant | — | — | — | — |
| PolyA | 13576 | 127 | 13576 | 127 |
| 3′ ITR | 13521 | 130 | 13521 | 130 |

[1289] In some embodiments, the AAV particle genome is VGC1 and comprises a 5′ inverted terminal repeat (ITR) sequence region and a 3′ ITR sequence region, a CAG promoter comprising a CMVie region and a minimal CBA promoter region, an antibody heavy chain signal sequence, an antibody heavy chain variable region and heavy chain constant region, a furin cleavage site, a T2A linker, an antibody light chain signal sequence, an antibody light chain variable region and light chain constant region, and a polyadenylation sequence.

[1290] In some embodiments, the AAV particle genome is VGC2 and comprises a 5′ inverted terminal repeat (ITR) sequence region and a 3′ ITR sequence region, a CAG promoter comprising a CMVie region and a minimal CBA promoter region, an antibody heavy chain signal sequence, an antibody heavy chain variable region and heavy chain constant region, a furin cleavage site, an F2A linker, an antibody light chain signal sequence, an antibody light chain variable region and light chain constant region, and a polyadenylation sequence.

TABLE 26
Viral Genome Cassettes Sequence Regions

| | VGC3 | | VGC4 | |
|---|---|---|---|---|
| | Region SEQ | Region | Region SEQ | Region |
| Sequence Regions | ID NO | length | ID NO | length |
| 5′ ITR | 13519 | 130 | 13519 | 130 |
| CB promoter | 13526 | 266 | 13526 | 260 |
| Exon | 13535 | 134 | 13535 | 134 |
| Intron | 13540 | 32 | 13540 | 32 |
| Intron | 13542 | 347 | 13542 | 347 |
| Exon | 13538 | 53 | 13538 | 53 |
| Signal | 13567 | 57 | 13567 | 57 |
| Variable and/or Constant | — | — | — | — |
| Linker | 1725 | 12 | 1724 | 12 |
| Linker | 1727 | 75 | 1726 | 54 |
| Signal | 13569 | 57 | 13569 | 57 |
| Variable and/or Constant | — | — | — | — |
| PolyA | 13576 | 127 | 13576 | 127 |
| 3′ ITR | 13521 | 130 | 13521 | 130 |

[1291] In some embodiments, the AAV particle genome is VGC3 and comprises a 5′ inverted terminal repeat (ITR) sequence region and a 3′ ITR sequence region, a CB promoter, an ie1 exon 1 region, an ie1 intron 1 region, a human beta-globin intron region, a human beta-globin exon region, an antibody heavy chain signal sequence, an antibody heavy chain variable region and heavy chain constant region, a furin cleavage site, an F2A linker, an antibody light chain signal sequence, an antibody light chain variable region and light chain constant region, and a polyadenylation sequence.

[1292] In some embodiments, the AAV particle genome is VGC4 and comprises a 5′ inverted terminal repeat (ITR) sequence region and a 3′ ITR sequence region, a CB promoter, an ie1 exon 1 region, an ie1 intron 1 region, a human beta-globin intron region, a human beta-globin exon region, an antibody heavy chain signal sequence, an antibody heavy chain variable region and heavy chain constant region, a furin cleavage site, a T2A linker, an antibody light chain signal sequence, an antibody light chain variable region and light chain constant region, and a polyadenylation sequence.

TABLE 27
Viral Genome Cassettes Sequence Regions

| | VGC5 | | VGC6 | | VGC7 | | VGC8 | |
|---|---|---|---|---|---|---|---|---|
| | Region | | Region | | Region | | Region | |
| | SEQ ID | Region | SEQ ID | Region | SEQ ID | Region | SEQ ID | Region |
| Sequence Regions | NO | length | NO | length | NO | length | NO | length |
| 5′ ITR | 13519 | 130 | 13519 | 130 | 13519 | 130 | 13519 | 130 |
| Promoter | 13528 | 699 | 13528 | 699 | 13529 | 557 | 13529 | 557 |
| Exon | 13535 | 134 | 13535 | 134 | 13535 | 134 | 13535 | 134 |
| Intron | 13540 | 32 | 13540 | 32 | 13540 | 32 | 13540 | 32 |
| Intron | 13542 | 347 | 13542 | 347 | 13542 | 347 | 13542 | 347 |
| Exon | 13538 | 53 | 13538 | 53 | 13538 | 53 | 13538 | 53 |
| Signal | 13567 | 57 | 13567 | 57 | 13567 | 57 | 13567 | 57 |
| Variable and/or | — | — | — | — | — | — | — | — |
| Constant | | | | | | | | |
| Linker | 1725 | 12 | 1724 | 12 | 1725 | 12 | 1724 | 12 |
| Linker | 1727 | 75 | 1726 | 54 | 1727 | 75 | 1726 | 54 |
| Signal | 13569 | 57 | 13569 | 57 | 13569 | 57 | 13569 | 57 |
| Variable and/or | — | — | — | — | — | — | — | — |
| Constant | | | | | | | | |
| Constant | 1864 | 321 | 1864 | 321 | 1864 | 321 | 1864 | 321 |
| PolyA | 13576 | 127 | 13576 | 127 | 13576 | 127 | 13576 | 127 |
| 3′ ITR | 13521 | 130 | 13521 | 130 | 13521 | 130 | 13521 | 130 |

[1293] In some embodiments, the AAV particle genome is VGC5 and comprises a 5′ inverted terminal repeat (ITR) sequence region and a 3′ ITR sequence region, a GFAP promoter, an ie1 exon 1 region, an ie1 intron 1 region, a human beta-globin intron region, a human beta-globin exon region, an antibody heavy chain signal sequence, an antibody heavy chain variable region and heavy chain constant region, a furin cleavage site, an F2A linker, an antibody light chain signal sequence, an antibody light chain variable region and light chain constant region, and a polyadenylation sequence.

[1294] In some embodiments, the AAV particle genome is VGC6 and comprises a 5′ inverted terminal repeat (ITR) sequence region and a 3′ ITR sequence region, a GFAP promoter, an ie1 exon 1 region, an ie1 intron 1 region, a human beta-globin intron region, a human beta-globin exon region, an antibody heavy chain signal sequence, an antibody heavy chain variable region and heavy chain constant region, a furin cleavage site, a T2A linker, an antibody light chain signal sequence, an antibody light chain variable region and light chain constant region, and a polyadenylation sequence.

[1295] In some embodiments, the AAV particle genome is VGC7 and comprises a 5′ inverted terminal repeat (ITR) sequence region and a 3′ ITR sequence region, a synapsin promoter, an ie1 exon 1 region, an ie1 intron 1 region, a human beta-globin intron region, a human beta-globin exon region, an antibody heavy chain signal sequence, an antibody heavy chain variable region and heavy chain constant region, a furin cleavage site, an F2A linker, an antibody light chain signal sequence, an antibody light chain variable region and light chain constant region, and a polyadenylation sequence.

[1296] In some embodiments, the AAV particle genome is VGC8 and comprises a 5′ inverted terminal repeat (ITR) sequence region and a 3′ ITR sequence region, a synapsin promoter, an ie1 exon region, an ie1 intron 1 region, a human beta-globin intron region, a human beta-globin exon region, an antibody heavy chain signal sequence, an antibody heavy chain variable region and heavy chain constant region, a furin cleavage site, a T2A linker, an antibody light chain signal sequence, an antibody light chain variable region and light chain constant region, and a polyadenylation sequence.

TABLE 28
Viral Genome Cassettes Sequence Regions

| | VGC9 | | VGC10 | |
|---|---|---|---|---|
| | Region SEQ | Region | Region SEQ | Region |
| Sequence Regions | ID NO | length | ID NO | length |
| 5′ ITR | 13519 | 130 | 13519 | 130 |
| CAG promoter | 13523 | 1715 | 13523 | 1715 |
| CMVie | 13524 | 299 | 13524 | 299 |
| CBA min. | 13525 | 283 | 13525 | 283 |
| Signal | 13569 | 57 | 13569 | 57 |
| Variable and/or Constant | — | — | — | — |
| Linker | 1727 | 75 | 1726 | 54 |
| Signal | 13567 | 57 | 13567 | 57 |
| Variable and/or Constant | — | — | — | — |
| PolyA | 13576 | 127 | 13576 | 127 |
| 3′ ITR | 13521 | 130 | 13521 | 130 |

[1297] In some embodiments, the AAV particle genome is VGC9 and comprises a 5′ inverted terminal repeat (ITR) sequence region and a 3′ ITR sequence region, a CAG promoter comprising a CMVie region and a minimal CBA promoter region, an antibody light chain signal sequence, an antibody light chain variable region and light chain constant region, an F2A linker, an antibody heavy chain signal sequence, an antibody heavy chain variable region and heavy chain constant region, and a polyadenylation sequence.

[1298] In some embodiments, the AAV particle genome is VGC10 and comprises a 5′ inverted terminal repeat (ITR) sequence region and a 3′ITR sequence region, a CAG promoter comprising a CMVie region and a minimal CBA promoter region, an antibody light chain signal sequence, an antibody light chain variable region and light chain constant region, a T2A linker, an antibody heavy chain signal sequence, an antibody heavy chain variable region and heavy chain constant region, and a polyadenylation sequence.

TABLE 29
Viral Genome Cassettes Sequence Regions

| | VGC11 | | VGC12 | |
|---|---|---|---|---|
| | Region SEQ | Region | Region SEQ | Region |
| Sequence Regions | ID NO | length | ID NO | length |
| 5′ ITR | 13519 | 130 | 13519 | 130 |
| Promoter | 13526 | 260 | 13526 | 260 |
| Exon | 13535 | 134 | 13535 | 134 |
| Intron | 13540 | 32 | 13540 | 32 |
| Intron | 13542 | 347 | 13542 | 347 |
| Exon | 13538 | 53 | 13538 | 53 |
| Signal | 13569 | 57 | 13569 | 57 |
| Variable and/or Constant | — | — | — | — |
| Linker | 1727 | 75 | 1726 | 54 |
| Signal | 13567 | 57 | 13567 | 57 |
| Variable and/or Constant | — | — | — | — |
| PolyA | 13576 | 127 | 13576 | 127 |
| 3′ ITR | 13521 | 130 | 13521 | 130 |

[1299] In some embodiments, the AAV particle genome is VGC11 and comprises a 5′ inverted terminal repeat (ITR) sequence region and a 3′ITR sequence region, a CB promoter, an ie1 exon 1 region, an ie1 intron region, a human beta-globin intron region, a human beta-globin exon region, an antibody light chain signal sequence, an antibody light chain variable region and light chain constant region, an F2A linker, an antibody heavy chain signal sequence, an antibody heavy chain variable region and heavy chain constant region, and a polyadenylation sequence.

[1300] In some embodiments, the AAV particle genome is VGC12 and comprises a 5′ inverted terminal repeat (ITR) sequence region and a 3′ITR sequence region, a CB promoter, an ie1 exon 1 region, an ie1 intron 1 region, a human beta-globin intron region, a human beta-globin exon region, an antibody light chain signal sequence, an antibody light chain variable region and light chain constant region, an T2A linker, an antibody heavy chain signal sequence, an antibody heavy chain variable region and heavy chain constant region, and a polyadenylation sequence.

TABLE 30
Viral Genome Cassettes Sequence Regions

| | VGC13 | | VGC14 | | VGC15 | | VGC16 | |
|---|---|---|---|---|---|---|---|---|
| Sequence | Region | Region | Region | Region | Region | Region | Region | Region |
| Regions | SEQ ID NO | length | SEQ ID NO | length | SEQ ID NO | length | SEQ ID NO | length |
| 5′ ITR | 13519 | 130 | 13519 | 130 | 13519 | 130 | 13519 | 130 |
| Promoter | 13528 | 699 | 13528 | 699 | 13529 | 557 | 13529 | 557 |
| Exon | 13535 | 134 | 13535 | 134 | 13535 | 134 | 13535 | 134 |
| Intron | 13540 | 32 | 13540 | 32 | 13540 | 32 | 13540 | 32 |
| Intron | 13542 | 347 | 13542 | 347 | 13542 | 347 | 13542 | 347 |
| Exon | 13538 | 53 | 13538 | 53 | 13538 | 53 | 13538 | 53 |
| Signal | 13569 | 57 | 13569 | 57 | 13569 | 57 | 13569 | 57 |
| Variable | — | — | — | — | — | — | — | — |
| and/or | | | | | | | | |
| Constant | | | | | | | | |
| Linker | 1727 | 75 | 1726 | 54 | 1727 | 75 | 1726 | 54 |
| Signal | 13567 | 57 | 13567 | 57 | 13567 | 57 | 13567 | 57 |
| Variable | — | — | — | — | — | — | — | — |
| and/or | | | | | | | | |
| Constant | | | | | | | | |
| PolyA | 13576 | 127 | 13576 | 127 | 13576 | 127 | 13576 | 127 |
| 3′ ITR | 13521 | 130 | 13521 | 130 | 13521 | 130 | 13521 | 130 |

[1301] In some embodiments, the AAV particle genome is VGC13 and comprises a 5′ inverted terminal repeat (ITR) sequence region and a 3′ITR sequence region, a GFAP promoter, an ie1 exon 1 region, an ie1 intron 1 region, a human beta-globin intron region, a human beta-globin exon region, an antibody light chain signal sequence, an antibody light chain variable region and light chain constant region, an F2A linker, an antibody heavy chain signal sequence, an antibody heavy chain variable region and heavy chain constant region, and a polyadenylation sequence.

[1302] In some embodiments, the AAV particle genome is VGC14 and comprises a 5′ inverted terminal repeat (ITR) sequence region and a 3′ ITR sequence region, a GFAP promoter, an ie1 exon 1 region, an ie1 intron 1 region, a human beta-globin intron region, a human beta-globin exon region, an antibody light chain signal sequence, an antibody light chain variable region and light chain constant region, a T2A linker, an antibody heavy chain signal sequence, an antibody heavy chain variable region and heavy chain constant region, and a polyadenylation sequence.

[1303] In some embodiments, the AAV particle genome is VGC15 and comprises a 5′ inverted terminal repeat (ITR) sequence region and a 3′ ITR sequence region, a synapsin promoter, an ie1 exon 1 region, an ie1 intron 1 region, a human beta-globin intron region, a human beta-globin exon region, an antibody light chain signal sequence, an antibody light chain variable region and light chain constant region, an F2A linker, an antibody heavy chain signal sequence, an antibody heavy chain variable region and heavy chain constant region, and a polyadenylation sequence.

[1304] In some embodiments, the AAV particle genome is VGC16 and comprises a 5′ inverted terminal repeat (ITR) sequence region and a 3′ ITR sequence region, a synapsin promoter, an ie1 exon 1 region, an ie1 intron 1 region, a human beta-globin intron region, a human beta-globin exon region, an antibody light chain signal sequence, an antibody light chain variable region and light chain constant region, a T2A linker, an antibody heavy chain signal sequence, an antibody heavy chain variable region and heavy chain constant region, and a polyadenylation sequence.

TABLE 31
Viral Genome Cassettes Sequence Regions

| | VGC17 | | VGC18 | | VGC19 | | VGC20 | | VGC21 | |
|---|---|---|---|---|---|---|---|---|---|---|
| Sequence | Region | Region | Region | Region | Region | Region | Region | Region | Region | Region |
| Regions | SEQ ID NO | length | SEQ ID NO | length | SEQ ID NO | length | SEQ ID NO | length | SEQ ID NO | length |
| 5′ ITR | 13519 | 130 | 13519 | 130 | 13519 | 130 | 13519 | 130 | 13519 | 130 |
| Promoter | 13526 | 260 | 13526 | 260 | 13526 | 260 | 13526 | 260 | 13526 | 260 |
| Exon | 13535 | 134 | 13535 | 134 | 13535 | 134 | 13535 | 134 | 13535 | 134 |
| Intron | 13540 | 32 | 13540 | 32 | 13540 | 32 | 13540 | 32 | 13540 | 32 |
| Intron | 13542 | 347 | 13542 | 347 | 13542 | 347 | 13542 | 347 | 13542 | 347 |
| Exon | 13538 | 53 | 13538 | 53 | 13538 | 53 | 13538 | 53 | 13538 | 53 |
| Signal | 13569 | 57 | 13569 | 57 | 13569 | 57 | 13569 | 57 | 13569 | 57 |
| Variable | — | — | — | — | — | — | — | — | — | — |
| and/or | | | | | | | | | | |
| Constant | | | | | | | | | | |
| Linker | 1726 | 54 | 1726 | 54 | 1726 | 54 | 1726 | 54 | 1726 | 54 |
| Signal | 13567 | 57 | 13567 | 57 | 13567 | 57 | 13567 | 57 | 13567 | 57 |
| Variable | — | — | — | — | — | — | — | — | — | — |
| and/or | | | | | | | | | | |
| Constant | | | | | | | | | | |
| PolyA | 13576 | 127 | 13576 | 127 | 13576 | 127 | 13576 | 127 | 13576 | 127 |
| 3′ ITR | 13521 | 130 | 13521 | 130 | 13521 | 130 | 13521 | 130 | 13521 | 130 |

[1305] In some embodiments, the AAV particle genome is VGC17 and comprises a 5′ inverted terminal repeat (ITR) sequence region and a 3′ ITR sequence region, a CB promoter, an ie1 exon 1 region, an ie1 intron 1 region, a human beta-globin intron region, a human beta-globin exon region, an antibody light chain signal sequence, a codon-optimized (Bioinformatics) antibody light chain variable region, alight chain constant region, a T2A linker, an antibody heavy chain signal sequence, a codon-optimized antibody heavy chain variable region, a heavy chain constant region, and a polyadenylation sequence.

[1306] In some embodiments, the AAV particle genome is VGC18 and comprises a 5′ inverted terminal repeat (ITR) sequence region and a 3′ ITR sequence region, a CB promoter, an ie1 exon 1 region, an ie1 intron 1 region, a human beta-globin intron region, a human beta-globin exon region, an antibody light chain signal sequence, a codon-optimized (EMBOSS) antibody light chain variable region, alight chain constant region, a T2A linker, an antibody heavy chain signal sequence, a codon-optimized antibody heavy chain variable region, a heavy chain constant region, and a polyadenylation sequence.

[1307] In some embodiments, the AAV particle genome is VGC19 and comprises a 5′ inverted terminal repeat (ITR) sequence region and a 3′ ITR sequence region, a CB promoter, an ie1 exon 1 region, an ie1 intron 1 region, a human beta-globin intron region, a human beta-globin exon region, an antibody light chain signal sequence, a codon-optimized (GeneInfinity) antibody light chain variable region, alight chain constant region, a T2A linker, an antibody heavy chain signal sequence, a codon-optimized antibody heavy chain variable region, a heavy chain constant region, and a polyadenylation sequence.

[1308] In some embodiments, the AAV particle genome is VGC20 and comprises a 5′ inverted terminal repeat (ITR) sequence region and a 3′ ITR sequence region, a CB promoter, an ie1 exon 1 region, an ie1 intron 1 region, a human beta-globin intron region, a human beta-globin exon region, an antibody light chain signal sequence, a codon-optimized (GregThatcher) antibody light chain variable region, alight chain constant region, a T2A linker, an antibody heavy chain signal sequence, a codon-optimized antibody heavy chain variable region, a heavy chain constant region, and a polyadenylation sequence.

[1309] In some embodiments, the AAV particle genome is VGC21 and comprises a 5′ inverted terminal repeat (ITR) sequence region and a 3′ ITR sequence region, a CB promoter, an ie1 exon 1 region, an ie1 intron 1 region, a human beta-globin intron region, a human beta-globin exon region, an antibody light chain signal sequence, a codon-optimized (IDT) antibody light chain variable region, alight chain constant region, a T2A linker, an antibody heavy chain signal sequence, a codon-optimized antibody heavy chain variable region, a heavy chain constant region, and a polyadenylation sequence.

TABLE 32
Viral Genome Cassettes Sequence Regions

| | VGC22 | | VGC23 | | VGC24 | | VGC25 | | VGC26 | |
|---|---|---|---|---|---|---|---|---|---|---|
| Sequence | Region | Region | Region | Region | Region | Region | Region | Region | Region | Region |
| Regions | SEQ ID NO | length | SEQ ID NO | length | SEQ ID NO | length | SEQ ID NO | length | SEQ ID NO | length |
| 5′ ITR | 13519 | 130 | 13519 | 130 | 13519 | 130 | 13519 | 130 | 13519 | 130 |
| Promoter | 13526 | 260 | 13526 | 260 | 13526 | 260 | 13526 | 260 | 13526 | 260 |
| Exon | 13535 | 134 | 13535 | 134 | 13535 | 134 | 13535 | 134 | 13535 | 134 |
| Intron | 13540 | 32 | 13540 | 32 | 13540 | 32 | 13540 | 32 | 13540 | 32 |
| Intron | 13542 | 347 | 13542 | 347 | 13542 | 347 | 13542 | 347 | 13542 | 347 |
| Exon | 13538 | 53 | 13538 | 53 | 13538 | 53 | 13538 | 53 | 13538 | 53 |
| Signal | 13569 | 57 | 13569 | 57 | 13569 | 57 | 13569 | 57 | 13569 | 57 |
| Variable | — | — | — | — | — | — | — | — | — | — |
| and/or | | | | | | | | | | |
| Constant | | | | | | | | | | |
| Linker | 1726 | 54 | 1726 | 54 | 1726 | 54 | 1726 | 54 | 1726 | 54 |
| Signal | 13567 | 57 | 13567 | 57 | 13567 | 57 | 13567 | 57 | 13567 | 57 |
| Variable | — | — | — | — | — | — | — | — | — | — |
| and/or | | | | | | | | | | |
| Constant | | | | | | | | | | |
| PolyA | 13576 | 127 | 13576 | 127 | 13576 | 127 | 13576 | 127 | 13576 | 127 |
| 3′ ITR | 13521 | 130 | 13521 | 130 | 13521 | 130 | 13521 | 130 | 13521 | 130 |

[1310] In some embodiments, the AAV particle genome is VGC22 and comprises a 5′ inverted terminal repeat (ITR) sequence region and a 3′ ITR sequence region, a CB promoter, an ie1 exon 1 region, an ie1 intron 1 region, a human beta-globin intron region, a human beta-globin exon region, an antibody light chain signal sequence, a codon-optimized (InSilico) antibody light chain variable region, alight chain constant region, a T2A linker, an antibody heavy chain signal sequence, a codon-optimized antibody heavy chain variable region, a heavy chain constant region, and a polyadenylation sequence.

[1311] In some embodiments, the AAV particle genome is VGC23 and comprises a 5′ inverted terminal repeat (ITR) sequence region and a 3′ ITR sequence region, a CB promoter, an ie1 exon 1 region, an ie1 intron 1 region, a human beta-globin intron region, a human beta-globin exon region, an antibody light chain signal sequence, a codon-optimized (MolBio) antibody light chain variable region, alight chain constant region, a T2A linker, an antibody heavy chain signal sequence, a codon-optimized antibody heavy chain variable region, a heavy chain constant region, and a polyadenylation sequence.

[1312] In some embodiments, the AAV particle genome is VGC24 and comprises a 5′ inverted terminal repeat (ITR) sequence region and a 3′ITR sequence region, a CB promoter, an ie1 exon 1 region, an ie1 intron 1 region, a human beta-globin intron region, a human beta-globin exon region, an antibody light chain signal sequence, a codon-optimized (N2P) antibody light chain variable region, alight chain constant region, a T2A linker, an antibody heavy chain signal sequence, a codon-optimized antibody heavy chain variable region, a heavy chain constant region, and a polyadenylation sequence.

[1313] In some embodiments, the AAV particle genome is VGC25 and comprises a 5′ inverted terminal repeat (ITR) sequence region and a 3′ ITR sequence region, a CB promoter, an ie1 exon 1 region, an ie1 intron 1 region, a human beta-globin intron region, a human beta-globin exon region, an antibody light chain signal sequence, a codon-optimized (SnapGene) antibody light chain variable region, alight chain constant region, a T2A linker, an antibody heavy chain signal sequence, a codon-optimized antibody heavy chain variable region, a heavy chain constant region, and a polyadenylation sequence.

[1314] In some embodiments, the AAV particle genome is VGC26 and comprises a 5′ inverted terminal repeat (ITR) sequence region and a 3′ ITR sequence region, a CB promoter, an ie1 exon 1 region, an ie1 intron 1 region, a human beta-globin intron region, a human beta-globin exon region, an antibody light chain signal sequence, a codon-optimized (Vector NTI) antibody light chain variable region, alight chain constant region, a T2A linker, an antibody heavy chain signal sequence, a codon-optimized antibody heavy chain variable region, a heavy chain constant region, and a polyadenylation sequence.

TABLE 33
Viral Genome Cassettes Sequence Regions

| | VGC27 | | VGC28 | | VGC29 | | VGC30 | | VGC31 | |
|---|---|---|---|---|---|---|---|---|---|---|
| Sequence | Region | Region | Region | Region | Region | Region | Region | Region | Region | Region |
| Regions | SEQ ID NO | length | SEQ ID NO | length | SEQ ID NO | length | SEQ ID NO | length | SEQ ID NO | length |
| 5′ ITR | 13520 | 141 | 13520 | 141 | 13520 | 141 | 13520 | 141 | 13520 | 141 |
| Promoter | 13527 | 654 | 13527 | 654 | 13527 | 654 | 13527 | 654 | 13527 | 654 |
| Exon | 13535 | 134 | 13535 | 134 | 13535 | 134 | 13535 | 134 | 13535 | 134 |
| Intron | 13540 | 32 | 13540 | 32 | 13540 | 32 | 13540 | 32 | 13540 | 32 |
| Intron | 13542 | 347 | 13542 | 347 | 13542 | 347 | 13542 | 347 | 13542 | 347 |
| Exon | 13538 | 53 | 13538 | 53 | 13538 | 53 | 13538 | 53 | 13538 | 53 |
| Signal | 13567 | 57 | — | — | 13567 | 57 | 13567 | 57 | 13567 | 57 |
| Variable | — | — | — | — | — | — | — | — | — | — |
| and/or | | | | | | | | | | |
| Constant | | | | | | | | | | |
| Linker | 1724 | 12 | 1724 | 12 | 1724 | 12 | 1724 | 12 | 1724 | 12 |
| Linker | 1726 | 54 | 1726 | 54 | 1726 | 54 | 1726 | 54 | 1726 | 54 |
| Signal | 13569 | 57 | 13569 | 57 | 13569 | 57 | 13569 | 57 | 13569 | 57 |
| Variable | — | — | — | — | — | — | — | — | — | — |
| and/or | | | | | | | | | | |
| Constant | | | | | | | | | | |
| PolyA | 13577 | 477 | 13577 | 477 | 13577 | 477 | 13577 | 477 | 13577 | 477 |
| 3′ ITR | 13522 | 141 | 13522 | 141 | 13522 | 141 | 13522 | 141 | 13522 | 141 |

[1315] In some embodiments, the AAV particle genome is VGC27 and comprises a 5′ inverted terminal repeat (ITR) sequence region and a 3′ITR sequence region, a CBA promoter, an ie1 exon 1 region, an ie1 intron 1 region, a human beta-globin intron region, a human beta-globin exon region, an antibody heavy chain signal sequence, a codon-optimized (GeneScript) antibody heavy chain variable region, a heavy chain constant region, a furin cleavage site, a T2A linker, an antibody light chain signal sequence, a codon-optimized antibody light chain variable region, a light chain constant region, and a polyadenylation sequence.

[1316] In some embodiments, the AAV particle genome is VGC28 and comprises a 5′ inverted terminal repeat (ITR) sequence region and a 3′ITR sequence region, a CBA promoter, an ie1 exon 1 region, an ie1 intron 1 region, a human beta-globin intron region, a human beta-globin exon region, a codon-optimized (SnapGene) antibody heavy chain variable region, a heavy chain constant region, a furin cleavage site, a T2A linker, an antibody light chain signal sequence, a codon-optimized antibody light chain variable region, alight chain constant region, and a polyadenylation sequence.

[1317] In some embodiments, the AAV particle genome is VGC29 and comprises a 5′ inverted terminal repeat (ITR) sequence region and a 3′ITR sequence region, a CBA promoter, an ie1 exon 1 region, an ie1 intron 1 region, a human beta-globin intron region, a human beta-globin exon region, an antibody heavy chain signal sequence, a codon-optimized (EMBOSS) antibody heavy chain variable region, a heavy chain constant region, a furin cleavage site, a T2A linker, an antibody light chain signal sequence, a codon-optimized antibody light chain variable region, alight chain constant region, and a polyadenylation sequence.

[1318] In some embodiments, the AAV particle genome is VGC30 and comprises a 5′ inverted terminal repeat (ITR) sequence region and a 3′ITR sequence region, a CBA promoter, an ie1 exon 1 region, an ie1 intron 1 region, a human beta-globin intron region, a human beta-globin exon region, an antibody heavy chain signal sequence, a codon-optimized (Bioinformatics) antibody heavy chain variable region, a heavy chain constant region, a furin cleavage site, a T2A linker, an antibody light chain signal sequence, a codon-optimized antibody light chain variable region, alight chain constant region, and a polyadenylation sequence.

[1319] In some embodiments, the AAV particle genome is VGC31 and comprises a 5′ inverted terminal repeat (ITR) sequence region and a 3′ITR sequence region, a CBA promoter, an ie1 exon 1 region, an ie1 intron 1 region, a human beta-globin intron region, a human beta-globin exon region, an antibody heavy chain signal sequence, a codon-optimized (NUS) antibody heavy chain variable region, a heavy chain constant region, a furin cleavage site, a T2A linker, an antibody light chain signal sequence, a codon-optimized antibody light chain variable region, alight chain constant region, and a polyadenylation sequence.

TABLE 34
Viral Genome Cassettes Sequence Regions

| | VGC32 | | VGC33 | | VGC34 | | VGC35 | | VGC36 | |
|---|---|---|---|---|---|---|---|---|---|---|
| Sequence | Region | Region | Region | Region | Region | Region | Region | Region | Region | Region |
| Regions | SEQ ID NO | length | SEQ ID NO | length | SEQ ID NO | length | SEQ ID NO | length | SEQ ID NO | length |
| 5′ ITR | 13520 | 141 | 13520 | 141 | 13520 | 141 | 13520 | 141 | 13520 | 141 |
| Promoter | 13527 | 654 | 13527 | 654 | 13527 | 654 | 13527 | 654 | 13527 | 654 |
| Exon | 13535 | 134 | 13535 | 134 | 13535 | 134 | 13535 | 134 | 13535 | 134 |
| Intron | 13540 | 32 | 13540 | 32 | 13540 | 32 | 13540 | 32 | 13540 | 32 |
| Intron | 13542 | 347 | 13542 | 347 | 13542 | 347 | 13542 | 347 | 13542 | 347 |
| Exon | 13538 | 53 | 13538 | 53 | 13538 | 53 | 13538 | 53 | 13538 | 53 |
| Signal | 13567 | 57 | 13567 | 57 | 13567 | 57 | 13567 | 57 | 13567 | 57 |
| Variable | — | — | — | — | — | — | — | — | — | — |
| and/or | | | | | | | | | | |
| Constant | | | | | | | | | | |
| Linker | 1724 | 12 | 1724 | 12 | 1724 | 12 | 1724 | 12 | 1724 | 12 |
| Linker | 1726 | 54 | 1726 | 54 | 1726 | 54 | 1726 | 54 | 1726 | 54 |
| Signal | 13569 | 57 | 13569 | 57 | 13569 | 57 | 13569 | 57 | 13569 | 57 |
| Variable | — | — | — | — | — | — | — | — | — | — |
| and/or | | | | | | | | | | |
| Constant | | | | | | | | | | |
| PolyA | 13577 | 477 | 13577 | 477 | 13577 | 477 | 13577 | 477 | 13577 | 477 |
| 3′ ITR | 13522 | 141 | 13522 | 141 | 13522 | 141 | 13522 | 141 | 13522 | 141 |

[1320] In some embodiments, the AAV particle genome is VGC32 and comprises a 5′ inverted terminal repeat (ITR) sequence region and a 3′ITR sequence region, a CBA promoter, an ie1 exon 1 region, an ie1 intron 1 region, a human beta-globin intron region, a human beta-globin exon region, an antibody heavy chain signal sequence, a codon-optimized (NUS2) antibody heavy chain variable region, a heavy chain constant region, a furin cleavage site, a T2A linker, an antibody light chain signal sequence, a codon-optimized antibody light chain variable region, alight chain constant region, and a polyadenylation sequence.

[1321] In some embodiments, the AAV particle genome is VGC33 and comprises a 5′ inverted terminal repeat (ITR) sequence region and a 3′ ITR sequence region, a CBA promoter, an ie1 exon 1 region, an ie1 intron 1 region, a human beta-globin intron region, a human beta-globin exon region, an antibody heavy chain signal sequence, a codon-optimized (GeneInfinity) antibody heavy chain variable region, a heavy chain constant region, a furin cleavage site, a T2A linker, an antibody light chain signal sequence, a codon-optimized antibody light chain variable region, alight chain constant region, and a polyadenylation sequence.

[1322] In some embodiments, the AAV particle genome is VGC34 and comprises a 5′ inverted terminal repeat (ITR) sequence region and a 3′ITR sequence region, a CBA promoter, an ie1 exon 1 region, an ie1 intron 1 region, a human beta-globin intron region, a human beta-globin exon region, an antibody heavy chain signal sequence, a codon-optimized (IDT) antibody heavy chain variable region, a heavy chain constant region, aurin cleavage site, T2A linker, an antibody light chain signal sequence, a codon-optimized antibody light chain variable region, alight chain constant region, and a polyadenylation sequence.

[1323] In some embodiments, the AAV particle genome is VGC35 and comprises a 5′ inverted terminal repeat (ITR) sequence region and a 3′ITR sequence region, a CBA promoter, an ie1 exon 1 region, an ie1 intron region, a human beta-globin intron region, a human beta-globin exon region, an antibody heavy chain signal sequence, a codon-optimized (Bioinformatics 2) antibody heavy chain variable region, a heavy chain constant region, a furin cleavage site, a T2A linker, an antibody light chain signal sequence, a codon-optimized antibody light chain variable region, a light chain constant region, and a polyadenylation sequence.

[1324] In some embodiments, the AAV particle genome is VGC36 and comprises a 5′ inverted terminal repeat (ITR) sequence region and a 3′ITR sequence region, a CBA promoter, an ie1 exon 1 region, an ie1 intron 1 region, a human beta-globin intron region, a human beta-globin exon region, an antibody heavy chain signal sequence, a codon-optimized (NUS3) antibody heavy chain variable region, a heavy chain constant region, a furin cleavage site, a T2A linker, an antibody light chain signal sequence, a codon-optimized antibody light chain variable region, alight chain constant region, and a polyadenylation sequence.

TABLE 35
Viral Genome Cassettes Sequence Regions

| | VGC37 | | VGC38 | | VGC39 | | VGC40 | | VGC41 | |
|---|---|---|---|---|---|---|---|---|---|---|
| Sequence | Region | Region | Region | Region | Region | Region | Region | Region | Region | Region |
| Regions | SEQ ID NO | length | SEQ ID NO | length | SEQ ID NO | length | SEQ ID NO | length | SEQ ID NO | length |
| 5′ ITR | 13520 | 141 | 13520 | 141 | 13520 | 141 | 13520 | 141 | 13520 | 141 |
| CAG promoter | 13523 | 1715 | 13523 | 1715 | 13523 | 1715 | 13523 | 1715 | 13523 | 1715 |
| CMVie | 13524 | 299 | 13524 | 299 | 13524 | 299 | 13524 | 299 | 13524 | 299 |
| CBA min. | 13525 | 283 | 13525 | 283 | 13525 | 283 | 13525 | 283 | 13525 | 283 |
| Signal | 13568 | 57 | 13555 | 84 | 13555 | 84 | 13568 | 57 | 13568 | 57 |
| Variable | — | — | — | — | — | — | — | — | — | — |
| and/or | | | | | | | | | | |
| Constant | | | | | | | | | | |
| Linker | 1730 | 45 | 1730 | 45 | 1730 | 45 | 1730 | 45 | 1730 | 45 |
| Variable | — | — | — | — | — | — | — | — | — | — |
| and/or | | | | | | | | | | |
| Constant | | | | | | | | | | |
| Tag | 13571 | 27 | 13572 | 21 | 13574 | 18 | 13571 | 27 | 13574 | 18 |
| PolyA | 13576 | 127 | 13577 | 477 | 13577 | 477 | 13577 | 477 | 13577 | 477 |
| Filler | 13579 | 1153 | 13580 | 1240 | 13580 | 1240 | 13580 | 1240 | 13580 | 1240 |
| 3′ ITR | 13522 | 141 | 13522 | 141 | 13522 | 141 | 13522 | 141 | 13522 | 141 |

[1325] In some embodiments, the AAV particle genome is VGC37 and comprises a 5′ inverted terminal repeat (ITR) sequence region and a 3′ITR sequence region, a CAG promoter comprising a CMVie region and a minimal CBA promoter region, an antibody heavy chain signal sequence, an antibody heavy chain variable region, a (G4S)3 linker (“˜(M)3” disclosed as SEQ ID NO: 13143), an antibody light chain variable region, an HA tag, a polyadenylation signal sequence and a filler sequence.

[1326] In some embodiments, the AAV particle genome is VGC38 and comprises a 5′ inverted terminal repeat (ITR) sequence region and a 3′ITR sequence region, a CAG promoter comprising a CMVie region and a minimal CBA promoter region, a human growth hormone-2 signal sequence, an antibody heavy chain variable region, a (G4)3 linker (“(G4S)3” disclosed as SEQ ID NO: 13143), an antibody light chain variable region, an SEKDEL tag (“SEKDEL” disclosed as SEQ ID NO: 13164), a polyadenylation signal sequence and a filler sequence.

[1327] In some embodiments, the AAV particle genome is VGC39 and comprises a 5′ inverted terminal repeat (ITR) sequence region and a 3′ ITR sequence region, a CAG promoter comprising a CMVie region and a minimal CBA promoter region, a human growth hormone-2 signal sequence, an antibody heavy chain variable region, a (G4S)3 linker (“(G4S)3” disclosed as SEQ ID NO: 13143), an antibody light chain variable region, a His tag, a polyadenylation signal sequence and a filler sequence.

[1328] In some embodiments, the AAV particle genome is VGC40 and comprises a 5′ Inverted terminal repeat (ITR) sequence region and a 3′ ITR sequence region, a CAG promoter comprising a CMVie region and a minimal CBA promoter region, an antibody heavy chain signal sequence, an antibody heavy chain variable region, a (G4S)3 linker (“(G4S)3” disclosed as SEQ ID NO: 13143), an antibody light chain variable region, an HA tag, polyadenylation signal sequence and a filler sequence.

[1329] In some embodiments, the AAV particle genome is VGC41 and comprises a 5′ inverted terminal repeat (ITR) sequence region and a 3′ITR sequence region, a CAG promoter comprising CMVie region and minimal promoter region, an antibody heavy chain signal sequence, an antibody heavy chain variable region, a (G4S)3 linker (“(M4)3” disclosed as SEQ ID NO: 13143), an antibody light chain variable region, a His tag, a polyadenylation signal sequence and a filler sequence.

TABLE 36
Viral Genome Cassettes Sequence Regions

| | VGC42 | | VGC43 | | VGC44 | | VGC45 | | VGC46 | |
|---|---|---|---|---|---|---|---|---|---|---|
| Sequence | Region | Region | Region | Region | Region | Region | Region | Region | Region | Region |
| Regions | SEQ ID NO | length | SEQ ID NO | length | SEQ ID NO | length | SEQ ID NO | length | SEQ ID NO | length |
| 5′ ITR | 13520 | 141 | 13520 | 141 | 13520 | 141 | 13520 | 141 | 13520 | 141 |
| CAG promoter | 13523 | 1715 | 13523 | 1715 | 13523 | 1715 | 13523 | 1715 | 13523 | 1715 |
| CMVie | 13524 | 299 | 13524 | 299 | 13524 | 299 | 13524 | 299 | 13524 | 299 |
| CBA min. | 13525 | 283 | 13525 | 283 | 13525 | 283 | 13525 | 283 | 13525 | 283 |
| Signal | 2016 | 84 | 13555 | 84 | 1862 | 57 | 1862 | 57 | 1862 | 57 |
| Variable | — | — | — | — | — | — | — | — | — | — |
| and/or | | | | | | | | | | |
| Constant | | | | | | | | | | |
| Linker | 1730 | 45 | 1730 | 45 | 1730 | 45 | 1730 | 45 | 1730 | 45 |
| Variable | — | — | — | — | — | — | — | — | — | — |
| and/or | | | | | | | | | | |
| Constant | | | | | | | | | | |
| Tag | 13573 | 18 | 13574 | 18 | 13571 | 27 | 13574 | 18 | 13571 | 27 |
| PolyA | 13577 | 447 | 13577 | 477 | 13577 | 477 | 13577 | 477 | 13576 | 127 |
| Filler | 13580 | 1240 | 13580 | 1240 | 13580 | 1240 | 13580 | 1240 | 13579 | 1153 |
| 3′ ITR | 13522 | 141 | 13522 | 141 | 13522 | 141 | 13522 | 141 | 13522 | 141 |

[1330] In some embodiments, the AAV particle genome is VGC42 and comprises a 5′ inverted terminal repeat (ITR) sequence region and a 3′ITR sequence region, a CAG promoter comprising a CMVie region and a minimal CBA promoter region, a human growth hormone-2 signal sequence, an antibody light chain variable region, a (G4S)3 linker (“(M4)3” disclosed as SEQ ID NO: 1131143), an antibody heavy chain variable region, a SEKDEL tag (“SEKDEL” disclosed as SEQ ID NO: 13164), a polyadenylation signal sequence and filler sequence.

[1331] In some embodiments, the AAV particle genome is VGC43 and comprises a 5′ inverted terminal repeat (ITR) sequence region and a 3′ITR sequence region, a CAG promoter comprising a CMVie region and a minimal CBA promoter region, a human growth hormone-2 signal sequence, an antibody light chain variable region, a (G4S)3 linker (“(G4S)3” disclosed as SEQ ID NO: 13143), an antibody heavy chain variable region, a His tag, a polyadenylation signal sequence and a filler sequence.

[1332] In some embodiments, the AAV particle genome is VGC44 and comprises a 5′ inverted terminal repeat (ITR) sequence region and a 3′ITR sequence region, a CAG promoter comprising a CMVie region and a minimal CBA promoter region, an antibody light chain signal sequence, an antibody light chain variable region, a (G4S)3 linker (“(G4S)3” disclosed as SEQ ID NO: 13143), an antibody heavy chain variable region, an His tag, a polyadenylation signal sequence and a filler sequence.

[1333] In some embodiments, the AAV particle genome is VGC45 and comprises a 5′ inverted terminal repeat (ITR) sequence region and a 3′ ITR sequence region, a CAG promoter comprising a CMVie region and a minimal CBA promoter region, an antibody light chain signal sequence, an antibody light chain variable region, a (G4S)3 linker (“(G4S)3” disclosed as SEQ ID NO: 13143), an antibody heavy chain variable region, a His tag, a polyadenylation signal sequence and a filler sequence.

[1334] In some embodiments, the AAV particle genome is VGC4 and comprises a 5′ inverted terminal repeat (ITR) sequence region and a 3′ITR sequence region, a CAG promoter comprising a CMVie region and a minimal CBA promoter region, an antibody light chain signal sequence, an antibody light chain variable region, a (G4S)3 linker (“(M4)3” disclosed as SEQ ID NO: 13143), an antibody heavy chain variable region, an HA tag, a polyadenylation signal sequence and filler sequence.

TABLE 37
Viral Genome Cassettes Sequence Regions

| | VGC47 | | VGC48 | | VGC49 | | VGC56 | | VGC51 | |
|---|---|---|---|---|---|---|---|---|---|---|
| Sequence | Region | Region | Region | Region | Region | Region | Region | Region | Region | Region |
| Regions | SEQ ID NO | length | SEQ ID NO | length | SEQ ID NO | length | SEQ ID NO | length | SEQ ID NO | length |
| 5′ ITR | 13520 | 141 | 13520 | 141 | 13520 | 141 | 13520 | 141 | 13520 | 141 |
| CBA promoter | 13527 | 654 | 13527 | 654 | 13527 | 654 | 13527 | 654 | 13527 | 654 |
| Exon | 13535 | 134 | 13537 | 59 | 13536 | 102 | 13535 | 134 | 13535 | 134 |
| Intron | 13540 | 32 | 13540 | 32 | 13541 | 15 | 13541 | 15 | 13540 | 32 |
| Intron | 13544 | 73 | 13543 | 168 | 2102 | 53 | 2102 | 53 | 13545 | 73 |
| Exon | 13538 | 53 | 13538 | 53 | 13538 | 53 | 13538 | 53 | 13538 | 53 |
| Signal | 13568 | 57 | 13568 | 57 | 13568 | 57 | 13568 | 57 | 13568 | 57 |
| Variable | — | — | — | — | — | — | — | — | — | — |
| and/or | | | | | | | | | | |
| Constant | | | | | | | | | | |
| Linker | 1730 | 45 | 1730 | 45 | 1730 | 45 | 1730 | 45 | 1730 | 45 |
| Variable | — | — | — | — | — | — | — | — | — | — |
| and/or | | | | | | | | | | |
| Constant | | | | | | | | | | |
| Tag | 13571 | 27 | 13571 | 27 | 13571 | 27 | 13571 | 27 | 13571 | 27 |
| PolyA | 13576 | 127 | 13576 | 127 | 13576 | 127 | 13576 | 127 | 13576 | 127 |
| 3′ ITR | 13522 | 141 | 13522 | 141 | 13522 | 141 | 13522 | 141 | 13522 | 141 |

[1335] In some embodiments, the AAV particle genome is VGC47 and comprises a 5′ inverted terminal repeat (ITR) sequence region and a 3′ITR sequence region, a CBA promoter, an ie1 exon 1 region, an ie1 intron 1 region, a human beta-globin intron region, a human beta-globin exon region, an antibody heavy chain signal sequence, an antibody heavy chain variable region, a (G4S)3 linker (“(G4S)3” disclosed as SEQ ID NO: 13143), an antibody light chain variable region, an HA tag, and a polyadenylation signal sequence.

[1336] In some embodiments, the AAV particle genome is VGC48 and comprises a 5′ inverted terminal repeat (ITR) sequence region and a 3′ ITR sequence region, a CBA promoter, an ie1 exon 1 region, an ie1 intron 1 region, a human beta-globin intron region, a human beta-globin exon region, an antibody heavy chain signal sequence, an antibody heavy chain variable region, a (G48)3 linker (“(G4S)3” disclosed as SEQ ID NO: 13143), an antibody light chain variable region, an HA tag, and a polyadenylation signal sequence.

[1337] In some embodiments, the AAV particle genome is VGC49 and comprises a 5′ inverted terminal repeat (ITR) sequence region and a 3′ ITR sequence region, a CBA promoter, an ie1 exon 1 region, an ie1 intron 1 region, a human beta-globin intron region, a human beta-globin exon region, an antibody heavy chain signal sequence, an antibody heavy chain variable region, a (G4S)3 linker (“(G4)3” disclosed as SEQ ID NO: 13143), an antibody light chain variable region, an HA tag, and a polyadenylation signal sequence.

[1338] In some embodiments, the AAV particle genome is VGC50 and comprises a 5′ inverted terminal repeat (ITR) sequence region and a 3′ ITR sequence region, a CBA promoter, an ie1 exon 1 region, an ie1 intron 1 region, a human beta-globin intron region, a human beta-globin exon region, an antibody heavy chain signal sequence, an antibody heavy chain variable region, a (G4)3 linker (“(G4S)3” disclosed as SEQ ID NO: 13143), an antibody light chain variable region, an HA tag, and a polyadenylation signal sequence.

[1339] In some embodiments, the AAV particle genome is VGC51 and comprises a 5′ inverted terminal repeat (ITR) sequence region and a 3′ ITR sequence region, a CBA promoter, an ie1 exon 1 region, an ie1 intron 1 region, a human beta-globin intron region, a human beta-globin exon region, an antibody heavy chain signal sequence, an antibody heavy chain variable region, a (G4S)3 linker (“(G4S)3” disclosed as SEQ ID NO: 13143), an antibody light chain variable region, an HA tag, and a polyadenylation signal sequence.

TABLE 38
Viral Genome Cassettes Sequence Regions

| | VGC52 | | VGC53 | | VGC54 | | VGC55 | | VGC56 | |
|---|---|---|---|---|---|---|---|---|---|---|
| Sequence | Region | Region | Region | Region | Region | Region | Region | Region | Region | Region |
| Regions | SEQ ID NO | length | SEQ ID NO | length | SEQ ID NO | length | SEQ ID NO | length | SEQ ID NO | length |
| 5′ ITR | 13520 | 141 | 13520 | 141 | 13520 | 141 | 13520 | 141 | 13520 | 141 |
| CBA promoter | 13527 | 654 | 13527 | 654 | 13527 | 654 | 13527 | 654 | 13527 | 654 |
| Exon | 13537 | 59 | 13535 | 134 | 13535 | 134 | — | — | — | — |
| Intron | 13540 | 32 | 13540 | 32 | 13540 | 32 | — | — | 2103 | 172 |
| Intron | 13543 | 168 | 13542 | 347 | 13542 | 347 | — | — | — | — |
| Exon | 13538 | 53 | 13538 | 53 | 13538 | 53 | — | — | — | — |
| Signal | 1862 | 57 | 1862 | 57 | 1862 | 57 | 1862 | 57 | 1862 | 57 |
| Variable | — | — | — | — | — | — | — | — | — | — |
| and/or | | | | | | | | | | |
| Constant | | | | | | | | | | |
| Linker | 1730 | 45 | 1730 | 45 | 1730 | 45 | 1730 | 45 | 1730 | 45 |
| Variable | — | — | — | — | — | — | — | — | — | — |
| and/or | | | | | | | | | | |
| Constant | | | | | | | | | | |
| Tag | 13571 | 27 | 13571 | 27 | 13571 | 27 | 13571 | 27 | 13571 | 27 |
| PolyA | 13576 | 127 | 13576 | 127 | 13576 | 127 | 13576 | 127 | 13576 | 127 |
| Filler | — | — | — | — | 13579 | 1153 | — | — | — | — |
| 3′ ITR | 13522 | 141 | 13522 | 141 | 13522 | 141 | 13522 | 141 | 13522 | 141 |

[1340] In some embodiments, the AAV particle genome is VGC52 and comprises a 5′ inverted terminal repeat (ITR) sequence region and a 3′ ITR sequence region, a CBA promoter, an ie1 exon 1 region, an ie1 intron 1 region, a human beta-globin intron region, a human beta-globin exon region, an antibody light chain signal sequence, an antibody light chain variable region, a (G4S)3 linker (“(G4)3” disclosed as SEQ ID NO: 13143), an antibody heavy chain variable region, an HA tag, and a polyadenylation signal sequence.

[1341] In some embodiments, the AAV particle genome is VGC53 and comprises a 5′ inverted terminal repeat (ITR) sequence region and a 3′ ITR sequence region, a CBA promoter, an ie1 exon 1 region, an ie1 intron 1 region, a human beta-globin intron region, a human beta-globin exon region, an antibody light chain signal sequence, an antibody light chain variable region, a (G4S)3 linker (“(G4)3” disclosed as SEQ ID NO: 13143), an antibody heavy chain variable region, an HA tag, and a polyadenylation signal sequence.

[1342] In some embodiments, the AAV particle genome is VGC54 and comprises a 5′ inverted terminal repeat (ITR) sequence region and a 3′ ITR sequence region, a CBA promoter, an ie1 exon 1 region, an ie1 intron 1 region, a human beta-globin intron region, a human beta-globin exon region, an antibody light chain signal sequence, an antibody light chain variable region, a (G4S)3 linker (“(G4S)3” disclosed as SEQ ID NO: 13143), an antibody heavy chain variable region, an HA tag, a polyadenylation signal sequence and a filler sequence.

[1343] In some embodiments, the AAV particle genome is VGC55 and comprises a 5′ inverted terminal repeat (ITR) sequence region and a 3′ ITR sequence region, a CBA promoter, an antibody light chain signal sequence, an antibody light chain variable region, a (G4S)3 linker (“(G4S)3” disclosed as SEQ ID NO: 13143), an antibody heavy chain variable region, an HA tag, and a polyadenylation signal sequence.

[1344] In some embodiments, the AAV particle genome is VGC56 and comprises a 5′ inverted terminal repeat (ITR) sequence region and a 3′ ITR sequence region, a CBA promoter, an SV40 intron, an antibody light chain signal sequence, an antibody light chain variable region, a (G4S)3 linker (“(G4S)3” disclosed as SEQ ID NO: 13143), an antibody heavy chain variable region, an HA tag, and a polyadenylation signal sequence.

TABLE 39
Viral Genome Cassettes Sequence Regions

| | VGC57 | | VGC58 | | VGC59 | | VGC60 | | VGC61 | |
|---|---|---|---|---|---|---|---|---|---|---|
| Sequence | Region | Region | Region | Region | Region | Region | Region | Region | Region | Region |
| Regions | SEQ ID NO | length | SEQ ID NO | length | SEQ ID NO | length | SEQ ID NO | length | SEQ ID NO | length |
| 5′ ITR | 13520 | 141 | 13520 | 141 | 13520 | 141 | 13520 | 141 | 13520 | 141 |
| CBA promoter | 13527 | 654 | 13527 | 654 | 13527 | 654 | 13527 | 654 | 13527 | 654 |
| Exon | 13535 | 134 | 13535 | 134 | 13535 | 134 | — | — | — | — |
| Intron | 13540 | 32 | 13540 | 32 | 13540 | 32 | — | — | 2103 | 172 |
| Intron | 13542 | 347 | 13542 | 347 | 2101 | 73 | — | — | — | — |
| Exon | 13538 | 53 | 13538 | 53 | 13538 | 53 | — | — | — | — |
| Signal | 13568 | 57 | 13568 | 57 | 13568 | 57 | 13568 | 57 | 13568 | 57 |
| Variable | — | — | — | — | — | — | — | — | — | — |
| and/or | | | | | | | | | | |
| Constant | | | | | | | | | | |
| Linker | 1730 | 45 | 1730 | 45 | 1730 | 45 | 1736 | 45 | 1730 | 45 |
| Variable | — | — | — | — | — | — | — | — | — | — |
| and/or | | | | | | | | | | |
| Constant | | | | | | | | | | |
| Tag | 13571 | 27 | 13571 | 27 | 13571 | 27 | 13571 | 27 | 13571 | 27 |
| PolyA | 13576 | 127 | 13576 | 127 | 13576 | 127 | 13576 | 127 | 13576 | 127 |
| Filler | 13579 | 1153 | — | — | — | — | — | — | — | — |
| 3′ ITR | 13522 | 141 | 13522 | 141 | 13522 | 141 | 13522 | 141 | 13522 | 141 |

[1345] In some embodiments, the AAV particle genome is an comprises a inverted terminal repeat sequence region and a 3′ITR sequence region, a CBA promoter, an ie1 exon 1 region, an ie1 intron 1 region, a human beta-globin intron region, a human beta-globin exon region, an antibody heavy chain signal sequence, an antibody heavy chain variable region, a (G4S)3 linker (“(G4S)3” disclosed as SEQ ID NO: 13143), an antibody light chain variable region, an HA tag, a polyadenylation signal sequence and a filler sequence.

[1346] In some embodiments, the AAV particle genome is VGC58 and comprises a 5′ inverted terminal repeat (ITR) sequence region and a 3′ ITR sequence region, a CBA promoter, an ie1 exon 1 region, an ie1 intron 1 region, a human beta-globin intron region, a human beta-globin exon region, an antibody heavy chain signal sequence, an antibody heavy chain variable region, a (G4S)3 linker (“(G48)3” disclosed as SEQ ID NO: 13143), an antibody light chain variable region, an HA tag, and a polyadenylation signal sequence.

[1347] In some embodiments, the AAV particle genome is VGC59 and comprises a 5′ inverted terminal repeat (ITR) sequence region and a 3′ ITR sequence region, a CBA promoter, an ie1 exon 1 region, an ie1 intron 1 region, a human beta-globin intron region, a human beta-globin exon region, an antibody heavy chain signal sequence, an antibody heavy chain variable region, a (G4S)3 linker (“(G4)3” disclosed as SEQ ID NO: 13143), an antibody light chain variable region, an HA tag, and a polyadenylation signal sequence.

[1348] In some embodiments, the AAV particle genome is VGC60 and comprises a 5′ inverted terminal repeat (ITR) sequence region and a 3′ ITR sequence region, a CBA promoter, an antibody heavy chain signal sequence, an antibody heavy chain variable region, a (G4S)3 linker (“(G4)3” disclosed as SEQ ID NO: 13143), an antibody light chain variable region, an HA tag, and a polyadenylation signal sequence.

[1349] In some embodiments, the AAV particle genome is VGC61 and comprises a 5′ inverted terminal repeat (ITR) sequence region and a 3′ ITR sequence region, a CBA promoter, an SV40 intron, an antibody heavy chain signal sequence, an antibody heavy chain variable region, a (G4S)3 linker (“(G4S)3” disclosed as SEQ ID NO: 13143), an antibody light chain variable region, an HA tag, and a polyadenylation signal sequence.

TABLE 40
Viral Genome Cassettes Sequence Regions

| | VGC62 | | VGC63 | | VGC64 | | VGC65 | | VGC66 | |
|---|---|---|---|---|---|---|---|---|---|---|
| Sequence | Region | Region | Region | Region | Region | Region | Region | Region | Region | Region |
| Regions | SEQ ID NO | length | SEQ ID NO | length | SEQ ID NO | length | SEQ ID NO | length | SEQ ID NO | length |
| 5′ ITR | 13519 | 130 | 13519 | 130 | 13519 | 130 | 13519 | 130 | 13519 | 130 |
| CMVie | 13530 | 382 | 13530 | 382 | 13530 | 382 | 13530 | 382 | 13530 | 382 |
| Promoter | 13526 | 260 | 13526 | 260 | 13526 | 260 | 13526 | 260 | 13526 | 260 |
| Intron | 2103 | 172 | 2103 | 172 | 2103 | 172 | 2103 | 172 | 2103 | 172 |
| Variable | — | — | — | — | — | — | — | — | — | — |
| and/or | | | | | | | | | | |
| Constant | | | | | | | | | | |
| Linker | 1725 | 12 | 1725 | 12 | — | — | — | — | — | — |
| Linker | 1727 | 75 | 1728 | 66 | 1727 | 75 | 1732 | 609 | 1728 | 66 |
| Variable | — | — | — | — | — | — | — | — | — | — |
| and/or | | | | | | | | | | |
| Constant | | | | | | | | | | |
| PolyA | 13576 | 127 | 13576 | 127 | 13576 | 127 | 13576 | 127 | 13576 | 127 |
| 3′ ITR | 13521 | 130 | 13521 | 130 | 13521 | 130 | 13521 | 130 | 13521 | 130 |

[1350] In some embodiments, the AAV particle genome is VGC62 and comprises a 5′ inverted terminal repeat (ITR) sequence region and a 3′ ITR sequence region, a CMVie region, a CB promoter, an SV40 intron, an antibody heavy chain variable region, a furin cleavage site, an F2A linker, an antibody light chain variable region, and a polyadenylation signal sequence.

[1351] In some embodiments, the AAV particle genome is VGC63 and comprises a 5′ inverted terminal repeat (ITR) sequence region and a 3′ ITR sequence region, a CMVie region, a CB promoter, an SV40 intron, an antibody heavy chain variable region, a furin cleavage site, a P2A linker, an antibody light chain variable region, and a polyadenylation signal sequence.

[1352] In some embodiments, the AAV particle genome is VGC64 and comprises a 5′ inverted terminal repeat (ITR) sequence region and a 3′ ITR sequence region, a CMVie region, a CB promoter, an SV40 intron, an antibody heavy chain variable region, an F2A linker, an antibody light chain variable region, and a polyadenylation signal sequence.

[1353] In some embodiments, the AAV particle genome is VGC65 and comprises a 5′ inverted terminal repeat (ITR) sequence region and a 3′ ITR sequence region, a CMVie region, a CB promoter, an SV40 intron, an antibody heavy chain variable region, an IRES linker, an antibody light chain variable region, and a polyadenylation signal sequence.

[1354] In some embodiments, the AAV particle genome is VGC66 and comprises a 5′ inverted terminal repeat (ITR) sequence region and a 3′ ITR sequence region, a CMVie region, a CB promoter, an SV40 intron, an antibody heavy chain variable region, a P2A linker, an antibody light chain variable region, and a polyadenylation signal sequence.

TABLE 41
Viral Genome Cassettes Sequence Regions

| | VGC67 | | VGC68 | |
|---|---|---|---|---|
| | Region SEQ | Region SEQ | Region | Region |
| Sequence Regions | ID NO | ID NO | length | length |
| 5′ ITR | 13519 | 130 | 13519 | 130 |
| CMVie | 13530 | 382 | 13530 | 382 |
| Promoter | 13526 | 260 | 13526 | 260 |
| Intron | 2103 | 172 | 2103 | 172 |
| Variable and/or Constant | — | — | — | — |
| Linker | 1725 | 12 | 1725 | 12 |
| Linker | 1727 | 75 | 1727 | 75 |
| Variable and/or Constant | — | — | — | — |
| PolyA | 13576 | 127 | 13576 | 127 |
| 3′ ITR | 13521 | 130 | 13521 | 130 |

[1355] In some embodiments, the MV particle genome is VGC67 and comprises a 5′ inverted terminal repeat (ITR) sequence region and a 3′ITR sequence region, a CMVie region, a CB promoter, an SV40 intron an antibody heavy chain variable region, a furin cleavage site, an F2A linker, an antibody light chain variable region, and polyadenylation signal sequence.

[1356] In some embodiments, the AAV particle genome is VGC68 and comprises a 5′ inverted terminal repeat (ITR) sequence region and a 3′ ITR sequence region, a CMVie region, a CB promoter, an SV40 intron, an antibody heavy chain variable region, a furin cleavage site, an F2A linker, an antibody light chain variable region, and a polyadenylation signal sequence.

TABLE 42
Viral Genome Cassettes Sequence Regions

| | VGC69 | | VGC70 | | VGC71 | | VGC72 | | VGC73 | |
|---|---|---|---|---|---|---|---|---|---|---|
| Sequence | Region | Region | Region | Region | Region | Region | Region | Region | Region | Region |
| Regions | SEQ ID NO | length | SEQ ID NO | length | SEQ ID NO | length | SEQ ID NO | length | SEQ ID NO | length |
| 5′ ITR | 13519 | 130 | 13519 | 130 | 13519 | 130 | 13519 | 130 | 13519 | 130 |
| CMVie | 13530 | 382 | 13530 | 382 | 13530 | 382 | 13530 | 382 | 13530 | 382 |
| Promoter | 13526 | 260 | 13526 | 260 | 13526 | 260 | 13526 | 260 | 13526 | 260 |
| SV40 | 2103 | 172 | 2103 | 172 | 2103 | 172 | 2103 | 172 | 2103 | 172 |
| Variable | — | — | — | — | — | — | — | — | — | — |
| and/or | | | | | | | | | | |
| Constant | | | | | | | | | | |
| Linker | 1725 | 12 | — | — | — | — | — | — | — | — |
| Linker | 1727 | 75 | 1727 | 75 | 1732 | 609 | 1724 | 75 | 1728 | 66 |
| Variable | — | — | — | — | — | — | — | — | — | — |
| and/or | | | | | | | | | | |
| Constant | | | | | | | | | | |
| PolyA | 13576 | 127 | 13576 | 127 | 13576 | 127 | 13576 | 127 | 13576 | 127 |
| 3′ ITR | 13521 | 130 | 13521 | 130 | 13521 | 130 | 13521 | 130 | 13521 | 130 |

[1357] In some embodiments, the AAV particle genome is VGC69 and comprises a 5′ inverted terminal repeat (ITR) sequence region and a 3′ ITR sequence region, a CMVie region, a CB promoter, an SV40 intron, an antibody light chain variable region, a furin cleavage site, an F2A linker, an antibody heavy chain variable region, and a polyadenylation signal sequence.

[1358] In some embodiments, the AAV particle genome is VGC70 and comprises a 5′ inverted terminal repeat (ITR) sequence region and a 3′ ITR sequence region, a CMVie region, a CB promoter, an 5V40 intron, an antibody light chain variable region, an F2A linker, an antibody heavy chain variable region, and a polyadenylation signal sequence.

[1359] In some embodiments, the AAV particle genome is VGC71 and comprises a 5′ inverted terminal repeat (ITR) sequence region and a 3′ITR sequence region, a CMVie region, a CB promoter, an SV40 intron, an antibody light chain variable region, an IRES linker, an antibody heavy chain variable region, and a polyadenylation signal sequence.

[1360] In some embodiments, the AAV particle genome is VGC72 and comprises a 5′ inverted terminal repeat (ITR) sequence region and a 3′ ITR sequence region, a CMVie region, a CB promoter, an SV40 intron, an antibody light chain variable region, a (G4S)5 linker (“(G4S)5” disclosed as SEQ ID NO: 13144), an antibody heavy chain variable region, and a polyadenylation signal sequence.

[1361] In some embodiments, the AAV particle genome is VGC73 and comprises a 5′ inverted terminal repeat (ITR) sequence region and a 3′ITR sequence region, a CMVie region, a CB promoter, an SV40 intron, an antibody light chain variable region, an P2A linker, an antibody heavy chain variable region, and a polyadenylation signal sequence.

TABLE 43
Viral Genome Cassettes Sequence Regions

| | VGC74 | | VGC75 | | VGC76 | |
|---|---|---|---|---|---|---|
| Sequence | Region | Region | Region | Region | Region | Region |
| Regions | SEQ ID NO | length | SEQ ID NO | length | SEQ ID NO | length |
| 5′ ITR | 13519 | 130 | 13519 | 130 | 13519 | 130 |
| CMVie | 13530 | 382 | 13530 | 382 | 13530 | 382 |
| Promoter | 13526 | 260 | 13526 | 260 | 13526 | 260 |
| Intron | 2103 | 172 | 2103 | 172 | 2103 | 172 |
| Variable | — | — | — | — | — | — |
| and/or | | | | | | |
| Constant | | | | | | |
| Linker | 1725 | 12 | — | — | — | — |
| Linker | 1728 | 66 | 1727 | 75 | 1727 | 75 |
| Variable | — | — | — | — | — | — |
| and/or | | | | | | |
| Constant | | | | | | |
| PolyA | 13576 | 127 | 13576 | 127 | 13576 | 127 |
| 3′ ITR | 13521 | 130 | 13521 | 130 | 13521 | 130 |

[1362] In some embodiments, the AAV particle genome is VGC74 and comprises a 5′ inverted terminal repeat (ITR) sequence region and a 3′ ITR sequence region, a CMVie region, a CB promoter, an SV40 intron, an antibody light chain variable region, a furin cleavage site, a P2A linker, an antibody heavy chain variable region, and a polyadenylation signal sequence.

[1363] In some embodiments, the AAV particle genome is VGC75 and comprises a 5′ inverted terminal repeat (ITR) sequence region and a 3′ ITR sequence region, a CMVie region, a CB promoter, an SV40 intron, an antibody light chain variable region, an F2A linker, an antibody heavy chain variable region, and a polyadenylation signal sequence.

[1364] In some embodiments, the AAV particle genome is VGC76 and comprises a 5′ inverted terminal repeat (ITR) sequence region and a 3′ ITR sequence region, a CMVie region, a CB promoter, an SV40 intron, an antibody light chain variable region, an F2A linker, an antibody heavy chain variable region, and a polyadenylation signal sequence.

TABLE 44
Viral Genome Cassettes Sequence Regions

| | VGC77 | | VGC78 | | VGC79 | | VGC80 | |
|---|---|---|---|---|---|---|---|---|
| Sequence | Region | Region | Region | Region | Region | Region | Region | Region |
| Regions | SEQ ID NO | length | SEQ ID NO | length | SEQ ID NO | length | SEQ ID NO | length |
| 5′ ITR | 13519 | 130 | 13519 | 130 | 13519 | 130 | 13519 | 130 |
| CAG promoter | 13523 | 1715 | 13523 | 1715 | 13523 | 1715 | 13523 | 1715 |
| CMVie | 13524 | 299 | 13524 | 299 | 13524 | 299 | 13524 | 299 |
| CBA min. | 13525 | 283 | 13525 | 283 | 13525 | 283 | 13525 | 283 |
| Signal | 13567 | 57 | 13567 | 57 | 13567 | 57 | 13567 | 57 |
| Variable | — | — | — | — | — | — | — | — |
| and/or | | | | | | | | |
| Constant | | | | | | | | |
| Linker | 1725 | 12 | 1724 | 12 | 1724 | 12 | 1724 | 12 |
| Linker | 1727 | 75 | 1726 | 54 | 1726 | 54 | 1726 | 54 |
| Signal | 13569 | 57 | 13569 | 57 | 13569 | 57 | 13569 | 57 |
| Variable | — | — | — | — | — | — | — | — |
| and/or | | | | | | | | |
| Constant | | | | | | | | |
| PolyA | 13576 | 127 | 13576 | 127 | 13576 | 127 | 13576 | 127 |
| 3′ ITR | 13521 | 130 | 13521 | 130 | 13521 | 130 | 13521 | 130 |

[1365] In some embodiments, the AAV particle genome is VGC77 and comprises a 5′ inverted terminal repeat (ITR) sequence region and a 3′ ITR sequence region, a CAG promoter comprising a CMVie region and a minimal CBA promoter region, a heavy chain signal sequence, an antibody heavy chain variable region, a heavy chain constant region, a furin cleavage site, a F2A linker, alight chain signal sequence, an antibody light chain variable region, alight chain constant region, and a polyadenylation signal sequence.

[1366] In some embodiments, the AAV particle genome is VGC78 and comprises a 5′ inverted terminal repeat (ITR) sequence region and a 3′ ITR sequence region, a CAG promoter comprising a CMVie region and a minimal CBA promoter region, a heavy chain signal sequence, an antibody heavy chain variable region, a heavy chain constant region, a furin cleavage site, a T2A linker, alight chain signal sequence, an antibody light chain variable region, alight chain constant region, and a polyadenylation signal sequence.

[1367] In some embodiments, the AAV particle genome is VGC79 and comprises a 5′ inverted terminal repeat (ITR) sequence region and a 3′ ITR sequence region, a CAG promoter comprising a CMVie region and a minimal CBA promoter region, a heavy chain signal sequence, an antibody heavy chain variable region, a heavy chain constant region, a furin cleavage site, a T2A linker, alight chain signal sequence, an antibody light chain variable region, alight chain constant region, and a polyadenylation signal sequence.

[1368] In some embodiments, the AAV particle genome is VGC80 and comprises a 5′ inverted terminal repeat (ITR) sequence region and a 3′ITR sequence region, a CAG promoter comprising a CMVie region and a minimal CBA promoter region, a heavy chain signal sequence, an antibody heavy chain variable region, a heavy chain constant region, a furin cleavage site, a T2A linker, alight chain signal sequence, an antibody light chain variable region, alight chain constant region, and a polyadenylation signal sequence.

TABLE 45
Viral Genome Cassettes Sequence Regions

| | VGC81 | | VGC82 | |
|---|---|---|---|---|
| | Region SEQ | Region | Region SEQ | Region |
| Sequence Regions | ID NO | length | ID NO | length |
| 5′ ITR | 13519 | 130 | 13519 | 130 |
| CAG promoter | 13523 | 1715 | 13523 | 1715 |
| CMVie | 13524 | 299 | 13524 | 299 |
| CBA min. | 13525 | 283 | 13525 | 283 |
| Signal | 13567 | 57 | 13567 | 57 |
| Variable and/or Constant | — | — | — | — |
| Linker | 13151 | 198 | 13151 | 198 |
| Linker | 1724 | 12 | 1724 | 12 |
| Linker | 1726 | 54 | 1726 | 54 |
| Signal | 13569 | 57 | 13569 | 57 |
| Variable and/or Constant | — | — | — | — |
| PolyA | 13576 | 127 | 13576 | 127 |
| 3′ ITR | 13521 | 130 | 13521 | 130 |

[1369] In some embodiments, the AAV particle genome is VGC81 and comprises a 5′ inverted terminal repeat (ITR) sequence region and a 3′ITR sequence region, a CAG promoter comprising a CMVie region and a minimal CBA promoter region, a heavy chain signal sequence, an antibody heavy chain variable region, a heavy chain constant region, a hinge region, a furin cleavage site, a T2A linker, a light chain signal sequence, an antibody light chain variable region, a light chain constant region, and a polyadenylation signal sequence.

[1370] In some embodiments, the AAV particle genome is VGC82 and comprises a 5′ inverted terminal repeat (ITR) sequence region and a 3′ITR sequence region, a CAG promoter comprising a CMVie region and minimal CBA promoter region, heavy chain signal sequence, an antibody heavy chain variable region, a heavy chain constant region, a hinge region, a furin cleavage site, a T2A linker, a light chain signal sequence, an antibody light chain variable region, a light chain constant region, and a polyadenylation signal sequence.

TABLE 46
Viral Genome Cassettes Sequence Regions

| | VGC83 | | VGC84 | | VGC85 | | VGC86 | | VGC87 | |
|---|---|---|---|---|---|---|---|---|---|---|
| Sequence | Region | Region | Region | Region | Region | Region | Region | Region | Region | Region |
| Regions | SEQ ID NO | length | SEQ ID NO | length | SEQ ID NO | length | SEQ ID NO | length | SEQ ID NO | length |
| 5′ ITR | 13519 | 130 | 13519 | 130 | 13519 | 130 | 13519 | 130 | 13519 | 130 |
| CAG promoter | 13523 | 1715 | 13523 | 1715 | 13523 | 1715 | 13523 | 1715 | 13523 | 1715 |
| CMVie | 13524 | 299 | 13524 | 299 | 13524 | 299 | 13524 | 299 | 13524 | 299 |
| CBA min. | 13525 | 283 | 13525 | 283 | 13525 | 283 | 13525 | 283 | 13525 | 283 |
| Signal | 13569 | 57 | 13569 | 57 | 13569 | 57 | 13569 | 57 | 13569 | 57 |
| Variable | — | — | — | — | — | — | — | — | — | — |
| and/or | | | | | | | | | | |
| Constant | | | | | | | | | | |
| Linker | 13154 | 45 | 13157 | 75 | 13160 | 120 | 13152 | 15 | 13153 | 30 |
| Variable | — | — | — | — | — | — | — | — | — | — |
| and/or | | | | | | | | | | |
| Constant | | | | | | | | | | |
| Tag | 13571 | 27 | 13571 | 27 | 13571 | 27 | 13571 | 27 | 13571 | 27 |
| PolyA | 13576 | 127 | 13576 | 127 | 13576 | 127 | 13576 | 127 | 13576 | 127 |
| 3′ ITR | 13521 | 130 | 13521 | 130 | 13521 | 130 | 13521 | 130 | 13521 | 130 |

[1371] In some embodiments, the AAV particle genome is VGC83 and comprises a 5′ inverted terminal repeat (ITR) sequence region and a 3′ ITR sequence region, a CAG promoter comprising a CMVie region and a minimal CBA promoter region, a light chain signal sequence, an antibody light chain variable region, a (G4S)3 linker (“(G4S)3” disclosed as SEQ ID NO: 13143), an antibody heavy chain variable region, an HA tag, and a polyadenylation signal sequence.

[1372] In some embodiments, the AAV particle genome is VGC84 and comprises a 5′ inverted terminal repeat (ITR) sequence region and a 3′ ITR sequence region, a CAG promoter comprising a CMVie region and a minimal CBA promoter region, a light chain signal sequence, an antibody light chain variable region, a (G4S)3 linker (“(G4)3” disclosed as SEQ ID NO: 13143), an antibody heavy chain variable region, an HA tag, and a polyadenylation signal sequence.

[1373] In some embodiments, the AAV particle genome is VGC85 and comprises a 5′ inverted terminal repeat (ITR) sequence region and a 3′ ITR sequence region, a CAG promoter comprising a CMVie region and a minimal CBA promoter region, a light chain signal sequence, an antibody light chain variable region, a (G4S)8 linker (“(G4)8” disclosed as SEQ ID NO: 13148), an antibody heavy chain variable region, an HA tag, and a polyadenylation signal sequence.

[1374] In some embodiments, the AAV particle genome is VGC86 and comprises a 5′ inverted terminal repeat (ITR) sequence region and a 3′ ITR sequence region, a CAG promoter comprising a CMVie region and a minimal CBA promoter region, a light chain signal sequence, an antibody light chain variable region, a G4S linker (“G4S” disclosed as SEQ ID NO: 13141), an antibody heavy chain variable region, an HA tag, and a polyadenylation signal sequence.

[1375] In some embodiments, the AAV particle genome is VGC87 and comprises a 5′ inverted terminal repeat (ITR) sequence region and a 3′ ITR sequence region, a CAG promoter comprising a CMVie region and a minimal CBA promoter region, a light chain signal sequence, an antibody light chain variable region, a (G4S)2 linker (“(G4)2” disclosed as SEQ ID NO: 13145), an antibody heavy chain variable region, an HA tag, and a polyadenylation signal sequence.

TABLE 47
Viral Genome Cassettes Sequence Regions

| | VGC88 | | VGC89 | | VGC90 | | VGC91 | |
|---|---|---|---|---|---|---|---|---|
| | Region | | Region | | Region | | Region | |
| Sequence | SEQ ID | Region | SEQ ID | Region | SEQ ID | Region | SEQ ID | Region |
| Regions | NO | length | NO | length | NO | length | NO | length |
| 5′ ITR | 13519 | 130 | 13519 | 130 | 13519 | 130 | 13519 | 130 |
| CAG promoter | 13523 | 1715 | 13523 | 1715 | 13523 | 1715 | 13523 | 1715 |
| CMVie | 13524 | 299 | 13524 | 299 | 13524 | 299 | 13524 | 299 |
| CBA min. | 13525 | 283 | 13525 | 283 | 13525 | 283 | 13525 | 283 |
| Signal | 13569 | 57 | 13569 | 57 | 13569 | 57 | 13569 | 57 |
| Variable | — | — | — | — | — | — | — | — |
| and/or | | | | | | | | |
| Constant | | | | | | | | |
| Linker | 1727 | 75 | 1726 | 54 | 1726 | 54 | 1726 | 54 |
| Signal | 13567 | 57 | 13567 | 57 | 13567 | 57 | 13567 | 57 |
| Variable | — | — | — | — | — | — | — | — |
| and/or | | | | | | | | |
| Constant | | | | | | | | |
| PolyA | 13576 | 127 | 13576 | 127 | 13576 | 127 | 13576 | 127 |
| 3′ ITR | 13521 | 130 | 13521 | 130 | 13521 | 130 | 13521 | 130 |

[1376] In some embodiments, the AAV particle genome is VGC88 and comprises a 5′ inverted terminal repeat (ITR) sequence region and a 3′ ITR sequence region, a CAG promoter comprising CMV region and a minimal CBA promoter region, light chain signal sequence, an antibody light chain variable region, a light chain constant region a F2A linker a heavy chain signal sequence, an antibody heavy chain variable region, a heavy chain constant region and a polyadenylation signal sequence.

[1377] In some embodiments, the AAV particle genome is VGC89 and comprises a 5′ inverted terminal repeat (ITR) sequence region and a 3′ ITR sequence region, a CAG promoter comprising a CMVie region and a minimal CBA promoter region, a light chain signal sequence, an antibody light chain variable region, a light chain constant region, a T2A linker, a heavy chain signal sequence, an antibody heavy chain variable region, a heavy chain constant region, and a polyadenylation signal sequence.

[1378] In some embodiments, the AAV particle genome is VGC90 and comprises a 5′ inverted terminal repeat (ITR) sequence region and a 3′ ITR sequence region, a CAG promoter comprising a CMVie region and a minimal CBA promoter region, a light chain signal sequence, an antibody light chain variable region, alight chain constant region, a T2A linker, a heavy chain signal sequence, an antibody heavy chain variable region, a heavy chain constant region, and a polyadenylation signal sequence.

[1379] In some embodiments, the AAV particle genome is VGC91 and comprises a 5′ inverted terminal repeat (ITR) sequence region and a 3′ITR sequence region, a CAG promoter comprising a CMVie region and a minimal CBA promoter region, a light chain signal sequence, an antibody light chain variable region, alight chain constant region, a T2A linker, a heavy chain signal sequence, an antibody heavy chain variable region, a heavy chain constant region, and a polyadenylation signal sequence.

TABLE 48
Viral Genome Cassettes Sequence Regions

| | VGC92 | | VGC93 | | VGC94 | | VGC95 | | VGC96 | |
|---|---|---|---|---|---|---|---|---|---|---|
| | Region | | Region | | Region | | Region | | Region | |
| Sequence | SEQ ID | Region | SEQ ID | Region | SEQ ID | Region | SEQ ID | Region | SEQ ID | Region |
| Regions | NO | length | NO | length | NO | length | NO | length | NO | length |
| 5′ ITR | 13519 | 130 | 13519 | 136 | 13519 | 130 | 13519 | 130 | 13519 | 130 |
| Promoter | 13528 | 699 | 13528 | 699 | 13528 | 699 | 13528 | 699 | 13528 | 699 |
| Intron | 13551 | 566 | 13551 | 566 | 13551 | 566 | 13551 | 566 | 13551 | 566 |
| Signal | 13567 | 57 | 13567 | 57 | 13567 | 57 | 13567 | 57 | 13567 | 57 |
| Variable | — | — | — | — | — | — | — | — | — | — |
| and/or | | | | | | | | | | |
| Constant | | | | | | | | | | |
| Linker | 1725 | 12 | 1724 | 12 | 1724 | 12 | 1724 | 12 | 1724 | 12 |
| Linker | 1727 | 75 | 1726 | 54 | 1726 | 54 | 1726 | 54 | 1726 | 54 |
| Signal | 13569 | 57 | 13569 | 57 | 13569 | 57 | 13569 | 57 | 13569 | 57 |
| Variable | — | — | — | — | — | — | — | — | — | — |
| and/or | | | | | | | | | | |
| Constant | | | | | | | | | | |
| PolyA | 13576 | 127 | 13576 | 127 | 13576 | 127 | 13576 | 127 | 13576 | 127 |
| 3′ ITR | 13521 | 130 | 13521 | 130 | 13521 | 130 | 13521 | 130 | 13521 | 130 |

[1380] In some embodiments, the AAV particle genome is VGC92 and comprises a 5′ inverted terminal repeat (ITR) sequence region and a 3′ITR sequence region, a GFAP promoter, a human beta-globin intron region, a heavy chain signal sequence, an antibody heavy chain variable region, a heavy chain constant region, a furin cleavage site, a F2A linker, a light chain signal sequence, an antibody light chain variable region, alight chain constant region, and a polyadenylation signal sequence.

[1381] In some embodiments, the AAV particle genome is VGC93 and comprises a 5′ inverted terminal repeat (ITR) sequence region and a 3′ ITR sequence region, a GFAP promoter, a human beta-globin intron region, a heavy chain signal sequence, an antibody heavy chain variable region, a heavy chain constant region, a furin cleavage site, a T2A linker, a light chain signal sequence, an antibody light chain variable region, alight chain constant region, and a polyadenylation signal sequence.

[1382] In some embodiments, the AAV particle genome is VGC94 and comprises a 5′ inverted terminal repeat (ITR) sequence region and a 3′ITR sequence region, a GFAP promoter, a human beta-globin intron region, a heavy chain signal sequence, an antibody heavy chain variable region, a heavy chain constant region, a furin cleavage site, a T2A linker, alight chain signal sequence, an antibody light chain variable region, alight chain constant region, and a polyadenylation signal sequence.

[1383] In some embodiments, the AAV particle genome is VGC95 and comprises a 5′ inverted terminal repeat (ITR) sequence region and a 3′ ITR sequence region, a GFAP promoter, a human beta-globin intron region, a heavy chain signal sequence, an antibody heavy chain variable region, a heavy chain constant region, a furin cleavage site, a T2A linker, alight chain signal sequence, an antibody light chain variable region, alight chain constant region, and a polyadenylation signal sequence.

[1384] In some embodiments, the AAV particle genome is VGC96 and comprises a 5′ inverted terminal repeat (ITR) sequence region and a 3′ ITR sequence region, a GFAP promoter, a human beta-globin intron region, a heavy chain signal sequence, an antibody heavy chain variable region, a heavy chain constant region, a furin cleavage site, a T2A linker, alight chain signal sequence, an antibody light chain variable region, alight chain constant region, and a polyadenylation signal sequence.

TABLE 49
Viral Genome Cassettes Sequence Regions

| | VGC97 | | VGC98 | | VGC99 | | VGC100 | |
|---|---|---|---|---|---|---|---|---|
| | Region | | Region | | Region | | Region | |
| Sequence | SEQ ID | Region | SEQ ID | Region | SEQ ID | Region | SEQ ID | Region |
| Regions | NO | length | NO | length | NO | length | NO | length |
| 5′ ITR | 13519 | 130 | 13519 | 130 | 13519 | 130 | 13519 | 130 |
| Promoter | 13528 | 699 | 13528 | 699 | 13529 | 557 | 13534 | 380 |
| Intron | 13551 | 566 | 13551 | 566 | 13551 | 566 | 13551 | 566 |
| Signal | 13567 | 57 | 13567 | 57 | 13567 | 57 | 13570 | 57 |
| Variable | — | — | — | — | — | — | — | — |
| and/or | | | | | | | | |
| Constant | | | | | | | | |
| Linker | 13151 | 198 | 13151 | 198 | 13151 | 198 | 13151 | 198 |
| Linker | 1724 | 12 | 1724 | 12 | 1724 | 12 | 1724 | 12 |
| Linker | 1726 | 54 | 1726 | 54 | 1726 | 54 | 1726 | 54 |
| Signal | 13569 | 57 | 13569 | 57 | 13569 | 57 | 13569 | 57 |
| Variable | — | — | — | — | — | — | — | — |
| and/or | | | | | | | | |
| Constant | | | | | | | | |
| PolyA | 13576 | 127 | 13576 | 127 | 13576 | 127 | 13576 | 127 |
| 3′ ITR | 13521 | 130 | 13521 | 130 | 13521 | 130 | 13521 | 130 |

[1385] In some embodiments, the AAV particle genome is VGC97 and comprises a 5′ inverted terminal repeat (ITR) sequence region and a 3′ ITR sequence region, a GFAP promoter, a human beta-globin intron region, a heavy chain signal sequence, an antibody heavy chain variable region, a heavy chain constant region, a hinge region, a furin cleavage site, a T2A linker, alight chain signal sequence, an antibody light chain variable region, alight chain constant region, and a polyadenylation signal sequence.

[1386] In some embodiments, the AAV particle genome is VGC98 and comprises a 5′ inverted terminal repeat (ITR) sequence region and a 3′ ITR sequence region, a GFAP promoter, a human beta-globin intron region, a heavy chain signal sequence, an antibody heavy chain variable region, a heavy chain constant region, a hinge region, a furin cleavage site, a T2A linker, alight chain signal sequence, an antibody light chain variable region, alight chain constant region, and a polyadenylation signal sequence.

[1387] In some embodiments, the AAV particle genome is VGC99 and comprises a 5′ inverted terminal repeat (ITR) sequence region and a 3′ ITR sequence region, a hSYN promoter, a human beta-globin intron region, a heavy chain signal sequence, an antibody heavy chain variable region, a heavy chain constant region, a hinge region, a furin cleavage site, a T2A linker, alight chain signal sequence, an antibody light chain variable region, alight chain constant region, and a polyadenylation signal sequence.

[1388] In some embodiments, the AAV particle genome is VGC100 and comprises a 5′ inverted terminal repeat (ITR) sequence region and a 3′ ITR sequence region, a CMVie region, a human beta-globin intron region, a heavy chain signal sequence, an antibody heavy chain variable region, a heavy chain constant region, a hinge region, a furin cleavage site, a T2A linker, alight chain signal sequence, an antibody light chain variable region, alight chain constant region, and a polyadenylation signal sequence.

TABLE 50
Viral Genome Cassettes Sequence Regions

| | VGC101 | | VGC102 | | VGC103 | | VGC104 | | VGC105 | |
|---|---|---|---|---|---|---|---|---|---|---|
| | Region | | Region | | Region | | Region | | Region | |
| Sequence | SEQ ID | Region | SEQ ID | Region | SEQ ID | Region | SEQ ID | Region | SEQ ID | Region |
| Regions | NO | length | NO | length | NO | length | NO | length | NO | length |
| 5′ ITR | 13519 | 130 | 13519 | 130 | 13519 | 130 | 13519 | 130 | 13519 | 130 |
| Promoter | 13528 | 699 | 13528 | 699 | 13528 | 699 | 13528 | 699 | 13528 | 699 |
| Intron | 13551 | 566 | 13551 | 566 | 13551 | 566 | 13551 | 566 | 13551 | 566 |
| Signal | 13569 | 57 | 13569 | 57 | 13569 | 57 | 13569 | 57 | 13569 | 57 |
| Variable | — | — | — | — | — | — | — | — | — | — |
| and/or | | | | | | | | | | |
| Constant | | | | | | | | | | |
| Linker | 13154 | 45 | 13157 | 75 | 13160 | 120 | 13152 | 15 | 13154 | 45 |
| Variable | — | — | — | — | — | — | — | — | — | — |
| and/or | | | | | | | | | | |
| Constant | | | | | | | | | | |
| Tag | 13571 | 27 | 13571 | 27 | 13571 | 27 | 13571 | 27 | 13571 | 27 |
| PolyA | 13576 | 127 | 13576 | 127 | 13576 | 127 | 13576 | 127 | 13576 | 127 |
| 3′ ITR | 13521 | 130 | 13521 | 130 | 13521 | 130 | 13521 | 130 | 13521 | 130 |

[1389] In some embodiments, the AAV particle genome is VGC101 and comprises a 5′ inverted terminal repeat (ITR) sequence region and a 3′ ITR sequence region, a GFAP promoter, a human beta-globin intron region, a light chain signal sequence, an antibody light chain variable region, a (G4S)3 linker (“(G4)3” disclosed as SEQ ID NO: 13143), an antibody heavy chain variable region, an HA tag, and a polyadenylation signal sequence.

[1390] In some embodiments, the AAV particle genome is VGC102 and comprises a 5′ inverted terminal repeat (ITR) sequence region and a 3′ ITR sequence region, a GFAP promoter, a human beta-globin intron region, a light chain signal sequence, an antibody light chain variable region, a (G4S)5 linker (“(G4)5” disclosed as SEQ ID NO: 13144), an antibody heavy chain variable region, an HA tag, and a polyadenylation signal sequence.

[1391] In some embodiments, the AAV particle genome is VGC103 and comprises a 5′ inverted terminal repeat (ITR) sequence region and a 3′ ITR sequence region, a GFAP promoter, a human beta-globin intron region, a light chain signal sequence, an antibody light chain variable region, a (G4S)8 linker (“(G4)8” disclosed as SEQ ID NO: 13148), an antibody heavy chain variable region, an HA tag, and a polyadenylation signal sequence.

[1392] In some embodiments, the AAV particle genome is VGC104 and comprises a 5′ inverted terminal repeat (ITR) sequence region and a 3′ ITR sequence region, a GFAP promoter, a human beta-globin intron region, alight chain signal sequence, an antibody light chain variable region, a G4S linker (“G4” disclosed as SEQ ID NO: 13141), an antibody heavy chain variable region, an HA tag, and a polyadenylation signal sequence.

[1393] In some embodiments, the AAV particle genome is VGC105 and comprises a 5′ inverted terminal repeat (ITR) sequence region and a 3′ ITR sequence region, a GFAP promoter, a human beta-globin intron region, a light chain signal sequence, an antibody light chain variable region, a (G4S)3 linker (“(G4)3” disclosed as SEQ ID NO: 13143), an antibody heavy chain variable region, an HA tag, and a polyadenylation signal sequence.

TABLE 51
Viral Genome Cassettes Sequence Regions

| | VGC106 | | VGC107 | | VGC108 | | VGC108 | | VGC109 | |
|---|---|---|---|---|---|---|---|---|---|---|
| | Region | | Region | | Region | | Region | | Region | |
| Sequence | SEQ ID | Region | SEQ ID | Region | SEQ ID | Region | SEQ ID | Region | SEQ ID | Region |
| Regions | NO | length | NO | length | NO | length | NO | length | NO | length |
| 5′ ITR | 13519 | 130 | 13519 | 130 | 13519 | 130 | 13519 | 130 | 13519 | 130 |
| Promoter | 13528 | 699 | 13528 | 699 | 13528 | 699 | 13529 | 557 | 13529 | 557 |
| Intron | 13551 | 566 | 13551 | 566 | 13551 | 566 | 13551 | 566 | 13551 | 566 |
| Signal | 13569 | 57 | 13569 | 57 | 13569 | 57 | 13569 | 57 | 13569 | 57 |
| Variable | — | — | — | — | — | — | — | — | — | — |
| and/or | | | | | | | | | | |
| Constant | | | | | | | | | | |
| Linker | 1727 | 75 | 1726 | 54 | 1726 | 54 | 1727 | 75 | 1726 | 54 |
| Signal | 13567 | 57 | 13567 | 57 | 13567 | 57 | 13567 | 57 | 13567 | 57 |
| Variable | — | — | — | — | — | — | — | — | — | — |
| and/or | | | | | | | | | | |
| Constant | | | | | | | | | | |
| PolyA | 13576 | 127 | 13576 | 127 | 13576 | 127 | 13576 | 127 | 13576 | 127 |
| 3′ ITR | 13521 | 130 | 13521 | 130 | 13521 | 130 | 13521 | 130 | 13521 | 130 |

[1394] In some embodiments, the AAV particle genome is VGC106 and comprises a 5′ inverted terminal repeat (ITR) sequence region and a 3′ ITR sequence region, a GFAP promoter, a human beta-globin intron region, a light chain signal sequence, an antibody light chain variable region, alight chain constant region, a F2A linker, a heavy chain signal sequence, an antibody heavy chain variable region, a heavy chain constant region, and a polyadenylation signal sequence.

[1395] In some embodiments, the AAV particle genome is VGC107 and comprises a 5′ inverted terminal repeat (ITR) sequence region and a 3′ ITR sequence region, a GFAP promoter, a human beta-globin intron region, a light chain signal sequence, an antibody light chain variable region, a light chain constant region, a T2A linker, a heavy chain signal sequence, an antibody heavy chain variable region, a heavy chain constant region, and a polyadenylation signal sequence.

[1396] In some embodiments, the AAV particle genome is VGC108 and comprises a 5′ inverted terminal repeat (ITR) sequence region and a 3′ ITR sequence region, a GFAP promoter, a human beta-globin intron region, a light chain signal sequence, an antibody light chain variable region, a light chain constant region, a T2A linker, a heavy chain signal sequence, an antibody heavy chain variable region, a heavy chain constant region, and a polyadenylation signal sequence.

[1397] In some embodiments, the AAV particle genome is VGC109 and comprises a 5′ inverted terminal repeat (ITR) sequence region and a 3′ ITR sequence region, a hSYN promoter, a human beta-globin intron region, alight chain signal sequence, an antibody light chain variable region, a light chain constant region, a F2A linker, a heavy chain signal sequence, an antibody heavy chain variable region, a heavy chain constant region, and a polyadenylation signal sequence.

[1398] In some embodiments, the AAV particle genome is VGC110 and comprises a 5′ inverted terminal repeat (ITR) sequence region and a 3′ ITR sequence region, a hSYN promoter, a human beta-globin intron region, alight chain signal sequence, an antibody light chain variable region, alight chain constant region, a T2A linker, a heavy chain signal sequence, an antibody heavy chain variable region, a heavy chain constant region, and a polyadenylation signal sequence.

TABLE 52
Viral Genome Cassettes Sequence Regions

| | VGC111 | | VGC112 | | VGC113 | | VGC114 | | VGC115 | |
|---|---|---|---|---|---|---|---|---|---|---|
| | Region | | Region | | Region | | Region | | Region | |
| Sequence | SEQ ID | Region | SEQ ID | Region | SEQ ID | Region | SEQ ID | Region | SEQ ID | Region |
| Regions | NO | length | NO | length | NO | length | NO | length | NO | length |
| 5′ ITR | 13519 | 130 | 13519 | 130 | 13519 | 130 | 13519 | 130 | 13519 | 130 |
| Promoter | 13528 | 699 | 13529 | 557 | 13529 | 557 | 13529 | 557 | 13529 | 557 |
| Intron | 13551 | 566 | 13551 | 566 | 13551 | 566 | 13551 | 566 | 13551 | 566 |
| Signal | 13569 | 57 | 13569 | 57 | 13569 | 57 | 13569 | 57 | 13569 | 57 |
| Variable | — | — | — | — | — | — | — | — | — | — |
| and/or | | | | | | | | | | |
| Constant | | | | | | | | | | |
| Linker | 13152 | 15 | 13154 | 45 | 13157 | 75 | 13160 | 120 | 13152 | 15 |
| Variable | — | — | — | — | — | — | — | — | — | — |
| and/or | | | | | | | | | | |
| Constant | | | | | | | | | | |
| Tag | 13571 | 27 | 13571 | 27 | 13571 | 27 | 13571 | 27 | 13571 | 27 |
| PolyA | 13576 | 127 | 13576 | 127 | 13576 | 127 | 13576 | 127 | 13576 | 127 |
| 3′ ITR | 13521 | 130 | 13521 | 130 | 13521 | 130 | 13521 | 130 | 13521 | 130 |

[1399] In some embodiments, the AAV particle genome is VGC111 and comprises a 5′ inverted terminal repeat (ITR) sequence region and a 3′ ITR sequence region, a GFAP promoter, a human beta-globin intron region, a light chain signal sequence, an antibody light chain variable region, a G4S linker (“G4S” disclosed as SEQ ID NO: 13141), an antibody heavy chain variable region, an HA tag, and a polyadenylation signal sequence.

[1400] In some embodiments, the AAV particle genome is VGC112 and comprises a 5′ inverted terminal repeat (ITR) sequence region and a 3′ ITR sequence region, a hSYN promoter, a human beta-globin intron region, alight chain signal sequence, an antibody light chain variable region, a (G4S)3 linker (“(G4)3” disclosed as SEQ ID NO: 13143), an antibody heavy chain variable region, an HA tag, and a polyadenylation signal sequence.

[1401] In some embodiments, the AAV particle genome is VGC113 and comprises a 5′ inverted terminal repeat (ITR) sequence region and a 3′ ITR sequence region, a hSYN promoter, a human beta-globin intron region, alight chain signal sequence, an antibody light chain variable region, a (G4S)5 linker (“(G4)5” disclosed as SEQ ID NO: 13144), an antibody heavy chain variable region, an HA tag, and a polyadenylation signal sequence.

[1402] In some embodiments, the AAV particle genome is VGC114 and comprises a 5′ inverted terminal repeat (ITR) sequence region and a 3′ ITR sequence region, a hSYN promoter, a human beta-globin intron region, alight chain signal sequence, an antibody light chain variable region, a (G4S)8 linker (“(G4S)8” disclosed as SEQ ID NO: 13148), an antibody heavy chain variable region, an HA tag, and a polyadenylation signal sequence.

[1403] In some embodiments, the AAV particle genome is VGC115 and comprises a 5′ inverted terminal repeat (ITR) sequence region and a 3′ ITR sequence region, a hSYN promoter, a human beta-globin intron region, alight chain signal sequence, an antibody light chain variable region, a G4S linker (“G4S” disclosed as SEQ ID NO: 13141), an antibody heavy chain variable region, an HA tag, and a polyadenylation signal sequence.

TABLE 53
Viral Genome Cassettes Sequence Regions

| | VGC116 | | VGC117 | | VGC118 | | VGC119 | | VGC120 | |
|---|---|---|---|---|---|---|---|---|---|---|
| | Region | | Region | | Region | | Region | | Region | |
| Sequence | SEQ ID | Region | SEQ ID | Region | SEQ ID | Region | SEQ ID | Region | SEQ ID | Region |
| Regions | NO | length | NO | length | NO | length | NO | length | NO | length |
| 5′ ITR | 13519 | 130 | 13519 | 130 | 13519 | 130 | 13519 | 130 | 13519 | 130 |
| Promoter | 13529 | 557 | 13529 | 557 | 13529 | 557 | 13529 | 557 | 13529 | 557 |
| Intron | 13551 | 566 | 13551 | 566 | 13551 | 566 | 13551 | 566 | 13551 | 566 |
| Signal | 13567 | 57 | 13567 | 57 | 13567 | 57 | 13567 | 57 | 13567 | 57 |
| Variable | — | — | — | — | — | — | — | — | — | — |
| and/or | | | | | | | | | | |
| Constant | | | | | | | | | | |
| Linker | 1725 | 12 | 1724 | 12 | 1724 | 12 | 1724 | 12 | 1724 | 12 |
| Linker | 1727 | 75 | 1726 | 54 | 1726 | 54 | 1726 | 54 | 1726 | 54 |
| Signal | 13569 | 57 | 13569 | 57 | 13569 | 57 | 13569 | 57 | 13569 | 57 |
| Variable | — | — | — | — | — | — | — | — | — | — |
| and/or | | | | | | | | | | |
| Constant | | | | | | | | | | |
| PolyA | 13576 | 127 | 13576 | 127 | 13576 | 127 | 13576 | 127 | 13576 | 127 |
| 3′ ITR | 13521 | 130 | 13521 | 130 | 13521 | 130 | 13521 | 130 | 13521 | 130 |

[1404] In some embodiments, the AAV particle genome is VGC116 and comprises a 5′ inverted terminal repeat (ITR) sequence region and a 3′ITR sequence region, a hSYN promoter, a human beta-globin intron region, a heavy chain signal sequence, an antibody heavy chain variable region, a heavy chain constant region, a furin cleavage site, a F2A linker, a light chain signal sequence, an antibody light chain variable region, alight chain constant region, and a polyadenylation signal sequence.

[1405] In some embodiments, the AAV particle genome is VGC117 and comprises a 5′ inverted terminal repeat (ITR) sequence region and a 3′ ITR sequence region, a hSYN promoter, a human beta-globin intron region, a heavy chain signal sequence, an antibody heavy chain variable region, a heavy chain constant region, a furin cleavage site, a T2A linker, a light chain signal sequence, an antibody light chain variable region, alight chain constant region, and a polyadenylation signal sequence.

[1406] In some embodiments, the AAV particle genome is VGC118 and comprises a 5′ inverted terminal repeat (ITR) sequence region and a 3′ ITR sequence region, a hSYN promoter, a human beta-globin intron region, a heavy chain signal sequence, an antibody heavy chain variable region, a heavy chain constant region, a furin cleavage site, a T2A linker, alight chain signal sequence, an antibody light chain variable region, alight chain constant region, and a polyadenylation signal sequence.

[1407] In some embodiments, the AAV particle genome is VGC119 and comprises a 5′ inverted terminal repeat (ITR) sequence region and a 3′ ITR sequence region, a hSYN promoter, a human beta-globin intron region, a heavy chain signal sequence, an antibody heavy chain variable region, a heavy chain constant region, a furin cleavage site, a T2A linker, alight chain signal sequence, an antibody light chain variable region, alight chain constant region, and a polyadenylation signal sequence.

[1408] In some embodiments, the AAV particle genome is VGC120 and comprises a 5′ inverted terminal repeat (ITR) sequence region and a 3 IT R sequence region, a hSYN promoter, a human beta-globin intron region, a heavy chain signal sequence, an antibody heavy chain variable region, a heavy chain constant region, a furin cleavage site, a T2A linker, alight chain signal sequence, an antibody light chain variable region, alight chain constant region, and a polyadenylation signal sequence.

TABLE 54
Viral Genome Cassettes Sequence Regions

VGC121

| Sequence Regions | Region SEQ ID NO | Region length |
|---|---|---|
| 5′ ITR | 13519 | 130 |
| Promoter | 13529 | 557 |
| Intron | 13551 | 566 |
| Signal | 13567 | 57 |
| Variable and/or Constant | — | — |
| Linker | 13151 | 198 |
| Linker | 1724 | 12 |
| Linker | 1726 | 54 |
| Signal | 13569 | 57 |
| Variable and/or Constant | — | — |
| PolyA | 13576 | 127 |
| 3′ ITR | 13521 | 130 |

[1409] In some embodiments, the AAV particle genome is VGC121 and comprises a 5′ inverted terminal repeat (ITR) sequence region and a 3′ ITR sequence region, a hSYN promoter, a human beta-globin intron region, a heavy chain signal sequence, an antibody heavy chain variable region, a heavy chain constant region, a hinge region, a furin cleavage site, a T2A linker, alight chain signal sequence, an antibody light chain variable region, alight chain constant region, and a polyadenylation signal sequence.

TABLE 55
Viral Genome Cassettes Sequence Regions

| | VGC122 | | VGC123 | | VGC124 | | VGC125 | |
|---|---|---|---|---|---|---|---|---|
| | Region | | Region | | Region | | Region | |
| Sequence | SEQ ID | Region | SEQ ID | Region | SEQ ID | Region | SEQ ID | Region |
| Regions | NO | length | NO | length | NO | length | NO | length |
| 5′ ITR | 13519 | 130 | 13519 | 130 | 13519 | 130 | 13519 | 130 |
| Promoter | 13529 | 557 | 13528 | 699 | 13529 | 557 | 13534 | 380 |
| Intron | 13551 | 566 | 13551 | 566 | 13551 | 566 | 13551 | 566 |
| Signal | 13569 | 57 | 13569 | 57 | 13569 | 57 | 13569 | 57 |
| Variable | — | — | — | — | — | — | — | — |
| and/or | | | | | | | | |
| Constant | | | | | | | | |
| Linker | 1726 | 54 | 1726 | 54 | 1726 | 54 | 1726 | 54 |
| Signal | 13567 | 57 | 13567 | 57 | 13567 | 57 | 13567 | 57 |
| Variable | — | — | — | — | — | — | — | — |
| and/or | | | | | | | | |
| Constant | | | | | | | | |
| PolyA | 13576 | 127 | 13576 | 127 | 13576 | 127 | 13576 | 127 |
| 3′ ITR | 13521 | 130 | 13521 | 130 | 13521 | 130 | 13521 | 130 |

[1410] In some embodiments, the AAV particle genome is VGC122 and comprises a 5′ inverted terminal repeat (ITR) sequence region and a 3′ ITR sequence region, a hSYN promoter, a human beta-globin intron region, alight chain signal sequence, an antibody light chain variable region, a light chain constant region, a T2A linker, a heavy chain signal sequence, an antibody heavy chain variable region, a heavy chain constant region, and a polyadenylation signal sequence.

[1411] In some embodiments, the AAV particle genome is VGC123 and comprises a 5′ inverted terminal repeat (ITR) sequence region and a 3′ ITR sequence region, a GFAP promoter, a human beta-globin intron region, a light chain signal sequence, an antibody light chain variable region, a light chain constant region, a T2A linker, a heavy chain signal sequence, an antibody heavy chain variable region, a heavy chain constant region, and a polyadenylation signal sequence.

[1412] In some embodiments, the AAV particle genome is VGC124 and comprises a 5′ inverted terminal repeat (ITR) sequence region and a 3′ITR sequence region, a hSYN promoter, a human beta-globin intron region, alight chain signal sequence, an antibody light chain variable region, alight chain constant region, a T2A linker, a heavy chain signal sequence, an antibody heavy chain variable region, a heavy chain constant region, and a polyadenylation signal sequence.

[1413] In some embodiments, the AAV particle genome is VGC125 and comprises a 5′ inverted terminal repeat (ITR) sequence region and a 3′ ITR sequence region, a CMVie region, a human beta-globin intron region, a light chain signal sequence, an antibody light chain variable region, a light chain constant region, a T2A linker, a heavy chain signal sequence, an antibody heavy chain variable region, a heavy chain constant region, and a polyadenylation signal sequence.

TABLE 56
Viral Genome Cassettes Sequence Regions

| | VGC126 | | VGC127 | |
|---|---|---|---|---|
| | Region SEQ | Region | Region SEQ | Region |
| Sequence Regions | ID NO | length | ID NO | length |
| 5′ ITR | 13519 | 130 | 13519 | 130 |
| Promoter | 13534 | 380 | 13534 | 380 |
| Promoter | 13526 | 260 | 13526 | 260 |
| Intron | 13551 | 566 | 13551 | 566 |
| Signal | 13567 | 57 | 13567 | 57 |
| Variable and/or Constant | — | — | — | — |
| Linker | 1725 | 12 | 1724 | 12 |
| Linker | 1727 | 75 | 1726 | 54 |
| Signal | 13569 | 57 | 13569 | 57 |
| Variable and/or Constant | — | — | — | — |
| PolyA | 13576 | 127 | 13576 | 127 |
| 3′ ITR | 13521 | 130 | 13521 | 130 |

[1414] In some embodiments, the AAV particle genome is VGC126 and comprises a 5′ inverted terminal repeat (ITR) sequence region and a 3′ITR sequence region, a CMVie region, a CB promoter, a human beta-globin intron region, a heavy chain signal sequence, an antibody heavy chain variable region, a heavy chain constant region, a furin cleavage site, an F2A linker, a light chain signal sequence, an antibody light chain variable region, a light chain constant region, and a polyadenylation signal sequence.

[1415] In some embodiments, the AAV particle genome is VGC127 and comprises a 5′ inverted terminal repeat (ITR) sequence region and a 3′ ITR sequence region, a CMVie region, a CB promoter, a human beta-globin intron region, a heavy chain signal sequence, an antibody heavy chain variable region, a heavy chain constant region, a furin cleavage site, an T2A linker, a light chain signal sequence, an antibody light chain variable region, alight chain constant region, and a polyadenylation signal sequence.

TABLE 57
Viral Genome Cassettes Sequence Regions

VGC128

| | Region | Region |
|---|---|---|
| Sequence Regions | SEQ ID NO | length |
| 5′ ITR | 13519 | 130 |
| Promoter | 13534 | 380 |
| Promoter | 13526 | 260 |
| Intron | 13551 | 566 |
| Signal | 13569 | 57 |
| Variable and/or Constant | — | — |
| Linker | 1727 | 75 |
| Signal | 13567 | 57 |
| Variable and/or Constant | — | — |
| PolyA | 13576 | 127 |
| 3′ ITR | 13521 | 130 |

[1416] In some embodiments, the AAV particle genome is an comprises a inverted terminal repeat (ITR) sequence region and a 3′ ITR sequence region, a CMVie region, a CB promoter, a human beta-globin intron region, alight chain signal sequence, an antibody light chain variable region, a light chain constant region, an F2A linker, a heavy chain signal sequence, an antibody heavy chain variable region, a heavy chain constant region, and a polyadenylation signal sequence.

TABLE 58
Viral Genome Cassettes Sequence Regions

| | VGC129 | | VGC130 | | VGC131 | | VGC132 | | VGC133 | |
|---|---|---|---|---|---|---|---|---|---|---|
| | Region | | Region | | Region | | Region | | Region | |
| Sequence | SEQ ID | Region | SEQ ID | Region | SEQ ID | Region | SEQ ID | Region | SEQ ID | Region |
| Regions | NO | length | NO | length | NO | length | NO | length | NO | length |
| 5′ ITR | 13519 | 130 | 13519 | 130 | 13519 | 130 | 13519 | 130 | 13519 | 130 |
| CAG promoter | 13523 | 1715 | 13523 | 1715 | 13523 | 1715 | 13523 | 1715 | 13523 | 1715 |
| CMVie | 13524 | 299 | 13524 | 299 | 13524 | 299 | 13524 | 299 | 13524 | 299 |
| CBA min. | 13525 | 283 | 13525 | 283 | 13525 | 283 | 13525 | 283 | 13525 | 283 |
| Signal | 13567 | 57 | 13567 | 57 | 13567 | 57 | 13567 | 57 | 13567 | 57 |
| Variable | — | — | — | — | — | — | — | — | — | — |
| and/or | | | | | | | | | | |
| Constant | | | | | | | | | | |
| Linker | 1730 | 45 | 13161 | 60 | 13156 | 75 | 13158 | 90 | 13159 | 120 |
| Variable | — | — | — | — | — | — | — | — | — | — |
| and/or | | | | | | | | | | |
| Constant | | | | | | | | | | |
| Tag | 13571 | 27 | 13571 | 27 | 13571 | 27 | 13571 | 27 | 13571 | 27 |
| PolyA | 13576 | 127 | 13576 | 127 | 13576 | 127 | 13576 | 127 | 13576 | 127 |
| 3′ ITR | 13521 | 130 | 13521 | 130 | 13521 | 130 | 13521 | 130 | 13521 | 130 |

[1417] In some embodiments, the AAV particle genome is VGC129 and comprises a 5′ inverted terminal repeat (ITR) sequence region and a 3′ITR sequence region, a CAG promoter comprising a CMVie region and a minimal CSA promoter region, a heavy chain signal sequence, an antibody heavy chain variable region, a (G4S)3 linker (“(G4S)3” disclosed as SEQ ID NO: 13143), an antibody light chain variable region, an HA tag, and a polyadenylation signal sequence.

[1418] In some embodiments, the AAV particle genome is VGC130 and comprises a 5′ inverted terminal repeat (ITR) sequence region and a 3′ITR sequence region, a CAG promoter comprising a CMVie region and a minimal CBA promoter region, a heavy chain signal sequence, an antibody heavy chain variable region, a (G4S)4 linker (“(G4S)4” disclosed as SEQ ID NO: 113146), an antibody light chain variable region, an HA tag, and a polyadenylation signal sequence.

[1419] In some embodiments, the AAV particle genome is VGC131 and comprises a 5′ inverted terminal repeat (ITR) sequence region and a 3′ITR sequence region, a CAG promoter comprising a CMVie region and a minimal CBA promoter region, a heavy chain signal sequence, an antibody heavy chain variable region, a (G4S)5 linker (“(G4S)5” disclosed as SEQ ID NO: 13144), an antibody light chain variable region, an HA tag, and a polyadenylation signal sequence.

[1420] In some embodiments, the AAV particle genome is VGC132 and comprises a 5′ inverted terminal repeat (ITR) sequence region and a 3′ITR sequence region, a CAG promoter comprising a CMVie region and a minimal CBA promoter region, a heavy chain signal sequence, an antibody heavy chain variable region, a (G4S)6 linker (“(G4S)4” disclosed as SEQ ID NO: 13147), an antibody light chain variable region, an HA tag, and a polyadenylation signal sequence.

[1421] In some embodiments, the AAV particle genome is VGC133 and comprises a 5′ inverted terminal repeat (ITR) sequence region and a 3′ITR sequence region, a CAG promoter comprising a CMVie region and a minimal CBA promoter region, a heavy chain signal sequence, an antibody heavy chain variable region, a (G4S)8 linker (“(G4)8” disclosed as SEQ ID NO: 13148), an antibody light chain variable region, an HA tag, and a polyadenylation signal sequence.

TABLE 59
Viral Genome Cassettes Sequence Regions

VGC134

| | Region | Region |
|---|---|---|
| Sequence Regions | SEQ ID NO | length |
| 5′ ITR | 13519 | 130 |
| CAG Promoter | 13523 | 1715 |
| CMVie | 13524 | 299 |
| CBA min. | 13525 | 283 |
| Signal | 13567 | 57 |
| Variable and/or Constant | — | — |
| Linker | 13152 | 15 |
| Variable and/or Constant | — | — |
| Tag | 13571 | 27 |
| PolyA | 13576 | 127 |
| 3′ ITR | 13521 | 130 |

[1422] In some embodiments, the AAV particle genome is VGC134 and comprises a 5′ inverted terminal repeat (ITR) sequence region and a 3′ITR sequence region, a CAG promoter comprising a CMVie region and a minimal CBA promoter region, a heavy chain signal sequence, an antibody heavy chain variable region, a G4S linker (“G4” disclosed as SEQ ID NO: 13141), an antibody light chain variable region, an HA tag, and a polyadenylation signal sequence.

TABLE 60
Viral Genome Cassettes Sequence Regions

| | VGC135 | | VGC136 | | VGC137 | |
|---|---|---|---|---|---|---|
| | Region | | Region | | Region | |
| Sequence | SEQ ID | Region | SEQ ID | Region | SEQ ID | Region |
| Regions | NO | length | NO | length | NO | length |
| 5′ ITR | 13519 | 130 | 13519 | 130 | 13519 | 130 |
| CAG promoter | 13523 | 1715 | 13523 | 1715 | 13523 | 1715 |
| CMVie | 13524 | 299 | 13524 | 299 | 13524 | 299 |
| CBA min. | 13525 | 283 | 13525 | 283 | 13525 | 283 |
| Signal | 13567 | 57 | 13567 | 57 | 13567 | 57 |
| Variable | — | — | — | — | — | — |
| and/or | | | | | | |
| Constant | | | | | | |
| Linker | 1724 | 12 | 1724 | 12 | 1724 | 12 |
| Linker | 1726 | 54 | 1726 | 54 | 1726 | 54 |
| Signal | 13569 | 57 | 13569 | 57 | 13569 | 57 |
| Variable | — | — | — | — | — | — |
| and/or | | | | | | |
| Constant | | | | | | |
| PolyA | 13576 | 127 | 13576 | 127 | 13576 | 127 |
| 3′ ITR | 13521 | 130 | 13521 | 130 | 13521 | 130 |

[1423] In some embodiments, the AAV particle genome is VGC135 and comprises a 5′ inverted terminal repeat (ITR) sequence region and a 3′ ITR sequence region, a CAG promoter comprising a CMVie region and a minimal CBA promoter region, a heavy chain signal sequence, an antibody heavy chain variable region, a heavy chain constant region, a furin cleavage site, a T2A linker, alight chain signal sequence, an antibody light chain variable region, a light chain constant region, and a polyadenylation signal sequence.

[1424] In some embodiments, the AAV particle genome is VGC136 and comprises a 5′ inverted terminal repeat (ITR) sequence region and a 3′ITR sequence region, a CAG promoter comprising a CMVie region and a minimal CBA promoter region, a heavy chain signal sequence, an antibody heavy chain variable region, a heavy chain constant region, a furin cleavage site, a T2A linker, alight chain signal sequence, an antibody light chain variable region, alight chain constant region, and a polyadenylation signal sequence.

[1425] In some embodiments, the AAV particle genome is VGC137 and comprises a 5′ inverted terminal repeat (ITR) sequence region and a 3′ ITR sequence region, a CAG promoter comprising a CMVie region and a minimal CBA promoter region, a heavy chain signal sequence, an antibody heavy chain variable region, a heavy chain constant region, a furin cleavage site, a T2A linker, alight chain signal sequence, an antibody light chain variable region, a light chain constant region, and a polyadenylation signal sequence.

TABLE 61
Viral Genome Cassettes Sequence Regions

VGC138

| | Region | Region |
|---|---|---|
| Sequence Regions | SEQ ID NO | length |
| 5′ ITR | 13519 | 130 |
| CAG Promoter | 13523 | 1715 |
| CMVie | 13524 | 299 |
| CBA min. | 13525 | 283 |
| Signal | 13567 | 57 |
| Variable and/or Constant | — | — |
| Linker | 13151 | 198 |
| Linker | 1724 | 12 |
| Linker | 1726 | 54 |
| Signal | 13569 | 57 |
| Variable and/or Constant | — | — |
| PolyA | 13576 | 127 |
| 3′ ITR | 13521 | 130 |

[1426] In some embodiments, the AAV particle genome is VGC138 and comprises a 5′ inverted terminal repeat (ITR) sequence region and a 3′ ITR sequence region, a CAG promoter comprising a CMVie region and a minimal CBA promoter region, a heavy chain signal sequence, an antibody heavy chain variable region, a heavy chain constant region, a hinge region, a furin cleavage site, a T2A linker, alight chain signal sequence, an antibody light chain variable region, alight chain constant region, and a polyadenylation signal sequence.

TABLE 62
Viral Genome Cassettes Sequence Regions

VGC139

| | Region | Region |
|---|---|---|
| Sequence Regions | SEQ ID NO | length |
| 5′ ITR | 13519 | 130 |
| CAG Promoter | 13523 | 1715 |
| CMVie | 13524 | 299 |
| CBA min. | 13525 | 283 |
| Signal | 13567 | 57 |
| Variable and/or Constant | — | — |
| Variable and/or Constant | — | — |
| Tag | 13571 | 27 |
| PolyA | 13576 | 127 |
| 3′ ITR | 13521 | 130 |

[1427] In some embodiments, the AAV particle genome is VGC139 and comprises a 5′ inverted terminal repeat (ITR) sequence region and a 3′ITR sequence region, a CAG promoter comprising a CMVie region and a minimal CBA promoter region, a heavy chain signal sequence, an antibody heavy chain variable region, an antibody light chain variable region, an HA tag, and a polyadenylation signal sequence.

TABLE 63
Viral Genome Cassettes Sequence Regions

| | VGC140 | | VGC141 | | VGC142 | | VGC143 | | VGC144 | |
|---|---|---|---|---|---|---|---|---|---|---|
| | Region | | Region | | Region | | Region | | Region | |
| Sequence | SEQ ID | Region | SEQ ID | Region | SEQ ID | Region | SEQ ID | Region | SEQ ID | Region |
| Regions | NO | length | NO | length | NO | length | NO | length | NO | length |
| 5′ ITR | 13519 | 130 | 13519 | 130 | 13519 | 130 | 13519 | 130 | 13519 | 130 |
| CAG promoter | 13533 | 1714 | 13533 | 1714 | 13533 | 1714 | 13533 | 1714 | 13523 | 1715 |
| CMVie | 13524 | 299 | 13524 | 299 | 13524 | 299 | 13524 | 299 | 13524 | 299 |
| CBA min. | 13525 | 283 | 13525 | 283 | 13525 | 283 | 13525 | 283 | 13525 | 283 |
| Signal | 13569 | 57 | 13569 | 57 | 13569 | 57 | 13569 | 57 | 13569 | 57 |
| Variable | — | — | — | — | — | — | — | — | — | — |
| and/or | | | | | | | | | | |
| Constant | | | | | | | | | | |
| Linker | 13154 | 45 | 13155 | 60 | 13157 | 75 | 2259 | 90 | 13152 | 15 |
| Variable | — | — | — | — | — | — | — | — | — | — |
| and/or | | | | | | | | | | |
| Constant | | | | | | | | | | |
| Tag | 13571 | 27 | 13571 | 27 | 13571 | 27 | 13571 | 27 | 13571 | 27 |
| PolyA | 13576 | 127 | 13576 | 127 | 13576 | 127 | 13576 | 127 | 13576 | 127 |
| 3′ ITR | 13521 | 130 | 13521 | 130 | 13521 | 130 | 13521 | 130 | 13521 | 130 |

[1428] In some embodiments, the AAV particle genome is VGC140 and comprises a 5′ inverted terminal repeat (ITR) sequence region and a 3′ITR sequence region, a CAG promoter comprising a CMVie region and a minimal CBA promoter region, a light chain signal sequence, an antibody light chain variable region, a (G4S)3 linker (“(G4S)3” disclosed as SEQ ID NO: 13143), an antibody heavy chain variable region, an HA tag, and a polyadenylation signal sequence.

[1429] In some embodiments, the AAV particle genome is VGC141 and comprises a 5′ inverted terminal repeat (ITR) sequence region and a 3′ ITR sequence region, a CAG promoter comprising a CMVie region and a minimal CBA promoter region, a light chain signal sequence, an antibody light chain variable region, a (G4S)4 linker (“(G4)4” disclosed as SEQ ID NO: 13146), an antibody heavy chain variable region, an HA tag, and a polyadenylation signal sequence.

[1430] In some embodiments, the AAV particle genome is VGC142 and comprises a 5′ inverted terminal repeat (ITR) sequence region and a 3′ITR sequence region, a CAG promoter comprising a CMVie region and a minimal CBA promoter region, a light chain signal sequence, an antibody light chain variable region, a (G4S)5 linker (“(G4S)5” disclosed as SEQ ID NO: 13144), an antibody heavy chain variable region, an HA tag, and a polyadenylation signal sequence.

[1431] In some embodiments, the AAV particle genome is VGC143 and comprises a 5′ inverted terminal repeat (ITR) sequence region and a 3′ITR sequence region, a CAG promoter comprising a CMVie region and a minimal CBA promoter region, a light chain signal sequence, an antibody light chain variable region, a (G4S)6 linker (“(G4S)4” disclosed as SEQ ID NO: 13147), an antibody heavy chain variable region, an HA tag, and a polyadenylation signal sequence.

[1432] In some embodiments, the AAV particle genome is VGC144 and comprises a 5′ inverted terminal repeat (ITR) sequence region and a 3′ITR sequence region, a CAG promoter comprising a CMVie region and a minimal CBA promoter region, a light chain signal sequence, an antibody light chain variable region, a G4S linker (“G4S” disclosed a SEQ ID NO: 13141), an antibody heavy chain variable region, an HA tag, and a polyadenylation signal sequence.

TABLE 64
Viral Genome Cassettes Sequence Regions

| | VGC145 | | VGC146 | | VGC147 | | VGC148 | | VGC149 | |
|---|---|---|---|---|---|---|---|---|---|---|
| | Region | | Region | | Region | | Region | | Region | |
| Sequence | SEQ ID | Region | SEQ ID | Region | SEQ ID | Region | SEQ ID | Region | SEQ ID | Region |
| Regions | NO | length | NO | length | NO | length | NO | length | NO | length |
| 5′ ITR | 13519 | 130 | 13519 | 130 | 13519 | 130 | 13519 | 130 | 13519 | 130 |
| Promoter | 13528 | 699 | 13528 | 699 | 13528 | 699 | 13528 | 699 | 13529 | 557 |
| Intron | 13551 | 566 | 13551 | 566 | 13551 | 566 | 13551 | 566 | 13551 | 566 |
| Signal | 13567 | 57 | 13567 | 57 | 13567 | 57 | 13567 | 57 | 13567 | 57 |
| Variable | — | — | — | — | — | — | — | — | — | — |
| and/or | | | | | | | | | | |
| Constant | | | | | | | | | | |
| Linker | 13152 | 15 | 1730 | 45 | 13156 | 75 | 13159 | 120 | 1730 | 45 |
| Variable | — | — | — | — | — | — | — | — | — | — |
| and/or | | | | | | | | | | |
| Constant | | | | | | | | | | |
| Tag | 13571 | 27 | 13571 | 27 | 13571 | 27 | 13571 | 27 | 13571 | 27 |
| PolyA | 13576 | 127 | 13576 | 127 | 13576 | 127 | 13576 | 127 | 13576 | 127 |
| 3′ ITR | 13521 | 130 | 13521 | 130 | 13521 | 130 | 13521 | 130 | 13521 | 130 |

[1433] In some embodiments, the AAV particle genome is VGC145 and comprises a 5′ inverted terminal repeat (ITR) sequence region and a 3′ ITR sequence region, a GFAP promoter, a human beta-globin intron region, a heavy chain signal sequence, an antibody heavy chain variable region, a G4S linker (“G4S” disclosed as SEQ ID NO: 13141), an antibody light chain variable region, an HA tag, and a polyadenylation signal sequence.

[1434] In some embodiments, the AAV particle genome is VGC146 and comprises a 5′ inverted terminal repeat (ITR) sequence region and a 3′ ITR sequence region, a GFAP promoter, a human beta-globin intron region, a heavy chain signal sequence, an antibody heavy chain variable region, a (G4S)3 linker (“(G4S)3” disclosed as SEQ ID NO: 13143), an antibody light chain variable region, an HA tag, and a polyadenylation signal sequence.

[1435] In some embodiments, the AAV particle genome is VGC147 and comprises a 5′ inverted terminal repeat (ITR) sequence region and a 3′ ITR sequence region, a GFAP promoter, a human beta-globin intron region, a heavy chain signal sequence, an antibody heavy chain variable region, a (G4S)5 linker (“(G4S)5” disclosed as SEQ ID NO: 13144), an antibody light chain variable region, an HA tag, and a polyadenylation signal sequence.

[1436] In some embodiments, the particle genome is VGC148 and comprises a 5′ inverted terminal repeat (ITR) sequence region and a 3′ITR sequence region, a GFAP promoter, a human beta-globin intron region, a heavy chain signal sequence, an antibody heavy chain variable region, a (G4S)8 linker (“(G4S)8” disclosed as SEQ ID NO: 13148), an antibody light chain variable region, an HA tag, and a polyadenylation signal sequence.

[1437] In some embodiments, the AAV particle genome is VGC149 and comprises a 5′ inverted terminal repeat (ITR) sequence region and a 3′ITR sequence region, a hSYN promoter, a human beta-globin intron region, a heavy chain signal sequence, an antibody heavy chain variable region, a (G4S)3 linker (“(G4S)3” disclosed as SEQ ID NO: 13143), an antibody light chain variable region, an HA tag and a polyadenylation signal sequence.

TABLE 65
Viral Genome Cassettes Sequence Regions

| | VGC150 | | VGC151 | | VGC152 | | VGC153 | | VGC154 | |
|---|---|---|---|---|---|---|---|---|---|---|
| | Region | | Region | | Region | | Region | | Region | |
| Sequence | SEQ ID | Region | SEQ ID | Region | SEQ ID | Region | SEQ ID | Region | SEQ ID | Region |
| Regions | NO | length | NO | length | NO | length | NO | length | NO | length |
| 5′ ITR | 13519 | 130 | 13519 | 130 | 13519 | 130 | 13519 | 130 | 13519 | 130 |
| Promoter | 13528 | 699 | 13529 | 557 | 13529 | 557 | 13529 | 557 | 13534 | 380 |
| Intron | 13551 | 566 | 13551 | 566 | 13551 | 566 | 13551 | 566 | 13551 | 566 |
| Signal | 13569 | 57 | 13569 | 57 | 13569 | 57 | 13569 | 57 | 13569 | 57 |
| Variable | — | — | — | — | — | — | — | — | — | — |
| and/or | | | | | | | | | | |
| Constant | | | | | | | | | | |
| Linker | 13157 | 75 | 13154 | 45 | 13157 | 75 | 13152 | 15 | 13152 | 15 |
| Variable | — | — | — | — | — | — | — | — | — | — |
| and/or | | | | | | | | | | |
| Constant | | | | | | | | | | |
| Tag | 13571 | 27 | 13571 | 27 | 13571 | 27 | 13571 | 27 | 13571 | 27 |
| PolyA | 13576 | 127 | 13576 | 127 | 13576 | 127 | 13576 | 127 | 13576 | 127 |
| 3′ ITR | 13521 | 130 | 13521 | 130 | 13521 | 130 | 13521 | 130 | 13521 | 130 |

[1438] In some embodiments, the AAV particle genome is VGC150 and comprises a 5′ inverted terminal repeat (ITR) sequence region and a 3° ITR sequence region, a GFAP promoter, a human beta-globin intron region, a light chain signal sequence, an antibody light chain variable region, a (G4S)5 linker (“(G4S)5” disclosed as SEQ ID NO: 13144), an antibody heavy chain variable region, an HA tag, and a polyadenylation signal sequence.

[1439] In some embodiments, the AAV particle genome is VGC151 and comprises a 5′ inverted terminal repeat (ITR) sequence region and a 3′ ITR sequence region, a hSYN promoter, a human beta-globin intron region, a light chain signal sequence, an antibody light chain variable region, a (G4S)3 linker (“(G4S)3” disclosed as SEQ ID NO: 13143), an antibody heavy chain variable region, an HA tag, and a polyadenylation signal sequence.

[1440] In some embodiments, the AAV particle genome is VGC152 and comprises a 5′ inverted terminal repeat (ITR) sequence region and a 3′ ITR sequence region, a hSYN promoter, a human beta-globin intron region, a light chain signal sequence, an antibody light chain variable region, a (G4S)5 linker (“(G4S)5” disclosed as SEQ ID NO: 13144), an antibody heavy chain variable region, an HA tag, and a polyadenylation signal sequence.

[1441] In some embodiments, the AAV particle genome is VGC153 and comprises a 5′ inverted terminal repeat (ITR) sequence region and a 3′ ITR sequence region, a hSYN promoter, a human beta-globin intron region, alight chain signal sequence, an antibody light chain variable region, a G4S linker (“G4” disclosed as SEQ ID NO: 13141), an antibody heavy chain variable region, an HA tag, and a polyadenylation signal sequence.

[1442] In some embodiments, the AAV particle genome is VGC154 and comprises a 5′ inverted terminal repeat (ITR) sequence region and a 3′ ITR sequence region, a CMVie region, a human beta-globin intron region, alight chain signal sequence, an antibody light chain variable region, a G4S linker (“G4” disclosed as SEQ ID NO: 13141), an antibody heavy chain variable region, an HA tag, and a polyadenylation signal sequence.

TABLE 66
Viral Genome Cassettes Sequence Regions

| | VGC155 | | VGC156 | | VGC157 | |
|---|---|---|---|---|---|---|
| | Region | | Region | | Region | |
| Sequence | SEQ ID | Region | SEQ ID | Region | SEQ ID | Region |
| Regions | NO | length | NO | length | NO | length |
| 5′ ITR | 13519 | 130 | 13519 | 130 | 13519 | 130 |
| Promoter | 13529 | 557 | 13529 | 557 | 13529 | 557 |
| Intron | 13551 | 566 | 13551 | 566 | 13551 | 566 |
| Signal | 13567 | 57 | 13567 | 57 | 13567 | 57 |
| Variable | — | — | — | — | — | — |
| and/or | | | | | | |
| Constant | | | | | | |
| Linker | 13156 | 75 | 13159 | 120 | 13152 | 15 |
| Variable | — | — | — | — | — | — |
| and/or | | | | | | |
| Constant | | | | | | |
| Tag | 13571 | 27 | 13571 | 27 | 13571 | 27 |
| PolyA | 13576 | 127 | 13576 | 127 | 13576 | 127 |
| 3′ ITR | 13521 | 130 | 13521 | 130 | 13521 | 130 |

[1443] In some embodiments, the AAV particle genome is VGC155 and comprises a 5′ inverted terminal repeat (ITR) sequence region and a 3′ ITR sequence region, a hSYN promoter, a human beta-globin intron region, a heavy chain signal sequence, an antibody heavy chain variable region, a (G4S)5 linker (“(G4S)5” disclosed as SEQ ID NO: 13144), an antibody light chain variable region, an HA tag, and a polyadenylation signal sequence.

[1444] In some embodiments, the AAV particle genome is VGC156 and comprises a 5′ inverted terminal repeat (ITR) sequence region and a 3′ ITR sequence region, a hSYN promoter, a human beta-globin intron region, a heavy chain signal sequence, an antibody heavy chain variable region, a (G4S)8 linker (“(G4)8” disclosed as SEQ ID NO: 13148), an antibody light chain variable region, an HA tag, and a polyadenylation signal sequence.

[1445] In some embodiments, the AAV particle genome is VGC157 and comprises a 5′ inverted terminal repeat (ITR) sequence region and a 3′ ITR sequence region, a hSYN promoter, a human beta-globin intron region, a heavy chain signal sequence, an antibody heavy chain variable region, a G4S linker (“4” disclosed as SEQ ID NO: 13141), an antibody light chain variable region, an HA tag, and a polyadenylation signal sequence.

TABLE 67
Viral Genome Cassettes Sequence Regions

| | VGC158 | | VGC159 | | VGC160 | | VGC161 | | VGC162 | |
|---|---|---|---|---|---|---|---|---|---|---|
| | Region | | Region | | Region | | Region | | Region | |
| Sequence | SEQ ID | Region | SEQ ID | Region | SEQ ID | Region | SEQ ID | Region | SEQ ID | Region |
| Regions | NO | length | NO | length | NO | length | NO | length | NO | length |
| 5′ ITR | 13519 | 130 | 13519 | 130 | 13519 | 130 | 13519 | 130 | 13519 | 130 |
| Promoter | 13534 | 380 | 13534 | 380 | 13534 | 380 | 13534 | 380 | 13534 | 380 |
| Intron | 13551 | 566 | 13551 | 566 | 13551 | 566 | 13551 | 566 | 13551 | 566 |
| Signal | 13567 | 57 | 13567 | 57 | 13567 | 57 | 13567 | 57 | 13567 | 57 |
| Variable | — | — | — | — | — | — | — | — | — | — |
| and/or | | | | | | | | | | |
| Constant | | | | | | | | | | |
| Linker | 13152 | 15 | 13153 | 30 | 1730 | 45 | 13161 | 60 | 13156 | 75 |
| Variable | — | — | — | — | — | — | — | — | — | — |
| and/or | | | | | | | | | | |
| Constant | | | | | | | | | | |
| Tag | 13571 | 27 | 13571 | 27 | 13571 | 27 | 13571 | 27 | 13571 | 27 |
| PolyA | 13576 | 127 | 13576 | 127 | 13576 | 127 | 13576 | 127 | 13576 | 127 |
| 3′ ITR | 13521 | 130 | 13521 | 130 | 13521 | 130 | 13521 | 130 | 13521 | 130 |

[1446] In some embodiments, the AAV particle genome is VGC158 and comprises a 5′ inverted terminal repeat (ITR) sequence region and a 3′ ITR sequence region, a CMVie region, a human beta-globin intron region, a heavy chain signal sequence, an antibody heavy chain variable region, alight chain constant region, a G4S linker (“G4S” disclosed as SEQ ID NO: 13141), an antibody light chain variable region, an HA tag, and a polyadenylation signal sequence.

[1447] In some embodiments, the AAV particle genome is VGC159 and comprises a 5′ inverted terminal repeat (ITR) sequence region and a 3′ITR sequence region, a CMVie region, a human beta-globin intron region, a heavy chain signal sequence, an antibody heavy chain variable region, alight chain constant region, a (G4S)2 linker (“(G4S)4” disclosed as SEQ ID NO: 13145), an antibody light chain variable region, an HA tag, and a polyadenylation signal sequence.

[1448] In some embodiments, the AAV particle genome is VGC160 and comprises a 5′ inverted terminal repeat (ITR) sequence region and a 3′ ITR sequence region, a CMVie region, a human beta-globin intron region, a heavy chain signal sequence, an antibody heavy chain variable region, alight chain constant region, a (G4S)3 linker (“(G4S)3” disclosed as SEQ ID NO: 13143), an antibody light chain variable region, an HA tag, and a polyadenylation signal sequence.

[1449] In some embodiments, the AAV particle genome is VGC161 and comprises a 5′ inverted terminal repeat (ITR) sequence region and a 3′ ITR sequence region, a CMVie region, a human beta-globin intron region, a heavy chain signal sequence, an antibody heavy chain variable region, alight chain constant region, a (G4S)4 linker (“(G4S)4” disclosed as SEQ ID NO: 13146), an antibody light chain variable region, an HA tag, and a polyadenylation signal sequence.

[1450] In some embodiments, the AAV particle genome is VGC162 and comprises a 5′ inverted terminal repeat (ITR) sequence region and a 3′ ITR sequence region, a CMVie region, a human beta-globin intron region, a heavy chain signal sequence, an antibody heavy chain variable region, alight chain constant region, a (G4S)5 linker (“(G4)5” disclosed as SEQ ID NO: 13144), an antibody light chain variable region, an HA tag, and a polyadenylation signal sequence.

TABLE 68
Viral Genome Cassettes Sequence Regions

| | VGC163 | | VGC164 | | VGC165 | | VGC166 | |
|---|---|---|---|---|---|---|---|---|
| | Region | | Region | | Region | | Region | |
| Sequence | SEQ ID | Region | SEQ ID | Region | SEQ ID | Region | SEQ ID | Region |
| Regions | NO | length | NO | length | NO | length | NO | length |
| 5′ ITR | 13519 | 130 | 13519 | 130 | 13519 | 130 | 13519 | 130 |
| Promoter | 13534 | 380 | 13534 | 380 | 13534 | 380 | 13534 | 380 |
| Intron | 13551 | 566 | 13551 | 566 | 13551 | 566 | 13551 | 566 |
| Signal | 13567 | 57 | 13570 | 57 | 13570 | 57 | 13570 | 57 |
| Variable and/or | — | — | — | — | — | — | — | — |
| Constant | | | | | | | | |
| Linker | 13158 | 90 | 1724 | 12 | 1724 | 12 | 1724 | 12 |
| Linker | — | — | 1726 | 54 | 1726 | 54 | 1726 | 54 |
| Signal | — | — | — | — | 13569 | 57 | 13569 | 57 |
| Variable and/or | — | — | — | — | — | — | — | — |
| Constant | | | | | | | | |
| Tag | 13571 | 27 | — | — | — | — | — | — |
| PolyA | 13576 | 127 | 13576 | 127 | 13576 | 127 | 13576 | 127 |
| 3′ ITR | 13521 | 130 | 13521 | 130 | 13521 | 136 | 13521 | 130 |

[1451] In some embodiments, the AAV particle genome is VGC163 an comprises a 5′ inverted terminal repeat (ITR) sequence region and a 3′ ITR sequence region, a CMVie region, a human beta-globin intron region, a heavy chain signal sequence, an antibody heavy chain variable region, a light chain constant region, a (G4S)6 linker (“(G4S)4” disclosed as SEQ ID NO: 13147), an antibody light chain variable region, an HA tag, and a polyadenylation signal sequence.

[1452] In some embodiments, the AAV particle genome is VGC164 and comprises a 5′ inverted terminal repeat (ITR) sequence region and a 3′ ITR sequence region, a CMVie region, a human beta-globin intron region, a heavy chain signal sequence, an antibody heavy chain variable region, a heavy chain constant region, a furin cleavage site, a T2A linker, a light chain constant region, and a polyadenylation signal sequence.

[1453] In some embodiments, the AAV particle genome is VGC165 and comprises a 5′ inverted terminal repeat (ITR) sequence region and a 3′ITR sequence region, a CMVie region, a human beta-globin intron region, a heavy chain signal sequence, an antibody heavy chain variable region, a heavy chain constant region, a furin cleavage site, a T2A linker, alight chain signal sequence, an antibody light chain variable region, alight chain constant region, and a polyadenylation signal sequence.

[1454] In some embodiments, the AAV particle genome is VGC166 and comprises a 5′ inverted terminal repeat (ITR) sequence region and a 3′ ITR sequence region, a CMVie region, a human beta-globin intron region, a heavy chain signal sequence, an antibody heavy chain variable region, a heavy chain constant region, a furin cleavage site, a T2A linker, a light chain signal sequence, an antibody light chain variable region, a light chain constant region, and a polyadenylation signal sequence.

TABLE 69
Viral Genome Cassettes Sequence Regions

| | VGC167 | | VGC168 | | VGC169 | | VGC176 | | VGC171 | |
|---|---|---|---|---|---|---|---|---|---|---|
| | Region | | Region | | Region | | Region | | Region | |
| Sequence | SEQ ID | Region | SEQ ID | Region | SEQ ID | Region | SEQ ID | Region | SEQ ID | Region |
| Regions | NO | length | NO | length | NO | length | NO | length | NO | length |
| 5′ ITR | 13519 | 136 | 13519 | 130 | 13519 | 130 | 13519 | 130 | 13519 | 130 |
| Promoter | 13534 | 386 | 13534 | 380 | 13534 | 380 | 13534 | 380 | 13534 | 380 |
| Intron | 13551 | 566 | 13551 | 566 | 13551 | 566 | 13551 | 566 | 13551 | 566 |
| Signal | 13569 | 57 | 13569 | 57 | 13569 | 57 | 13569 | 57 | 13569 | 57 |
| Variable and/or | — | — | — | — | — | — | — | — | — | — |
| Constant | | | | | | | | | | |
| Linker | 13153 | 30 | 1730 | 45 | 13161 | 60 | 13156 | 75 | 13158 | 90 |
| Variable and/or | — | — | — | — | — | — | — | — | — | — |
| Constant | | | | | | | | | | |
| Tag | 13571 | 27 | 13571 | 27 | 13571 | 27 | 13571 | 27 | 13571 | 27 |
| PolyA | 13576 | 127 | 13576 | 127 | 13576 | 127 | 13576 | 127 | 13576 | 127 |
| 3′ ITR | 13521 | 130 | 13521 | 130 | 13521 | 130 | 13521 | 130 | 13521 | 130 |

[1455] In some embodiments, the AAV particle genome is VGC167 and comprises a 5′ inverted terminal repeat (ITR) sequence region and a 3′ ITR sequence region, a CMVie region, a human beta-globin intron region, a light chain signal sequence, an antibody light chain variable region, a (G4S)2 linker (“(G4)4” disclosed as SEQ ID NO: 13145), an antibody heavy chain variable region, an HA tag, and a polyadenylation signal sequence.

[1456] In some embodiments, the AAV particle genome is VGC168 and comprises a 5′ inverted terminal repeat (ITR) sequence region and a 3′ ITR sequence region, a CMVie region, a human beta-globin intron region, alight chain signal sequence, an antibody light chain variable region, a (G4S)3 linker (“(G4S)3” disclosed as SEQ ID NO: 13143), an antibody heavy chain variable region, an HA tag, and a polyadenylation signal sequence.

[1457] In some embodiments, the AAV particle genome is VGC169 and comprises a 5′ inverted terminal repeat (ITR) sequence region and a 3′ ITR sequence region, a CMVie region, a human beta-globin intron region, a light chain signal sequence, an antibody light chain variable region, a (G4S)4 linker (“(G48)4” disclosed as SEQ ID NO: 13146), an antibody heavy chain variable region, an HA tag, and a polyadenylation signal sequence.

[1458] In some embodiments, the AAV particle genome is VGC170 and comprises a 5′ inverted terminal repeat (ITR) sequence region and a 3′ ITR sequence region, a CMVie region, a human beta-globin intron region, alight chain signal sequence, an antibody light chain variable region, a (G4S)5 linker (“(G4S)5” disclosed as SEQ ID NO: 13144), an antibody heavy chain variable region, an HA tag, and a polyadenylation signal sequence.

[1459] In some embodiments, the AAV particle genome is VGC171 and comprises a 5′ inverted terminal repeat (ITR) sequence region and a 3′ ITR sequence region, a CMVie region, a human beta-globin intron region, a light chain signal sequence, an antibody light chain variable region, a (G4S)6 linker (“(G4S)4” disclosed as SEQ ID NO: 13147), an antibody heavy chain variable region, an HA tag, and a polyadenylation signal sequence.

TABLE 70
Viral Genome Cassettes Sequence Regions

| | VGC172 | | VGC173 | |
|---|---|---|---|---|
| | Region | Region | Region | Region |
| Sequence Regions | SEQ ID NO | length | SEQ ID NO | length |
| 5′ ITR | 13519 | 130 | 13520 | 141 |
| CAG Promoter | 13523 | 1715 | 13523 | 1715 |
| CMVie | 13524 | 299 | 13524 | 299 |
| CBA min. | 13525 | 283 | 13525 | 283 |
| Variable and/or Constant | — | — | — | — |
| Linker | 1724 | 12 | 1730 | 45 |
| Linker | 1726 | 54 | — | — |
| Variable and/or Constant | — | — | — | — |
| PolyA | 13576 | 127 | 13577 | 477 |
| Filler | — | — | 13580 | 1240 |
| 3′ ITR | 13521 | 130 | 13522 | 141 |

[1460] In some embodiments, the AAV particle genome is VGC172 and comprises a 5′ inverted terminal repeat (ITR) sequence region and a 3′ ITR sequence region, a CAG promoter comprising a CMVie region and a minimal CBA promoter region, an antibody heavy chain variable region, a furin cleavage site, a T2A linker, an antibody light chain variable region and a polyadenylation signal sequence.

[1461] In some embodiments, the AAV particle genome is VGC173 and comprises a 5′ inverted terminal repeat (ITR) sequence region and a 3′ ITR sequence region, a CAG promoter comprising a CMVie region and a minimal CBA promoter region, an antibody heavy chain variable region, a furin cleavage site, an antibody light chain variable region, a polyadenylation signal sequence and a filler sequence.

TABLE 71
Viral Genome Cassettes Sequence Regions

| | VGC174 | | VGC175 | | VGC176 | |
|---|---|---|---|---|---|---|
| | Region | | Region | | Region | |
| Sequence | SEQ ID | Region | SEQ ID | Region | SEQ ID | Region |
| Regions | NO | length | NO | length | NO | length |
| 5′ ITR | 13519 | 130 | 13519 | 130 | 13519 | 130 |
| Promoter | 13527 | 654 | 13528 | 699 | 5086 | 557 |
| Intron | 13551 | 566 | 13551 | 566 | 13551 | 566 |
| Variable and/or | — | — | — | — | — | — |
| Constant | | | | | | |
| Linker | 1724 | 12 | 1724 | 12 | 1724 | 12 |
| Linker | 1726 | 54 | 1726 | 54 | 1726 | 54 |
| Variable and/or | — | — | — | — | — | — |
| Constant | | | | | | |
| PolyA | 13576 | 127 | 13576 | 127 | 13576 | 127 |
| 3′ ITR | 13521 | 130 | 13521 | 130 | 13521 | 130 |

[1462] In some embodiments, the AAV particle genome is VGC174 and comprises a 5′ inverted terminal repeat (ITR) sequence region and a 3′ITR sequence region, a CBA promoter, a human beta-globin intron region, an antibody heavy chain variable region, a furin cleavage site, a T2A linker, an antibody light chain variable region, and a polyadenylation sequence.

[1463] In some embodiments, the AAV particle genome is VGC175 and comprises a 5′ inverted terminal repeat (ITR) sequence region and a 3′ITR sequence region, a GFAP promoter, a human beta-globin intron region, an antibody heavy chain variable region, a furin cleavage site, a T2A linker, an antibody light chain variable region, and a polyadenylation sequence.

[1464] In some embodiments, the AAV particle genome is VGC176 and comprises a 5′ inverted terminal repeat (ITR) sequence region and a 3′ITR sequence region, a synapsin promoter, a human beta-globin intron region, an antibody heavy chain variable region, a furin cleavage site, a T2A linker, an antibody light chain variable region, and a polyadenylation sequence.

TABLE 72
Viral Genome Cassettes Sequence Regions

| | VGC177 | | VGC178 | | VGC179 | | VGC180 | |
|---|---|---|---|---|---|---|---|---|
| | Region | | Region | | Region | | Region | |
| Sequence | SEQ ID | Region | SEQ ID | Region | SEQ ID | Region | SEQ ID | Region |
| Regions | NO | length | NO | length | NO | length | NO | length |
| 5′ ITR | 13520 | 141 | 13520 | 141 | 13520 | 141 | 13520 | 141 |
| CBA Promoter | 13527 | 654 | 13527 | 654 | 13527 | 654 | 13527 | 654 |
| Intron | 13552 | 491 | 13553 | 387 | 13554 | 292 | — | — |
| Variable and/or | — | — | — | — | — | — | — | — |
| Constant | | | | | | | | |
| Linker | 1730 | 45 | 1730 | 45 | 1730 | 45 | 1730 | 45 |
| Variable and/or | — | — | — | — | — | — | — | — |
| Constant | | | | | | | | |
| HA Tag | 13571 | 27 | 13571 | 27 | 13571 | 27 | — | — |
| PolyA | 13576 | 127 | 13576 | 127 | 13576 | 127 | 13577 | 477 |
| Filler | — | — | — | — | — | — | 13580 | 1240 |
| 3′ ITR | 13522 | 141 | 13522 | 141 | 13522 | 141 | 13522 | 141 |

[1465] In some embodiments, the AAV particle genome is VGC177 and comprises a 5′ inverted terminal repeat (ITR) sequence region and a 3′ITR sequence region, a CAB promoter, a human beta-globin intron region, an antibody heavy chain variable region, a furin cleavage site, an antibody light chain variable region, a HA tag and a polyadenylation sequence.

[1466] In some embodiments, the AAV particle genome is VGC173 and comprises a 5′ inverted terminal repeat (ITR) sequence region and a 3′ITR sequence region, a CBA promoter, a human beta-globin intron region, an antibody heavy chain variable region, a furin cleavage site, an antibody light chain variable region, a HA tag and a polyadenylation sequence.

[1467] In some embodiments, the AAV particle genome is VGC179 and comprises a 5′ inverted terminal repeat (ITR) sequence region and a 3′ITR sequence region, a CBA promoter, a human beta-globin intron region, an antibody heavy chain variable region, a furin cleavage site, an antibody light chain variable region, a HA tag and a polyadenylation sequence.

[1468] In some embodiments, the AAV particle genome is VGC180 and comprises a 5′ inverted terminal repeat (ITR) sequence region and a 3′ITR sequence region, a CBA promoter, an antibody heavy chain variable region, a furin cleavage site, an antibody light chain variable region, a polyadenylation signal sequence and a filler sequence.

TABLE 73
Viral Genome Cassettes Sequence Regions

| | VGC181 | | VGC181 | | VGC182 | | VGC182 | |
|---|---|---|---|---|---|---|---|---|
| | Region | | Region | | Region | | Region | |
| Sequence | SEQ ID | Region | SEQ ID | Region | SEQ ID | Region | SEQ ID | Region |
| Regions | NO | length | NO | length | NO | length | NO | length |
| 5′ ITR | 13519 | 130 | 13519 | 130 | 13519 | 130 | 13519 | 130 |
| CAG promoter | 13523 | 1715 | 13523 | 1715 | 13523 | 1715 | 13523 | 1715 |
| CMVie | 13524 | 299 | 13524 | 299 | 13524 | 299 | 13524 | 299 |
| CBA min. | 13525 | 283 | 13525 | 283 | 13525 | 283 | 13525 | 283 |
| Signal | 13567 | 57 | 13567 | 57 | 13567 | 57 | 13567 | 57 |
| Variable and/or | — | — | — | — | — | — | — | — |
| Constant | | | | | | | | |
| Linker | 13154 | 45 | 13154 | 45 | 13154 | 45 | 13154 | 45 |
| Variable and/or | — | — | — | — | — | — | — | — |
| Constant | | | | | | | | |
| HA Tag | 13571 | 27 | 13571 | 27 | 13571 | 27 | 13571 | 27 |
| PolyA | 13576 | 127 | 13576 | 127 | 13576 | 127 | 13576 | 127 |
| 3′ ITR | 13521 | 130 | 13521 | 130 | 13521 | 136 | 13521 | 130 |

[1469] In some embodiments, the AAV particle genome is VGC181 and comprises a 5′ inverted terminal repeat (ITR) sequence region and a 3′ ITR sequence region, a CAG promoter comprising a CMVie region and a minimal CBA promoter region, a heavy chain signal, an antibody heavy chain variable region, a (G4S)3 linker, a light chain signal, an antibody light chain variable region, a HA tag, and a polyadenylation signal sequence.

[1470] In some embodiments, the AAV particle genome is VGC182 and comprises a 5′ inverted terminal repeat (ITR) sequence region and a 3′ITR sequence region, a CAG promoter comprising a CMVie region and a minimal CBA promoter region, a heavy chain signal, an antibody heavy chain variable region, a (G4S)3 linker, alight chain signal, an antibody light chain variable region, a HA tag, and a polyadenylation signal sequence.

[1471] In some embodiments, the AAV particle genome is VGC183 and comprises a 5′ inverted terminal repeat (ITR) sequence region and a 3′ ITR sequence region, a CAG promoter comprising a CMVie region and a minimal CBA promoter region, a heavy chain signal, an antibody heavy chain variable region, a (G4S)3 linker, alight chain signal, an antibody light chain variable region, a HA tag, and a polyadenylation signal sequence.

[1472] In some embodiments, the AAV particle genome is VGC184 and comprises a 5′ inverted terminal repeat (ITR) sequence region and a 3′ITR sequence region, a CAG promoter comprising a CMVie region and a minimal CBA promoter region, a heavy chain signal, an antibody heavy chain variable region, a (G4S)3 linker, a light chain signal, an antibody light chain variable region, a HA tag, and a polyadenylation signal sequence

TABLE 74
Viral Genome Cassettes Sequence Regions

| | VGC185 | | VGC186 | | VGC187 | | VGC188 | |
|---|---|---|---|---|---|---|---|---|
| | Region | | Region | | Region | | Region | |
| Sequence | SEQ ID | Region | SEQ ID | Region | SEQ ID | Region | SEQ ID | Region |
| Regions | NO | length | NO | length | NO | length | NO | length |
| 5′ ITR | 13519 | 130 | 13519 | 136 | 13519 | 136 | 13519 | 136 |
| SAG promoter | 13523 | 1715 | 13523 | 1715 | 13523 | 1715 | 13523 | 1715 |
| CMVie | 13524 | 299 | 13524 | 299 | 13524 | 299 | 13524 | 299 |
| CBA min. | 13525 | 283 | 13525 | 283 | 13525 | 283 | 13525 | 283 |
| Signal | 13567 | 57 | 13567 | 57 | 13567 | 57 | 13567 | 57 |
| Variable and/or | — | — | — | — | — | — | — | — |
| Constant | | | | | | | | |
| Linker | 13154 | 45 | 13154 | 45 | 13154 | 45 | 13154 | 45 |
| Variable and/or | — | — | — | — | — | — | — | — |
| Constant | | | | | | | | |
| HA Tag | 13571 | 27 | 13571 | 27 | 13571 | 27 | 13571 | 27 |
| PolyA | 13576 | 127 | 13576 | 127 | 13576 | 127 | 13576 | 127 |
| 3′ ITR | 13521 | 130 | 13521 | 136 | 13521 | 136 | 13521 | 130 |

[1473] In some embodiments, the AAV particle genome is VGC185 and comprises a 5′ inverted terminal repeat (ITR) sequence region and a 3′ ITR sequence region, a CAG promoter comprising a CMVie region and a minimal CBA promoter region, a heavy chain signal, an antibody heavy chain variable region, a (G4S)3 linker, a light chain signal, an antibody light chain variable region, a HA tag, and a polyadenylation signal sequence.

[1474] In some embodiments, the AAV particle genome is VGC186 and comprises a 5′ inverted terminal repeat (ITR) sequence region and a 3′ ITR sequence region, a CAG promoter comprising a CMVie region and a minimal CBA promoter region, a heavy chain signal, an antibody heavy chain variable region, a (G4S)3 linker, alight chain signal, an antibody light chain variable region, a HA tag, and a polyadenylation signal sequence.

[1475] In some embodiments, the AAV particle genome is VGC187 and comprises a 5′ inverted terminal repeat (ITR) sequence region and a 3′ ITR sequence region, a CAG promoter comprising a CMVie region and a minimal CBA promoter region, a heavy chain signal, an antibody heavy chain variable region, a (G4S)3 linker, alight chain signal, an antibody light chain variable region, a HA tag, and a polyadenylation signal sequence.

[1476] In some embodiments, the AAV particle genome is VGC188 and comprises a 5′ inverted terminal repeat (ITR) sequence region and a 3′ITR sequence region, a CAG promoter comprising a CMVie region and a minimal CBA promoter region, a heavy chain signal, an antibody heavy chain variable region, a (G4S)3 linker, a light chain signal, an antibody light chain variable region, a HA tag, and a polyadenylation signal sequence.

TABLE 75
ViraI Genome Cassettes Sequence Regions

| | VGC189 | | VGC190 | |
|---|---|---|---|---|
| | Region | Region | Region | Region |
| Sequence Regions | SEQ ID NO | length | SEQ ID NO | length |
| 5′ ITR | 13519 | 130 | 13519 | 130 |
| CAG Promoter | 13523 | 1715 | 13523 | 1715 |
| CMVie | 13524 | 299 | 13524 | 299 |
| CBA min. | 13525 | 283 | 13525 | 283 |
| Signal | 13567 | 57 | 13567 | 57 |
| Variable and/or Constant | — | — | — | — |
| Linker | 13153 | 30 | 13155 | 60 |
| Variable and/or Constant | — | — | — | — |
| HA Tag | 13571 | 27 | 13571 | 27 |
| PolyA | 13576 | 127 | 13576 | 127 |
| 3′ ITR | 13521 | 130 | 13521 | 130 |

[1477] In some embodiments, the AAV particle genome is VGC189 and comprises a 5′ inverted terminal repeat (ITR) sequence region and a 3′ITR sequence region, a CAG promoter comprising a CMVie region and a minimal CBA promoter region, a heavy chain signal, an antibody heavy chain variable region, a (G4S)2 linker, a light chain signal, an antibody light chain variable region, a HA tag, and a polyadenylation signal sequence.

[1478] In some embodiments, the AAV particle genome is VGC190 and comprises a 5′ inverted terminal repeat (ITR) sequence region and a 3′ITR sequence region, a CAG promoter comprising a CMVie region and a minimal CBA promoter region, a heavy chain signal, an antibody heavy chain variable region, a (G4S)4 linker, alight chain signal, an antibody light chain variable region, a HA tag, and a polyadenylation signal sequence.

TABLE 76
Viral Genome Cassettes Sequence Regions

| | VGC191 | | VGC192 | |
|---|---|---|---|---|
| | Region | Region | Region | Region |
| Sequence Regions | SEQ ID NO | length | SEQ ID NO | length |
| 5′ ITR | 13519 | 130 | 13519 | 130 |
| CAG Promoter | 13523 | 1715 | 13523 | 1715 |
| CMVie | 13524 | 299 | 13524 | 299 |
| CBA min. | 13525 | 283 | 13525 | 283 |
| Signal | 13567 | 57 | 13567 | 57 |
| Variable and/or Constant | — | — | — | — |
| Linker | 1725 | 12 | 1725 | 12 |
| Linker | 1727 | 75 | 1727 | 75 |
| Signal | 13569 | 57 | 13569 | 57 |
| Variable and/or Constant | — | — | — | — |
| PolyA | 13576 | 127 | 13576 | 127 |
| 3′ ITR | 13521 | 130 | 13521 | 130 |

[1479] In some embodiments, the AAV particle genome is VGC191 and comprises a 5′ inverted terminal repeat (ITR) sequence region and a 3′ITR sequence region, a CAG promoter comprising a CMVie region and a minimal CBA promoter region, a heavy chain signal, an antibody heavy chain variable and constant region, a furin cleavage site, a F2A linker, alight chain signal, an antibody light chain variable and constant region and a polyadenylation signal sequence.

[1480] In some embodiments, the AAV particle genome is VGC192 and comprises a 5′ inverted terminal repeat (ITR) sequence region and a 3′ITR sequence region, a CAG promoter comprising a CMVie region and a minimal CBA promoter region, a heavy chain signal, an antibody heavy chain variable and constant region, a furin cleavage site, a F2A linker, a light chain signal, an antibody light chain variable and constant region and a polyadenylation signal sequence.

TABLE 77
Viral Genome Cassettes Sequence Regions

| | VGC193 | | VGC194 | | VGC195 | | VGC196 | |
|---|---|---|---|---|---|---|---|---|
| | Region | | Region | | Region | | Region | |
| Sequence | SEQ ID | Region | SEQ ID | Region | SEQ ID | Region | SEQ ID | Region |
| Regions | NO | length | NO | length | NO | length | NO | length |
| 5′ ITR | 13519 | 130 | 13519 | 130 | 13519 | 130 | 13519 | 130 |
| CAG promoter | 13523 | 1715 | 13523 | 1715 | 13523 | 1715 | 13523 | 1715 |
| CMVie | 13524 | 299 | 13524 | 299 | 13524 | 299 | 13524 | 299 |
| CBA min. | 13525 | 283 | 13525 | 283 | 13525 | 283 | 13525 | 283 |
| Signal | 13567 | 57 | 13567 | 57 | 13567 | 57 | 13567 | 57 |
| Variable and/or | — | — | — | — | — | — | — | — |
| Constant | | | | | | | | |
| Linker | 1724 | 12 | 1724 | 12 | 1724 | 12 | 1724 | 12 |
| Linker | 1726 | 54 | 1726 | 54 | 1726 | 54 | 1726 | 54 |
| Signal | 13569 | 57 | 13569 | 57 | 13569 | 57 | 13569 | 57 |
| Variable and/or | — | — | — | — | — | — | — | — |
| Constant | | | | | | | | |
| PolyA | 1357S | 127 | 13576 | 127 | 13576 | 127 | 13576 | 127 |
| 3′ ITR | 13521 | 136 | 13521 | 136 | 13521 | 130 | 13521 | 136 |

[1481] In some embodiments, the AAV particle genome is VGC193 and comprises a 5′ inverted terminal repeat (ITR) sequence region and a 3′ITR sequence region, a CAG promoter comprising a CMVie region and a minimal CBA promoter region, a heavy chain signal, an antibody heavy chain variable and constant region, a furin cleavage site, a T2A linker, a light chain signal, an antibody light chain variable and constant region and a polyadenylation signal sequence.

[1482] In some embodiments, the AAV particle genome is VGC194 and comprises a 5′ inverted terminal repeat (ITR) sequence region and a 3′ ITR sequence region, a CAG promoter comprising a CMVie region and a minimal CBA promoter region, a heavy chain signal, an antibody heavy chain variable and constant region, a furin cleavage site, a T2A linker, a light chain signal, an antibody light chain variable and constant region and a polyadenylation signal sequence.

[1483] In some embodiments, the AAV particle genome is VGC195 and comprises a 5′ inverted terminal repeat (ITR) sequence region and a 3′ ITR sequence region, a CAG promoter comprising a CMVie region and a minimal CBA promoter region, a heavy chain signal, an antibody heavy chain variable and constant region, a furin cleavage site, a T2A linker, alight chain signal, an antibody light chain variable and constant region and a polyadenylation signal sequence.

[1484] In some embodiments, the AAV particle genome is VGC196 and comprises a 5′ inverted terminal repeat (ITR) sequence region and a 3′ ITR sequence region, a CAG promoter comprising a CMVie region and a minimal CBA promoter region, a heavy chain signal, an antibody heavy chain variable and constant region, a furin cleavage site, a T2A linker, alight chain signal, an antibody light chain variable and constant region and a polyadenylation signal sequence.

TABLE 78
Viral Genome Cassettes Sequence Regions

| | VGC197 | | VGC198 | |
|---|---|---|---|---|
| | Region | Region | Region | Region |
| Sequence Regions | SEQ ID NO | length | SEQ ID NO | length |
| 5′ ITR | 13519 | 130 | 13519 | 130 |
| CAG Promoter | 13523 | 1715 | 13523 | 1715 |
| CMVie | 13524 | 299 | 13524 | 299 |
| CBA min. | 13525 | 283 | 13525 | 283 |
| Signal | 13567 | 57 | 13567 | 57 |
| Variable and/or Constant | — | — | — | — |
| Linker | 1737 | 198 | 1737 | 198 |
| Linker | 1724 | 12 | 1724 | 12 |
| Linker | 1727 | 75 | 1726 | 54 |
| Signal | 13569 | 57 | 13569 | 57 |
| Variable and/or Constant | — | — | — | — |
| PolyA | 13576 | 127 | 13576 | 127 |
| 3′ ITR | 13521 | 130 | 13521 | 130 |

[1485] In some embodiments, the AAV particle genome is VGC197 and comprises a 5′ inverted terminal repeat (ITR) sequence region and a 3′ITR sequence region, a CAG promoter comprising a CMVie region and a minimal CBA promoter region, a heavy chain signal, an antibody heavy chain variable and constant region, a hinge region, a furin cleavage site, a F2A linker, a light chain signal, an antibody light chain variable and constant region and a polyadenylation signal sequence.

[1486] In some embodiments, the AAV particle genome is VGC198 and comprises a 5′ inverted terminal repeat (ITR) sequence region and a 3′ ITR sequence region, a CAG promoter comprising a CMVie region and a minimal CBA promoter region, a heavy chain signal, an antibody heavy chain variable and constant region, a hinge region, a furin cleavage site, a T2A linker, a light chain signal, an antibody light chain variable and constant region and a polyadenylation signal sequence.

TABLE 79
Viral Genome Cassettes Sequence Regions

| | VGC199 | | VGC200 | |
|---|---|---|---|---|
| | Region | Region | Region | Region |
| Sequence Regions | SEQ ID NO | length | SEQ ID NO | length |
| 5′ ITR | 13519 | 130 | 13519 | 130 |
| CAG Promoter | 13523 | 1715 | 13523 | 1715 |
| CMVie | 13524 | 299 | 13524 | 299 |
| CBA min. | 13525 | 283 | 13525 | 283 |
| Signal | 13569 | 57 | 13567 | 57 |
| Variable and/or Constant | — | — | — | — |
| Linker | 13154 | 45 | 13154 | 45 |
| Variable and/or Constant | — | — | — | — |
| HA Tag | 13571 | 27 | 13571 | 27 |
| PolyA | 13576 | 127 | 13576 | 127 |
| 3′ ITR | 13521 | 130 | 13521 | 130 |

[1487] In some embodiments, the AAV particle genome is VGC199 and comprises a 5′ inverted terminal repeat (ITR) sequence region and a 3′ ITR sequence region, a CAG promoter comprising a CMVie region and a minimal CBA promoter region, a light chain signal, an antibody heavy chain variable region, a (G4S)3 linker, an antibody light chain variable region, a HA tag and a polyadenylation signal sequence.

[1488] In some embodiments, the AAV particle genome is VGC200 and comprises a 5′ inverted terminal repeat (ITR) sequence region and a 3′ ITR sequence region, a CAG promoter comprising a CMVie region and a minimal CBA promoter region, a heavy chain signal, an antibody light chain variable region, a (G4S)3 linker, an antibody heavy chain variable region, a HA tag and a polyadenylation signal sequence.

TABLE 80
Viral Genome Cassettes Sequence Regions

| | VGC201 | | VGC202 | | VGC203 | | VGC204 | |
|---|---|---|---|---|---|---|---|---|
| | Region | | Region | | Region | | Region | |
| Sequence | SEQ ID | Region | SEQ ID | Region | SEQ ID | Region | SEQ ID | Region |
| Regions | NO | length | NO | length | NO | length | NO | length |
| 5′ ITR | 13519 | 130 | 13519 | 139 | 13519 | 130 | 13519 | 130 |
| CAG promoter | 13523 | 1715 | 13523 | 1715 | 13523 | 1715 | 13523 | 1715 |
| CMVie | 13524 | 299 | 13524 | 299 | 13524 | 299 | 13524 | 299 |
| CBA min. | 13525 | 283 | 13525 | 283 | 13525 | 283 | 13525 | 283 |
| Signal | 13569 | 57 | 13569 | 57 | 13569 | 57 | 13569 | 57 |
| Variable and/or | — | — | — | — | — | — | — | — |
| Constant | | | | | | | | |
| Linker | 13153 | 39 | 13154 | 45 | 13154 | 45 | 13155 | 60 |
| Variable and/or | — | — | — | — | — | — | — | — |
| Constant | | | | | | | | |
| HA Tag | 13571 | 27 | 13571 | 27 | 13575 | 18 | 13571 | 27 |
| PolyA | 13576 | 127 | 13576 | 127 | 13576 | 127 | 13576 | 127 |
| 3′ ITR | 13521 | 130 | 13521 | 130 | 13521 | 130 | 13521 | 130 |

[1489] In some embodiments, the AAV particle genome is VGC201 and comprises a 5′ inverted terminal repeat (ITR) sequence region and a 3′ ITR sequence region, a CAG promoter comprising a CMVie region and a minimal CBA promoter region, a light chain signal, an antibody light chain variable region, a (G4S)2 linker, an antibody heavy chain variable region, a HA tag and a polyadenylation signal sequence.

[1490] In some embodiments, the AAV particle genome is VGC202 and comprises a 5′ inverted terminal repeat (ITR) sequence region and a 3′ ITR sequence region, a CAG promoter comprising a CMVie region and a minimal CBA promoter region, a light chain signal, an antibody light chain variable region, a (G4S)3 linker, an antibody heavy chain variable region, a HA tag and a polyadenylation signal sequence.

[1491] In some embodiments, the AAV particle genome is VGC203 and comprises a 5′ inverted terminal repeat (ITR) sequence region and a 3′ ITR sequence region, a CAG promoter comprising a CMVie region and a minimal CBA promoter region, a light chain signal, an antibody light chain variable region, a (G4S)3 linker, an antibody heavy chain variable region, a HA tag and a polyadenylation signal sequence.

[1492] In some embodiments, the AAV particle genome is VGC204 and comprises a 5′ inverted terminal repeat (ITR) sequence region and a 3′ ITR sequence region, a CAG promoter comprising a CMVie region and a minimal CBA promoter region, a light chain signal, an antibody light chain variable region, a (G4S)4 linker, an antibody heavy chain variable region, a HA tag and a polyadenylation signal sequence.

TABLE 81
Viral Genome Cassettes Sequence Regions

| | VGC205 | | VGC206 | | VGC207 | | VGC208 | | VGC209 | |
|---|---|---|---|---|---|---|---|---|---|---|
| | Region | | Region | | Region | | Region | | Region | |
| Sequence | SEQ ID | Region | SEQ ID | Region | SEQ ID | Region | SEQ ID | Region | SEQ ID | Region |
| Regions | NO | length | NO | length | NO | length | NO | length | NO | length |
| 5′ ITR | 13519 | 130 | 13519 | 130 | 13519 | 130 | 13519 | 130 | 13519 | 130 |
| CAG promoter | 13523 | 1715 | 13523 | 1715 | 13523 | 1715 | 13523 | 1715 | 13523 | 1715 |
| CMVie | 13524 | 299 | 13524 | 299 | 13524 | 299 | 13524 | 299 | 13524 | 299 |
| CBA min. | 13525 | 283 | 13525 | 283 | 13525 | 283 | 13525 | 283 | 13525 | 283 |
| Signal | 13569 | 57 | 13569 | 57 | 13569 | 57 | 13569 | 57 | 13569 | 57 |
| Variable and/or | — | — | — | — | — | — | — | — | — | — |
| Constant | | | | | | | | | | |
| Linker | 1727 | 75 | 1727 | 75 | 1726 | 54 | 1726 | 54 | 1726 | 54 |
| Signal | 13567 | 57 | 13567 | 57 | 13570 | 57 | 13567 | 57 | 13567 | 57 |
| Variable and/or | — | — | — | — | — | — | — | — | — | — |
| Constant | | | | | | | | | | |
| PolyA | 13576 | 127 | 13576 | 127 | 13576 | 127 | 13576 | 127 | 13576 | 127 |
| 3′ ITR | 13521 | 130 | 13521 | 130 | 13521 | 130 | 13521 | 130 | 13521 | 130 |

[1493] In some embodiments, the AAV particle genome is VGC205 and comprises a 5′ inverted terminal repeat (ITR) sequence region and a 3′ITR sequence region, a CAG promoter comprising a CMVie region and a minimal CBA promoter region, a light chain signal, an antibody light chain variable and constant region, a F2A linker, a heavy chain signal, an antibody heavy chain variable and constant region and a polyadenylation signal sequence.

[1494] In some embodiments, the AAV particle genome is VGC206 and comprises a 5′ inverted terminal repeat (ITR) sequence region and a 3′ITR sequence region, a CAG promoter comprising a CMVie region and a minimal CBA promoter region, a light chain signal, an antibody light chain variable and constant region, a F2A linker, a heavy chain signal, an antibody heavy chain variable and constant region and a polyadenylation signal sequence.

[1495] In some embodiments, the AAV particle genome is VGC207 and comprises a 5′ inverted terminal repeat (ITR) sequence region and a 3′ ITR sequence region, a CAG promoter comprising a CMVie region and a minimal CBA promoter region, a light chain signal, an antibody light chain variable and constant region, a T2A linker, a heavy chain signal, an antibody heavy chain variable and constant region and a polyadenylation signal sequence.

[1496] In some embodiments, the AAV particle genome is VGC208 and comprises a 5′ inverted terminal repeat (ITR) sequence region and a 3′ITR sequence region, a CAG promoter comprising a CMVie region and a minimal CBA promoter region, a light chain signal, an antibody light chain variable and constant region, a T2A linker, a heavy chain signal, an antibody heavy chain variable and constant region and a polyadenylation signal sequence.

[1497] In some embodiments, the AAV particle genome is VGC209 and comprises a 5′ inverted terminal repeat (ITR) sequence region and a 3′ ITR sequence region, a CAG promoter comprising a CMVie region and a minimal CBA promoter region, a light chain signal, an antibody light chain variable and constant region, a T2A linker, a heavy chain signal, an antibody heavy chain variable and constant region and a polyadenylation signal sequence.

TABLE 82
Viral Genome Cassettes Sequence Regions

| | VGC210 | | VGC211 | |
|---|---|---|---|---|
| | Region | Region | Region | Region |
| Sequence Regions | SEQ ID NO | length | SEQ ID NO | length |
| 5′ ITR | 13519 | 130 | 13519 | 130 |
| CAG Promoter | 13523 | 1715 | 13523 | 1715 |
| CMVie | 13524 | 299 | 13524 | 299 |
| CBA min. | 13525 | 283 | 13525 | 283 |
| Signal | 13569 | 57 | 13569 | 57 |
| Variable and/or Constant | — | — | — | — |
| Linker | 1724 | 12 | 1724 | 12 |
| Linker | 1726 | 54 | 1726 | 54 |
| Signal | 13567 | 57 | 13567 | 57 |
| Variable and/or Constant | — | — | — | — |
| PolyA | 13576 | 127 | 13576 | 127 |
| 3′ ITR | 13521 | 130 | 13521 | 130 |

[1498] in some embodiments, the AAV particle genome is VGC211 an comprises a 5′ inverted terminal repeat sequence region and a 3′ITR sequence region, a CAG promoter comprising a CMVie region and a minimal CBA promoter region, a light chain signal, an antibody light chain variable and constant region, a furin cleavage site, a T2A linker, a heavy chain signal, an antibody heavy chain variable and constant region and a polyadenylation signal sequence.

[1499] In some embodiments, the AAV particle genome is VGC212 and comprises a 5′ inverted terminal repeat (ITR) sequence region and a 3′ITR sequence region, a CAG promoter comprising a CMVie region and a minimal CBA promoter region, a light chain signal, an antibody light chain variable and constant region, a furin cleavage site, a T2A linker, a heavy chain signal, an antibody heavy chain variable and constant region and a polyadenylation signal sequence.

TABLE 83
Viral Genome Cassettes Sequence Regions

| | VGC212 | | VGC213 | | VGC214 | |
|---|---|---|---|---|---|---|
| | Region | | Region | | Region | |
| Sequence | SEQ ID | Region | SEQ ID | Region | SEQ ID | Region |
| Regions | NO | length | NO | length | NO | length |
| 5′ITR | 13519 | 130 | 13519 | 130 | 13519 | 130 |
| CAG promoter | 13523 | 1715 | 13523 | 1715 | 13523 | 1715 |
| CMVie | 13524 | 299 | 13524 | 299 | 13524 | 299 |
| CBA min. | 13525 | 283 | 13525 | 283 | 13525 | 283 |
| Variable and/or | — | — | — | — | — | — |
| Constant | | | | | | |
| Linker | 13154 | 45 | 13154 | 45 | 13154 | 45 |
| Variable and/or | — | — | — | — | — | — |
| Constant | | | | | | |
| HA Tag | 13571 | 27 | 13571 | 27 | 13571 | 27 |
| PolyA | 13576 | 127 | 13576 | 127 | 13576 | 127 |
| 3′ ITR | 13521 | 130 | 13521 | 130 | 13521 | 130 |

[1500] In some embodiments, the AAV particle genome is VGC212 and comprises a 5′ inverted terminal repeat (ITR) sequence region and a 3′ITR sequence region, a CAG promoter comprising a CMVie region and a minimal CBA promoter region, an antibody heavy chain variable region, a (G4S)3 linker, an antibody light chain variable region, a HA tag and a polyadenylation signal sequence.

[1501] In some embodiments, the AAV particle genome is VGC213 and comprises a 5′ inverted terminal repeat (ITR) sequence region and a 3′ ITR sequence region, a CAG promoter comprising a CMVie region and a minimal CBA promoter region, an antibody heavy chain variable region, a (G4S)3 linker, an antibody light chain variable region, a HA tag and a polyadenylation signal sequence.

[1502] In some embodiments, the AAV particle genome is VGC214 and comprises a 5′ inverted terminal repeat (ITR) sequence region and a 3′ITR sequence region, a CAG promoter comprising a CMVie region and a minimal CBA promoter region, an antibody heavy chain variable region, a (G4S)3 linker, an antibody light chain variable region, a HA tag and a polyadenylation signal sequence.

TABLE 84
Viral Genome Cassettes Sequence Regions

| | VGC215 | | VGC216 | | VGC217 | |
|---|---|---|---|---|---|---|
| | Region | | Region | | Region | |
| Sequence | SEQ ID | Region | SEQ ID | Region | SEQ ID | Region |
| Regions | NO | length | NO | length | NO | length |
| 5′ ITR | 13519 | 130 | 13519 | 136 | 13519 | 136 |
| GFAP | 13528 | 699 | 13528 | 699 | 13528 | 699 |
| Promoter | | | | | | |
| Intron | 13551 | 566 | 13551 | 566 | 13551 | 566 |
| Signal | 13567 | 57 | 13567 | 57 | 13567 | 57 |
| Variable and/or | — | — | — | — | — | — |
| Constant | | | | | | |
| Constant | 1742 | 969 | 1742 | 969 | 2243 | 291 |
| Linker | 1725 | 12 | 1724 | 12 | 1724 | 12 |
| Linker | 1727 | 75 | 1726 | 54 | 1726 | 54 |
| Signal | 1980 | 321 | 1980 | 321 | 1986 | 321 |
| Variable and/or | — | — | — | — | — | — |
| Constant | | | | | | |
| PolyA | 13576 | 127 | 13576 | 127 | 13576 | 127 |
| 3′ ITR | 13521 | 130 | 13521 | 136 | 13521 | 136 |

[1503] In some embodiments, the AAV particle genome is VGC215 and comprises a 5′ inverted terminal repeat (ITR) sequence region and a 3′ ITR sequence region, a GFAP promoter, a human beta-globin intron region, a heavy chain signal, an antibody heavy chain variable and constant region, a furin cleavage site, a F2A linker, a light chain signal, an antibody light chain variable and constant region and a polyadenylation signal sequence.

[1504] In some embodiments, the AAV particle genome is VGC216 and comprises a 5′ inverted terminal repeat (ITR) sequence region and a 3′ ITR sequence region, a GFAP promoter, a human beta-globin intron region, a heavy chain signal, an antibody heavy chain variable and constant region, a furin cleavage site, a T2A linker, alight chain signal, an antibody light chain variable and constant region and a polyadenylation signal sequence.

[1505] In some embodiments, the AAV particle genome is VGC217 and comprises a 5′ inverted terminal repeat (ITR) sequence region and a 3′ITR sequence region, a GFAP promoter, a human beta-globin intron region, a heavy chain signal, an antibody heavy chain variable and constant region, a furin cleavage site, a T2A linker, a light chain signal, an antibody light chain variable and constant region and a polyadenylation signal sequence.

TABLE 85
Viral Genome Cassettes Sequence Regions

| | VGC218 | | VGC219 | |
|---|---|---|---|---|
| | Region | Region | Region | Region |
| Sequence Regions | SEQ ID NO | length | SEQ ID NO | length |
| 5′ ITR | 13519 | 130 | 13519 | 130 |
| GFAP Promoter | 13528 | 699 | 13528 | 699 |
| Intron | 13551 | 566 | 13551 | 566 |
| Signal | 13567 | 57 | 13567 | 57 |
| Variable and/or Constant | — | — | — | — |
| Hinge | 1737 | 198 | 1737 | 198 |
| Linker | 1725 | 12 | 1724 | 12 |
| Linker | 1727 | 75 | 1726 | 54 |
| Signal | 13569 | 57 | 13569 | 57 |
| Variable and/or Constant | — | — | — | — |
| PolyA | 13576 | 127 | 13576 | 127 |
| 3′ ITR | 13521 | 130 | 13521 | 130 |

[1506] In some embodiments, the AAV particle genome is VGC218 and comprises a 5′ inverted terminal repeat (ITR) sequence region and a 3′ITR sequence region, a GFAP promoter, a human beta-globin intron region, a heavy chain signal, an antibody heavy chain variable and constant region, a hinge region, a furin cleavage site, a F2A linker, a light chain signal, an antibodylightchainvariableandconstantregionandaplyadenylationsignal sequence.

[1507] In some embodiments, the AAV particle genome is VGC219 and comprises a 5′ inverted terminal repeat (ITR) sequence region and a 3′ITR sequence region, a GFAP promoter, a human beta-globin intron region, a heavy chain signal, an antibody heavy chain variable and constant region, a hinge region, a furin cleavage site, a T2A linker, a light chain signal, an antibody light chain variable and constant region and a polyadenylation signal sequence.

TABLE 86
Viral Genome Cassettes Sequence Regions

| | VGC220 | | VGC221 | | VGC222 | |
|---|---|---|---|---|---|---|
| | Region | | Region | | Region | |
| Sequence | SEQ ID | Region | SEQ ID | Region | SEQ ID | Region |
| Regions | NO | length | NO | length | NO | length |
| 5′ ITR | 13519 | 138 | 13519 | 130 | 13519 | 130 |
| GFAP | 13528 | 699 | 13528 | 699 | 13528 | 699 |
| Promoter | | | | | | |
| Intron | 13551 | 568 | 13551 | 566 | 13551 | 566 |
| Signal | 13569 | 57 | 13569 | 57 | 13569 | 57 |
| Variable and/or | — | — | — | — | — | — |
| Constant | | | | | | |
| Linker | 13153 | 38 | 13154 | 45 | 13155 | 60 |
| Variable and/or | — | — | — | — | — | — |
| Constant | | | | | | |
| HA Tag | 13571 | 27 | 13571 | 27 | 13571 | 27 |
| PolyA | 13576 | 127 | 13576 | 127 | 13576 | 127 |
| 3′ ITR | 13521 | 130 | 13521 | 130 | 13521 | 130 |

[1508] In some embodiments, the AAV particle genome is VGC220 and comprises a 5′ inverted terminal repeat (ITR) sequence region and a 3′ ITR sequence region, a GFAP promoter, a human beta-globin intron region, a light chain signal, an antibody light chain variable region, a (G4S)2 linker, an antibody heavy chain variable region, a HA tag and a polyadenylation signal sequence.

[1509] In some embodiments, the AAV particle genome is VGC221 and comprises a 5′ inverted terminal repeat (ITR) sequence region and a 3′ITR sequence region, a GFAP promoter, a human beta-globin intron region, a light chain signal, an antibody light chain variable region, a (G4S)3 linker, an antibody heavy chain variable region, a HA tag and a polyadenylation signal sequence.

[1510] In some embodiments, the AAV particle genome is VGC222 and comprises a 5′ inverted terminal repeat (ITR) sequence region and a 3′ ITR sequence region, a GFAP promoter, a human beta-globin intron region, alight chain signal, an antibody light chain variable region, a (G4S)4 linker, an antibody heavy chain variable region, a HA tag and a polyadenylation signal sequence.

TABLE 87
Viral Genome Cassettes Sequence Regions

| | VGC223 | | VGC224 | |
|---|---|---|---|---|
| | Region | Region | Region | Region |
| Sequence Regions | SEQ ID NO | length | SEQ ID NO | length |
| 5′ ITR | 13519 | 130 | 13519 | 130 |
| GFAP Promoter | 13528 | 699 | 13528 | 699 |
| Intron | 13551 | 566 | 13551 | 566 |
| Signal | 13569 | 57 | 13569 | 57 |
| Variable and/or Constant | — | — | — | — |
| Linker | 1727 | 75 | 1826 | 54 |
| Signal | 13567 | 57 | 13570 | 57 |
| Variable and/or Constant | — | — | — | — |
| PolyA | 13576 | 127 | 13576 | 127 |
| 3′ ITR | 13521 | 130 | 13521 | 130 |

[1511] In some embodiments, the AAV particle genome is VGC223 and comprises a 5′ inverted terminal repeat (ITR) sequence region and a 3′ITR sequence region, a GFAP promoter, a human beta-globin intron region, a light chain signal, an antibody light chain variable and constant region, a F2A linker, a heavy chain signal, an antibody heavy chain variable and constant region and a polyadenylation signal sequence.

[1512] In some embodiments, the AAV particle genome is VGC224 and comprises a 5′ inverted terminal repeat (ITR) sequence region and a 3′ ITR sequence region, a GFAP promoter, a human beta-globin intron region, a light chain signal, an antibody light chain variable and constant region, a T2A linker, a heavy chain signal, an antibody heavy chain variable and constant region and a polyadenylation signal sequence.

TABLE 88
Viral Genome Cassettes Sequence Regions

| | VGC225 | | VGC226 | | VGC227 | |
|---|---|---|---|---|---|---|
| | Region | | Region | | Region | |
| Sequence | SEQ ID | Region | SEQ ID | Region | SEQ ID | Region |
| Regions | NO | length | NO | length | NO | length |
| 5′ ITR | 13519 | 130 | 13519 | 130 | 13519 | 130 |
| SYN Promoter | 13529 | 557 | 13529 | 557 | 13529 | 557 |
| intron | 13551 | 566 | 13551 | 566 | 13551 | 566 |
| Signal | 13567 | 57 | 13567 | 57 | 13567 | 57 |
| Variable and/or | — | — | — | — | — | — |
| Constant | | | | | | |
| Linker | 1725 | 12 | 1724 | 12 | 1724 | 12 |
| Linker | 1727 | 75 | 1726 | 54 | 1726 | 54 |
| Signal | 13569 | 57 | 13569 | 57 | 13569 | 57 |
| Variable and/or | — | — | — | — | — | — |
| Constant | | | | | | |
| PolyA | 13576 | 127 | 13576 | 127 | 13576 | 127 |
| 3′ ITR | 13521 | 130 | 13521 | 130 | 13521 | 130 |

[1513] In some embodiments, the AAV particle genome is VGC225 and comprises a 5′ inverted terminal repeat (ITR) sequence region and a 3′ ITR sequence region, a synapsin promoter, a human beta-globin intron region, a heavy chain signal, an antibody heavy chain variable and constant region, a furin cleavage site, a F2A linker, alight chain signal, an antibody light chain variable and constant region and a polyadenylation signal sequence.

[1514] In some embodiments, the AAV particle genome is VGC226 and comprises a 5′ inverted terminal repeat (ITR) sequence region and a 3′ ITR sequence region, a synapsin promoter, a human beta-globin intron region, a heavy chain signal, an antibody heavy chain variable and constant region, a furin cleavage site, a F2A linker, alight chain signal, an antibody light chain variable and constant region and a polyadenylation signal sequence.

[1515] In some embodiments, the AAV particle genome is VGC227 and comprises a 5′ inverted terminal repeat (ITR) sequence region and a 3′ ITR sequence region, a synapsin promoter, a human beta-globin intron region, a heavy chain signal, an antibody heavy chain variable and constant region, a furin cleavage site, a F2A linker, alight chain signal, an antibody light chain variable and constant region and a polyadenylation signal sequence.

TABLE 89
Viral Genome Cassettes Sequence Regions

| | VGC228 | | VGC229 | |
|---|---|---|---|---|
| | Region | Region | Region | Region |
| Sequence Regions | SEQ ID NO | length | SEQ ID NO | length |
| 5′ ITR | 13519 | 130 | 13519 | 130 |
| SYN Promoter | 13529 | 557 | 13529 | 557 |
| Intron | 13551 | 566 | 13551 | 566 |
| Signal | 13567 | 57 | 13567 | 57 |
| Variable and/or Constant | — | — | — | — |
| Linker | 1737 | 198 | 1737 | 198 |
| Linker | 1724 | 12 | 1724 | 12 |
| Linker | 1727 | 75 | 1726 | 54 |
| Signal | 13569 | 54 | 13569 | 57 |
| Variable and/or Constant | — | — | — | — |
| PolyA | 13576 | 127 | 13576 | 127 |
| 3′ ITR | 13521 | 130 | 13521 | 130 |

[1516] In some embodiments, the AAV particle genome is VGC228 and comprises a 5′ inverted terminal repeat (ITR) sequence region and a 3′ ITR sequence region, a synapsin promoter, a human beta-globin intron region, a heavy chain signal, an antibody heavy chain variable and constant region, a hinge region, a furin cleavage site, a F2A linker, alight chain signal, an antibody light chain variable and constant region and a polyadenylation signal sequence.

[1517] In some embodiments, the AAV particle genome is VGC229 and comprises a 5′ inverted terminal repeat (ITR) sequence region and a 3′ ITR sequence region, a synapsin promoter, a human beta-globin intron region, a heavy chain signal, an antibody heavy chain variable and constant region, a hinge region, a furin cleavage site, a T2A linker, alight chain signal, an antibody light chain variable and constant region and a polyadenylation signal sequence.

TABLE 90
Viral Genome Cassettes Sequence Regions

| | VGC230 | | VGC231 | | VGC232 | |
|---|---|---|---|---|---|---|
| | Region | | Region | | Region | |
| Sequence | SEQ ID | Region | SEQ ID | Region | SEQ ID | Region |
| Regions | NO | length | NO | length | NO | length |
| 5′ ITR | 13519 | 130 | 13519 | 130 | 13519 | 130 |
| SYN Promoter | 13529 | 557 | 13529 | 557 | 13529 | 557 |
| Intron | 13551 | 566 | 13551 | 566 | 13551 | 566 |
| Signal | 13569 | 57 | 13569 | 57 | 13569 | 57 |
| Variable and/or | — | — | — | — | — | — |
| Constant | | | | | | |
| Linker | 13153 | 30 | 13154 | 45 | 13155 | 60 |
| Variable and/or | — | — | — | — | — | — |
| Constant | | | | | | |
| HA Tag | 13571 | 27 | 13571 | 27 | 13571 | 27 |
| PolyA | 13576 | 127 | 13576 | 127 | 13576 | 127 |
| 3′ ITR | 13521 | 130 | 13521 | 130 | 13521 | 130 |

[1518] In some embodiments, the AAV particle genome is VGC230 and comprises a 5′ inverted terminal repeat (ITR) sequence region and a 3′ ITR sequence region, a synapsin promoter, a human beta-globin intron region, a light chain signal, an antibody light chain variable region, a (G4S)2 linker, an antibody heavy chain variable region, a HA tag and a polyadenylation signal sequence.

[1519] In some embodiments, the AAV particle genome is VGC231 and comprises a 5′ inverted terminal repeat (ITR) sequence region and a 3′ ITR sequence region, a synapsin promoter, a human beta-globin intron region, alight chain signal, an antibody light chain variable region, a (G4S)3 linker, an antibody heavy chain variable region, a HA tag and a polyadenylation signal sequence.

[1520] In some embodiments, the AAV particle genome is VGC232 and comprises a 5′ inverted terminal repeat (ITR) sequence region and a 3′ ITR sequence region, a synapsin promoter, a human beta-globin intron region, a light chain signal, an antibody light chain variable region, a (G4S)4 linker, an antibody heavy chain variable region, a HA tag and a polyadenylation signal sequence.

TABLE 91
Viral Genome Cassettes Sequence Regions

| | VGC232 | | VGC233 | |
|---|---|---|---|---|
| | Region | Region | Region | Region |
| Sequence Regions | SEQ ID NO | length | SEQ ID NO | length |
| 5′ ITR | 13519 | 130 | 13519 | 130 |
| SYN Promoter | 13529 | 557 | 13529 | 557 |
| Intron | 13551 | 566 | 13551 | 566 |
| Signal | 13569 | 57 | 13569 | 57 |
| Variable and/or Constant | — | — | — | — |
| Linker | 1727 | 75 | 1726 | 54 |
| Signal | 13567 | 57 | 13570 | 57 |
| Variable and/or Constant | — | — | — | — |
| PolyA | 13576 | 127 | 13576 | 127 |
| 3′ ITR | 13521 | 130 | 13521 | 130 |

[1521] In some embodiments, the AAV particle genome is VGC233 and comprises a 5′ inverted terminal repeat (ITR) sequence region and a 3′ITR sequence region, a synapsin promoter, a human beta-globin intron region, a light chain signal, an antibody light chain variable region, a F2A linker, a heavy chain signal, an antibody heavy chain variable and constant region and a polyadenylation signal sequence.

[1522] In some embodiments, the AAV particle genome is VGC234 and comprises a 5′ inverted terminal repeat (ITR) sequence region and a 3′ITR sequence region, a synapsin promoter, a human beta-globin intron region, a light chain signal, an antibody light chain variable region, a T2A linker, a heavy chain signal, an antibody heavy chain variable and constant region and a polyadenylation signal sequence.

TABLE 92
Viral Genome Cassettes Sequence Regions

| | VGC235 | | VGC236 | | VGC237 | |
|---|---|---|---|---|---|---|
| | Region | | Region | | Region | |
| Sequence | SEQ ID | Region | SEQ ID | Region | SEQ ID | Region |
| Regions | NO | length | NO | length | NO | length |
| 5′ ITR | 13519 | 130 | 13519 | 136 | 13519 | 130 |
| CMVie | 13534 | 386 | 13534 | 386 | 13534 | 380 |
| CB Promoter | 13526 | 266 | 13526 | 266 | 13526 | 260 |
| Intron | 13551 | 566 | 13551 | 566 | 13551 | 566 |
| Signal | 13567 | 57 | 13567 | 57 | 13567 | 57 |
| Variable and/or | — | — | — | — | — | — |
| Constant | | | | | | |
| Linker | 1725 | 12 | 1724 | 12 | 1724 | 12 |
| Linker | 1727 | 75 | 1726 | 54 | 1726 | 54 |
| Signal | 13569 | 57 | 13569 | 57 | 13569 | 57 |
| Variable and/or | — | — | — | — | — | — |
| Constant | | | | | | |
| PolyA | 13576 | 127 | 13576 | 127 | 13576 | 127 |
| 3′ ITR | 13521 | 130 | 13521 | 130 | 13521 | 136 |

[1523] In some embodiments, the AAV particle genome is VGC235 and comprises a 5′ inverted terminal repeat (ITR) sequence region and a 3′ITR sequence region, a CMVie region and a CB promoter, a human beta-globin intron region, a heavy chain signal, an antibody heavy chain variable and constant region, a furin cleavage site, a F2A linker, alight chain signal, an antibody light chain variable and constant region and a polyadenylation signal sequence.

[1524] In some embodiments, the AAV particle genome is VGC236 and comprises a 5′ inverted terminal repeat (ITR) sequence region and a 3′ ITR sequence region, a CMVie region and a CB promoter, a human beta-globin intron region, a heavy chain signal, an antibody heavy chain variable and constant region, a furin cleavage site, a T2A linker, a light chain signal, an antibody light chain variable and constant region and a polyadenylation signal sequence.

[1525] In some embodiments, the AAV particle genome is VGC237 and comprises a 5′ inverted terminal repeat (ITR) sequence region and a 3′ITR sequence region, a CMVie region and a CB promoter, a human beta-globin intron region, a heavy chain signal, an antibody heavy chain variable and constant region, a furin cleavage site, a T2A linker, alight chain signal, an antibody light chain variable and constant region and a polyadenylation signal sequence.

TABLE 93
Viral Genome Cassettes Sequence Regions

| | VGC238 | | VGC239 | |
|---|---|---|---|---|
| | Region | Region | Region | Region |
| Sequence Regions | SEQ ID NO | length | SEQ ID NO | length |
| 5′ ITR | 13519 | 130 | 13519 | 130 |
| CMVie | 13534 | 380 | 13534 | 380 |
| CB Promoter | 13526 | 260 | 13526 | 260 |
| Intron | 13551 | 566 | 13551 | 566 |
| Signal | 13569 | 57 | 13569 | 57 |
| Variable and/or Constant | — | — | — | — |
| Linker | 1727 | 75 | 1726 | 54 |
| Signal | 13567 | 57 | 13570 | 57 |
| Variable and/or Constant | — | — | — | — |
| PolyA | 13576 | 127 | 13576 | 127 |
| 3′ ITR | 13521 | 130 | 13521 | 130 |

[1526] in some embodiments, the AAV particle genome is an comprises a 5′ inverted terminal repeat sequence region and a 3′ ITR sequence region, a CMVie region and a CB promoter, a human beta-globin intron region, a light chain signal, an antibody light chain variable and constant region, a F2A linker, a heavy chain signal, an antibody heavy chain variable and constant region and a polyadenylation signal sequence.

[1527] In some embodiments, the AAV particle genome is VGC239 and comprises a 5′ inverted terminal repeat (ITR) sequence region and a 3′ITR sequence region, a CMVie region and a CB promoter, a human beta-globin intron region, alight chain signal, an antibody light chain variable and constant region, a F2A linker, a heavy chain signal, an antibody heavy chain variable and constant region and a polyadenylation signal sequence.

### II. Formulation and Delivery

### Pharmaceutical Compositions

[1528] According to the present disclosure the AAV particles may be prepared as pharmaceutical compositions. It will be understood that such compositions necessarily comprise one or more active ingredients and, most often, a pharmaceutically acceptable excipient.

[1529] Relative amounts of the active ingredient (e.g. AAV particle), a pharmaceutically acceptable excipient, and/or any additional ingredients in a pharmaceutical composition in accordance with the present disclosure may vary, depending upon the identity, size, and/or condition of the subject being treated and further depending upon the route by which the composition is to be administered. For example, the composition may comprise between 0.1% and 99% (w/w) of the active ingredient. By way of example, the composition may comprise between 0.1% and 100%, e.g., between 0.5 and 50%, between 1-30%, between 5-80%, at least 80% (w/w) active ingredient.

[1530] In some embodiments, the AAV particle pharmaceutical compositions described herein may comprise at least one payload. As a non-limiting example, the pharmaceutical compositions may contain an AAV particle with 1, 2, 3, 4 or 5 payloads. In some embodiments, the pharmaceutical composition may contain a nucleic acid encoding a payload construct encoding proteins selected from antibodies and/or antibody-based compositions.

[1531] Although the descriptions of pharmaceutical compositions provided herein are principally directed to pharmaceutical compositions which are suitable for administration to humans, it will be understood by the skilled artisan that such compositions are generally suitable for administration to any other animal, e.g., to non-human animals, e.g. non-human mammals. Modification of pharmaceutical compositions suitable for administration to humans in order to render the compositions suitable for administration to various animals is well understood, and the ordinarily skilled veterinary pharmacologist can design and/or perform such modification with merely ordinary, if any, experimentation. Subjects to which administration of the pharmaceutical compositions is contemplated include, but are not limited to, humans and/or other primates; mammals, including commercially relevant mammals such as cattle, pigs, horses, sheep, cats, dogs, mice, rats, birds, including commercially relevant birds such as poultry, chickens, ducks, geese, and/or turkeys.

[1532] In some embodiments, compositions are administered to humans, human patients or subjects.

### Formulations

[1533] The AAV particles of the disclosure can be formulated using one or more excipients to: (1) increase stability; (2) increase cell transfection or transduction; (3) permit the sustained or delayed expression of the payload; (4) alter the biodistribution (e.g., target the viral particle to specific tissues or cell types); (5) increase the translation of encoded protein; (6) alter the release profile of encoded protein and/or (7) allow for regulatable expression of the payload.

[1534] Formulations of the present disclosure can include, without limitation, saline, liposomes, lipid nanoparticles, polymers, peptides, proteins, cells transfected with viral vectors (e.g., for transfer or transplantation into a subject) and combinations thereof.

[1535] Formulations of the pharmaceutical compositions described herein may be prepared by any method known or hereafter developed in the art of pharmacology. As used herein the term “pharmaceutical composition” refers to compositions comprising at least one active ingredient and optionally one or more pharmaceutically acceptable excipients.

[1536] In general, such preparatory methods include the step of associating the active ingredient with an excipient and/or one or more other accessory ingredients. As used herein, the phrase “active ingredient” generally refers either to an AAV particle carrying a payload region encoding the polypeptides of the disclosure or to the antibody or antibody-based composition encoded by a viral genome of by an AAV particle as described herein.

[1537] Formulations of the AAV particles and pharmaceutical compositions described herein may be prepared by any method known or hereafter developed in the art of pharmacology. In general, such preparatory methods include the step of bringing the active ingredient into association with an excipient and/or one or more other accessory ingredients, and then, if necessary and/or desirable, dividing, shaping and/or packaging the product into a desired single- or multi-dose unit.

[1538] A pharmaceutical composition in accordance with the present disclosure may be prepared, packaged, and/or sold in bulk, as a single unit dose, and/or as a plurality of single unit doses. As used herein, a “unit dose” refers to a discrete amount of the pharmaceutical composition comprising a predetermined amount of the active ingredient. The amount of the active ingredient is generally equal to the dosage of the active ingredient which would be administered to a subject and/or a convenient fraction of such a dosage such as, for example, one-half or one-third of such a dosage.

[1539] In some embodiments, the AAV particles of the disclosure may be formulated in PBS with 0.001% of pluronic acid (F-68) at a pH of about 7.0.

[1540] Relative amounts of the active ingredient (e.g. AV particle), the pharmaceutically acceptable excipient, and/or any additional ingredients in a pharmaceutical composition in accordance with the present disclosure may vary, depending upon the identity, size, and/or condition of the subject being treated and further depending upon the route by which the composition is to be administered. For example, the composition may comprise between 0.1% and 99% (w/w) of the active ingredient. By way of example, the composition may comprise between 0.1% and 100%, e.g., between 0.5 and 50%, between 1-30%, between 5-80%, at least 80% (w/w) active ingredient.

[1541] In some embodiments, the AAV formulations described herein may contain sufficient AAV particles for expression of at least one expressed functional antibody or antibody-based composition. As a non-limiting example, the AAV particles may contain viral genomes encoding 1, 2, 3, 4 or 5 functional antibodies.

[1542] According to the present disclosure AAV particles may be formulated for CNS delivery. Agents that cross the brain blood barrier may be used. For example, some cell penetrating peptides that can target molecules to the brain blood barrier endothelium may be used for formulation (e.g., Mathupala, Expert Opin Ther Pat., 2009, 19, 137.140; the content of which is incorporated herein by reference in its entirety).

### Excipients and Diluents

[1543] The AAV particles of the disclosure can be formulated using one or more excipients or diluents to (1) increase stability; (2) increase cell transfection or transduction; (3) permit the sustained or delayed release; (4) alter the biodistribution (e.g., target the viral particle to specific tissues or cell types); (5) increase the translation of encoded protein in vivo; (6) alter the release profile of encoded protein in vivo and/or (7) allow for regulatable expression of the polypeptides of the disclosure.

[1544] In some embodiments, a pharmaceutically acceptable excipient may be at least 95%, at least 96%, at least 97%, at least 98%, at least 99%, or 100% pure. In some embodiments, an excipient is approved for use for humans and for veterinary use. In some embodiments, an excipient may be approved by United States Food and Drug Administration. In some embodiments, an excipient may be of pharmaceutical grade. In some embodiments, an excipient may meet the standards of the United States Pharmacopoeia (USP), the European Pharmacopoeia (EP), the British Pharmacopoeia, and/or the International Pharmacopoeia.

[1545] Excipients, as used herein, include, but are not limited to, any and all solvents, dispersion media, diluents, or other liquid vehicles, dispersion or suspension aids, surface active agents, isotonic agents, thickening or emulsifying agents, preservatives, and the like, as suited to the particular dosage form desired. Various excipients for formulating pharmaceutical compositions and techniques for preparing the composition are known in the art (see Remington: The Science and Practice of Pharmacy, 21st Edition, A. R. Gennaro, Lippincott, Williams & Wilkins, Baltimore, Md., 2006; incorporated herein by reference in its entirety). The use of a conventional excipient medium may be contemplated within the scope of the present disclosure, except insofar as any conventional excipient medium may be incompatible with a substance or its derivatives, such as by producing any undesirable biological effect or otherwise interacting in a deleterious manner with any other component(s) of the pharmaceutical composition.

[1546] Exemplary diluents include, but are not limited to, calcium carbonate, sodium carbonate, calcium phosphate, dicalcium phosphate, calcium sulfate, calcium hydrogen phosphate, sodium phosphate lactose, sucrose, cellulose, microcrystalline cellulose, kaolin, mannitol, sorbitol, inositol, sodium chloride, dry starch, cornstarch, powdered sugar, etc., and/or combinations thereof.

### Inactive Ingredients

[1547] In some embodiments, AAV particle formulations may comprise at least one inactive ingredient. As used herein, the term “inactive ingredient” refers to one or more agents that do not contribute to the activity of the active ingredient of the pharmaceutical composition included in formulations. In some embodiments, all, none or some of the inactive ingredients which may be used in the formulations of the present disclosure may be approved by the US Food and Drug Administration (FDA).

[1548] In some embodiments, the AAV particle pharmaceutical compositions comprise at least one inactive ingredient such as, but not limited to, 1,2,6-Hexanetriol; 1,2-Dimyristoyl-Sn-Glycero-3-(Phospho-S-(1-Glycerol)); 1,2-Dimyristoyl-Sn-Glycero-3-Phosphocholine; 1,2-Dioleoyl-Sn-Glycero-3-Phosphocholine; 1,2-Dipalmitoyl-Sn-Glycero-3-(Phospho-Rac-(1-Glycerol)); 1,2-Distearoyl-Sn-Glycero-3-(Phospho-Rac-(1-Glycerol)); 1,2-Distearoyl-Sn-Glycero-3-Phosphocholine; 1-O-Tolylbiguanide; 2-Ethyl-1,6-Hexanediol; Acetic Acid; Acetic Acid, Glacial; Acetic Anhydride; Acetone; Acetone Sodium Bisulfite; Acetylated Lanolin Alcohols; Acetylated Monoglycerides; Acetylcysteine; Acetyltryptophan, DL-; Acrylates Copolymer; Acrylic Acid-Isooctyl Acrylate Copolymer; Acrylic Adhesive 788; Activated Charcoal; Adcote 72A103; Adhesive Tape; Adipic Acid; Aerotex Resin 3730; Alanine; Albumin Aggregated; Albumin Colloidal; Albumin Human; Alcohol; Alcohol, Dehydrated; Alcohol, Denatured; Alcohol, Diluted; Alfadex; Alginic Acid; Alkyl Ammonium Sulfonic Acid Betaine; Alkyl Aryl Sodium Sulfonate; Allantoin; Allyl .Alpha-lonone; Almond Oil; Alpha-Terpineol; Alpha-Tocopherol; Alpha-Tocopherol Acetate, DI-; Alpha-Tocopherol, DI-; Aluminum Acetate; Aluminum Chlorhydroxy Allantoinate; Aluminum Hydroxide; Aluminum Hydroxide-Sucrose, Hydrated; Aluminum Hydroxide Gel; Aluminum Hydroxide Gel F 500; Aluminum Hydroxide Gel F 5000; Aluminum Monostearate; Aluminum Oxide; Aluminum Polyester; Aluminum Silicate; Aluminum Starch Octenylsuccinate; Aluminum Stearate; Aluminum Subacetate; Aluminum Sulfate Anhydrous; Amerchol C; Amerchol-Cab; Aminomethylpropanol; Ammonia; Ammonia Solution; Ammonia Solution, Strong; Ammonium Acetate; Ammonium Hydroxide; Ammonium Lauryl Sulfate; Ammonium Nonoxynol-4 Sulfate; Ammonium Salt Of C-12-C-15 Linear Primary Alcohol Ethoxylate; Ammonium Sulfate; Ammonyx; Amphoteric-2; Amphoteric-9; Anethole; Anhydrous Citric Acid; Anhydrous Dextrose; Anhydrous Lactose; Anhydrous Trisodium Citrate; Aniseed Oil; Anoxid Sbn; Antifoam; Antipyrine; Apaflurane; Apricot Kernel Oil Peg-6 Esters; Aquaphor; Arginine; Arlacel; Ascorbic Acid; Ascorbyl Palmitate; Aspartic Acid; Balsam Peru; Barium Sulfate; Beeswax; Beeswax, Synthetic; Beheneth-10; Bentonite; Benzalkonium Chloride; Benzenesulfonic Acid; Benzethonium Chloride; Benzododecinium Bromide; Benzoic Acid; Benzyl Alcohol; Benzyl Benzoate; Benzyl Chloride; Betadex; Bibapcitide; Bismuth Subgallate; Boric Acid; Brocrinat; Butane; Butyl Alcohol; Butyl Ester Of Vinyl Methyl Ether/Maleic Anhydride Copolymer (125000 Mw); Butyl Stearate; Butylated Hydroxyanisole; Butylated Hydroxytoluene; Butylene Glycol; Butylparaben; Butyric Acid; C20-40 Pareth-24; Caffeine; Calcium; Calcium Carbonate; Calcium Chloride; Calcium Gluceptate; Calcium Hydroxide; Calcium Lactate; Calcobutrol; Caldiamide Sodium; Caloxetate Trisodium; Calteridol Calcium; Canada Balsam; Caprylic/Capric Triglyceride; Caprylic/Capric/Stearic Triglyceride; Captan; Captisol; Caramel; Carbomer 1342; Carbomer 1382; Carbomer 934; Carbomer 934p; Carbomer 940; Carbomer 941; Carbomer 980; Carbomer 981; Carbomer Homopolymer Type B (Allyl Pentaerythritol Crosslinked); Carbomer Homopolymer Type C (Allyl Pentaerythritol Crosslinked); Carbon Dioxide; Carboxy Vinyl Copolymer; Carboxymethylcellulose; Carboxymethylcellulose Sodium; Carboxypolymethylene; Carrageenan; Carrageenan Salt; Castor Oil; Cedar Leaf Oil; Cellulose; Cellulose, Microcrystalline; Cerasynt-Se; Ceresin; Ceteareth-12; Ceteareth-15; Ceteareth-30; Cetearyl Alcohol/Ceteareth-20; Cetearyl Ethylhexanoate; Ceteth-10; Ceteth-2; Ceteth-20; Ceteth-23; Cetostearyl Alcohol; Cetrimonium Chloride; Cetyl Alcohol; Cetyl Esters Wax; Cetyl Palmitate; Cetylpyridinium Chloride; Chlorobutanol; Chlorobutanol Hemihydrate; Chlorobutanol, Anhydrous; Chlorocresol; Chloroxylenol; Cholesterol; Choleth; Choleth-24; Citrate; Citric Acid; Citric Acid Monohydrate; Citric Acid, Hydrous; Cocamide Ether Sulfate; Cocamine Oxide; Coco Betaine; Coco Diethanolamide; Coco Monoethanolamide; Cocoa Butter; Coco-Glycerides; Coconut Oil; Coconut Oil, Hydrogenated; Coconut Oil/Palm Kernel Oil Glycerides, Hydrogenated; Cocoyl Caprylocaprate; Cola Nitida Seed Extract; Collagen; Coloring Suspension; Corn Oil; Cottonseed Oil; Cream Base; Creatine; Creatinine; Cresol; Croscarmellose Sodium; Crospovidone; Cupric Sulfate; Cupric Sulfate Anhydrous; Cyclomethicone; Cyclomethicone/Dimethicone Copolyol; Cysteine; Cysteine Hydrochloride; Cysteine Hydrochloride Anhydrous; Cysteine, DI-; D&C Red No. 28; D&C Red No. 33; D&C Red No. 36; D&C Red No. 39; D&C Yellow No. 10; Dalfampridine; Daubert 1-5 Pestr (Matte) 164z; Decyl Methyl Sulfoxide; Dehydag Wax Sx; Dehydroacetic Acid; Dehymuls E; Denatonium Benzoate; Deoxycholic Acid; Dextran; Dextran 40; Dextrin; Dextrose; Dextrose Monohydrate; Dextrose Solution; Diatrizoic Acid; Diazolidinyl Urea; Dichlorobenzyl Alcohol; Dichlorodifluoromethane; Dichlorotetrafluoroethane; Diethanolamine; Diethyl Pyrocarbonate; Diethyl Sebacate; Diethylene Glycol Monoethyl Ether; Diethylhexyl Phthalate; Dihydroxyaluminum Aminoacetate; Diisopropanolamine; Diisopropyl Adipate; Diisopropyl Dilinoleate; Dimethicone 350; Dimethicone Copolyol; Dimethicone Mdx4-4210; Dimethicone Medical Fluid 360; Dimethyl Isosorbide; Dimethyl Sulfoxide; Dimethylaminoethyl Methacrylate-Butyl Methacrylate-Methyl Methacrylate Copolymer; Dimethyldioctadecylammonium Bentonite; Dimethylsiloxane/Methylvinylsiloxane Copolymer; Dinoseb Ammonium Salt; Dipalmitoylphosphatidylglycerol, DI-; Dipropylene Glycol; Disodium Cocoamphodiacetate; Disodium Laureth Sulfosuccinate; Disodium Lauryl Sulfosuccinate; Disodium Sulfosalicylate; Disofenin; Divinylbenzene Styrene Copolymer; Dmdm Hydantoin; Docosanol; Docusate Sodium; Duro-Tak 280-2516; Duro-Tak 387-2516; Duro-Tak 80-1196; Duro-Tak 87-2070; Duro-Tak 87-2194; Duro-Tak 87-2287: Duro-Tak 87-2296; Duro-Tak 87-2888; Duro-Tak 87-2979; Edetate Calcium Disodium; Edetate Disodium; Edetate Disodium Anhydrous; Edetate Sodium; Edetic Acid; Egg Phospholipids; Entsufon; Entsufon Sodium; Epilactose; Epitetracycline Hydrochloride; Essence Bouquet 9200; Ethanolamine Hydrochloride; Ethyl Acetate; Ethyl Oleate; Ethylcelluloses; Ethylene Glycol; Ethylene Vinyl Acetate Copolymer; Ethylenediamine; Ethylenediamine Dihydrochloride; Ethylene-Propylene Copolymer; Ethylene-Vinyl Acetate Copolymer (28% Vinyl Acetate); Ethylene-Vinyl Acetate Copolymer (9% Vinylacetate); Ethylhexyl Hydroxystearate; Ethylparaben; Eucalyptol; Exametazime; Fat, Edible; Fat, Hard; Fatty Acid Esters; Fatty Acid Pentaerythriol Ester; Fatty Acids; Fatty Alcohol Citrate; Fatty Alcohols; Fd&C Blue No. 1; Fd&C Green No. 3; Fd&C Red No, 4; Fd&C Red No, 40; Fd&C Yellow No. 10 (Delisted); Fd&C Yellow No. 5; Fd&C Yellow No. 6; Ferric Chloride; Ferric Oxide; Flavor 89-186; Flavor 89-259; Flavor Df-119; Flavor Df-1530; Flavor Enhancer; Flavor Fig. 827118; Flavor Raspberry Pfc-8407; Flavor Rhodia Pharmaceutical No. Rf 451; Fluorochlorohydrocarbons; Formaldehyde; Formaldehyde Solution; Fractionated Coconut Oil; Fragrance 3949-5; Fragrance 520a; Fragrance 6.007; Fragrance 91-122; Fragrance 9128-Y; Fragrance 93498g; Fragrance Balsam Pine No. 5124; Fragrance Bouquet 10328; Fragrance Chemoderm 6401-B; Fragrance Chemoderm 6411; Fragrance Cream No. 73457; Fragrance Cs-28197; Fragrance Felton 066m; Fragrance Firmenich 47373; Fragrance Givaudan Ess 9090/1c; Fragrance H-6540; Fragrance Herbal 10396; Fragrance Nj-1085; Fragrance P O FI-147; Fragrance Pa 52805; Fragrance Pera Derm D; Fragrance Rbd-9819; Fragrance Shaw Mudge U-7776; Fragrance Tf 044078; Fragrance Ungerer Honeysuckle K 2771; Fragrance Ungerer N5195; Fructose; Gadolinium Oxide; Galactose; Gamma Cyclodextrin; Gelatin; Gelatin, Crosslinked; Gelfoam Sponge; Gellan Gum (Low Acyl); Gelva 737; Gentisic Acid; Gentisic Acid Ethanolamide; Gluceptate Sodium; Gluceptate Sodium Dihydrate; Gluconolactone; Glucuronic Acid; Glutamic Acid, DI-; Glutathione; Glycerin; Glycerol Ester Of Hydrogenated Rosin; Glyceryl Citrate; Glyceryl Isostearate; Glyceryl Laurate; Glyceryl Monostearate; Glyceryl Oleate; Glyceryl Oleate/Propylene Glycol; Glyceryl Palmitate; Glyceryl Ricinoleate; Glyceryl Stearate; Glyceryl Stearate-Laureth-23; Glyceryl Stearate/Peg Stearate; Glyceryl Stearate/Peg-100 Stearate; Glyceryl Stearate/Peg-40 Stearate; Glyceryl Stearate-Stearamidoethyl Diethylamine; Glyceryl Trioleate; Glycine; Glycine Hydrochloride; Glycol Distearate; Glycol Stearate; Guanidine Hydrochloride; Guar Gum; Hair Conditioner (18n195-1m); Heptane; Hetastarch; Hexylene Glycol; High Density Polyethylene; Histidine; Human Albumin Microspheres; Hyaluronate Sodium; Hydrocarbon; Hydrocarbon Gel, Plasticized; Hydrochloric Acid; Hydrochloric Acid, Diluted; Hydrocortisone; Hydrogel Polymer; Hydrogen Peroxide; Hydrogenated Castor Oil; Hydrogenated Palm Oil; Hydrogenated Palm/Palm Kernel Oil Peg-6 Esters; Hydrogenated Polybutene 635-690; Hydroxide Ion; Hydroxyethyl Cellulose; Hydroxyethylpiperazine Ethane Sulfonic Acid; Hydroxymethyl Cellulose; Hydroxyoctacosanyl Hydroxystearate; Hydroxypropyl Cellulose; Hydroxypropyl Methylcellulose 2906; Hydroxypropyl-Beta-cyclodextrin; Hypromellose 2208 (15000 Mpa·S); Hypromellose 2910 (15000 Mpa·S); Hypromelloses; Imidurea; Iodine; Iodoxamic Acid; Iofetamine Hydrochloride; Irish Moss Extract; Isobutane; Isoceteth-20; Isoleucine; Isooctyl Acrylate; Isopropyl Alcohol; Isopropyl Isostearate; Isopropyl Myristate; Isopropyl Myristate-Myristyl Alcohol; Isopropyl Palmitate; Isopropyl Stearate; Isostearic Acid; Isostearyl Alcohol; Isotonic Sodium Chloride Solution; Jelene; Kaolin; Kathon Cg; Kathon Cg II; Lactate; Lactic Acid; Lactic Acid, DI-; Lactic Acid, L-; Lactobionic Acid; Lactose; Lactose Monohydrate; Lactose, Hydrous; Laneth; Lanolin; Lanolin Alcohol-Mineral Oil; Lanolin Alcohols; Lanolin Anhydrous; Lanolin Cholesterols; Lanolin Nonionic Derivatives; Lanolin, Ethoxylated; Lanolin, Hydrogenated; Lauralkonium Chloride; Lauramine Oxide; Laurdimonium Hydrolyzed Animal Collagen; Laureth Sulfate; Laureth-2; Laureth-23; Laureth-4; Lauric Diethanolamide; Lauric Myristic Diethanolamide; Lauroyl Sarcosine; Lauryl Lactate; Lauryl Sulfate; Lavandula Angustifolia Flowering Top; Lecithin; Lecithin Unbleached; Lecithin, Egg; Lecithin, Hydrogenated; Lecithin, Hydrogenated Soy; Lecithin, Soybean; Lemon Oil; Leucine; Levulinic Acid; Lidofenin; Light Mineral Oil; Light Mineral Oil (85 Ssu); Limonene, (+/−)-; Lipocol Sc-15; Lysine; Lysine Acetate; Lysine Monohydrate; Magnesium Aluminum Silicate; Magnesium Aluminum Silicate Hydrate; Magnesium Chloride; Magnesium Nitrate; Magnesium Stearate; Maleic Acid; Mannitol; Maprofix; Mebrofenin; Medical Adhesive Modified S-15; Medical Antiform A-F Emulsion; Medronate Disodium; Medronic Acid; Meglumine; Menthol; Metacresol; Metaphosphoric Acid; Methanesulfonic Acid; Methionine; Methyl Alcohol; Methyl Gluceth-10; Methyl Gluceth-20; Methyl Gluceth-20 Sesquistearate; Methyl Glucose Sesquistearate; Methyl Laurate; Methyl Pyrrolidone; Methyl Salicylate; Methyl Stearate; Methylboronic Acid; Methylcellulose (4000 Mpa·S); Methylcelluloses; Methylchloroisothiazolinone; Methylene Blue; Methylisothiazolinone; Methylparaben; Microcrystalline Wax; Mineral Oil; Mono and Diglyceride; Monostearyl Citrate; Monothioglycerol; Multisterol Extract; Myristyl Alcohol; Myristyl Lactate; Myristyl-.Gamma.-Picolinium Chloride; N-(Carbamoyl-Methoxy Peg-40)-1,2-Distearoyl-Cephalin Sodium; N,N-Dimethylacetamide; Niacinamide; Nioxime; Nitric Acid; Nitrogen; Nonoxynol Iodine; Nonoxynol-15; Nonoxynol-9; Norflurane; Oatmeal; Octadecene. 1/Maleic Acid Copolymer; Octanoic Acid; Octisalate; Octoxynol-1; Octoxynol-40; Octoxynol-9; Octyldodecanol; Octylphenol Polymethylene; Oleic Acid; Oleth-10/Oleth-5; Oleth-2; Oleth-20; Oleyl Alcohol; Oleyl Oleate; Olive Oil; Oxidronate Disodium; Oxyquinoline; Palm Kernel Oil; Palmitamine Oxide; Parabens; Paraffin; Paraffin, White Soft; Parfum Creme 4513; Peanut Oil; Peanut Oil, Refined; Pectin; Peg 6-32 Stearate/Glycol Stearate; Peg Vegetable Oil; Peg-100 Stearate; Peg-12 Glyceryl Laurate; Peg. 120 Glyceryl Stearate; Peg-120 Methyl Glucose Dioleate; Peg-15 Cocamine; Peg-150 Distearate; Peg-2 Stearate; Peg-20 Sorbitan Isostearate; Peg-22 Methyl Ether/Dodecyl Glycol Copolymer; Peg-25 Propylene Glycol Stearate; Peg-4 Dilaurate; Peg-4 Laurate; Peg-40 Castor Oil; Peg-40 Sorbitan Diisostearate; Peg-45/Dodecyl Glycol Copolymer; Peg-5 Oleate; Peg-50 Stearate; Peg-54 Hydrogenated Castor Oil; Peg-6 Isostearate; Peg-60 Castor Oil; Peg-60 Hydrogenated Castor Oil; Peg-7 Methyl Ether; Peg-75 Lanolin; Peg-8 Laurate; Peg-8 Stearate; Pegoxol 7 Stearate; Pentadecalactone; Pentaerythritol Cocoate; Pentasodium Pentetate; Pentetate Calcium Trisodium; Pentetic Acid; Peppermint Oil; Perflutren; Perfume 25677; Perfume Bouquet; Perfume E-1991; Perfume Gd 5604; Perfume Tana 90/42 Scba; Perfume W-1952-1; Petrolatum; Petrolatum, White; Petroleum Distillates; Phenol; Phenol, Liquefied; Phenonip; Phenoxyethanol; Phenylalanine; Phenylethyl Alcohol; Phenylmercuric Acetate; Phenylmercuric Nitrate; Phosphatidyl Glycerol, Egg; Phospholipid; Phospholipid, Egg; Phospholipon 90 g; Phosphoric Acid; Pine Needle Oil (Pinus Sylvestris); Piperazine Hexahydrate; Plastibase-50w; Polacrilin; Polidronium Chloride; Poloxamer 124; Poloxamer 181; Poloxamer 182; Poloxamer 188; Poloxamer 237; Poloxamer 407; Poly(Bis(P-Carboxyphenoxy)Propane Anhydride):Sebacic Acid; Poly(Dimethylsiloxane/Methylvinylsiloxane/Methylhydrogensiloxane) Dimethylvinyl Or Dimethylhydroxy Or Trimethyl Endblocked; Poly(DI-Lactic-Co-Glycolic Acid), (50:50; Poly(DI-Lactic-Co-Glycolic Acid), Ethyl Ester Terminated, (50:50; Polyacrylic Acid (250000 Mw); Polybutene (1400 Mw); Polycarbophil; Polyester; Polyester Polyamine Copolymer; Polyester Rayon; Polyethylene Glycol 1000; Polyethylene Glycol 1450; Polyethylene Glycol 1500; Polyethylene Glycol 1540; Polyethylene Glycol 200; Polyethylene Glycol 300; Polyethylene Glycol 300-1600; Polyethylene Glycol 3350; Polyethylene Glycol 400; Polyethylene Glycol 4000; Polyethylene Glycol 540; Polyethylene Glycol 600; Polyethylene Glycol 6000; Polyethylene Glycol 8000; Polyethylene Glycol 900; Polyethylene High Density Containing Ferric Oxide Black (<1%); Polyethylene Low Density Containing Barium Sulfate (20-24%); Polyethylene T; Polyethylene Terephthalates; Polyglactin; Polyglyceryl-3 Oleate; Polyglyceryl-4 Oleate; Polyhydroxyethyl Methacrylate; Polyisobutylene; Polyisobutylene (1100000 Mw); Polyisobutylene (35000 Mw); Polyisobutylene 178-236; Polyisobutylene 241-294; Polyisobutylene 35-39; Polyisobutylene Low Molecular Weight; Polyisobutylene Medium Molecular Weight; Polyisobutylene/Polybutene Adhesive; Polylactide; Polyols; Polyoxyethylene-Polyoxypropylene 1800; Polyoxyethylene Alcohols; Polyoxyethylene Fatty Acid Esters; Polyoxyethylene Propylene; Polyoxyl 20 Cetostearyl Ether; Polyoxyl 35 Castor Oil; Polyoxyl 40 Hydrogenated Castor Oil; Polyoxyl 40 Stearate; Polyoxyl 400 Stearate; Polyoxyl 6 And Polyoxyl 32 Palmitostearate; Polyoxyl Distearate; Polyoxyl Glyceryl Stearate; Polyoxyl Lanolin; Polyoxyl Palmitate; Polyoxyl Stearate; Polypropylene; Polypropylene Glycol; Polyquaternium-10; Polyquaternium-7 (70/30 Acrylamide/Dadmac; Polysiloxane; Polysorbate 20; Polysorbate 40; Polysorbate 60; Polysorbate 65; Polysorbate 80; Polyurethane; Polyvinyl Acetate; Polyvinyl Alcohol; Polyvinyl Chloride; Polyvinyl Chloride-Polyvinyl Acetate Copolymer; Polyvinylpyridine; Poppy Seed Oil; Potash; Potassium Acetate; Potassium Alum; Potassium Bicarbonate; Potassium Bisulfite; Potassium Chloride; Potassium Citrate; Potassium Hydroxide; Potassium Metabisulfite; Potassium Phosphate, Dibasic; Potassium Phosphate, Monobasic; Potassium Soap; Potassium Sorbate; Povidone Acrylate Copolymer; Povidone Hydrogel; Povidone K17; Povidone K25; Povidone K29/32; Povidone K30; Povidone K90; Povidone K90f; Povidone/Eicosene Copolymer; Povidones; Ppg-12/Smdi Copolymer; Ppg-15 Stearyl Ether; Ppg-20 Methyl Glucose Ether Distearate; Ppg-26 Oleate; Product Wat; Proline; Promulgen D; Promulgen G; Propane; Propellant A-46; Propyl Gallate; Propylene Carbonate; Propylene Glycol; Propylene Glycol Diacetate; Propylene Glycol Dicaprylate; Propylene Glycol Monolaurate; Propylene Glycol Monopalmitostearate; Propylene Glycol Palmitostearate; Propylene Glycol Ricinoleate; Propylene Glycol/Diazolidinyl Urea/Methylparaben/Propylparben; Propylparaben; Protamine Sulfate; Protein Hydrolysate; Pvm/Ma Copolymer; Quaternium-15; Quaternium-15 Cis-Form; Quaternium-52; Ra-2397; Ra-3011; Saccharin; Saccharin Sodium; Saccharin Sodium Anhydrous; Safflower Oil; Sd Alcohol 3a; Sd Alcohol 40; Sd Alcohol 40-2; Sd Alcohol 40b; Sepineo P 600; Serine; Sesame Oil; Shea Butter; Silastic Brand Medical Grade Tubing; Silastic Medical Adhesive, Silicone Type A; Silica, Dental; Silicon; Silicon Dioxide; Silicon Dioxide, Colloidal; Silicone; Silicone Adhesive 4102; Silicone Adhesive 4502; Silicone Adhesive Bio-Psa Q7-4201; Silicone Adhesive Bio-Psa Q74301; Silicone Emulsion; Silicone/Polyester Film Strip; Simethicone; Simethicone Emulsion; Sipon Ls 20np; Soda Ash; Sodium Acetate; Sodium Acetate Anhydrous; Sodium Alkyl Sulfate; Sodium Ascorbate; Sodium Benzoate; Sodium Bicarbonate; Sodium Bisulfate; Sodium Bisulfite; Sodium Borate; Sodium Borate Decahydrate; Sodium Carbonate; Sodium Carbonate Decahydrate; Sodium Carbonate Monohydrate; Sodium Cetostearyl Sulfate; Sodium Chlorate; Sodium Chloride; Sodium Chloride Injection; Sodium Chloride Injection, Bacteriostatic; Sodium Cholesteryl Sulfate; Sodium Citrate; Sodium Cocoyl Sarcosinate; Sodium Desoxycholate; Sodium Dithionite; Sodium Dodecylbenzenesulfonate; Sodium Formaldehyde Sulfoxylate; Sodium Gluconate; Sodium Hydroxide; Sodium Hypochlorite; Sodium Iodide; Sodium Lactate; Sodium Lactate, L-; Sodium Laureth-2 Sulfate; Sodium Laureth-3 Sulfate; Sodium Laureth-5 Sulfate; Sodium Lauroyl Sarcosinate; Sodium Lauryl Sulfate; Sodium Lauryl Sulfoacetate; Sodium Metabisulfite; Sodium Nitrate; Sodium Phosphate; Sodium Phosphate Dihydrate; Sodium Phosphate, Dibasic; Sodium Phosphate, Dibasic, Anhydrous; Sodium Phosphate, Dibasic, Dihydrate; Sodium Phosphate, Dibasic, Dodecahydrate; Sodium Phosphate, Dibasic, Heptahydrate; Sodium Phosphate, Monobasic; Sodium Phosphate, Monobasic, Anhydrous; Sodium Phosphate, Monobasic, Dihydrate; Sodium Phosphate, Monobasic, Monohydrate; Sodium Polyacrylate (2500000 Mw); Sodium Pyrophosphate; Sodium Pyrrolidone Carboxylate; Sodium Starch Glycolate; Sodium Succinate Hexahydrate; Sodium Sulfate; Sodium Sulfate Anhydrous; Sodium Sulfate Decahydrate; Sodium Sulfite; Sodium Sulfosuccinated Undecyclenic Monoalkylolamide; Sodium Tartrate; Sodium Thioglycolate; Sodium Thiomalate; Sodium Thiosulfate; Sodium Thiosulfate Anhydrous; Sodium Trimetaphosphate; Sodium Xylenesulfonate; Somay 44; Sorbic Acid; Sorbitan; Sorbitan Isostearate; Sorbitan Monolaurate; Sorbitan Monooleate; Sorbitan Monopalmitate; Sorbitan Monostearate; Sorbitan Sesquioleate; Sorbitan Trioleate; Sorbitan Tristearate; Sorbitol; Sorbitol Solution; Soybean Flour; Soybean Oil; Spearmint Oil; Spermaceti; Squalane; Stabilized Oxychloro Complex; Stannous 2-Ethylhexanoate; Stannous Chloride; Stannous Chloride Anhydrous; Stannous Fluoride; Stannous Tartrate; Starch; Starch 1500, Pregelatinized; Starch, Corn; Stearalkonium Chloride; Stearalkonium Hectorite/Propylene Carbonate; Stearamidoethyl Diethylamine; Steareth-10; Steareth-100; Steareth-2; Steareth-20; Steareth-21; Steareth-40; Stearic Acid; Stearic Diethanolamide; Stearoxytrimethylsilane; Steartrimonium Hydrolyzed Animal Collagen; Stearyl Alcohol; Sterile Water For Inhalation; Styrene/Isoprene/Styrene Block Copolymer; Succimer; Succinic Acid; Sucralose; Sucrose; Sucrose Distearate; Sucrose Polyesters; Sulfacetamide Sodium; Sulfobutylether .Beta.-Cyclodextrin; Sulfur Dioxide; Sulfuric Acid; Sulfurous Acid; Surfactol Qs; Tagatose, D-; Talc; Tall Oil; Tallow Glycerides; Tartaric Acid; Tartaric Acid, DI-; Tenox; Tenox-2; Tert-Butyl Alcohol; Tert-Butyl Hydroperoxide; Tert-Butylhydroquinone; Tetrakis(2-Methoxyisobutylisocyanide)Copper(I) Tetrafluoroborate; Tetrapropyl Orthosilicate; Tetrofosmin; Theophylline; Thimerosal; Threonine; Thymol; Tin; Titanium Dioxide; Tocopherol; Tocophersolan; Total parenteral nutrition, lipid emulsion; Triacetin; Tricaprylin; Trichloromonofluoromethane; Trideceth-10; Triethanolamine Lauryl Sulfate; Trifluoroacetic Acid; Triglycerides, Medium Chain; Trihydroxystearin; Trilaneth-4 Phosphate; Trilaureth-4 Phosphate; Trisodium Citrate Dihydrate; Trisodium Hedta; Triton 720; Triton X-200; Trolamine; Tromantadine; Tromethamine (TRIS); Tryptophan; Tyloxapol; Tyrosine; Undecylenic Acid; Union 76 Amsco-Res 6038; Urea; Valine; Vegetable Oil; Vegetable Oil Glyceride, Hydrogenated; Vegetable Oil, Hydrogenated; Versetamide; Viscarin; Viscose/Cotton; Vitamin E; Wax, Emulsifying; Wecobee Fs; White Ceresin Wax; White Wax; Xanthan Gum; Zinc; Zinc Acetate; Zinc Carbonate; Zinc Chloride; and Zinc Oxide.

[1549] Pharmaceutical composition formulations of AAV particles disclosed herein may include cations or anions. In some embodiments, the formulations include metal cations such as, but not limited to, Zn2+, Ca2+, Cu2+, Mn2+, Mg+ and combinations thereof. As a non-limiting example, formulations may include polymers and complexes with a metal cation (See e.g., U.S. Pat. Nos. 6,265,389 and 6,555,525, each of which is herein incorporated by reference in its entirety).

[1550] Formulations of the disclosure may also include one or more pharmaceutically acceptable salts. As used herein, “pharmaceutically acceptable salts” refers to derivatives of the disclosed compounds wherein the parent compound is modified by converting an existing acid or base moiety to its salt form (e.g., by reacting the free base group with a suitable organic acid). Examples of pharmaceutically acceptable salts include, but are not limited to, mineral or organic acid salts of basic residues such as amines; alkali or organic salts of acidic residues such as carboxylic acids; and the like. Representative acid addition salts include acetate, acetic acid, adipate, alginate, ascorbate, aspartate, benzenesulfonate, benzene sulfonic acid, benzoate, bisulfate, borate, butyrate, camphorate, camphorsulfonate, citrate, cyclopentanepropionate, digluconate, dodecylsulfate, ethanesulfonate, fumarate, glucoheptonate, glycerophosphate, hemisulfate, heptonate, hexanoate, hydrobromide, hydrochloride, hydrochloride, 2-hydroxy-ethanesulfonate, lactobionate, lactate, laurate, lauryl sulfate, malate, maleate, malonate, methanesulfonate, 2-naphthalenesulfonate, nicotinate, nitrate, oleate, oxalate, palmitate, pamoate, pectinate, persulfate, 3-phenylpropionate, phosphate, picrate, pivalate, propionate, stearate, succinate, sulfate, tartrate, thiocyanate, toluenesulfonate, undecanoate, valerate salts, and the like. Representative alkali or alkaline earth metal salts include sodium, lithium, potassium, calcium, magnesium, and the like, as well as nontoxic ammonium, quaternary ammonium, and amine cations, including, but not limited to ammonium, tetramethylammonium, tetraethylammonium, methylamine, dimethylamine, trimethylamine, triethylamine, ethylamine, and the like. The pharmaceutically acceptable salts of the present disclosure include the conventional non-toxic salts of the parent compound formed, for example, from non-toxic inorganic or organic acids.

[1551] Solvates may be prepared by crystallization, recrystallization, or precipitation from a solution that includes organic solvents, water, or a mixture thereof. Examples of suitable solvents are ethanol, water (for example, mono-, di-, and tri-hydrates), N-methylpyrrolidinone (NMP), dimethyl sulfoxide (DMSO), N,N-dimethylformamide (DMF), N,N′-dimethylacetamide (DMAC), 1,3-dimethyl-2-imidazolidinone (DMEU), 1,3-dimethyl-3,4,5,6-tetrahydro-2-(1H)-pyrimidinone (DMPU), acetonitrile (ACN), propylene glycol, ethyl acetate, benzyl alcohol, 2-pyrrolidone, benzyl benzoate, and the like. When water is the solvent, the solvate is referred to as a “hydrate.”

### III. Administration and Dosing

### Administration

[1552] The AAV particles of the present disclosure may be administered by any delivery route which results in a therapeutically effective outcome. These include, but are not limited to, enteral (into the intestine), gastroenteral, epidural (into the dura mater), oral (by way of the mouth), transdermal, intracerebral (into the cerebrum), intracerebroventricular (into the cerebral ventricles), epicutaneous (application onto the skin), intradermal, (into the skin itself), subcutaneous (under the skin), nasal administration (through the nose), intravenous (into a vein), intravenous bolus, intravenous drip, intra-arterial (into an artery), intramuscular (into a muscle), intracardiac (into the heart), intraosseous infusion (into the bone marrow), intrathecal (into the spinal canal), intraparenchymal (into the substance of a tissue, e.g., brain tissue), intraperitoneal, (infusion or injection into the peritoneum), intravesical infusion, intravitreal, (through the eye), intracavernous injection (into a pathologic cavity) intracavitary (into the base of the penis), intravaginal administration, intrauterine, extra-amniotic administration, transdermal (diffusion through the intact skin for systemic distribution), transmucosal (diffusion through a mucous membrane), transvaginal, insufflation (snorting), sublingual, sublabial, enema, eye drops (onto the conjunctiva), or in ear drops, auricular (in or by way of the ear), buccal (directed toward the cheek), conjunctival, cutaneous, dental (to a tooth or teeth), electro-osmosis, endocervical, endosinusial, endotracheal, extracorporeal, hemodialysis, infiltration, interstitial, intra-abdominal, intra-amniotic, intra-articular, intrabiliary, intrabronchial, intrabursal, intracartilaginous (within a cartilage), intracaudal (within the cauda equine), intracisternal (within the cisterna magna cerebellomedularis), intracorneal (within the cornea), dental intracoronal, intracoronary (within the coronary arteries), intracorporus cavernosum (within the dilatable spaces of the corporus cavernosa of the penis), intradiscal (within a disc), intraductal (within a duct of a gland), intraduodenal (within the duodenum), intradural (within or beneath the dura), intraepidermal (to the epidermis), intraesophageal (to the esophagus), intragastric (within the stomach), intragingival (within the gingivae), intraileal (within the distal portion of the small intestine), intralesional (within or introduced directly to a localized lesion), intraluminal (within a lumen of a tube), intralymphatic (within the lymph), intramedullary (within the marrow cavity of a bone), intrameningeal (within the meninges), intramyocardial (within the myocardium), intraocular (within the eye), intraovarian (within the ovary), intrapericardial (within the pericardium), intrapleural (within the pleura), intraprostatic (within the prostate gland), intrapulmonary (within the lungs or its bronchi), intrasinal (within the nasal or periorbital sinuses), intraspinal (within the vertebral column), intrasynovial (within the synovial cavity of a joint), intratendinous (within a tendon), intratesticular (within the testicle), intrathecal (within the cerebrospinal fluid at any level of the cerebrospinal axis), intrathoracic (within the thorax), intratubular (within the tubules of an organ), intratumor (within a tumor), intratympanic (within the aurus media), intravascular (within a vessel or vessels), intraventricular (within a ventricle), iontophoresis (by means of electric current where ions of soluble salts migrate into the tissues of the body), irrigation (to bathe or flush open wounds or body cavities), laryngeal (directly upon the larynx), nasogastric (through the nose and into the stomach), occlusive dressing technique (topical route administration which is then covered by a dressing which occludes the area), ophthalmic (to the external eye), oropharyngeal (directly to the mouth and pharynx), parenteral, percutaneous, periarticular, peridural, perineural, periodontal, rectal, respiratory (within the respiratory tract by inhaling orally or nasally for local or systemic effect), retrobulbar (behind the pons or behind the eyeball), soft tissue, subarachnoid, subconjunctival, submucosal, topical, transplacental (through or across the placenta), transtracheal (through the wall of the trachea), transtympanic (across or through the tympanic cavity), ureteral (to the ureter), urethral (to the urethra), vaginal, caudal block, diagnostic, nerve block, biliary perfusion, cardiac perfusion, photopheresis, ganglionic (to the ganglion), intraganglionic (within the ganglion), and/or spinal.

[1553] In some embodiments, compositions may be administered in a way which allows them to cross the blood-brain barrier, vascular barrier, or other epithelial barrier. The AAV particles of the present disclosure may be administered in any suitable form, either as a liquid solution or suspension, as a solid form suitable for liquid solution or suspension in a liquid solution. The AAV particles may be formulated with any appropriate and pharmaceutically acceptable excipient.

[1554] In some embodiments, the AAV particles of the present disclosure may be delivered to a subject via a single route administration.

[1555] In some embodiments, the AAV particles of the present disclosure may be delivered to a subject via a multi-site route of administration. A subject may be administered at 2, 3, 4, 5 or more than 5 sites.

[1556] In some embodiments, a subject may be administered the AAV particles of the present disclosure using a bolus infusion.

[1557] In some embodiments, a subject may be administered the AAV particles of the present disclosure using sustained delivery over a period of minutes, hours or days. The infusion rate may be changed depending on the subject, distribution, formulation or another delivery parameter.

[1558] In some embodiments, the AAV particles of the present disclosure may be delivered by intramuscular delivery route. (See, e.g., U.S. Pat. No. 6,506,379; the content of which is incorporated herein by reference in its entirety). Non-limiting examples of intramuscular administration include an intravenous injection or a subcutaneous injection.

[1559] In some embodiments, the AAV particles of the present disclosure may be delivered by oral administration. Non-limiting examples of oral administration include a digestive tract administration and a buccal administration.

[1560] In some embodiments, the AAV particles of the present disclosure may be delivered by intraocular delivery route. A non-limiting example of intraocular administration include an intravitreal injection.

[1561] In some embodiments, the AAV particles of the present disclosure may be delivered by intranasal delivery route. Non-limiting examples of intranasal delivery include administration of nasal drops or nasal sprays.

[1562] In some embodiments, the AAV particles that may be administered to a subject by peripheral injections. Non-limiting examples of peripheral injections include intraperitoneal, intramuscular, intravenous, conjunctival or joint injection. It was disclosed in the art that the peripheral administration of AAV vectors can be transported to the central nervous system, for example, to the motor neurons (e.g., U. S. Patent Publication Nos. 20100240739; and 20100130594; the content of each of which is incorporated herein by reference in their entirety).

[1563] In some embodiments, the AAV particles may be delivered by injection into the CSF pathway. Non-limiting examples of delivery to the CSF pathway include intrathecal and intracerebroventricular administration.

[1564] In some embodiments, the AAV particles may be delivered by systemic delivery. As a non-limiting example, the systemic delivery may be by intravascular administration.

[1565] In some embodiments, the AAV particles of the present disclosure may be administered to a subject by intracranial delivery (See, e.g., U.S. Pat. No. 8,119,611; the content of which is incorporated herein by reference in its entirety).

[1566] In some embodiments, the AAV particles of the present disclosure may be administered to a subject by intraparenchymal administration.

[1567] In some embodiments, the AAV particles of the present disclosure may be administered to a subject by intramuscular administration.

[1568] In some embodiments, the AAV particles of the present disclosure are administered to a subject and transduce muscle of a subject. As a non-limiting example, the AAV particles are administered by intramuscular administration.

[1569] In some embodiments, the AAV particles of the present disclosure may be administered to a subject by intravenous administration.

[1570] In some embodiments, the AAV particles of the present disclosure may be administered to a subject by subcutaneous administration.

[1571] In some embodiments, the AAV particles of the present disclosure may be administered to a subject by topical administration.

[1572] In some embodiments, the AAV particles may be delivered by direct injection into the brain. As a non-limiting example, the brain delivery may be by intrastriatal administration.

[1573] In some embodiments, the AAV particles may be delivered by more than one route of administration. As non-limiting examples of combination administrations, AAV particles may be delivered by intrathecal and intracerebroventricular, or by intravenous and intraparenchymal administration.

### Parenteral and Injectable Administration

[1574] In some embodiments, pharmaceutical compositions, AAV particles of the present disclosure may be administered parenterally. Liquid dosage forms for oral and parenteral administration include, but are not limited to, pharmaceutically acceptable emulsions, microemulsions, solutions, suspensions, syrups, and/or elixirs. In addition to active ingredients, liquid dosage forms may comprise inert diluents commonly used in the art such as, for example, water or other solvents, solubilizing agents and emulsifiers such as ethyl alcohol, isopropyl alcohol, ethyl carbonate, ethyl acetate, benzyl alcohol, benzyl benzoate, propylene glycol, 1,3-butylene glycol, dimethylformamide, oils (in particular, cottonseed, groundnut, corn, germ, olive, castor, and sesame oils), glycerol, tetrahydrofurfuryl alcohol, polyethylene glycols and fatty acid esters of sorbitan, and mixtures thereof. Besides inert diluents, oral compositions can include adjuvants such as wetting agents, emulsifying and suspending agents, sweetening, flavoring, and/or perfuming agents. In certain embodiments for parenteral administration, compositions are mixed with solubilizing agents such as CREMOPHOR*, alcohols, oils, modified oils, glycols, polysorbates, cyclodextrins, polymers, and/or combinations thereof. In other embodiments, surfactants are included such as hydroxypropylcellulose.

[1575] Injectable preparations, for example, sterile injectable aqueous or oleaginous suspensions may be formulated according to the known art using suitable dispersing agents, wetting agents, and/or suspending agents. Sterile injectable preparations may be sterile injectable solutions, suspensions, and/or emulsions in nontoxic parenterally acceptable diluents and/or solvents, for example, as a solution in 1,3-butanediol. Among the acceptable vehicles and solvents that may be employed are water, Ringer's solution, U.S.P., and isotonic sodium chloride solution. Sterile, fixed oils are conventionally employed as a solvent or suspending medium. For this purpose, any bland fixed oil can be employed including synthetic mono- or diglycerides. Fatty acids such as oleic acid can be used in the preparation of injectables.

[1576] Injectable formulations may be sterilized, for example, by filtration through a bacterial-retaining filter, and/or by incorporating sterilizing agents in the form of sterile solid compositions which can be dissolved or dispersed in sterile water or other sterile injectable medium prior to use.

[1577] In order to prolong the effect of active ingredients, it is often desirable to slow the absorption of active ingredients from subcutaneous or intramuscular injections. This may be accomplished by the use of liquid suspensions of crystalline or amorphous material with poor water solubility. The rate of absorption of active ingredients depends upon the rate of dissolution which, in turn, may depend upon crystal size and crystalline form. Alternatively, delayed absorption of a parenterally administered drug form is accomplished by dissolving or suspending the drug in an oil vehicle. Injectable depot forms are made by forming microencapsulated matrices of the drug in biodegradable polymers such as polylactide-polyglycolide. Depending upon the ratio of drug to polymer and the nature of the particular polymer employed, the rate of drug release can be controlled. Examples of other biodegradable polymers include poly(orthoesters) and poly(anhydrides). Depot injectable formulations are prepared by entrapping the drug in liposomes or microemulsions which are compatible with body tissues.

### Rectal and Vaginal Administration

[1578] In some embodiments, pharmaceutical compositions, AAV particles of the present disclosure may be administered rectally and/or vaginally. Compositions for rectal or vaginal administration are typically suppositories which can be prepared by mixing compositions with suitable non-irritating excipients such as cocoa butter, polyethylene glycol or a suppository wax which are solid at ambient temperature but liquid at body temperature and therefore melt in the rectum or vaginal cavity and release the active ingredient.

### Oral Administration

[1579] In some embodiments, pharmaceutical compositions, AAV particles of the present disclosure may be administered orally. Solid dosage forms for oral administration include capsules, tablets, pills, powders, and granules. In such solid dosage forms, an active ingredient is mixed with at least one inert, pharmaceutically acceptable excipient such as sodium citrate or dicalcium phosphate and/or fillers or extenders (e.g. starches, lactose, sucrose, glucose, mannitol, and silicic acid), binders (e.g. carboxymethylcellulose, alginates, gelatin, polyvinylpyrrolidinone, sucrose, and acacia), humectants (e.g. glycerol), disintegrating agents (e.g. agar, calcium carbonate, potato or tapioca starch, alginic acid, certain silicates, and sodium carbonate), solution retarding agents (e.g. paraffin), absorption accelerators (e.g. quaternary ammonium compounds), wetting agents (e.g. cetyl alcohol and glycerol monostearate), absorbents (e.g. kaolin and bentonite clay), and lubricants (e.g. talc, calcium stearate, magnesium stearate, solid polyethylene glycols, sodium lauryl sulfate), and mixtures thereof. In the case of capsules, tablets and pills, the dosage form may comprise buffering agents.

### Topical or Transdermal Administration

[1580] As described herein, pharmaceutical compositions, AAV particles of the present disclosure may be formulated for administration topically. The skin may be an ideal target site for delivery as it is readily accessible. Three routes are commonly considered to deliver pharmaceutical compositions, AAV particles of the present disclosure to the skin: (i) topical application (e.g. for local/regional treatment and/or cosmetic applications); (ii) intradermal injection (e.g. for local/regional treatment and/or cosmetic applications); and (iii) systemic delivery (e.g. for treatment of dermatologic diseases that affect both cutaneous and extracutaneous regions). Pharmaceutical compositions, AAV particles of the present disclosure can be delivered to the skin by several different approaches known in the art.

[1581] In some embodiments, the disclosure provides for a variety of dressings (e.g., wound dressings) or bandages (e.g., adhesive bandages) for conveniently and/or effectively carrying out methods of the present disclosure. Typically dressing or bandages may comprise sufficient amounts of pharmaceutical compositions, AAV particles of the present disclosure described herein to allow users to perform multiple treatments.

[1582] Dosage forms for topical and/or transdermal administration may include ointments, pastes, creams, lotions, gels, powders, solutions, sprays, inhalants and/or patches. Generally, active ingredients are admixed under sterile conditions with pharmaceutically acceptable excipients and/or any needed preservatives and/or buffers. Additionally, the present disclosure contemplates the use of transdermal patches, which often have the added advantage of providing controlled delivery of pharmaceutical compositions, AAV particles of the present disclosure to the body. Such dosage forms may be prepared, for example, by dissolving and/or dispensing pharmaceutical compositions, AAV particles in the proper medium. Alternatively, or additionally, rates may be controlled by either providing rate controlling membranes and/or by dispersing pharmaceutical compositions, AAV particles in a polymer matrix and/or gel.

[1583] Formulations suitable for topical administration include, but are not limited to, liquid and/or semi liquid preparations such as liniments, lotions, oil in water and/or water in oil emulsions such as creams, ointments and/or pastes, and/or solutions and/or suspensions.

[1584] Topically-administrable formulations may, for example, comprise from about 1% to about 10% (w/w) active ingredient, although the concentration of active ingredient may be as high as the solubility limit of the active ingredient in the solvent. Formulations for topical administration may further comprise one or more of the additional ingredients described herein.

### Depot Administration

[1585] As described herein, in some embodiments, pharmaceutical compositions, AAV particles of the present disclosure are formulated in depots for extended release. Generally, specific organs or tissues (“target tissues”) are targeted for administration.

[1586] In some aspects of the disclosure, pharmaceutical compositions, AAV particles of the present disclosure are spatially retained within or proximal to target tissues. Provided are methods of providing pharmaceutical compositions, AAV particles, to target tissues of mammalian subjects by contacting target tissues (which comprise one or more target cells) with pharmaceutical compositions, AAV particles, under conditions such that they are substantially retained in target tissues, meaning that at least 10, 20, 30, 40, 50, 60, 70, 80, 85, 90, 95, 96, 97, 98, 99, 99.9, 99.99 or greater than 99.99% of the composition is retained in the target tissues. Advantageously, retention is determined by measuring the amount of pharmaceutical compositions, AAV particles, that enter one or more target cells. For example, at least 1%, 5%, 10%, 20%, 30%, 40%, 50%, 60%, 70%, 80%, 85%, 90%, 95%, 96%, 97%, 98%, 99%, 99.9%, 99.99% or greater than 99.99% of pharmaceutical compositions, AAV particles, administered to subjects are present intracellularly at a period of time following administration. For example, intramuscular injection to mammalian subjects may be performed using aqueous compositions comprising pharmaceutical compositions, AAV particles of the present disclosure and one or more transfection reagents, and retention is determined by measuring the amount of pharmaceutical compositions, AAV particles, present in muscle cells.

[1587] Certain aspects of the disclosure are directed to methods of providing pharmaceutical compositions, AAV particles of the present disclosure to a target tissues of mammalian subjects, by contacting target tissues (comprising one or more target cells) with pharmaceutical compositions, AAV particles under conditions such that they are substantially retained in such target tissues. Pharmaceutical compositions, AAV particles comprise enough active ingredient such that the effect of interest is produced in at least one target cell. In some embodiments, pharmaceutical compositions, AAV particles generally comprise one or more cell penetration agents, although “naked” formulations (such as without cell penetration agents or other agents) are also contemplated, with or without pharmaceutically acceptable carriers.

### Pulmonary Administration

[1588] In some embodiments, pharmaceutical compositions, AAV particles of the present disclosure may be prepared, packaged, and/or sold in formulations suitable for pulmonary administration. In some embodiments, such administration is via the buccal cavity. In some embodiments, formulations may comprise dry particles comprising active ingredients. In such embodiments, dry particles may have a diameter in the range from about 0.5 nm to about 7 nm or from about 1 nm to about 6 nm. In some embodiments, formulations may be in the form of dry powders for administration using devices comprising dry powder reservoirs to which streams of propellant may be directed to disperse such powder. In some embodiments, self-propelling solvent/powder dispensing containers may be used. In such embodiments, active ingredients may be dissolved and/or suspended in low-boiling propellant in sealed containers. Such powders may comprise particles wherein at least 98% of the particles by weight have diameters greater than 0.5 nm and at least 95% of the particles by number have diameters less than 7 nm. Alternatively, at least 95% of the particles by weight have a diameter greater than 1 nm and at least 90% of the particles by number have a diameter less than 6 nm. Dry powder compositions may include a solid fine powder diluent such as sugar and are conveniently provided in a unit dose form.

[1589] Low boiling propellants generally include liquid propellants having a boiling point of below 65° F. at atmospheric pressure. Generally, propellants may constitute 50% to 99.9% (w/w) of the composition, and active ingredient may constitute 0.1% to 20% (w/w) of the composition. Propellants may further comprise additional ingredients such as liquid non-ionic and/or solid anionic surfactant and/or solid diluent (which may have particle sizes of the same order as particles comprising active ingredients).

[1590] Pharmaceutical compositions formulated for pulmonary delivery may provide active ingredients in the form of droplets of solution and/or suspension. Such formulations may be prepared, packaged, and/or sold as aqueous and/or dilute alcoholic solutions and/or suspensions, optionally sterile, comprising active ingredients, and may conveniently be administered using any nebulization and/or atomization device. Such formulations may further comprise one or more additional ingredients including, but not limited to, a flavoring agent such as saccharin sodium, a volatile oil, a buffering agent, a surface active agent, and/or a preservative such as methylhydroxybenzoate. Droplets provided by this route of administration may have an average diameter in the range from about 0.1 nm to about 200 nm.

### Intranasal, Nasal and Buccal Administration

[1591] In some embodiments, pharmaceutical compositions, AAV particles of the present disclosure may be administered nasally and/or intranasal. In some embodiments, formulations described herein useful for pulmonary delivery may also be useful for intranasal delivery. In some embodiments, formulations for intranasal administration comprise a coarse powder comprising the active ingredient and having an average particle from about 0.2 μm to 500 μm. Such formulations are administered in the manner in which snuff is taken, i.e. by rapid inhalation through the nasal passage from a container of the powder held close to the nose.

[1592] Formulations suitable for nasal administration may, for example, comprise from about as little as 0.1% (w/w) and as much as 100% (w/w) of active ingredient, and may comprise one or more of the additional ingredients described herein. A pharmaceutical composition may be prepared, packaged, and/or sold in a formulation suitable for buccal administration. Such formulations may, for example, be in the form of tablets and/or lozenges made using conventional methods, and may, for example, 0.1% to 20% (w/w) active ingredient, the balance comprising an orally dissolvable and/or degradable composition and, optionally, one or more of the additional ingredients described herein. Alternately, formulations suitable for buccal administration may comprise powders and/or an aerosolized and/or atomized solutions and/or suspensions comprising active ingredients. Such powdered, aerosolized, and/or aerosolized formulations, when dispersed, may comprise average particle and/or droplet sizes in the range of from about 0.1 nm to about 200 nm, and may further comprise one or more of any additional ingredients described herein.

### Ophthalmic or Otic Administration

[1593] In some embodiments, pharmaceutical compositions, AAV particles of the present disclosure may be prepared, packaged, and/or sold in formulations suitable for ophthalmic and/or otic administration. Such formulations may, for example, be in the form of eye and/or ear drops including, for example, a 0.1/1.0% (w/w) solution and/or suspension of the active ingredient in aqueous and/or oily liquid excipients. Such drops may further comprise buffering agents, salts, and/or one or more other of any additional ingredients described herein. Other ophthalmically-administrable formulations which are useful include those which comprise active ingredients in microcrystalline form and/or in liposomal preparations. Subretinal inserts may also be used as forms of administration.

### Delivery

[1594] In some embodiments, the AAV particles or pharmaceutical compositions of the present disclosure may be administered or delivered using the methods for treatment of disease described in U.S. Pat. No. 8,999,948, or International Publication No. WO2014178863, the contents of which are herein incorporated by reference in their entirety.

[1595] In some embodiments, the AAV particles or pharmaceutical compositions of the present disclosure may be administered or delivered using the methods for delivering gene therapy in Alzheimer's Disease or other neurodegenerative conditions as described in US Application No. 20150126590, the contents of which are herein incorporated by reference in their entirety.

[1596] In some embodiments, the AAV particles or pharmaceutical compositions of the present disclosure may be administered or delivered using the methods for delivery of a CNS gene therapy as described in U.S. Pat. Nos. 6,436,708, and 8,946,152, and International Publication No. WO2015168666, the contents of which are herein incorporated by reference in their entirety.

[1597] In some embodiments, the AAV particle or pharmaceutical compositions of the present disclosure may be administered or delivered using the methods for delivering proteins using AAV vectors described in European Patent Application No. EP2678433, the contents of which are herein incorporated by reference in their entirety.

[1598] In some embodiments, the AAV particle or pharmaceutical compositions of the present disclosure may be administered or delivered using the methods for delivering DNA to the bloodstream described in U.S. Pat. No. 6,211,163, the contents of which are herein incorporated by reference in their entirety.

[1599] In some embodiments, the AAV particle or pharmaceutical compositions of the present disclosure may be administered or delivered using the methods for delivering a payload to the central nervous system described in U.S. Pat. No. 7,588,757, the contents of which are herein incorporated by reference in their entirety.

[1600] In some embodiments, the AAV particle or pharmaceutical compositions of the present disclosure may be administered or delivered using the methods for delivering a payload described in U.S. Pat. No. 8,283,151, the contents of which are herein incorporated by reference in their entirety.

[1601] In some embodiments, the AAV particle or pharmaceutical compositions of the present disclosure may be administered or delivered using the methods for delivering a payload using a glutamic acid decarboxylase (GAD) delivery vector described in International Patent Publication No. WO2001089583, the contents of which are herein incorporated by reference in their entirety.

[1602] In some embodiments, the AAV particle or pharmaceutical compositions of the present disclosure may be administered or delivered using the methods for delivering a payload to neural cells described in International Patent Publication No. WO2012057363, the contents of which are herein incorporated by reference in their entirety.

### Delivery to Cells

[1603] The present disclosure provides a method of delivering to a cell or tissue any of the above-described AAV particles, comprising contacting the cell or tissue with said AAV particle or contacting the cell or tissue with a formulation comprising said AAV particle, or contacting the cell or tissue with any of the described compositions, including pharmaceutical compositions. The method of delivering the AAV particle to a cell or tissue can be accomplished in vitro, ex vivo, or in vivo.

### Delivery to Subjects

[1604] The present disclosure additionally provides a method of delivering to a subject, including a mammalian subject, any of the above-described AAV particles comprising administering to the subject said AAV particle, or administering to the subject a formulation comprising said AAV particle, or administering to the subject any of the described compositions, including pharmaceutical compositions.

### Dose and Regimen

[1605] The present disclosure provides methods of administering AAV particles in accordance with the disclosure to a subject in need thereof. The pharmaceutical, diagnostic, or prophylactic AAV particles and compositions of the present disclosure may be administered to a subject using any amount and any route of administration effective for preventing, treating, managing, or diagnosing diseases, disorders and/or conditions. The exact amount required will vary from subject to subject, depending on the species, age, and general condition of the subject, the severity of the disease, the particular composition, its mode of administration, its mode of activity, and the like. The subject may be a human, a mammal, or an animal. Compositions in accordance with the disclosure are typically formulated in unit dosage form for ease of administration and uniformity of dosage. It will be understood, however, that the total daily usage of the compositions of the present disclosure may be decided by the attending physician within the scope of sound medical judgment. The specific therapeutically effective, prophylactically effective, or appropriate diagnostic dose level for any particular individual will depend upon a variety of factors including the disorder being treated and the severity of the disorder; the activity of the specific payload employed; the specific composition employed; the age, body weight, general health, sex and diet of the patient; the time of administration, route of administration, and rate of excretion of the specific AAV particle employed; the duration of the treatment; drugs used in combination or coincidental with the specific AAV particle employed; and like factors well known in the medical arts.

[1606] In certain embodiments, AAV particle pharmaceutical compositions in accordance with the present disclosure may be administered at dosage levels sufficient to deliver from about 0.0001 mg/kg to about 100 mg/kg, from about 0.001 mg/kg to about 0.05 mg/kg, from about 0.005 mg/kg to about 0.05 mg/kg, from about 0.001 mg/kg to about 0.005 mg/kg, from about 0.05 mg/kg to about 0.5 mg/kg, from about 0.01 mg/kg to about 50 mg/kg, from about 0.1 mg/kg to about 40 mg/kg, from about 0.5 mg/kg to about 30 mg/kg, from about 0.01 mg/kg to about 10 mg/kg, from about 0.1 mg/kg to about 10 mg/kg, or from about 1 mg/kg to about 25 mg/kg, of subject body weight per day, one or more times a day, to obtain the desired therapeutic, diagnostic, or prophylactic, effect. It will be understood that the above dosing concentrations may be converted to vg or viral genomes per kg or into total viral genomes administered by one of skill in the art.

[1607] In certain embodiments, AAV particle pharmaceutical compositions in accordance with the present disclosure may be administered at about 10 to about 600 μl/site, 50 to about 500 μl/site, 100 to about 400 μl/site, 120 to about 300 μl/site, 140 to about 200 μl/site, about 160 μl/site. As non-limiting examples, AAV particles may be administered at 50 μl/site and/or 150 μl/site.

[1608] The desired dosage of the AAV particles of the present disclosure may be delivered only once, three times a day, two times a day, once a day, every other day, every third day, every week, every two weeks, every three weeks, or every four weeks. In certain embodiments, the desired dosage may be delivered using multiple administrations (e.g., two, three, four, five, six, seven, eight, nine, ten, eleven, twelve, thirteen, fourteen, or more administrations). When multiple administrations are employed, split dosing regimens such as those described herein may be used. As used herein, a “split dose” is the division of “single unit dose” or total daily dose into two or more doses, e.g., two or more administrations of the “single unit dose”. As used herein, a “single unit dose” is a dose of any therapeutic administered in one dose/at one time/single route/single point of contact, i.e., single administration event.

[1609] The desired dosage of the AAV particles of the present disclosure may be administered as a “pulse dose” or as a “continuous flow”. As used herein, a “pulse dose” is a series of single unit doses of any therapeutic administered with a set frequency over a period of time. As used herein, a “continuous flow” is a dose of therapeutic administered continuously for a period of time in a single route/single point of contact, i.e., continuous administration event. A total daily dose, an amount given or prescribed in 24 hour period, may be administered by any of these methods, or as a combination of these methods, or by any other methods suitable for a pharmaceutical administration.

[1610] In some embodiments, delivery of the AAV particles of the present disclosure to a subject provides neutralizing activity to a subject. The neutralizing activity can be for at least 1 month, 2 months, 3 months, 4 months, 5 months, 6 months, 7 months, 8 months, 9 months, 10 months, 11 months, 1 year, 13 months, 14 months, 15 months, 16 months, 17 months, 18 months, 19 months, 20 months, 20 months, 21 months, 22 months, 23 months, 2 years, 3 years, 4 years, 5 years, 6 years, 7 years, 8 years, 9 years, 10 years or more than 10 years.

[1611] In some embodiments, delivery of the AAV particles of the present disclosure results in minimal serious adverse events (SAEs) as a result of the delivery of the AAV particles.

[1612] In some embodiments, delivery of AAV particles to cells of the central nervous system (e.g., parenchyma) may comprise a total dose between about 1×10⁶ VG and about 1×10⁶ VG. In some embodiments, delivery may comprise a total dose of about 1×10⁶, 2×10⁶, 3×10⁶, 4×10⁶, 5×10⁶, 6×10⁶, 7×10⁶, 8×10⁶, 9×10⁶, 1×10⁷, 2×10⁷, 3×10⁷, 4×10⁷, 5×10⁷, 6×10⁷, 7×10⁷, 8×10⁷, 9×10⁷, 1×10⁸, 2×10³, 3×10⁸, 4×10⁸, 5×10³, 6×10⁸, 7×10⁸, 8×10, 9×10⁸, 1×10⁹, 2×10⁹, 3×10⁹, 4×10⁹, 5×10⁹, 6×10⁹, 7×10⁹, 8×10⁹, 9×10⁹, 1×10¹⁰, 1.9×10¹⁰, 2×10¹⁰, 3×10¹⁰, 3.73×10¹⁰, 4×10⁹, 5×10⁹, 6×10¹⁰, 7×10¹⁰, 8×10⁹, 9×10¹⁰, 1×10¹¹, 2×10¹¹, 2.5×10¹¹, 3×10¹¹, 4×10¹¹, 5×10¹¹, 6×10¹¹, 7×10¹¹, 8×10¹¹, 9×10¹¹, 1×10¹², 2×10¹², 3×10¹², 4×10², 5×10¹², 6×10², 7×10¹², 8×10², 9×10¹², 1×10¹³, 2×10¹³, 3×10¹³, 4×10¹³, 5×10¹³, 6×10¹³, 7×10¹³, 8×10¹³, 9×10¹³, 1×10¹⁴, 2×10¹⁴, 3×10¹⁴, 4×10¹⁴, 5×10¹⁴, 6×10¹⁴, 7×10¹⁴, 8×10¹⁴, 9×10¹⁴, 1×10¹⁵, 2×10¹⁵, 3×10¹⁵, 4×10¹⁵, 5×10¹⁵, 6×10¹⁵, 7×10¹⁵, 8×10¹⁵, 9×10¹⁵, or 1×10¹⁶VG. As a non-limiting example, the total dose is 1×10¹³VG. As another non-limiting example, the total dose is 2.1×10¹²VG.

[1613] In some embodiments, delivery of AAV particles to cells of the central nervous system (e.g., parenchyma) may comprise a composition concentration between about 1×10⁶ VG/mL and about 1×10¹⁶ VG/mL. In some embodiments, delivery may comprise a composition concentration of about 1×10⁶, 2×10⁶, 3×10⁶, 4×10⁶, 5×10⁶, 6×10⁶, 7×10⁶, 8×10⁶, 9×10⁶, 1×10⁷, 2×10⁷, 3×10⁷, 4×10⁷, 5×10⁷, 6×10⁷, 7×10⁷, 8×10⁷, 9×10⁷, 1×10⁸, 2×10⁸, 3×10⁸, 4×10⁸, 5×10⁸, 6×10⁸, 7×10⁸, 8×10⁸, 9×10⁸, 1×10⁹, 2×10⁹, 3×10⁹, 4×10⁹, 5×10⁹, 6×10⁹, 7×10⁹, 8×10⁹, 9×10⁹, 1×10¹⁰, 2×10¹⁰, 3×10¹⁰, 4×10¹⁰, 5×10¹⁰, 6×10¹⁰, 7×10¹⁰, 8×10¹⁰, 9×10¹⁰, 1×10¹¹, 2×10¹¹, 3×10¹¹, 4×10¹¹, 5×10¹¹, 6×10¹¹, 7×10¹¹, 8×10¹¹, 9×10¹¹, 1×10¹², 2×10¹², 3×10¹², 4×10¹², 5×10¹², 6×10¹², 7×10¹², 8×10¹², 9×10¹², 1×10¹³, 2×10¹³, 3×10¹³, 4×10¹³, 5×10¹³, 6×10¹³, 7×10¹³, 8×10¹³, 9×10¹³, 1×10¹⁴, 2×10¹⁴, 3×10¹⁴, 4×10¹⁴, 5×10¹⁴, 6×10¹⁴, 7×10¹⁴, 8×10¹⁴, 9×10¹⁴, 1×10¹⁵, 2×10¹⁵, 3×10¹⁵, 4×10¹⁵, 5×10¹⁵, 6×10¹⁵, 7×10¹⁵, 8×10¹⁵, 9×10¹⁵, or 1×10¹⁶′VG/mL In some embodiments, the delivery comprises a composition concentration of 1×10¹³VG/mL. In some embodiments, the delivery comprises a composition concentration of 2.1×10¹² VG/mL.

### Combinations

[1614] The AAV particles may be used in combination with one or more other therapeutic, prophylactic, research or diagnostic agents. By “in combination with,” it is not intended to imply that the agents must be administered at the same time and/or formulated for delivery together, although these methods of delivery are within the scope of the present disclosure. Compositions can be administered concurrently with, prior to, or subsequent to, one or more other desired therapeutics or medical procedures. In general, each agent will be administered at a dose and/or on a time schedule determined for that agent. In some embodiments, the present disclosure encompasses the delivery of pharmaceutical, prophylactic, research, or diagnostic compositions in combination with agents that may improve their bioavailability, reduce and/or modify their metabolism, inhibit their excretion, and/or modify their distribution within the body.

### Measurement of Expression

[1615] Expression of payloads from viral genomes may be determined using various methods known in the art such as, but not limited to immunochemistry (e.g., IHC), in situ hybridization (ISH), enzyme-linked immunosorbent assay (ELISA), affinity ELISA, ELISPOT, flow cytometry, immunocytology, surface plasmon resonance analysis, kinetic exclusion assay, liquid chromatography-mass spectrometry (LCMS), high-performance liquid chromatography (HPLC), BCA assay, immunoelectrophoresis, Western blot, SDS-PAGE, protein immunoprecipitation, and/or PCR.

### Bioavailability

[1616] The AAV particles, when formulated into a composition with a delivery agent as described herein, can exhibit an increase in bioavailability as compared to a composition lacking a delivery agent as described herein. As used herein, the term “bioavailability” refers to the systemic availability of a given amount of AAV particle or expressed payload administered to a mammal. Bioavailability can be assessed by measuring the area under the curve (AUC) or the maximum serum or plasma concentration (Cₘₐₓ) of the composition following. AUC is a determination of the area under the curve plotting the serum or plasma concentration of a compound (e.g., AAV particles or expressed payloads) along the ordinate (Y-axis) against time along the abscissa (X-axis). Generally, the AUC for a particular compound can be calculated using methods known to those of ordinary skill in the art and as described in G. S. Banker, Modern Pharmaceutics, Drugs and the Pharmaceutical Sciences, v. 72, Marcel Dekker, New York, Inc., 1996, the contents of which are herein incorporated by reference in its entirety.

[1617] The Cₘₐₓ value is the maximum concentration of the AAV particle or expressed payload achieved in the serum or plasma of a mammal following administration of the AAV particle to the mammal. The Cₘₐₓ value of can be measured using methods known to those of ordinary skill in the art. The phrases “increasing bioavailability” or “improving the pharmacokinetics,” as used herein mean that the systemic availability of a first AAV particle or expressed payload, measured as AUC, Cₘₐₓ, or Cₘᵢₙ in a mammal is greater, when co-administered with a delivery agent as described herein, than when such co-administration does not take place. In some embodiments, the bioavailability can increase by at least about 2%, at least about 5%, at least about 10%, at least about 15%, at least about 20%, at least about 25%, at least about 30%, at least about 35%, at least about 40%, at least about 45%, at least about 50%, at least about 55%, at least about 60%, at least about 65%, at least about 70%, at least about 75%, at least about 80%, at least about 85%, at least about 90%, at least about 95%, or about 100%.

### Therapeutic Window

[1618] As used herein “therapeutic window” refers to the range of plasma concentrations, or the range of levels of therapeutically active substance at the site of action, with a high probability of eliciting a therapeutic effect. In some embodiments, the therapeutic window of the AAV particle as described herein can increase by at least about 2%, at least about 5%, at least about 10%, at least about 15%, at least about 20%, at least about 25%, at least about 30%, at least about 35%, at least about 40%, at least about 45%, at least about 50%, at least about 55%, at least about 60%, at least about 65%, at least about 70%, at least about 75%, at least about 80%, at least about 85%, at least about 90%, at least about 95%, or about 100%.

### Volume of Distribution

[1619] As used herein, the term “volume of distribution” refers to the fluid volume that would be required to contain the total amount of the drug in the body at the same concentration as in the blood or plasma: V_{dist} equals the amount of drug in the body/concentration of drug in blood or plasma. For example, for a 10 mg dose and a plasma concentration of 10 mg/L, the volume of distribution would be 1 liter. The volume of distribution reflects the extent to which the drug is present in the extravascular tissue. A large volume of distribution reflects the tendency of a compound to bind to the tissue components compared with plasma protein binding. In a clinical setting, V_{dist} a can be used to determine a loading dose to achieve a steady state concentration. In some embodiments, the volume of distribution of the AAV particles as described herein can decrease at least about 2%, at least about 5%, at least about 10%, at least about 15%, at least about 20%, at least about 25%, at least about 30%, at least about 35%, at least about 40%, at least about 45%, at least about 50%, at least about 55%, at least about 60%, at least about 65%, at least about 70%.

### Biological Effect

[1620] In some embodiments, the biological effect of the AAV particles delivered to the animals may be categorized by analyzing the payload expression in the animals. The payload expression may be determined from analyzing a biological sample collected from a mammal administered the AAV particles of the present disclosure. For example, a protein expression of 50-200 pg/ml for the protein encoded by the AAV particles delivered to the mammal may be seen as a therapeutically effective amount of protein in the mammal.

### IV. Methods and Uses of the Compositions of the Disclosure

[1621] The present disclosure provides a method for treating a disease, disorder and/or condition in a mammalian subject, including a human subject, comprising administering to the subject any of the AAV particles described herein or administering to the subject any of the described compositions, including pharmaceutical compositions, described herein.

[1622] In some embodiments, the AAV particles of the present disclosure are administered to a subject prophylactically.

[1623] In some embodiments, the AAV particles of the present disclosure are administered to a subject having at least one of the diseases described herein.

[1624] In some embodiments, the AAV particles of the present disclosure are administered to a subject to treat a disease or disorder described herein. The subject may have the disease or disorder or may be at-risk to developing the disease or disorder.

[1625] In some embodiments, the AAV particles of the present disclosure are part of an active immunization strategy to protect against diseases and disorders. In an active immunization strategy, a vaccine or AAV particles are administered to a subject to prevent an infectious disease by activating the subject's production of antibodies that can fight off invading bacteria or viruses.

[1626] In some embodiments, the AAV particles of the present disclosure are part of a passive immunization strategy. In a passive immunization strategy, antibodies against a particular infectious agent are given directly to the subject.

### Therapeutic Applications: Infectious Disease

[1627] AAV particles and methods of using the AAV particles described in the present disclosure may be used to prevent, manage and/or treat infectious disease. As a non-limiting example, the AAV particles of the present disclosure comprise a nucleic acid sequence encoding at least one of the sequences described in Table 3 (SEQ ID NO: 1740-2141).

[1628] The methods, components and compositions of the present disclosure may be used to diagnose, prevent, treat and/or manage infectious diseases. As used herein, the term “Infectious disease” may refer to any disorder and/or condition caused by invasion into the body of an exogenous organism or infection agent that is not typically present such as, but not limited to, viruses, bacteria, prions, nematodes, fungus, parasites or arthropods. Infectious diseases are also known as transmissible diseases or communicable diseases. Infectious diseases and/or infection related diseases, disorders, and/or conditions that may be treated by methods, components and compositions of the present disclosure include, but are not limited to, Acute bacterial rhinosinusitis, 14-day measles, Acne, Acrodermatitis chronica atrophicans (ACA)-(late skin manifestation of latent Lyme disease), Acute hemorrhagic conjunctivitis, Acute hemorrhagic cystitis, Acute rhinosinusitis, Adult T-cell Leukemia. Lymphoma (ATLL), African Sleeping Sickness, AIDS (Acquired Immunodeficiency Syndrome), Alveolar hydatid, Amebiasis, Amebic meningoencephalitis, Anaplasmosis, Anthrax, Arboviral or parainfectious, Ascariasis—(Roundworm infections), Aseptic meningitis, Athlete's foot (Tinea pedis), Australian tick typhus, Avian Influenza, Babesiosis, Bacillary angiomatosis, Bacterial meningitis, Bacterial vaginosis, Balanitis, Balantidiasis, Bang's disease, Barmah Forest virus infection, Bartonellosis (Verruga peruana; Carrion's disease; Oroya fever), Bat Lyssavirus Infection, Bay sore (Chiclero's ulcer), Baylisascaris infection (Racoon roundworm infection), Beaver fever, Beef tapeworm, Bejel (endemic syphilis), Biphasic meningoencephalitis, Black Bane, Black death, Black piedra, Blackwater Fever, Blastomycosis, Blennorrhea of the newborn, Blepharitis, Boils, Bornholm disease (pleurodynia), Borrelia miyamotoi Disease, Botulism, Boutonneuse fever, Brazilian purpuric fever, Break Bone fever, Brill, Bronchiolitis, Bronchitis, Brucellosis (Bang's disease), Bubonic plague, Bullous impetigo, Burkholderia mallei (Glanders), Burkholderia pseudomallei (Melioidosis), Buruli ulcers (also Mycoburuli ulcers), Busse, Busse-Buschke disease (Cryptococcosis), California group encephalitis, Campylobacteriosis, Candidiasis, Canefield fever (Canicola fever; 7-day fever; Weil's disease; leptospirosis; canefield fever), Canicola fever, Capillariasis, Carate, Carbapenem-resistant Enterobacteriaceae (CRE), Carbuncle, Carrion's disease, Cat Scratch fever, Cave disease, Central Asian hemorrhagic fever, Central European tick, Cervical cancer, Chagas disease, Chancroid (Soft chancre), Chicago disease, Chickenpox (Varicella), Chiclero's ulcer, Chikungunya fever, Chlamydial infection, Cholera, Chromoblastomycosis, Ciguatera, Clap, Clonorchiasis (Liver fluke infection), Clostridium Difficile Infection, ClostriDium Perfringens (Epsilon Toxin), Coccidioidomycosis fungal infection (Valley fever; desert rheumatism), Coenurosis, Colorado tick fever, Condyloma accuminata, Condyloma accuminata (Warts), Condyloma lata, Congo fever, Congo hemorrhagic fever virus, Conjunctivitis, cowpox, Crabs, Crimean, Croup, Cryptococcosis, Cryptosporidiosis (Crypto), Cutaneous Larval Migrans, Cyclosporiasis, Cystic hydatid, Cysticercosis, Cystitis, Czechoslovak tick, D68 (EV-D68), Dacryocytitis, Dandy fever, Darling's Disease, Deer fly fever, Dengue fever (1, 2, 3 and 4), Desert rheumatism, Devil's grip, Diphasic milk fever, Diphtheria, Disseminated Intravascular Coagulation, Dog tapeworm, Donovanosis, Donovanosis (Granuloma inguinale), Dracontiasis, Dracunculosis, Duke's disease, Dum Dum Disease, Durand-Nicholas-Favre disease, Dwarf tapeworm, E. coli infection (E. coli), Eastern equine encephalitis, Ebola Hemorrhagic Fever (Ebola virus disease EVD), Ectothrix, Ehrlichiosis (Sennetsu fever), Encephalitis, Endemic Relapsing fever, Endemic syphilis, Endophthalmitis, Endothrix, Enterobiasis (Pinworm infection), Enterotoxin-B Poisoning (Staph Food Poisoning), Enterovirus Infection, Epidemic Keratoconjunctivitis, Epidemic Relapsing fever, Epidemic typhus, Epiglottitis, Erysipelis, Erysipeloid (Erysipelothricosis), Erythema chronicum migrans, Erythema infectiosum, Erythema marginatum, Erythema multiforme, Erythema nodosum, Erythema nodosum leprosum, Erythrasma, Espundia, Eumycotic mycetoma, European blastomycosis, Exanthem subitum (Sixth disease), Eyeworm, Far Eastern tick, Fasciollasis, Fievre boutonneuse (Tick typhus), Fifth Disease (erythema infectiosum), Filatow-Dukes' Disease (Scalded Skin Syndrome; Ritter's Disease), Fish tapeworm, Fitz-Hugh-Curtis syndrome-Perihepatitis, Flinders Island Spotted Fever, Flu (Influenza), Folliculitis, Four Corners Disease, Four Corners Disease (Human Pulmonary Syndrome (HPS)), Frambesia, Francis disease, Furunculosis, Gas gangrene, Gastroenteritis, Genital Herpes, Genital Warts, German measles, Gerstmann-Straussler-Scheinker (GSS), Giardiasis, Gilchrist's disease, Gingivitis, Gingivostomatitis, Glanders, Glandular fever (infectious mononucleosis), Gnathostomiasis, Gonococcal Infection (Gonorrhea), Gonorrhea, Granuloma inguinale (Donovanosis), Guinea Worm, Haemophilus Influenza disease, Hamburger disease, Hansen's disease—leprosy, Hantaan disease, Hantaan-Korean hemorrhagic fever, Hantavirus Pulmonary Syndrome, Hantavirus Pulmonary Syndrome (HPS), Hard chancre, Hard measles, Haverhill fever—Rat bite fever, Head and Body Lice, Heartland fever, Helicobacterosis, Hemolytic Uremic Syndrome (HUS), Hepatitis A, Hepatitis B, Hepatitis C, Hepatitis D, Hepatitis E, Herpangina, Herpes-genital, Herpes labialis, Herpes-neonatal, Hidradenitis, Histoplasmosis, Histoplasmosis infection (Histoplasmosis), His-Werner disease, HIV infection, Hookworm infections, Hordeola, Hordeola (Stye), HTLV, HTLV-associated myelopathy (HAM), Human granulocytic ehrlichiosis, Human monocytic ehrlichlosis, Human Papillomavirus (HPV), Human Pulmonary Syndrome, Hydatid cyst, Hydrophobia, Impetigo, Including congenital (German Measles), Inclusion conjunctivitis, Inclusion conjunctivitis-Swimming Pool conjunctivitis-Pannus, Infantile diarrhea, Infectious Mononucleosis, Infectious myocarditis, Infectious pericarditis, Influenza, Isosporiasis, Israeli spotted fever, Japanese Encephalitis, Jock itch, Jorge Lobo disease-lobomycosis, Jungle yellow fever, Junin Argentinian hemorrhagic fever, Kala Azar, Kaposi's sarcoma, Keloidal blastomycosis, Keratoconjunctivitis, Kuru, Kyasanur forest disease, LaCrosse encephalitis, Lassa hemorrhagic fever, Legionellosis (Legionnaires Disease), Legionnaire's pneumonia, Lemierre's Syndrome (Postanginal septicemia), Lemming fever, Leprosy, Leptospirosis (Nanukayami fever; Weil's disease), Listeriosis (Listeria), Liver fluke infection, Lobo's mycosis, Lockjaw, Loiasis, Louping III, Ludwig's angina, Lung fluke infection, Lung fluke infection (Paragonimiasis), Lyme disease, Lymphogranuloma venereum infection (LGV), Machupo Bolivian hemorrhagic fever, Madura foot, Mal del pinto, Malaria, Malignant pustule, Malta fever, Marburg hemorrhagic fever, Masters disease, Maternal Sepsis (Puerperal fever), Measles, Mediterranean spotted fever, Melioidosis (Whitmore's disease), Meningitis, Meningococcal Disease, MERS, Milker's nodule, Molluscum contagiosum, Monillasis, monkeypox, Mononucleosis, Mononucleosis-like syndrome, Montezuma's Revenge, Morbilli, MRSA (methicillin-resistant Staphylococcus aureus) infection, Mucormycosis. Zygomycosis, Multiple Organ Dysfunction Syndrome or MODS, Multiple-system atrophy (MSA), Mumps, Murine typhus, Murray Valley Encephalitis (MVE), Mycoburuli ulcers, Mycoburuli ulcers. Buruli ulcers, Mycotic vulvovaginitis, Myositis, Nanukayami fever, Necrotizing fasciitis, Necrotizing fasciitis-Type 1, Necrotizing fasciitis. Type 2, Negishi, New world spotted fever, Nocardiosis, Nongonococcal urethritis, Non-Polio (Non-Polio Enterovirus), Norovirus infection, North American blastomycosis, North Asian tick typhus, Norwalk virus infection, Norwegian itch, O'Hara disease, Omsk hemorrhagic fever, Onchoceriasis, Onychomycosis, Opisthorchiasis, Opthalmia neonatorium, Oral hairy leukoplakia, Orf, Oriental Sore, Oriental Spotted Fever, Ornithosis (Parrot fever; Psittacosis), Oroya fever, Otitis externa, Otitis media, Pannus, Paracoccidioidomycosis, Paragonimiasis, Paralytic Shellfish Poisoning (Paralytic Shellfish Poisoning), Paronychia (Whitlow), Parotitis, PCP pneumonia, Pediculosis, Peliosis hepatica, Pelvic Inflammatory Disease, Pertussis (also called Whooping cough), Phaeohyphomycosis, Pharyngoconjunctival fever, Piedra (White Piedra), Piedra(Black Piedra), Pigbel, Pink eye conjunctivitis, Pinta, Pinworm infection, Pitted Keratolysis, Pityriasis versicolor (Tinea versicolor), Plague; Bubonic, Pleurodynia, Pneumococcal Disease, Pneumocystosis, Pneumonia, Pneumonic (Plague), Polio or Poliomyelitis, Polycystic hydatid, Pontiac fever, Pork tapeworm, Posada-Wernicke disease, Postanginal septicemia, Powassan, Progressive multifocal leukencephalopathy, Progressive Rubella Panencephalitis, Prostatitis, Pseudomembranous colitis, Psittacosis, Puerperal fever, Pustular Rash diseases (Small pox), Pyelonephritis, Pylephlebitis, Q-Fever, Quinsy, Quintana fever (5-day fever), Rabbit fever, Rabies, Racoon roundworm infection, Rat bite fever, Rat tapeworm, Reiter Syndrome, Relapsing fever, Respiratory syncytial virus (RSV) infection, Rheumatic fever, Rhodotorulosis, Ricin Poisoning, Rickettsialpox, Rickettsiosis, Rift Valley Fever, Ringworm, Ritter's Disease, River Blindness, Rocky Mountain spotted fever, Rose Handler's disease (Sporotrichosis), Rose rash of infants, Roseola, Ross River fever, Rotavirus infection, Roundworm infections, Rubella, Rubeola, Russian spring, Salmonellosis gastroenteritis, San Joaquin Valley fever, Sao Paulo Encephalitis, Sao Paulo fever, SARS, Scabies Infestation (Scabies) (Norwegian itch), Scalded Skin Syndrome, Scarlet fever (Scarlatina), Schistosomiasis, Scombroid, Scrub typhus, Sennetsu fever, Sepsis (Septic shock), Severe Acute Respiratory Syndrome, Severe Acute Respiratory Syndrome (SARS), Shiga Toxigenic Escherichia coli (STEC/VTEC), Shigellosis gastroenteritis (Shigella), Shinbone fever, Shingles, Shipping fever, Siberian tick typhus, Sinusitis, Sixth disease, Slapped cheek disease, Sleeping sickness, Smallpox (Variola), Snail Fever, Soft chancre, Southern tick associated rash illness, Sparganosis, Spelunker's disease, Sporadic typhus, Sporotrichosis, Spotted fever, Spring, St. Louis encephalitis, Staphylococcal Food Poisoning, Staphylococcal Infection, Strep. throat, Streptococcal Disease, Streptococcal Toxic-Shock Syndrome, Strongyloiciasis, Stye, Subacute Sclerosing Panencephalitis, Subacute Sclerosing Panencephalitis (SSPE), Sudden Acute Respiratory Syndrome, Sudden Rash, Swimmer's ear, Swimmer's Itch, Swimming Pool conjunctivitis, Sylvatic yellow fever, Syphilis, Systemic Inflammatory Response Syndrome (SIRS), Tabes dorsalis (tertiary syphilis), Taeniasis, Taiga encephalitis, Tanner's disease, Tapeworm infections, Temporal lobe encephalitis, Temporal lobe encephalitis, tetani (Lock Jaw), Tetanus Infection, Threadworm infections, Thrush, Tick, Tick typhus, Tinea barbae, Tinea capitis, Tinea corporis, Tinea cruris, Tinea manuum, Tinea nigra, Tinea pedis, Tinea unguium, Tinea versicolor, Torulopsosis, Torulosis, Toxic Shock Syndrome, Toxoplasmosis, transmissible spongioform (CJD), Traveler's diarrhea, Trench fever 5, Trichinellosis, Trichomoniasis, Trichomycosis axillaris, Trichuriasis, Tropical Spastic Paraparesis (TSP), Trypanosomiasis, Tuberculosis (TB), Tuberculousis, Tularemia, Typhoid Fever, Typhus fever, Ulcus molle, Undulant fever, Urban yellow fever, Urethritis, Vaginitis, Vaginosis, Vancomycin Intermediate (VISA), Vancomycin Resistant (VRSA), Varicella, Venezuelan Equine encephalitis, Verruga peruana, Vibrio cholerae (Cholera), Vibriosis (Vibrio), Vincent's disease or Trench mouth, Viral conjunctivitis, Viral Meningitis, Viral meningoencephalitis, Viral rash, Visceral Larval Migrans, Vomito negro, Vulvovaginitis, Warts, Waterhouse, Weil's disease, West Nile Fever, Western equine encephalitis, Whipple's disease, Whipworm infection, White Piedra, Whitlow, Whitmore's disease, Winter diarrhea, Wolhynia fever, Wool sorters' disease, Yaws, Yellow Fever, Yersinosis, Yersinosis (Yersinia), Zahorsky's disease, Zika virus disease, Zoster, Zygomycosis, John Cunningham Virus (JCV), Human immunodeficiency virus (HIV), Influenza virus, Hepatitis B, Hepatitis C, Hepatitis D, Respiratory syncytial virus (RSV), Herpes simplex virus 1 and 2, Human Cytomegalovirus, Epstein-Barr virus, Varicella zoster virus, Coronaviruses, Poxviruses, Enterovirus 71, Rubella virus, Human papilloma virus, Streptococcus pneumoniae, Streptococcus viridans., Staphylococcus aureus (S. aureus), Methicillin-resistant Staphylococcus aureus (MRSA), Vancomycin-intermediate Staphylococcus aureus (VISA), Vancomycin-resistant Staphylococcus aureus (VRSA), Staphylococcus epidermidis (S. epidermidis), Clostridium Tetani, Bordetella pertussis, Bordetella paratussis, Mycobacterium, Francisella Tularensis, Toxoplasma gondii, Candida (C. albicans, C. glabrata, C. parapsilosis, C. tropicalis, C. krusei and C. lusitaniae) and/or any other infectious diseases, disorders or syndromes.

[1629] Additionally, an infection or symptoms associated with an infection may be caused by one or more toxins produced by such agents. Humans, and other mammals, react to infections with an innate immune system response, often involving an inflammation. The illnesses and symptoms involved with infections vary according to the infectious agent. Many infections may be subclinical without presenting any definite or observable symptoms, whereas some infections cause severe symptoms, require hospitalization or may be life-threatening. Some infections are localized, whereas some may overcome the body through blood circulation or lymphatic vessels. Some infections have long-term effects on wellbeing of infected individuals.

[1630] Infectious agents may be transmitted to humans via different routes. For example, infection agents may be transmitted by direct contact with an infected human, an infected animal, or an infected surface. Infections may be transmitted by direct contact with bodily fluids of an infected human or an animal, e.g. blood, saliva, sweat, tears, mucus, female ejaculate, semen, vomit or urine. For example, infection may be transmitted by a fecal-oral route, referring to an infected person shedding the virus in fecal particles which then enters to person's mouth causing infection. The fecal-oral route is especially common transmission route in environments with poor sanitation and hygiene. Non-limiting examples of agents transmitted by the fecal-oral route include bacteria, e.g. shigella, Salmonella typhi and Vibrio cholerae, virus, e.g. norovirus, rotavirus, enteroviruses, and hepatitis A, fungi, protozoans e.g. Entamoeba histolytica, parasites, tape worms, transmitted by contaminated food or beverage, leading to food poisoning or gastroenteritis. Infections may be transmitted by a respiratory route, referring to agents that are spread through the air. Typical examples include agents spread as small droplets of liquid or as aerosols, e.g. respiratory droplets expelled from the mouth and nose while coughing and sneezing. Typical examples of respiratory transmitted diseases include the common cold mostly implicated to rhinoviruses, influenza caused by influenza viruses, respiratory tract infections caused by e.g. respiratory syncytial virus (RSV). Infections may be transmitted by a sexual transmission route. Examples of common sexually transmitted infections include e.g. human immunodeficiency virus (HIV) causing acquired immune deficiency syndrome (AIDS), chlamydia caused by Neisseria gonorrhoeae bacteria, fungal infection Candidiasis caused by Candida yeast, and Herpes Simplex disease caused by herpes simplex virus. Infections may be transmitted by an oral transmission route, e.g. by kissing or sharing a drinking glass. A common infection transmitted by oral transmission is an infectious mononucleosis caused by Epstein-Barr virus. Infections may be transmitted by a vertical transmission, also known as “mother-to-child transmission,” from mother to an embryo, fetus or infant during pregnancy or childbirth. Examples of infection agents that may be transmitted vertically include HIV, chlamydia, rubella, Toxoplasma gondii, and herpes simplex virus. Infections may be transmitted by an iatrogenic route, referring to a transmission by medical procedures such as injection (contaminated reused needles and syringes), or transplantation of infected material, blood transfusions, or infection occurring during surgery. For example, methicillin-resistant Staphylococcus aureus (MRSA), which may cause several severe infections, may be transmitted via iatrogenic route during surgery. Infections may also be transmitted by vector-borne transmission, where a vector may be an organism transferring the infection agents from one host to another. Such vectors may be triatomine bugs, e.g. trypanosomes, parasites, animals, arthropods including e.g. mosquitos, flies, lice, flees, tick and mites or humans. Non-limiting examples of mosquito-borne infections include Dengue fever, West Nile virus related infections, Yellow fever and Chikungunya fever. Non-limiting examples of parasite-borne diseases include malaria, Human African trypanosomiasis and Lyme disease. Non-limiting examples of diseases spread by humans or mammals include HIV, Ebola hemorrhagic fever and Marburg fever.

[1631] Traditionally infectious diseases are treated with medications and/or good supportive care. Medical prevention, treatment and/or management of bacterial infections may include administration of antibiotics. Antibiotics may inhibit the colonization of bacteria or kill the bacteria. Antibiotics include e.g. penicillins, cephalosporins, macrolides, fluoroquinolones, sulfonamides, tetracyclines, and aminoglycosides. Antibiotics may be specific to a certain bacteria or act against broad spectrum of bacteria. Some types of bacteria are especially susceptible to antibiotics, whereas some bacteria are more resistant. Development of bacterial strain mutations that are resistant to antibiotics is an increasing concern. Methicillin-resistant Staphylococcus aureus (MRSA), vancomycin-resistant Enterococcus (VRE), multi-drug-resistant Mycobacterium tuberculosis (MDR-TB) and Klebsiella pneumoniae carbapenemase-producing bacteria (KPC) are examples of bacteria that are resistant to most general antibiotics. Due to the emerging resistance, unnecessary administration and overdosing of antibiotics should be avoided. Medical prevention, treatment and/or management of viral infections may include administration of antiviral medications. Antiviral medications may be specific to a certain bacteria or act against a broad spectrum of viruses. Currently antiviral medications are available for e.g. HIV, influenza, hepatitis B and C. Medical prevention, treatment and/or management of viral infections may include administration of antifungal medication. Antifungal medication kills or prevents the growth of fungi. Types of antifungal medications include e.g. imidazoles, triazoles and thiazoles, allylamines, and echinocandins. Development of antifungal medication capable of targeting fungal cells without affecting human cells is a challenge due to the similarities of human and fungal cell on the molecular level. Typically, medical treatment is combined with good supportive care, which includes provision of fluids, bed rest, medication to relieve pain and lower fever, supportive alternative medicine such as vitamins, antioxidants and other supplements important for wellbeing of patients.

[1632] Antibody therapies for infectious diseases have also been developed. Examples of commercial therapeutic antibodies include raxibacumab (developed by Cambridge Antibody Technology and Human Genome Sciences) which is an antibody for the prophylaxis and treatment of inhaled anthrax, SHIGAMAB™ (developed by Bellus Health Inc.) is a monoclonal antibody for treatment of Shiga toxin induced hemolytic uremic syndrome, and actoxumab and bezlotoxumab (developed by Medarex Inc. and the University of Massachusetts Medical School) are commercial human monoclonal antibodies targeting C. difficile toxin A and toxin B, respectively.

### Common Infectious Diseases

### John Cunningham Virus (JCV)

[1633] John Cunningham Virus is a common human polyomavirus. The transmission route of JCV is unknown. The virus is suspected to be spread by contaminated water and may be obtained through tonsils or by the gastrointestinal tract 70-90% of humans are estimated to be infected by the virus, and for normal healthy individuals the infection is asymptomatic. However, for patients with weakened immune system, JCV may lead to Progressive multifocal leukoencephalopathy (PML). PML is a condition characterized by multifocal progressive damage or inflammation of the white matter of the brain. The symptoms include clumsiness, progressive weakness and changes in visual, speech and personality. PLM has a mortality rate of 30-50% and patients who survive the disease are left with severe neurological disabilities PML occurs in patients with a severe immunodeficiency, most commonly in patients with HIV/AIDS. As many as 5% of HIV/AIDS patients are affected by PML. Individuals with other autoimmune conditions such as multiple sclerosis, rheumatoid arthritis, and systemic lupus erythematosus are also at risk, as well as individuals going through immunosuppressive therapy for cancer, e.g. lymphoma or Hodgkin's disease, or organ transplant. PML associated with immunosuppressive therapy is an increasing concern. For example, commercial antibody natalizumab (TYSABRI®, developed by Biogen Idec) for treatment of multiple sclerosis increases susceptibility to PML. Other drugs associated with increased risk of PML include Rituximab (RITUXAN®, developed by IDEC Pharmaceuticals), Efalizumab (RAPTIVA® developed by Genentech and XOMA) and Mycophenolate mofetil (CELLCEPT®, developed by Genentech).

[1634] JCV is a nonenveloped, T=7 icosahedral virus with a closed circular, double-stranded DNA genome. The major capsid component is the viral protein VP1 is made of 72 pentamers formed by VP1 monomers linked through the C terminal end. VP1 starts the infection by binding to the receptor target cells. After initial infection, typically occurring in childhood or adolescence, the virus stays quiescent in the kidneys and the lymphoid organs. In healthy individuals, the virus may replicate in kidney without causing any symptoms. However, in patients with weakened immune system, JCV may cross the blood-brain barrier into the central nervous system causing PML.

[1635] As of today, there is no known cure for PML. Current therapies focus on reversing the immune deficiency to slow down or stop the progress of the disease. There remains a need for therapies neutralizing JVC for prevention, management and treatment of JCV infection and PML Goldmann et al. demonstrated that neutralizing activity with JCV VP1 protein in sera of a rabbit (see Goldmann C. et al., 1999, J Virol.; 73(5): 4465-4469). Therapies based on neutralizing JCV antibodies could be applied for treatment, management and/or prevention of PML. Recently, immunological approaches have been under investigation and neutralizing antibodies binding to JC virus, especially targeting the VP1 protein, have been developed e.g. as described in US Patent Publication US2015/0191530, US2015/0056188 and US201510050271, the contents of each of which are incorporated herein by reference in their entirety. Such antibodies may cause reduction of JCV replication, proliferation or infectivity. Antibodies may bind to a conformational epitope of JCV VP1 protein or to the sialic acid binding pocket of VP1 protein of JCV.

[1636] In some embodiments, methods of the present disclosure may be used to prevent, manage and/or treat JCV infection and/or PML

[1637] AAV particles and methods of using the AAV particles described in the present disclosure may be used to prevent, manage and/or treat JCV. As a non-limiting example, the AAV particles of the present disclosure comprise a nucleic acid sequence encoding at least one of the sequences described in Table 3 (SEQ ID NO: 1740-2141).

### Influenza Virus

[1638] Influenza viruses cause a common respiratory infection called influenza (flu). Influenza viruses are categorized into three main groups, virus A, B and C. Influenza viruses are negative-sense, single-stranded, segmented RNA viruses. Influenza A contains two proteins on the surface of the viral envelope: hemagglutinin (H), which is a protein responsible for red blood cell agglutination and neuraminidase (N), which is an enzyme cleaving the glycosidic bonds of neuraminic acid. Influenza A mutates at a faster rate than types B and C. Several serotypes of H and subtypes of N have been identified. Influenza Type B, similarly to Type A, contains H and N protein. Type C influenza virus is a single stranded RNA virus with glycoprotein called hemagglutinin-esterase fusion. Influenza strains vary according to geographical presentation.

[1639] Influenza in general is a highly contagious disease and may be transmitted by the respiratory route. Influenza symptoms include e.g. high fever, runny nose, headache, sore throat, muscle pain, cough and occasionally nausea and vomiting. Influenza may lead to other complications such as pneumonia or sinus infections, Influenza may be dangerous to young children, the elderly, pregnant women and individuals with chronic medical conditions or weakened immune system. According to Centers for Disease Control and Prevention (CDC), the estimated annual number of flu-associated deaths in the United States ranges between 3000 and 49, 000, depending on the severity of the seasonal variations.

[1640] Influenza may be treated with good supportive care and antiviral medication. Antiviral medications include neuraminidase inhibitors, e.g. oseltamivir and zanamivir and M2 protein inhibitors. However, some strains of influenza appear to be resistant to these antiviral medications. Seasonal vaccinations to influenza are very efficient in prevention of the disease and are recommended annually.

[1641] There remains a need for prevention and treatment therapies for influenza, especially for those providing long lasting and broad neutralization. Therapeutic antibodies against influenza viruses have been developed. In general, antibody responses to different subtypes and serotypes of influenza A, B and C are unique. Some therapeutic antibodies are specific to an antibody type, whereas some have a broad coverage. Navivumab (developed by Celltrion, Inc.) taught in US Patent application US20140234336, firivumab (developed by Celltrion, Inc.) taught in US Patent application US20130004505 and diridavumab (developed by Jansen Biotech, Crucell and Johnson & Johnson) taught in International Patent application WO/2008/028946 are examples of therapeutically antibodies against influenza A hemagglutinin HA.

[1642] AAV particles and methods of using the AAV particles described in the present disclosure may be used to prevent, manage and/or treat influenza. As a non-limiting example, the AAV particles of the present disclosure comprise a nucleic acid sequence encoding at least one of the sequences described in Table 3 (SEQ ID NO: 1740-2141).

### Hepatitis

[1643] Hepatitis is an inflammation of the liver. Hepatitis may be caused by an infection of hepatitis viruses A, B, C, D or E. In some cases, hepatitis may be asymptotic. A typical symptom of hepatitis is jaundice, characterized by yellowing of the skin, mucous membrane and conjunctiva. Other symptoms include loss of appetite, diarrhea, nausea and fever. Hepatitis may lead to a liver failure. Acute form of hepatitis is healed within six months of infection. The inflammation may also progress to a chronic hepatitis, which may lead to liver complications such as fibrosis, cirrhosis or hepatocellular carcinoma. There is no specific treatment for hepatitis. Typically, acute hepatitis is treated with good supportive care, including good nutritional balance, fluid and rest. Chronic hepatitis may be treated with antiviral drugs. Hepatitis may be prevented by vaccinations.

[1644] Hepatitis A (HAV) virus belongs to the family of Picornaviridae. HAV is encapsidated in an icosahedral structure formed by 60 copies of three viral structural proteins (VP1, VP2 and VP3), (see e.g. Kim et al. 2004, Virology; 318(2):598-607, and references therein). HAV is spread by the fecal-oral-route. Typical transmission is through contaminated food or drink or in contact with an infected individual. Improperly cooked shellfish is a common source of HAV. Hepatitis A is more abundant in developing countries with poor sanitary conditions. According to the World Health Organization (WHO), an estimated 1.4 million people are infected by HAV every year.

[1645] Vaccines for prevention of HAV infection exists and are recommended to be administered to children under 1 year of age by CDC. As of today, there is no specific treatment for HAV infection. The treatment includes supportive therapy and may last for weeks or even months. There remains a need for treatment therapies for HAV. Antibodies for prevention and/or treatment of HAV have been developed. For example, US Patent US763476, International Publication WO2011114353 and Kim et al in Virology. 2004 Jan. 20; 318(2):598-607, the contents of each of which are incorporated herein by reference in their entirety, teach neutralizing antibodies targeting HAV antigens.

[1646] Hepatitis B (HBV) belongs to the family of Orthohepadnaviridae. HBV comprises a 3.2 kb-partially double-stranded circular DNA genome. HBV virus may be transmitted via the sexual transmission route, vertical transmission at birth, iatrogenic route (e.g. blood transfusions, contaminated reused needles and syringes), as well as via exposure to certain body fluids of an infected individual. According to the WHO, an estimated 240 million people are chronically infected with hepatitis B annually, and more than 780 000 people die to associated complications.

[1647] HBV may be prevented by vaccination. The WHO recommends vaccination for all infants, as well as for adults living in increased risk of the infection. HBV infection may be treated with antiviral medications, e.g. tenofovir and entecavir. The medication does not cure the disease but suppresses the replication of the virus. Individuals with chronic hepatitis B infection are administered antiviral medications for life. There remains a need for therapies providing long lasting management and/or cure for HBV infection. Antibodies for prevention and/or treatment of HBV infection are described e.g. in US Patent publication US20120308580 and International publication WO2013165972, the contents of each of which are herein incorporated by their reference in their entirety.

[1648] Hepatitis C (HCV) belongs to the family of Faviviridae. HCV is a positive-sense single-stranded RNA virus with an open reading frame with 9600 nucleotide bases. HCV is most commonly transmitted by the sexual transmission route or latrogenic route. Hepatitis C may be transmitted also via the vertical route, though uncommon. According to WHO, 130-150 million people have a chronic HCV infection and approximately half a million people die from complications associated with HCV annually.

[1649] As of today, there is no vaccine for HCV infection. Traditional treatment of hepatitis C is based on antiviral medication therapy with e.g. ribavirin and interferon. More recently, direct antiviral agents (DAA) have been developed to treat hepatitis C infections. However, there remains a need for efficient prevention and treatment therapies for HCV infection.

[1650] Hepatitis D (HDV) is a small spherical enveloped RNA virus belonging to the genus of deltaviruses. HDV infection may only replicate in the presence of a HBV virus and therefore HDV infection has a dependency on HBV. HDV virus may be transmitted as coinfection with HBV or be superimposed on chronic HBV or HBV carrier state. HDV may be transmitted similarly to HBV, e.g. via the sexual transmission route, vertical transmission at birth, latrogenic route, as well as via exposure to certain body fluids of an infected individual. Treatment and vaccination against HBV may be applied against HDV, and there remains a need for therapies to cure both infections.

[1651] Hepatitis E (HEV) is a linear, monoparte, single-stranded RNA virus belonging to the family of Hepevirdae. HEV may be transmitted via the fecal-oral route due to contaminated food or beverage, the iatrogenic route (e.g. blood transfusions, contaminated reused needles and syringes) or the vertical transmission route during pregnancy. Contaminated drinking water is the most common source of infection. Improperly cooked shellfish are a common source of HEV. The disease is present worldwide but is more abundant in East and South Asia, and especially in environments with poor sanitation and hygiene. According to WHO, an estimated 20 million HEV infections occur annually leading to 56 600 death associated with HEV complications.

[1652] There is no specific treatment for HEV. The disease is typically cured with good supportive care. As of today, vaccinations against HEV are not globally available, though development in the field has been done. There remains a need for prevention and treatment therapies for HEV infection. Antibodies for prevention and treatment of HEV have been developed. For example, neutralizing antibodies targeting HEV have been taught in US Patent U.S. Pat. No. 7,148,323, Tang et al. 2011, Proc. Natl. Acad. Sci. U.S.A. 108(25), 10266.10271 and Gu et al. 2015, Cell Res. 25(5), 604-620, the contents of each of which are incorporated herein by reference in their entirety.

[1653] In some embodiments, methods of the present disclosure may be used to prevent, manage and/or treat infections and complications caused by HAV, HBV, HCV, HDV and/or HEV.

[1654] AAV particles and methods of using the AAV particles described in the present disclosure may be used to prevent, manage and/or treat HAV. As a non-limiting example, the AAV particles of the present disclosure comprise a nucleic acid sequence encoding at least one of the sequences described in Table 3 (SEQ ID NO: 1740-2141).

[1655] AAV particles and methods of using the AAV particles described in the present disclosure may be used to prevent, manage and/or treat HBV. As a non-limiting example, the AAV particles of the present disclosure comprise a nucleic acid sequence encoding at least one of the sequences described in Table 3 (SEQ ID NO: 1740-2141).

[1656] AAV particles and methods of using the AAV particles described in the present disclosure may be used to prevent, manage and/or treat HDV. As a non-limiting example, the AAV particles of the present disclosure comprise a nucleic acid sequence encoding at least one of the sequences described in Table 3 (SEQ ID NO: 1740-2141).

[1657] AAV particles and methods of using the AAV particles described in the present disclosure may be used to prevent, manage and/or treat HEV. As a non-limiting example, the AAV particles of the present disclosure comprise a nucleic acid sequence encoding at least one of the sequences described in Table 3 (SEQ ID NO: 1740-2141).

### Respiratory Syncytial Virus (RSV)

[1658] Respiratory syncytial virus (RSV) is a single-stranded RNA virus belonging to the family of Paramyxoviridae. The RSV RNA is contained in a nucleocapsid made of 11 proteins and covered with a lipid envelope (see, e.g. Piedimonte, 2015, Cleve Clin J Med.; 82(11 Suppl 1):S13-8, and references therein). RSV attaches to the epithelial cells of the host airway cells with the surface glycoproteins G and F and merges the viral envelope to the membranes of adjacent cells. G and F glycoproteins are the principal antigens exposed to the host immune system.

[1659] Respiratory syncytial virus (RSV) causes infections of the respiratory tract including the lungs and breathing passages. RSV is transmitted through the respiratory transmission route, in direct contact with nasal or oral secretions of infected individuals, or indirectly e.g. by touching a contaminated surface. The symptoms include a runny nose, decrease of appetite, coughing, sneezing, fever and wheezing. The infection may progress into a pneumonia or bronchiolitis. Additionally, RSV infection may have a role in triggering asthma attacks and in the inception of asthma for individuals with a family history of asthma. In healthy adults, RSV infection is typically mild and does not require hospitalization. However, the infection may be dangerous for young children and infants, and for individuals with a weakened immune system. According to the CDC, almost all children under 3 years of age will acquire an RSV infection and up to 2% of cases require hospitalization. RSV infection the most common cause for bronchiolitis and pneumonia in children younger than 1-year-old.

[1660] As of today, there is no specific medical treatment for RSV infection on the market and typically the infection is treated with good supportive care. There remains a need for prevention and treatment therapies for RSV infections and associated complications. Antibodies for treatment and prevention of RSV infection have been developed. For example, palivizumab (developed by MedImmune) taught in US Patent U.S. Pat. No. 8,153,133, the contents of which are incorporated herein by reference in their entirety, is a nearly human monoclonal antibody targeting the RSV F glycoprotein. Palivizumab is used for passive immunity for infants at risk for severe infection, including children with hemodynamically significant congenital heart defects, profound immunodeficiency and pulmonary or neuromuscular pathologies impairing airway clearance.

[1661] In some embodiments, methods of the present disclosure may be used to prevent, manage and/or treat infections and complications caused by RSV.

[1662] AAV particles and methods of using the AAV particles described in the present disclosure may be used to prevent, manage and/or treat RSV. As a non-limiting example, the AAV particles of the present disclosure comprise a nucleic acid sequence encoding at least one of the sequences described in Table 3 (SEQ ID NO: 1740-2141).

### Herpes Simplex Virus 1 and 2

[1663] Herpes simplex viruses 1 and 2 (HSV1 and HSV2), also known as human herpesvirus 1 and 2 (HHV-1 and HHV-2), belong to the family of Herpesviridae. Herpesviruses in general, consist of an icosahedral capsid surrounded by a membrane envelope. The capsid contains the viral double stranded DNA. The capsid is surrounded by an amorphous tegument of 30 viral proteins. The virion is enveloped by lipids with multiple viral glycoproteins and cellular proteins (see, e.g. McAllister and Schleiss, 2014, Expert Rev Vaccines; 13(11): 1349-1360, and references therein).

[1664] HSV1 and HSV2 cause an infection known as herpes, which is characterized by blisters in the skin, or mucous membranes of the mouth, lips, also known as “cold sores”, or genitals. Typically, the symptoms are mild or asymptomatic. However, HSV1 and HSV2 are neurotropic and neuroinvasive viruses persisting in the body by becoming latent, and sustain in the cell bodies of neurons. The infection is lifelong with outbreaks, or sporadic episodes of viral reactivation, when the virus in the nerve cells become active causing new blistering. The infection may be dangerous to individuals with weakened immune system. Neonatal herpes of infants may be fatal. Occasionally HSV1 infections may lead to encephalitis or keratitis. HSV1 and HSV2 are transmitted by contact with an infected area during reactivations of the virus. HSV1 is mainly transmitted by oral-to-oral contact, skin contact or the sexual transmission route. HSV1 may also be transmitted vertically during birth. HSV2 is transmitted via the sexual transmission route and is one of the most common sexually transmitted infections. According to the WHO, an estimated 67% of world's population aged under 50 years has an HSV-1 infection. An estimated 11% of world's population aged 15-49 years has an HSV2 infection.

[1665] As of today, there is no vaccination for prevention of HSV1 and HSV2 infections on the market. HSV1 and HSV2 infections may be treated with antiviral medications, such as acyclovir, famciclovir and valacyclovir. Antiviral medications do not cure the infection, but reduce the severity and frequency of symptoms. There remains a therapy for prevention and cure for these infections. Antibodies for prevention, treatment and management of HSV1 and HSV2, targeting the viral glycoproteins, have been developed, as described e.g. in US Patent U.S. Pat. No. 8,431,118, US Patent U.S. Pat. No. 5,646,041, Haynes US Patent Publication US2014/0302062, the contents of each of which are incorporated herein by reference in their entirety.

[1666] In some embodiments, methods of the present disclosure may be used to prevent, manage and/or treat infections and complications caused by HSV1 and HSV2.

[1667] AAV particles and methods of using the AAV particles described in the present disclosure may be used to prevent, manage and/or treat HSV. As a non-limiting example, the AAV particles of the present disclosure comprise a nucleic acid sequence encoding at least one of the sequences described in Table 3 (SEQ ID NO:1740-2141).

### Human Cytomegalovirus

[1668] Human Cytomegalovirus (HCMV) also known as human herpesvirus 5 (HHV-5) belongs to the family of Herpesviridae, a sub-family of Betaherpesvirinae. HCMV is a double-stranded DNA enveloped virus composed of a nucleocapsid surrounded by structured tegument layer and bounded by a trilaminate membrane envelope.

[1669] In most occasions, an initial HCMV infection is asymptomatic, or associated with mild symptoms e.g. sore throat, fatigue, flu-like symptoms, and fever. After initial infections, HCMV virus resides in mononuclear cells without detectable symptoms. HCMV infection may be dangerous to individuals with weakened immune system. HCMV may be transmitted by contact with certain body fluids of an infected individuals (e.g. saliva, urine, semen). HCMV may be transmitted vertically, especially if acquired during pregnancy, leading to a congenital HCMV infection. According to CDC, about 1 in 150 children are born with congenital CMV infection. In about 20% of cases, congenital HCMV infection may lead to premature birth, birth defects or developmental disabilities, e.g. liver, lung, spleen problems, small head size, small body size or seizures.

[1670] As of today, there is no specific treatment or prevention therapy for HCMV infection. In severe cases of congenital HCMV infection, infants may be treated with an antiviral drug, ganciclovir, to prevent hearing loss and developmental outcomes. However, the drug has serious side effects. There remains a need for prevention therapy and improved therapies for treatment and cure of HCMV infection. Antibodies neutralizing HCMV have been developed. Such antibodies are taught e.g. in International Patent Publication WO2010007463, US Patent U.S. Pat. Nos. 9,149,524, 8,492,529 and 8,202,518, the contents of each of which are incorporated herein by reference in their entirety.

[1671] In some embodiments, methods of the present disclosure may be used to prevent, manage and/or treat infections and complications caused by HCMV.

[1672] AAV particles and methods of using the AAV particles described in the present disclosure may be used to prevent, manage and/or treat HCMV. As a non-limiting example, the AAV particles of the present disclosure comprise a nucleic acid sequence encoding at least one of the sequences described in Table 3 (SEQ ID NO: 1740-2141).

### Epstein-Barr Virus

[1673] Epstein-Barr virus (EBV), also known as human herpesvirus 4 (HHV-4) belongs to the family of Herpesviridae. EBV is a double-stranded DNA virus composed of a protein nucleocapsid surrounded by a tegument layer and bounded by an envelope containing lipids and surface projection of glycoproteins. EBV may enter B cells and epithelial cells.

[1674] EBV infection causes glandular fever known as infectious mononucleosis, also known as the kissing disease. Typical symptoms include e.g. sore throat, fever swollen lymph nodes in the neck, enlarged spleen, swollen liver, rash and fatigue. Additionally, EBV infection is associated with certain cancers, e.g. central nervous system lymphomas, Hodgkin's lymphoma, Burkitt's lymphoma, Guillain-Barre syndrome, multiple sclerosis, and higher susceptibility to certain autoimmune diseases. The virus is transmitted via contact with certain bodily fluids of an infected individual, especially through saliva. The infection affects majority of population. According to CDC, 90% of adult population have antibodies demonstrating current or past EBV infection.

[1675] As of today, there is no specific therapy for prevention or treatment of EBV infection on the market. Typically, EBV infection is treated with good supportive care. Antibodies for prevention, management and treatment of EBV infection and associated diseases have been developed, e.g. by Wang and Fogg in US Patent publication US20150064174 and Fang et al. in Intervirology 50 (4), 254.263 (2007), the contents of each of which are incorporated herein by reference in their entirety.

[1676] In some embodiments, methods of the present disclosure may be used to prevent, manage and/or treat infections and complications caused by EBV.

[1677] AAV particles and methods of using the AAV particles described in the present disclosure may be used to prevent, manage and/or treat EBV. As a non-limiting example, the AAV particles of the present disclosure comprise a nucleic acid sequence encoding at least one of the sequences described in Table 3 (SEQ ID NO: 1740-2141).

### Varicella Zoster Virus

[1678] Varicella zoster virus (VZV), also known as human herpes virus 3 (HHV-3) and chickenpox virus, belongs to the family of Herpesviridae. VZV is a linear duplex DNA molecule containing two segments (L and S) joined covalently. At least five clades of the virus have been identified.

[1679] VZV causes varicella, also known as chickenpox, which is an infection characterized by blister-like rash, itching, fatigue and fever. Chickenpox may be dangerous for babies, adults and individuals with weakened immune system. After primary phase of the infection, VZV resides in the nerves, including cranial nerve ganglia, dorsal root ganglia and autonomic ganglia, and may eventually lead to shingles, which is a viral disease characterized with a painful skin rash, blistering and occasionally nerve pain. Additionally, VZV has been associated with other complications, e.g. neurological conditions, inflammation of arteries, myelitis, Ramsay Hunt syndrome, Mollaret's meningitis. VZV is transmitted by direct contact or by the respiratory route. VZV is highly contagious. According to CDC, before VZV vaccination, about 4 million people would be affected by chickenpox in the US annually, with more than 10, 000 hospitalized.

[1680] VZV infection may be prevented by a vaccination, which is recommended by CDC to all children and unvaccinated adults. Chickenpox may be treated with antiviral medications, e.g. acyclovir, valacyclovir and famciclovir, or with other symptom relieving medications and therapies. However, the present antiviral medications may have undesirable side effects. There remains a need for improved therapies to treat VZV infection, and its reactivation stages. Antibodies targeting VZV have been developed, e.g. as described in US Patent U.S. Pat. No. 5,506,132, and US Patent application US20100074906, the contents of which are herein incorporated by their reference in their entirety.

[1681] In some embodiments, methods of the present disclosure may be used to prevent, manage and/or treat infections and complications caused by VZV.

[1682] AAV particles and methods of using the AAV particles described in the present disclosure may be used to prevent, manage and/or treat VZV. As a non-limiting example, the AAV particles of the present disclosure comprise a nucleic acid sequence encoding at least one of the sequences described in Table 3 (SEQ ID NO: 1740-2141).

### Coronaviruses

[1683] Coronaviruses are a diverse group of enveloped viruses belonging to the family of Coronaviridae. Coronaviruses contain an envelope, a helical capsid, and a single-stranded, positive-sense RNA genome. Coronaviruses have a characteristic structure with viral spike-shaped glycoprotein populating the surface of the virus and causing an appearance resembling the solar corona. Coronaviruses are a common cause of mammalian and avian infections causing upper respiratory tract, gastrointestinal and central nervous system diseases.

[1684] Human coronavirus 229E, OC-43, NL63, and HKU1 are a cause a behind typical, short term ‘common cold’ and affect individuals all over the world. Typical symptoms of the infections include coughing, sneezing, fatigue and fever. Occasionally the viruses can cause lower-respiratory tract illnesses, such as pneumonia. The viruses are spread by direct contact or by the respiratory route. The infections may be dangerous to the elderly and individuals with weakened immune system. There is no specific treatment or prevention therapy for these coronavirus infections.

[1685] Severe Acute Respiratory Syndrome coronavirus (SARS-CoV) causes a viral respiratory illness. Typical symptoms of the infection include a high fever, headache, body aches, dry coughing and eventually pneumonia. SARS-CoV was identified in 2003 in an outbreak starting from Asia. SARS-CoV is transmitted by direct contact with an infected individual or by the respiratory route. According to the WHO, during the 2003 outbreak of SARS-CoV, 8098 people worldwide were infected with symptoms and out of them, 774 died. As of today, there is no specific treatment or prevention therapy for SARS on the market. Antiviral medication and steroids may be prescribed to certain patients. Antibodies targeting SARS-CoV have been developed, e.g. as described in US Patent U.S. Pat. No. 7,728,110 and US Patent publication US20110159001, the contents of each of which are herein incorporated by their reference in their entirety.

[1686] Middle East Respiratory syndrome coronavirus (MERS-CoV) causes an acute severe respiratory infection affecting the lungs and breathing tubes. MERS-CoV was identified in 2012. Typical symptoms include fever, cough and shortness of breath, eventually pneumonia and additionally gastrointestinal symptoms. MERS-CoV is highly dangerous to humans. According to the WHO, 36% of the infections are fatal. MERS-CoV is a zoonotic virus transmitted to humans from animals, e.g. bats and camels, or from human to human. Camels are suggested to be a reservoir for MERS-CoV. Majority of MERS-CoV infection have occurred in the Arabian Peninsula, and especially in Saudi Arabia. As of today, no specific treatment of prevention therapy for MERS-CoV infection is available on the market. Antibodies targeting MERS-CoV have been developed, e.g as described in International publication WO201505742, the contents of which are herein incorporated by their reference in their entirety.

[1687] In some embodiments, methods of the present disclosure may be used to prevent, manage and/or treat infections and complications caused by SARS-CoV, MERS-CoV and/or other coronaviruses.

[1688] AAV particles and methods of using the AAV particles described in the present disclosure may be used to prevent, manage and/or treat coronaviruses. As a non-limiting example, the AAV particles of the present disclosure comprise a nucleic acid sequence encoding at least one of the sequences described in Table 3 (SEQ ID NO: 1740-2141).

### Poxviruses

[1689] Poxviruses affecting humans include orthopoxvirus, parapoxvirus, yatapoxvirus and mollusipoxvirus. Poxviruses are typically brick-shaped, enveloped, single, liner or double-stranded viruses with DNA genome. Typically, poxvirus infections cause lesions, skin nodules, or disseminated rash. Poxviruses may be transmitted by direct contact with contaminated humans, animals or materials. Diseases caused by poxviruses include e.g. smallpox, monkeypox, molluscum conagiosum, vaccinia virus and orf virus infection.

[1690] Smallpox virus infection is highly fatal, and though it does not occur in nature anymore, smallpox virus is considered to be a potential chemical or biological warfare agent. The threat of terrorism has created a need for efficient and improved methods for treatment and/or prevention of smallpox infection. The traditional vaccination for smallpox, also applicable against monkeypox, has a rare but severe side effect due to vaccinia virus, which is the active constituent of the vaccine that eradicated smallpox. Vaccinia Immune Globulin (VIG) is the only licensed therapeutic treatment for smallpox, but is highly variable and available in limited quantities. Antibodies against smallpox have been developed, as described e.g. in US Patent U.S. Pat. No. 8,623,370 and US Patent publication US20140186370, the contents of each of which are herein incorporated by their reference in their entirety.

[1691] In some embodiments, methods of the present disclosure may be used to prevent, manage and/or treat infections and complications caused by smallpox virus and/or other poxviruses.

[1692] AAV particles and methods of using the AAV particles described in the present disclosure may be used to prevent, manage and/or treat poxvirus. As a non-limiting example, the AAV particles of the present disclosure comprise a nucleic acid sequence encoding at least one of the sequences described in Table 3 (SEQ ID NO: 1740-2141).

### Enterovirus 71

[1693] Enterovirus 71 (EV71) belongs to the family of Picornaviridae. Enterovirus 71 is a single-stranded RNA positive sense virus. The virus has approximately 7411 nucleotides. The RNA genome is enclosed in an icosahedral capsid of structural proteins VP1-VP4. (see, e.g. Tan et al., 2014, J Biomed Sci; 21(1): 140, and references therein).

[1694] EV71 infections typically cause hand, foot and mouth (HFMD), which is characterized by fever, mouth ulcers, and vesicles on the palms of the hands and feet. Additionally, EV71 causes severe neurological manifestations, including poliomyelitis-like acute flaccid paralysis, brainstem encephalitis in infants and children. These neurological manifestations may be fatal, or cause permanent neurological consequences, such as delayed neurodevelopment or reduced cognitive function in children. EV71 is transmitted through direct contact with certain bodily fluids, such as saliva, or the respiratory route, or the fecal-to-mouth route. Outbreaks of EV71 have been reported by WHO in the US, Europe, and more frequently in Asia-Pacific region in the past 30 year.

[1695] As of today, no specific treatment or prevention therapy for EV71 is on the market. Antiviral drugs, e.g. pleconaris and other capsid-function inhibitors (see, e.g. Tan et al. J Biomed Sci. 2014; 21(1): 140), may be prescribed against EV71 infections, though their effectiveness is not well established. There remains a need for prevention and treatment therapies for EV71 infection. Antibodies neutralizing EV71 have been developed. Non-limiting examples include the anti-EV71 antibody MAB979 (developed by Merck Millipore) and those taught by Carderosa et al. in International Patent Publication WO2015092668, the contents of which are incorporated herein by reference in their entirety.

[1696] In some embodiments, methods of the present disclosure may be used to prevent, manage and/or treat infections and complications caused by EV71.

[1697] AAV particles and methods of using the AAV particles described in the present disclosure may be used to prevent, manage and/or treat EV71. As a non-limiting example, the AAV particles of the present disclosure comprise a nucleic acid sequence encoding at least one of the sequences described in Table 3 (SEQ ID NO: 1740-2141).

### Rubella Virus

[1698] Rubella virus belongs to the family of Togaviridae. Rubella virus is a positive sense, single-stranded RNA virus with spike-like, hemagglutinin containing surface projections. The virus core is enveloped by glycosylated E1 and E2 proteins.

[1699] Rubella, also known as German measles or three-day measles, is a viral infection typically characterized by a rash, low fever, nausea, swollen lymph glands behind the ears and the neck, and mild conjunctivitis. At later stage, the infection may develop arthritis and pain in the joints. Typical symptoms of rubella infection are mild and affect children and young adults. Rubella virus is transmitted by the respiratory route and the virus replicates in the nasopharyngeal mucosa and local lymph nodes. However, when an infection is acquired during pregnancy, the virus is transmitted through vertical route with 90% chance and may cause fetal death or congenital defects known as congenital rubella syndrome (CRS). Infants with CRS may have hearing impairments, eye and heart defects, diabetes mellitus, thyroid dysfunction and/or autism. According to the WHO, about 10,000 infants with CRS are born every year, majority occurring in countries with low vaccine coverage.

[1700] As of today, there is no specific treatment for rubella. Rubella may be prevented with vaccination, and rubella has been part of the vaccination program for the past 40 years. However, the infection still persists and an increasing concern related to the life-time of vaccine efficiency exists. There remains a need for long lasting prevention therapy, as well as treatment for rubella virus infection. Antibodies against rubella have been described e.g. in US Patent US20100143376, the contents of each of which are herein incorporated by reference in their entirety.

[1701] In some embodiments, methods of the present disclosure may be used to prevent, manage and/or treat infections and complications caused by rubella.

[1702] AAV particles and methods of using the AAV particles described in the present disclosure may be used to prevent, manage and/or treat Rubella. As a non-limiting example, the AAV particles of the present disclosure comprise a nucleic acid sequence encoding at least one of the sequences described in Table 3 (SEQ ID NO: 1740-2141).

### Human Papilloma Virus

[1703] Human papilloma virus (HPV) is a non-enveloped double-stranded DNA virus belonging to the family of Papillomaviridae. Over 170 types of HPV have been identified.

[1704] HPV infections may be asymptomatic, or cause infection related to warts (e.g. plantar, flat or anogenital warts), oral infections such as papillomas or multifocal epithelial hyperplasia. The infection may be undetected, and clears from the body to low levels within two years. Infections caused by human papillomavirus (HPV) have been associated with certain cancers of stratified epithelial tissues, e.g. cervical, anal, vaginal, vulvar and penile cancers, lung and throat cancers. Especially HPV16 and HPV18 are known to be carcinogenic. According to the WHO, persistent genital HPV infection may cause cervical cancer which is the second most common cancer in women worldwide. In developing countries, cervical cancer counts for 13% of all female cancers, and survivor rate worldwide is approximately 50%. HPV is very common. CDC estimates that every one in four individuals in the US has an HPV infection. Most commonly HPV is transmitted by the sexual route, but also the vertical transmission route, or by direct contact to infected blood, or objects may occur.

[1705] Cancers caused by HPV may be prevented by vaccines developed against certain HPV types. The vaccines are available worldwide and are recommended by CDC for all preteen aged children. As of today, there are no specific treatment for HPV infection. There remains a need for prevention and treatment therapy affecting a broad range of HPV infections. Antibodies for HPV have been developed, e.g. as described in International publication WO2015096269, the contents of each of which are herein incorporated by reference in their entirety.

[1706] In some embodiments, methods of the present disclosure may be used to prevent, manage and/or treat infections and complications caused by HPV.

[1707] AAV particles and methods of using the AAV particles described in the present disclosure may be used to prevent, manage and/or treat HPV. As a non-limiting example, the AAV particles of the present disclosure comprise a nucleic acid sequence encoding at least one of the sequences described in Table 3 (SEQ ID NO: 1740-2141).

### Pseudomonas Aeruginosa

[1708] Pseudomonas Aeruginosa (P. Aeruginosa) is a common Gram-negative, aerobic, rod-shaped bacterium belonging to the family of Pseudomonodaceae. P. Aeruginosa is found in soil, water, skin, flora, and in most man-made environments around the world. P. Aeruginosa is considered as an opportunistic pathogen taking advantage of a weakened immune system.

[1709] P. Aeruginosa may cause a variety of mild infections, such as, urinary tract infections, respiratory system infections, dermatitis, soft tissue infections, bacteremia, bone and joint infections, gastrointestinal infections, blood infections, ear infections, skin rash, eye infections and a variety of systemic infections. P. Aeruginosa is transmitted through water, contaminated hands, materials or objects. In general, P. Aeruginosa infections in healthy individuals are very mild or asymptomatic. However, the infections expose a significant risk for individuals with weakened immunity, such as patients with other underlying illnesses or complications, and especially when in a hospital environment. For example, patients with cystic fibrosis have a susceptibility towards loss of lung function due to respiratory tract infection with the bacterium. Patients attached to breathing machines, patients with catheters, or with surgery wounds or burn wounds are potentially at risk for serious and life-threatening infections. P. Aeruginosa infection may lead to a fatal sepsis. According to CDC, approximately 51, 000 health-care associated infection occur in the US every year, leading to approximately 400 deaths.

[1710] As of today, there are no prevention therapies for P. Aeruginosa infection on the market. Some strains of P. Aeruginosa may be treated with antibiotics, e.g. gentamicin, tobramycin, colistin, and amikacin. However, an increasing number of strains of P. Aeruginosa, especially those affecting hospitalized patients, are resistant to antibiotics and no specific treatment therapy exists. There remains a need for improved treatment and prevention therapies against P. Aeruginosa infections. Antibodies against P. Aeruginosa have been developed, such as, panobacumab (developed by Kenta Biotech Inc.), which is an antibacterial antibody against P. Aeruginosa.

[1711] In some embodiments, methods of the present disclosure may be used to prevent, manage and/or treat infections and complications caused by P. Aeruginosa.

[1712] AAV particles and methods of using the AAV particles described in the present disclosure may be used to prevent, manage and/or treat P. Aeruginosa. As a non-limiting example, the AAV particles of the present disclosure comprise a nucleic acid sequence encoding at least one of the sequences described in Table 3 (SEQ ID NO: 1740-2141).

### Streptococcus Bacteria

[1713] Streptococcus is a genus of gram-positive bacteria belonging to the family of Streptococcaceae. Species of Streptococcus are divided into alpha- and beta-hemolytic species. Alpha-hemolytic species cause oxidation of iron in hemoglobin molecules within the red blood cells. Alpha-hemolytic streptococci include e.g. Streptococcus pneumoniae and Streptococcus viridans. Beta-hemolytic species cause complete rupture of the red blood cells and include e.g. Lancefield groups A and B, also known as ‘group A strep’ and ‘group B strep’. Streptococcus genus includes overall more than 50 species. Streptococcus bacteria cause a variety of infections in humans, including dental caries, pneumonia, endocarditis, meningitis, respiratory tract infections, urinary tract infections, neonatal meningitis, pharyngitis and/or sepsis.

[1714] Streptococcus pneumoniae is a common bacterium causing, i.e. pneumonia, meningitis, bronchitis, acute sinusitis, conjunctivitis, osteomyelitis, endocarditis and/or septic arthritis. The bacteria is transmitted by direct contact or via the respiratory route. The bacteria resides in the nasopharynx of healthy carriers and proceeds into an infection under certain circumstances. The infection may be prevented by vaccines, e.g. conjugate vaccine or polysaccharide vaccines. The infection may be treated with antibiotics, e.g. broad-spectrum cephalosporin, and vancomycin, but there is a concern over increasing resistant towards antibodies. According to CDC, Streptococcus pneumoniae is currently resistant to one or more antibiotics in 30% of infections. Streptococcus pneumoniae is resistant to e.g. penicillins. There remains a need for improved, non-antibiotic, therapies for treatment of Streptococcus pneumoniae and other Streptococcus infections. Antibodies for Streptococcus have been developed, as described e.g. in US Patent U.S. Pat. No. 5,686,070 and US Patent publication US20070003561, the contents of each of which are herein incorporated by reference in their entirety.

[1715] In some embodiments, methods of the present disclosure may be used to prevent, manage and/or treat infections and complications caused by Streptococcus pneumoniae and other Streptococcus bacteria.

[1716] AAV particles and methods of using the AAV particles described in the present disclosure may be used to prevent, manage and/or treat Streptococcus pneumoniae. As a non-limiting example, the AAV particles of the present disclosure comprise a nucleic acid sequence encoding at least one of the sequences described in Table 3 (SEQ ID NO: 1740-2141).

Staphylococcus bacteria

[1717] Staphylococcus is a genus of gram-positive bacteria belonging to the family of Staphylococcaceae. The genus includes overall approximately 40 species. Most species of the genus are harmless and reside in the skin and mucous membranes of humans. Staphylococcus bacteria may also be found in the soil. The bacteria may cause diseases either through toxin production or penetration. Staphylococcal toxins are a common cause of food poisoning. Staphylococcus bacteria may cause a variety of diseases, e.g. localized or diffuse skin infection, gastroenteritis, ear infections, septic arthritis, osteomyelitis, sinusitis, infective endocarditis and/or toxic shock syndrome.

[1718] Staphylococcus aureus (S. aureus) is typically residing in human nose asymptomatically. In certain circumstances, S. aureus infections may affect many tissues and organs. Individuals with chronic conditions, e.g. diabetes, cancer, vascular disease, eczema and lung disease, have an increased susceptibility towards S. aureus infections. S. aureus may cause skin infections, such as, pimples, impetigo, atopic dermatitis, cellulitis folliculitis. More serious forms of infections include pneumonia, meningitis, osteomyelitis and endocarditis. S. aureus may also cause food poisoning. In severe cases, S. aureus infection may enter the blood stream causing bacteremia and/or sepsis. As of today, there is no medical therapy for prevention of the infection. Some strains of S. aureus may be treated with antibiotics. However, increasing resistance towards antibiotics is a concern. Currently several antibiotic resistant forms of S. aureus exist, including, but not limited to, Methicillin-resistant Staphylococcus aureus (MRSA), Vancomycin-intermediate Staphylococcus aureus (VISA) and Vancomycin-resistant Staphylococcus aureus (VRSA). The drug resistant forms of S. aureus are more frequent in hospital environments.

[1719] Staphylococcus epidermidis (S. epidermidis) resides in the normal human skin flora and may cause an infection to individuals with weakened immune system, and to individuals who have catheters, prostheses or surgical implants. S. epidermidis has an ability to colonize on plastic materials or devices placed within the body. The infection may be treated with some antibiotics, but they do not remove the infection and can only be used to manage such infections. Many S. epidermis strains are resistant to antibiotics, such as penicillin, methicillin and/or amoxicillin, and increasing resistance to antibiotics in a concern.

[1720] There remains a need for prevention and/or improved treatment therapies against Staphylococcal infections. Antibodies targeting Staphylococcal bacteria have been developed. As an example, pagabaximab (developed by MedImmune and AstraZeneca) is a monoclonal antibody for prevention of staphylococcal sepsis and may be administered to infants with low birth weight.

[1721] In some embodiments, methods of the present disclosure may be used to prevent, manage and/or treat infections and complications caused by Staphylococcus bacteria.

[1722] AAV particles and methods of using the AAV particles described in the present disclosure may be used to prevent, manage and/or treat Staphylococcal infections. As a non-limiting example, the AAV particles of the present disclosure comprise a nucleic acid sequence encoding at least one of the sequences described in Table 3 (SEQ ID NO: 1740-2141).

Clostridium tetani

[1723] Clostridium tetani(C. tetani) is a rod-shaped, anaerobic, Gram-positive bacteria belonging to the family of Clostridiaceae. A matured bacterium develops a terminal spore, which is resistant to heat and common antiseptics. C. tetani produces tetanospasmin toxin. C. tetani is found as spores in soil and in the gastrointestinal tract of animals.

[1724] C. tetani infection spreads the tetanospamin toxin to the body, causing tetanus, also known as lock jaw. Tetanus is a dangerous disease characterized by painful tightening of the muscles. The disease may lead to locking of the jaw and neck, leading to inability to open mouth or swallow. The tightening may affect the whole body. In severe cases, the infection may lead to breathing difficulties, pneumonia, or pulmonary embolism. Even more serious is an infection acquired during pregnancy, leading to almost always fatal neonatal tetanus of an infant. The bacteria is typically transmitted through broken skin by direct contact with contaminated soil or objects, or saliva or feces of a contaminated animal. Especially susceptible are individuals with burns, puncture wounds, crush injuries or injuries with dead tissue, individuals having animal bites or scratches. Tetanus is fairly uncommon in developed countries. However, the WHO reported an estimated 50, 000 neonatal tetanus deaths in year 2008. A program form elimination of tetanus was started in 1989 by the WHO.

[1725] Tetanus may be prevented efficiently by a four vaccine combination, DTaP, Tdap, DT, and Td, given to children and adults. For adequate immunity, the primary vaccine is administered during childhood, a booster dose during adolescence and every 10 years thereafter during adulthood. C. tetani infection may be treated with antibiotics, wound care and with human tetanus immune globulin (an antitoxin). Despite the existing treatment methods, approximately 10% of tetanus infections lead to death, according to CDC. There remains a need for longer lasting vaccine as well as improved treatment therapies against C. tetani infections. Antibodies against C. Tetani have been developed, as described e.g. by Larrick, J. W. et al., 1992, Immunol. Rev. 130, 69-85, and de Kruif, J. et al., 2009, J. Mol. Biol. 387 (3), 548-558, the contents of each of which are herein incorporated by reference in their entirety.

[1726] In some embodiments, methods of the present disclosure may be used to prevent, manage and/or treat infections and complications caused by C. Tetani.

[1727] MV particles and methods of using the AAV particles described in the present disclosure may be used to prevent, manage and/or treat C. Tetani. As a non-limiting example, the AAV particles of the present disclosure comprise a nucleic acid sequence encoding at least one of the sequences described in Table 3 (SEQ ID NO: 1740-2141).

### Bordetella

[1728] Bordetella is a genus of Gram-negative, coccobacilli belonging to the family of Alcaliigenaceae. The structure of the bacteria consists of an outer membrane with lipopolysaccharides and phospholipids forming a capsule. Bordetella bacteria affecting humans include, but are not limited to, B. pertussis, B. parapertussis and B. bronchiseptica. B. pertussis resides in the upper air pathways, mostly the trachea and the bronchi, of humans. B. parapertussis resides in the upper air pathways of mammals. The bacteria release toxins that cause damage and swelling of the respiratory pathways.

[1729] Pertussis, also known as whooping cough, is a highly contagious infection of the respiratory track caused most commonly by B. pertussis, and occasionally by B. parapertussis. Typical symptoms of the infection include severe coughing and difficulty to breathe accompanied by a runny nose, apnea and fever. Additional complications for infants include pneumonia, convulsions, apnea, and encephalopathy. The bacteria are transmitted through the respiratory tract route. The disease is especially dangerous for infants. According to CDC, about 30,000 infections were reported in the US in 2014. CDC reports 277 deaths occurring from 2000 through 2014, out of which 241 where infants less than 3 months of age.

[1730] Pertussis may be treated with antibiotics, such as, erythromycin, clarithromycin or azithromycin. However, an increasing resistance to antibiotics is a concern. Pertussis caused B. pertussis may be prevented by vaccination, e.g. by DTaP combination vaccine, which is recommended routinely for infants by CDC and WHO. Despite the widespread vaccination, the disease has insisted. The protection provided by the traditional vaccination is estimated to be 3-6 years. There remains a need for prevention therapies providing a longer lasting immunity, as well as for improved, non-antibiotic, treatments. Antibodies for prevention and/for treatment of pertussis have been developed, as described e.g. in International publication WO2014160098, and Hussein, A. H. et al., 2007, Infect. Immun. 75 (11), 5476-5482, the contents of each of which are herein incorporated by reference in their entirety.

[1731] In some embodiments, methods of the present disclosure may be used to prevent, manage and/or treat infections and complications caused by B. pertussis, B. parapertussis and/or other Bordetella bacteria.

[1732] AAV particles and methods of using the AAV particles described in the present disclosure may be used to prevent, manage and/or treat Bordetella infection. As a non-limiting example, the AAV particles of the present disclosure comprise a nucleic acid sequence encoding at least one of the sequences described in Table 3 (SEQ ID NO: 1740-2141).

### Mycobacterium

[1733] Mycobacterium is a genus of nonmotile and aerobic bacteria, belonging to its own family of Mycobacteriaceae. Mycobacteria have an outer membrane, and a hydrophobic and waxy cell wall with mycolic acid/mycolates. The cell wall is neither truly Gram-positive nor -negative. In general, the infections are difficult to treat and the bacteria is naturally resistant to many antibiotics, e.g. penicillin, due to the cell wall. Mycobacteria includes species, such as, but not limited to, M. tuberculosis, Nontuberculous mycobacteria (NTM), M. leprae, M. bovis, M. africanum, and M. microti.

[1734] M. tuberculosis is a genetically diverse bacterium and most common and dangerous of the mycobacteria family species. M. tuberculosis causes tuberculosis (TB) which is an infection mainly affecting the lungs. Typical early symptoms include cough, fever, night sweat, and weight loss. The disease may be mild for a period of time and therefore early diagnosis is difficult. Eventually the symptoms get more severe and coughing sputum and blood may occur. TB may be transmitted by the respiratory tract. TB affects all ages of the population, but is most dangerous to children, and individuals with weakened immune systems, e.g. HIV patients. According to the WHO, TB is referred to as a top infectious disease killer worldwide. WHO reports an estimated 9.6 million infections of TB in 2014, out of which 1.5 million cases were fatal. The disease is globally spread, but it is most abundant in the South-East Asia and Western Pacific Regions.

[1735] TB may be prevented by vaccinations, i.e. Bacille Clamette-Guerin vaccine. The vaccine is provided for children and adults exposed to environments with high risk of infection. However, the vaccine is not always efficient against TB, e.g. due to the diversity of strains geographically. TB may be treated with a 6 to 9 month course of combinational antimicrobial drug therapy. Antimicrobial drugs effective against TB include e.g. isoniazid, rifampin, ethambutol, and pyrazinamide. However, an increasing resistance towards the medication is a concern. Certain strains of existing TB are identified as multi-drug resistant TB strains, which do not respond to therapy with e.g. isoniazid, rifampicin, or other common drugs. WHO reports an estimated 480 000 multidrug-resistant TB infections in 2014. There remains a need for prevention therapies protecting against broad spectrum of strains, as well as for improved treatment of M. tuberculosis and/or other mycobacteria. Antibodies against mycobacteria have been developed, as described e.g. in US Patent publications US20130309237, US20130309237, US20060229438, the contents of each of which are herein incorporated by reference in their entirety.

[1736] In some embodiments, methods of the present disclosure may be used to prevent, manage and/or treat infections and complications caused by M. tuberculosis and/or other mycobacteria.

[1737] AAV particles and methods of using the AAV particles described in the present disclosure may be used to prevent, manage and/or treat myobacterium related diseases. As a non-limiting example, the AAV particles of the present disclosure comprise a nucleic acid sequence encoding at least one of the sequences described in Table 3 (SEQ ID NO: 1740-2141).

### Francisella Tularensis

[1738] Francisella Tularensis (F. tularensis) is a facultative intracellular Gram-negative, rod-shaped bacterium belonging to the family of Francisellaceae. F. tularensis resides in invertebrates, birds, reptiles, fish, and mammals, including humans. It is one of the most infectious and pathogenic bacteria known (see, e.g. Pechous et al., 2009, Microbiol Mol Biol Rev.; 73(4): 684-711).

[1739] F. Tularensis causes infection called Tularemia. Severity of tularemia varies from mild to fatal. F. Tularensis may be transmitted to a human by direct skin or eye contact, by the respiratory route or by consumption of contaminated food or drink. Most commonly, the infection is acquired while handling infected animals. Most common form of tularemia is ulcero-glandular tularemia, characterized by skin ulcers on the site of infection accompanied by swelling or regional lymph glands. Ulcero-glandular tularemia is typically acquired by a tick, or deer fly bite. Pneumonic tularemia is an infection of the respiratory tract characterized by a cough, chest pain, and difficulty of breathing. Pneumonic tularemia is transmitted through the respiratory route and may be fatal if not treated. Oropharyngeal tularemia is transmitted by contaminated food or beverage and causes a sore throat, mouth ulcers, tonsillitis and swelling of lymph glands in the neck. Other forms of tularemia include glandular, oculo-glandular (affecting the eyes) and typhoidal (combination of the general symptoms). F. Tularensis is considered to be a potential biological and chemical warfare agent.

[1740] As of today, there is not preventive therapy for tularemia infection on the market. Some vaccines have been under development (see, e.g. Pechous et al., Microbiol Mol Biol Rev. 2009 December; 73(4): 684-711). Tularemia may be treated with antibiotics, such as, streptomycin, gentamicin, doxycycline, and ciprofloxacin. However, increasing resistance against antibiotics is a concern. There remains a need for improved prevention and treatment therapies for F. Tularensis infections. Antibodies against F. Tularensis have been developed, e.g. as described by Rynkiewicz, M. J. et al., 2012, Biochemistry, 51(28), 5684-5694 and Lu, Z, et al., 2013, Immunology, 140 (3), 374-389, the contents of each of which are herein incorporated by reference in their entirety.

[1741] In some embodiments, methods of the present disclosure may be used to prevent, manage and/or treat infections and complications caused by F. Tularensis.

[1742] AAV particles and methods of using the AAV particles described in the present disclosure may be used to prevent, manage and/or treat F. Tularensis related infections. As a non-limiting example, the AAV particles of the present disclosure comprise a nucleic acid sequence encoding at least one of the sequences described in Table 3 (SEQ ID NO: 1740-2141).

Toxoplasma gondii

[1743] Toxoplasma gondii is a parasitic protozoan infecting warm-blooded animals, including humans. Domestic cats and other felines are the most desired hosts for Toxoplasma gondii, as they are the only hosts where the protozoan is capable of sexual reproduction. According to CDC, more than 60 million people in the US may be infected by Toxoplasma gondii.

[1744] Toxoplasma gondii causes toxoplasmosis, which is typically asymptomatic in healthy individuals and is controlled by the natural immune system. The infection may be obtained from undercooked, contaminated food, especially pork, lamb and venison, from food contaminated by utensils, or contaminated hands, occasionally from contaminated drinking water, or by the fecal-to-oral route from cat feces. Toxoplasma gondii may also be transmitted by vertical route, especially when the protozoan is acquired during pregnancy. Children infected during or just prior to pregnancy may have eye problems, or brain damage at birth, or may develop symptoms later in their lives. Toxoplasmosis may be dangerous to individuals with a weakened immune system, such as patients with AIDS, undergoing certain chemotherapies or having organ transplants.

[1745] Toxoplasmosis may be treated with certain medications such as antibiotics called sulfadiazine and pyrimethamine, which is an anti-parasite medication used for e.g. malaria. However, resistance to both of the medications is an increasing concern. There remains a need for improved treatment methods as well as prevention therapies against Toxoplasma gondii infection. Antibodies targeting Toxoplasma gondii have been developed, as described by e.g. Graille, M. et al., 2005, J. Mol. Biol. 354 (2), 447-458, the contents of which are herein incorporated by reference in their entirety.

[1746] In some embodiments, methods of the present disclosure may be used to prevent, manage and/for treat infections and complications caused by Toxoplasma gondii.

[1747] AAV particles and methods of using the AAV particles described in the present disclosure may be used to prevent, manage and/or treat Toxoplasma gondii related infections. As a non-limiting example, the AAV particles of the present disclosure comprise a nucleic acid sequence encoding at least one of the sequences described in Table 3 (SEQ ID NO: 1740-2141).

Candida yeast

[1748] Typically, species of yeast are commensals and endosymbionts of human hosts, but may cause an infection under certain circumstances. C. albicans is a yeast belonging to the family of Saccharomycetaceae. C. albicans causes infection of the mouth characterized by white patches on the tongue, mouth and throat. The infection of the mouth is most typical with new born babies, the elderly and individuals with weakened immune system, e.g. HIV/AIDS patients. Optionally, the infection may affect the nails, leading o brittle and defected nails. Optionally, the infection may cause an infection of the vagina, leading to genital burning or uncomfortable discharge. Typically, Candida albicans infections are mild and localized. However, the infection may be severe or fatal for individuals with underlying health problems and left untreated. Invasive candidiasis refers to an infection spreading to many parts of the body, including the heart, brain, eyes, bones and/or joints. Candidemia refers to an infection where candida yeast is present in the blood stream. Severe forms of C. albicans infections affect individuals in health care environments, e.g. patients with central venous catheter, patients treated at an intensive care unit, patients undergoing antibiotic treatments, treatments for kidney failure, recovering from a surgery, and patients with chronic diseases, e.g. diabetes and/or HIV/AIDS. C. albicans is typically transmitted from mother to an infant during childbirth and it remains as a species of human's normal microflora. It may also be transmitted through the sexual transmission route. Other species of candida yeast family include, e.g., C. glabrata, C. parapsilosis, C. tropicalis, C. krusei and C. lusitaniae.

[1749] C. albicans infection may be treated with antifungal drugs, e.g. nystatin, clotrimazole, amphotericin B oral suspension) or systemic oral azoles (e.g. fluconazole, itraconazole, or posaconazole). Despite the medical therapy available, some forms of C. albicans infections are dangerous, or life-threatening. There remains a need for improved prevention, and/or treatment therapies against C. albicans infections, for example by antibody therapies. Efungumab (developed by NeuTec Pharma) is an antibody for treatment of invasive C. albicans infection.

[1750] In some embodiments, methods of the present disclosure may be used to prevent and/or treat C. albicans infections.

[1751] AAV particles and methods of using the AAV particles described in the present disclosure may be used to prevent, manage and/or treat C. albicans related infections. As a non-limiting example, the AAV particles of the present disclosure comprise a nucleic acid sequence encoding at least one of the sequences described in Table 3 (SEQ ID NO: 1740-2141).

### Human Immunodeficiency Virus (HIV)

[1752] Human immunodeficiency virus (HIV) is a roughly spherical enveloped RNA virus belonging to the family of Retroviridae. HIV is composed of two positive single-stranded RNA copies. The viral core contains a viral capsule protein, p24, which surrounds the two single stranded RNAs and the enzymes for HIV replication. The viral envelope consists of two lipid layers, the outer layer glycoprotein 120 (gp 120) and the transmembrane glycoprotein 41 (gp41). Gp120 attached to the host cell whereas gp41 has a role in the cell fusion process. For replication, the virus needs a host cell and the RNA first transcribes into DNA by enzyme reverse transcriptase. HIV infects the CD4 lymphocyte (T cell) leading to depletion of CD4+ T cells and loss of CD4+ T-cell function, as infected cell loses its function and converts to a HIV-replicating cell. (see, e.g. Okoye and Picker, 2013, Immunol Rev.; 254(1): 54-64, and references therein). Additionally, HIV infection leads to B lymphocyte (B cell) hyper-activation and dysfunction (see, e.g. Moir and Fauci, 2009, Nat Rev Immunol.; 9(4): 235-245, and references therein). The virus may be transmitted through sexual transmission route, vertical transmission route, iatrogenic (medical procedure) route, or in direct contact with certain body fluids with high concentration of HIV, including e.g. blood, breast milk, semen, vaginal, and rectal secretions. Two types of HIV (HIV-1 and HIV-2) have been identified. HIV-1 has higher infectivity and has spread around the globe whereas HIV-2 is more localized to West Africa. According to CDC, there is about 36.9 million people in the world with HIV/AIDS with about 2 million cases arising every year. The infection is most abundant in Sub-Saharan Africa.

[1753] In acute HIV infection stage, within 2.4 weeks after infection, infected patients experience flu-like illness. In the second stage the infection is asymptomatic and the HIV replication is at low level. The second stage may last for years or decades, especially when treated with HIV medication. Eventually, HIV causes acquired immune deficiency syndrome (AIDS), which is a clinical condition characterized by severe immunosuppression attacking the CD4 cells, making individuals susceptible to life-threatening malignancies and infections. Complications associated with HIV/AIDS include common bacterial and viral infections, parasite infections, certain cancers (e.g. Kaposi's sarcoma, Non-Hodgkin's lymphoma, and angiosarcoma), progressive multifocal leukoencephalopathy (PML) and wasting.

[1754] As of today, there is no prevention therapy or cure for HIV/AIDS. However, with antiretroviral (ART) therapy, the disease may be managed for along period of time. ART therapy comprises of five classes of drugs used in different combinations to treat HIV. The drugs target the different phases of the retrovirus life-cycle. However, there remains a need for improved therapies for prevention, management and/or treatment of HIV/AIDS.

[1755] Antibodies for treatment and prevention of HIV infection have been developed. For example, commercial antibody lbalizumab (developed by Taimed Biologics Inc.) is a non-immunosuppressive monoclonal antibody binding to CD4, Anaplasma phagocytophilium inhibiting the viral entry process. As another example, suvizumab (developed by Kaktsuden, Chemo-Sero Therapeutic Research Institute) is a humanized antibody targeting the HIV-1 envelope glycoprotein GP120. As a non-limiting example, any of the antibodies in Table 3, variants or fragments thereof may be used in the treatment and/or prevention of HIV.

[1756] Antibodies neutralizing HIV-1 and HIV-1 strains have been identified, but as of today, the researchers have not been able to develop a vaccination for HIV. HIV has a capability to evolve with unusually high somatic mutation and recombination rate. So far, conventional vaccines have not succeeded in eliciting analogues of the broadly neutralizing antibodies. An alternative approach suggested involves using adeno-associated vectored gene delivery for expression of antibodies from muscle tissue (e.g. Balasz et al, 2012, Nature Letter, 481, 81-84, Balasz et al, 2014, Nat Med.; 20(3): 296-300, Saunders et al., 2015, J Virol.; 89(16):8334-45, and US Patent publication US20030219733, the contents of which are herein incorporated by reference in their entirety). The studies have demonstrated efficient and long-lasting protection from HIV infection by e.g. intravenous or mucosal surface transmission.

[1757] AAV particles and methods of using the AAV particles described in the present disclosure may be used to prevent, manage and/or treat HIV infection and AIDS. As a non-limiting example, the AAV particles of the present disclosure comprise a nucleic acid sequence encoding at least one of the sequences described in Table 3 (SEQ ID NO: 1740-2141).

### Tropical Diseases (TDs) and Vector-Borne Diseases

[1758] AAV particles and methods of using the AAV particles described in the present disclosure may be used to prevent, manage and/or treat infectious disease. As a non-limiting example, the AAV particles of the present disclosure comprise a nucleic acid sequence encoding at least one of the sequences described in Table 3 (SEQ ID NO: 1740-2141).

Plasmodium falciparum

[1759] Plasmodium falciparum (P. falciparum) is a protozoan parasite belonging to Plasmodium parasite family. P. falciparum is the main cause of malaria and responsible for nearly all death cases in malaria. P. falciparum is released to the human bloodstream through mosquito saliva. The parasite has a high rate of replication and capability to alter. P. falciparum, among other Plasmodium parasites, cause malaria, which is a mosquito borne tropical disease. The early stage symptoms include fever, headache, chills and vomiting. If not treated at the early stage, malaria can progress to a life-threatening condition involving multiple organs, resulting in skin yellowing, seizures and coma. In children, malaria may cause severe anemia, respiratory distress in relation to metabolic acidosis, and/or cerebral malaria. The disease is especially dangerous for young children, pregnant women and individuals without immunity to the disease, such as travelers from non-malaria areas. An infection may develop a partial immunity, allowing the following infections to be asymptomatic. According to the WHO, about half of world's population are at risk of malaria. Sub-Saharan Africa carries the highest density of malaria. In 2015, 88% of malaria cases and 90% of malaria deaths was in Sub-Saharan Africa. Malaria is spread by female Anopheles mosquitos and caused by 5 different parasite species, out of which Plasmodium falciparum is the most prevalent and responsible for the severe cases of malaria.

[1760] Despite tremendous efforts, there is no commercial vaccination for malaria. Traditional treatment for malaria consists of antimalarial medicine therapies, such as artemisinin-based combination therapies, which consists of artemisinin combined with antimalarial drugs such as amodiaquine, lumefantrine, mefloquine and sulfadoxine/pyrimethamine. However, drug resistance has been a serious challenge in malaria treatment. Currently resistance is common for all antimalarial medications apart from artemisinin combination therapy. The cost of artemisinin treatment is high and there remains a need for prevention therapies and improved treatment against malaria.

[1761] Due to the polymorphic nature and high replication rate of P. Falciparum, tolerance to malaria is achieved only after years of repeated infections. Antibodies for prevention and treatment of malaria have been developed. For example, antibodies against P. falciparum are taught in US Patent U.S. Pat. No. 7,811,569, in US Patent publication US20150197562 and in International Patent publication WO2014087007, the contents of each of which are incorporated herein by reference in their entirety. A need for mechanism to deliver constant, effective concentration of malaria antibody for along period is still in need. Studies by Deal et al. demonstrate results on vectored immunoprophylaxis delivery of malaria antibodies to mice (see, Deal et al. PNAS, 2014, 111(34), 12528-12532).

[1762] In some embodiments, methods of the present disclosure may be used to prevent, manage and/or treat infections and complications caused by P. falciparum.

[1763] AAV particles and methods of using the AAV particles described in the present disclosure may be used to prevent, manage and/or treat P. falciparum related infections and/or conditions. As a non-limiting example, the AAV particles of the present disclosure comprise a nucleic acid sequence encoding at least one of the sequences described in Table 3 (SEQ ID NO: 1740-2141).

### Ebola Virus

[1764] Genus of Ebola virus includes five viruses, Zaire, Reston, Sudan, Tai Forest and Bundibygyo Ebola viruses, is a negative-sense RNA virus belonging to the family of filoviridae. The West Africa outbreak has been associated with Zaire Ebola virus. The genome of Ebolavirus encodes seven genes. The glycoprotein GP gene encodes two distinct gene products: sGP which is a dimeric and secreted glycoprotein and less abundant GP, which is a trimeric-virion attached, membrane embedded envelope glycoprotein and responsible for the virus attachment, fusion and entry during infection. Ebola virus disease is a hemorrhagic fever disease caused. The early symptoms include fever, sore throat, muscular pain, followed by a diarrhea and rash. Eventually the disease will affect the liver and kidney function, and cause internal bleeding. The disease is highly fatal, as about 50% infected individuals die. The Ebola virus is transmitted by direct contact with the blood and body fluids and tissues of an infected person or an animal, most commonly a chimpanzee, gorilla, fruit bat, monkey, forest antelope and porcupine. The disease is also transmitted when handling dead bodies of infected animals or humans. Also, sexual transmittance of the disease has been suggested. The WHO has reported more than 28 000 infections and 11 000 deaths in Ebola virus disease outbreak in West Africa (2014-present), mainly affecting Guinea, Sierra Leone and Liberia.

[1765] As of today, there is no licensed treatment or prevention therapy proven to neutralize the virus. Typically, Ebola virus disease is treated with a good supportive care. A variety of blood, immunological and drug therapies are under investigation, as well as preventive vaccines undergoing evaluations. However, a demand for effective therapies for treatment and prevention of Ebola virus disease remain.

[1766] Viral surface of GP has been identified as a target for neutralizing antibodies. Antibodies targeting GP of Ebola virus have been taught, e.g. in International Patent publication WO2015127136 and Olal, D., et al., 2012, J. Virol. 86 (5), 2809-2816, the contents of each of which are incorporated herein by reference in their entirety.

[1767] In some embodiments, methods of the present disclosure may be used to prevent, manage and/or treat infections and complications caused by Ebola virus.

[1768] AAV particles and methods of using the AAV particles described in the present disclosure may be used to prevent, manage and/or treat Ebola related infections and/or conditions. As a non-limiting example, the AAV particles of the present disclosure comprise a nucleic acid sequence encoding at least one of the sequences described in Table 3 (SEQ ID NO: 1740-2141).

### Marburg Virus

[1769] Marburg virus belongs to the filoviridae family of viruses with coiled, toroid or branched structures with seven proteins. The structure of Marburg virus is similar to Ebola virus; however, the involved antigens are different. The filoviruses express a single glycoprotein on their surface. The glycoprotein is responsible for the infection, as it is involved in the attachment and entry of the viruses causing infection. Marburg virus disease is a hemorrhaging fever disease caused by Marburg virus. It is highly fatal disease and related to Ebola virus diseases. The early symptoms of the disease include severe headache and malaise. Severe hemorrhagic manifestations in later stages include bleeding from multiple sites. The Marburg virus is transmitted by direct contact with the blood and body fluids and tissues of infected persons or animals, most commonly fruit bats and monkeys. The disease is also transmitted when handling dead the bodies of infected animals or humans. Marburg virus disease is uncommon, but outbreaks typically have a high rate of fatality. According to the WHO, the death rate was as high 80% in outbreaks of 1998-2000 in Democratic Republic of Congo and 2005 in Angola.

[1770] As of today, there is no preventive or treatment therapy for Marburg virus disease. The current treatment methods include good supportive treatment. The surface glycoprotein has been a target for development of antibodies for Marburg disease vaccines and treatments. For example, International Patent publication WO2015127140, and US Patent publication US20140356354, the contents of which are incorporated herein by reference in their entirety, teach therapeutic antibodies that recognize glycoprotein of filoviruses for different strains of Marburg, as well as Ebola.

[1771] In some embodiments, methods of the present disclosure may be used to prevent, manage and/or treat infections and complications caused by Marburg virus.

[1772] AAV particles and methods of using the AAV particles described in the present disclosure may be used to prevent, manage and/or treat Marburg related infections and/or conditions. As a non-limiting example, the AAV particles of the present disclosure comprise a nucleic acid sequence encoding at least one of the sequences described in Table 3 (SEQ ID NO: 1740-2141).

West Nile virus

[1773] West Nile virus (WNV) is a positive-stranded RNA of the flavivirus genome and member of the Japanese encephalitis serocomplex of flaviviruses, (see Throsby, M., J. Virol. 80 (14), 6982-6992 (2006)). Two lineages of the virus have been identified. The genome of the virus encodes a single polyprotein producing three structural proteins, capsid C, precursor membrane prM and envelope E as well as seven nonstructural proteins. WNV causes mosquito-borne infections with a variety of manifestations. Tough about 80% of WNV infections are symptomless and not harmful, in certain cases, the disease may lead to fatal neurological diseases, Infection of MNV may lead to a West Nile fever, which causes flu-like symptoms accompanied by high fever, headache, chills, excessive sweating, fatigue, weakness, swollen lymph nodes, and joint pains. Infection by MNV may also occur as cutaneous manifestations, including rashes that may include punctate erythematous, macular and popular eruptions. West Nile infections may also affect the central nervous system resulting in West Nile neuroinvasive diseases, including meningitis, encephalitis, meningoencephalitis and poliomyelitis-like syndrome. These neuroinvasive forms of NWV infections occur in only about 1% of infections, but they may be life-threatening. WNV is commonly found in Africa, Europe, the Middle East, North America and West Asia. WNV is typically transmitted to humans and other mammals by mosquitos and is maintained in nature in a cycle involving transmission between birds and mosquitoes. WNV is carried by different types of mosquitos, dependent on geographical distribution. Transmission to humans may also occur from birds, horses or other humans.

[1774] As of today, there is no specific treatment or prevention therapy for MNV infections. Current methods of treatment include good supportive care. Due to severity of some of the manifestations, there remains a need for such therapies. Envelope E has been a target of most antibody related studies. Antibodies targeting M and the first non-structural protein have also been investigated. As an example, Thorsby et al., 2006, J. Virol. 80 (14), 6982-6992, the contents of which are incorporated herein by reference in their entirety, teaches antibodies binding to E and prM proteins. US Patents U.S. Pat. Nos. 8,663,950 and 7,527,973, the contents of each of which are incorporated herein by reference in their entirety, teach antibodies binding to E protein of WNV.

[1775] In some embodiments, methods of the present disclosure may be used to prevent, manage and/or treat infections and complications caused by West Nile virus.

[1776] AAV particles and methods of using the AAV particles described in the present disclosure may be used to prevent, manage and/or treat West Nile virus related infections and/or conditions. As a non-limiting example, the AAV particles of the present disclosure comprise a nucleic acid sequence encoding at least one of the sequences described in Table 3 (SEQ ID NO: 1740-2141).

### Yellow Fever Virus

[1777] Yellow fever virus is an enveloped RNA virus belonging to the Flavivirus family. Yellow fever, also known as Yellow Jack, Yellow Plague or Bronze John, is a mosquito-borne viral hemorrhagic disease. In most cases, the symptoms include fever, headache, chills, loss of appetite, nausea, and muscle pain. In some occasions, the disease progresses to a second stage which includes fever accompanied by abdominal pains, liver damage resulting in jaundice, kidney problems and/or bleeding. The disease is spread primarily by Aedes and Haemogogus type mosquitos. The disease is most typical in tropical environments. According to the WHO, there are 200 000 annual cases of yellow fever resulting in 30 000 deaths mainly in Africa and Latin America. 90% of cases occur in Africa.

[1778] Preventive live-attenuated vaccines for yellow fever are available. However, concern related to post-vaccine adverse events has decreased the popularity of the vaccines. The vaccination is not recommended to infants younger than 9 months, pregnant women and individuals with an immune deficiency. As of today, there is no specific treatment for yellow fever. Current methods for treatment involve with supportive care to treat dehydration, respiratory failure and fever. There is a need for improved prevention and treatment therapies against yellow fever virus.

[1779] Envelope E glycoprotein of yellow fever virus has been identified as a potential target for antibody therapies. Neutralizing antibodies for yellow fever virus have been reported by Thibodeaux, B A. et al, 2012, Antiviral Res. 94 (1), 1-8 and Daffis, S. et al., 2005, Virology, 337(2), 262-272, the contents of each of which are incorporated herein by reference in their entirety.

[1780] In some embodiments, methods of the present disclosure may be used to prevent, manage and/or treat infections and complications caused by yellow fever virus.

[1781] AAV particles and methods of using the AAV particles described in the present disclosure may be used to prevent, manage and/or treat yellow fever virus related infections and/or conditions. As a non-limiting example, the AAV particles of the present disclosure comprise a nucleic acid sequence encoding at least one of the sequences described in Table 3 (SEQ ID NO: 1740-2141).

### Japanese Encephalitis Virus

[1782] Japanese encephalitis virus is an enveloped positive sense single-stranded RNA virus belonging to Flavivirus family and closely related to St. Louis encephalitis and West Nile virus. The virus causes Japanese encephalitis, also known as Japanese B encephalitis. In majority of cases, the disease is symptomless. However, in less than 1% of infections, the disease leads to a life-threatening encephalitis. The early stage symptoms include fever, headache and malaise. As the disease progresses into an acute encephalitis, the symptoms include neck rigidity, cachexia, hemiparesis, convulsions and fever, accompanied by lifelong neurological problems such as deafness, and/or mental retardation. The disease is transmitted to humans via mosquitos of the Culex species. The virus exists in a transmission cycle between mosquitos, pigs, and water birds. The disease affects 24 countries in the South-East Asia and Western Pacific. According to the WHO, an estimated 68 000 clinical cases are reported annually, with case-fatality rate as high as 30%. Major outbreaks of the disease occur every 2-15 years.

[1783] The disease may be prevented by a vaccination, most common vaccination being alive attenuated vaccine. In general, the vaccines initially show high effectiveness, but the protection decreases over time. As of today, there is no specific treatment for the disease. Current treatment therapies include good supportive care. There remains a need for longer lasting, improved prevention therapies, and treatment for Japanese encephalitis virus infections.

[1784] Antibodies for treatment of Japanese encephalitis have been developed. For example, Hsieh et al. teach antibodies that target cellular receptors and interrupts their function in flavivirus infections in US Patent publication US20080292644, the contents of which are incorporated herein by reference in their entirety.

[1785] In some embodiments, methods of the present disclosure may be used to prevent, manage and/or treat infections and complications caused by Japanese encephalitis virus.

[1786] AAV particles and methods of using the AAV particles described in the present disclosure may be used to prevent, manage and/or treat Japanese encephalitis virus related infections and/or conditions. As a non-limiting example, the AAV particles of the present disclosure comprise a nucleic acid sequence encoding at least one of the sequences described in Table 3 (SEQ ID NO: 1740-2141).

St. Louis Encephalitis Virus

[1787] St. Louis encephalitis virus is a positive-stranded RNA virus and member of the Flavivirus family and closely related to Japanese encephalitis virus. St. Louis encephalitis is a mosquito-borne disease caused by the virus. In majority of cases, the disease is symptomless. However, in less than 1% of the cases, the disease may lead to encephalitis, which may be life-threatening, especially for the elderly. The early stage symptoms include fever, headache, dizziness, malaise and nausea. If the disease progresses to the central nervous system, symptoms include stiff neck, confusion, disorientation, dizziness, tremor and unsteadiness, and in severe cases coma or even death. St. Louis encephalitis virus is transmitted to humans through Culex mosquitos. The virus exists in a transmission cycle between mosquitos and birds. The disease mainly affects the USA, especially eastern and central states. The disease has also spread to Canada and Mexico.

[1788] As of today, there is no vaccine or specific treatment for St. Louis encephalitis. Current treatment therapies include good supportive care. There is a demand for preventive and treatment therapies for the disease. Neutralizing antibodies for St. Louis encephalitis virus have been reported in Thibodeaux, B. A., et al, 2012, Antiviral Res. 94 (1), 1-8 and Daffis, S. et al., 2005, Virology 337 (2), 262-272, the contents of which are incorporated herein by reference in their entirety.

[1789] In some embodiments, methods of the present disclosure may be used to prevent, manage and/for treat infections and complications caused by St. Louis encephalitis virus.

[1790] AAV particles and methods of using the AAV particles described in the present disclosure may be used to prevent, manage and/or treat St. Louis encephalitis virus related infections and/or conditions. As a non-limiting example, the AAV particles of the present disclosure comprise a nucleic acid sequence encoding at least one of the sequences described in Table 3 (SEQ ID NO: 1740-2141).

### Neglected Tropical Diseases (NTDs)

[1791] AAV particles and methods of using the AAV particles described in the present disclosure may be used to prevent, manage and/or treat infectious disease. As a non-limiting example, the AAV particles of the present disclosure comprise a nucleic acid sequence encoding at least one of the sequences described in Table 3 (SEQ ID NO: 1740-2141).

[1792] Neglected Tropical diseases (NTDs) are a diverse category of communicable diseases present in tropical and subtropical environments. NTDs affect more than one billion people in about 150 countries. NTDs are a significant public health problem costing the involved developing economies billions of dollars annually. The diseases affect mostly the populations with inadequate sanitation, and those in contact with infectious vectors, domestic animals and livestock. In May 2013, the 66^{th} WHO Assembly announced resolution WHA66.12 to integrate measures and plan investments to improve the wellbeing of populations affected by NTDs. NTDs include Buruli ulcer, Chagas disease, Dengue and Chikungunya, Dracunculiasis (guinea-worm disease), Echinococcosis, Endemic treponematoses (Yaws), Foodborne trematodiases, Human African trypanosomiasis (sleeping sickness), Leishmaniasis, Leprosy (Hansen disease), Lymphatic filariasis, Onchocerciasis (river blindness), Rabies, Schistosomiasis, Soil-transmitted helminthiases, Taeniasis/Cysticercosis and Trachoma.

### Chikungunya Virus

[1793] Chikungunya virus is an arbovirus belonging to the Togoviridae family. The genome is a single-strand RNA molecule encoding four non-structural and three structural glycoproteins (C, E1, E2) (see, e.g. Caglioti et al., 2013, New Microbiol.; 36(3):211-27, and references therein). Chikungunya fever is a mosquito-borne disease caused by chikungunya virus. The symptoms include a fever lasting 2-7 days, rash and flu-like symptoms accompanied by a joint pain that may last for weeks, months or even years. The disease may be dangerous for the elderly and individuals with chronic medical problems. Chikungunya virus is spread by Aedes albopictus and Aedes aegypti. Outbreaks of chikungunya fever have occurred in Africa, Asia, Europe and Indian and Pacific Oceans, and more recently in islands in the Caribbean. As an example, according to the WHO, an outbreak of 1.9 million cases in India, Indonesia, Maldives, Myanmar and Thailand since 2005 has been reported. More recently, as of April 2015 more than million cases have reported in Caribbean Islands, Latin American countries and the United States.

[1794] As of today, there is no specific treatment or vaccination for chikungunya fever. The disease is typically treated with supportive care therapy, as well as anti-inflammatory drugs and medicines to relieve the symptoms. Research and development on vaccinations has been done but none has been approved for commercial use so far. Antibodies for detection and treatment of Chikungunya have been developed. E.g. fully human antibodies binding to an epitope located in an antigenic site of the chikungunya virus E1 and E2 envelope proteins were in US Patent Publication US20130189279, the contents of each of which are incorporated herein by reference in their entirety.

[1795] In some embodiments, methods of the present disclosure may be used to prevent, manage and/or treat infections and complications caused by chikungunya virus.

[1796] AAV particles and methods of using the AAV particles described in the present disclosure may be used to prevent, manage and/or treat chikungunya virus related infections and/or conditions. As a non-limiting example, the AAV particles of the present disclosure comprise a nucleic acid sequence encoding at least one of the sequences described in Table 3 (SEQ ID NO: 1740-2141).

### Dengue Virus

[1797] Dengue virus belongs to the family of Flaviviridae, genus of Flavivirus. It is an enveloped, positive strand RNA virus containing two integral membrane proteins envelope (E) and premembrane (prM). Dengue virus is closely related to e.g. Yellow fever, West Nile virus and St. Louis and Japanese encephalitis viruses. There are five serotypes of the virus that can cause dengue fever, which is a mosquito-borne tropical disease. Neutralizing antibodies target the protein E as it binds to the cellular receptors and mediates the viral entry into cells. Infection with a serotype may produce a lifelong immunity to that serotype but no long-term immunity against other serotypes, (see e.g., Wahala and de Silva, 2011, Viruses.; 3(12): 2374-2395, and references therein). In fact, an infection by a second serotype may lead to a more severe form of disease, due to the complexity of the antibody respond and possible antibody dependent enhancement (ADE), which hypothesizes that weakly neutralizing antibodies from the first infection bind to the second serotype and enhance the infection. The symptoms of dengue fever are similar to flu, including fever, headache, muscle and joint pain and skin rash. The disease may also manifest as a potentially lethal complication called severe dengue, also known as dengue hemorrhagic fever. The disease may be dangerous to individuals with chronic diseases, such as diabetes or asthma, or children and the elderly. Dengue virus is spread by several mosquito species, out of which Aedes aegypti is the most common. Dengue may also be transmitted via infected blood or organ donation or by the vertical transmission route. According to the WHO, the estimated number of dengue infections annually could be as high as 390 million.

[1798] As of today, there is no specific treatment or prevention therapy for dengue fever. Antibodies targeting dengue virus have been developed. As an example, antibodies neutralizing four serotypes of dengue virus have been in US Patent publication US20150225474, US20150218255 and in US Patent U.S. Pat. No. 9,073,981, the contents of each of which are incorporated herein by reference in their entirety.

[1799] In some embodiments, methods of the present disclosure may be used to prevent, manage and/or treat infections and complications caused by dengue virus.

[1800] AAV particles and methods of using the AAV particles described in the present disclosure may be used to prevent, manage and/or treat Dengue virus related infections and/or conditions. As a non-limiting example, the AAV particles of the present disclosure comprise a nucleic acid sequence encoding at least one of the sequences described in Table 3 (SEQ ID NO: 1740-2141).

Trypanosoma cruzi

[1801] Trypanosoma Cruzi(T. cruzi) is a species of parasitic euglenoid protozoan. T. cruzi causes Chagas disease, also known as American trypanosomiasis, which is a tropical parasitic disease. The symptoms of Chagas disease at the early stage include fever, swollen lymph nodes, headaches or local swelling at the site of bite. The chronic phase of Chagas starts after 8-12 weeks, which may be symptomless, or include enlargement of the ventricles of the heart, which may result in heart failure, or to an enlarged esophagus or enlarged colon. The severity of Chagas disease varies from almost unnoticeable to fatal. Chagas disease is spread by an insect vector triatomine bug. These bugs get infected with T. cruzi by feeding on the blood of an infected human or animals, and they spread it further by bites and ingestion of blood. The triatomine bug is also known as a “kissing bug” referring to its tendency to feed on people's faces. T. cruzi may also be transmitted through blood transfusions or through breast milk. Chagas disease is present mainly in 12 Latin American countries, but has also spread to other continents. According The WHO, over 10 000 people die every year from Chagas disease, and 25 million people are in the risk of infection.

[1802] As of today, there is no specific prevention or treatment therapy for Chagas disease. The traditional therapies for Chagas have been involved with attempts to kill the parasite and treatment of the symptoms. For example, azole and nitro-derivative drugs have been used, but have not been successful in removal of the parasite fully. Other mechanisms to treat the disease have been under research. After infection in mammals, the parasite incorporates a charged carbohydrate (sialic acid) to survive to the chronic phase of the disease. To do so, the parasite scavenged sialic acid it from the host's sialoglycoconjugates, through a transglycosylation reaction catalyzed by an enzyme called trans-sialidase. The trans-sialidase has been identified as a potential target for drug development. Buschiazzo et al. have reported an antibody inhibiting the T. cruzi trans-sialidase enzyme providing an antibody therapy mechanism for Chagas disease (see, Buschiazzo et al., 2012, PLoS Pathol. 8(1), E1002474, and references therein).

[1803] In some embodiments, methods of the present disclosure may be used to prevent, manage and/or treat infections and complications caused by Chagas disease.

[1804] AAV particles and methods of using the AAV particles described in the present disclosure may be used to prevent, manage and/or treat Chagas disease. As a non-limiting example, the AAV particles of the present disclosure comprise a nucleic acid sequence encoding at least one of the sequences described in Table 3 (SEQ ID NO: 1740-2141).

### Rabies Virus

[1805] Lyssaviruses are a genus of RNA viruses belonging to the family of Rhabdoviridae. Rabies virus is a neurotropic virus with cylindrical morphology. After infection, rabies virus enters the peripheral nervous system, and further to central nervous system by retrograde axonal transport. Rabies virus and Australian bat lyssavirus cause rabies. Rabies affects humans and warm-blooded animals. The early stage symptoms include flu-like signs, but later the disease manifests as paralysis, anxiety, insomnia, abnormal behavior, hallucinations. Humans and animals infected may also experience hydrophobia, “fear of water”, which is considered a characteristic symptom of the disease. Eventually the disease affects the central nervous system and brain, causing death. Humans are typically infected by being bitten, scratched or licked by an animal with the disease. Most commonly the infection is by dogs. Whereas efficient vaccination programs for animals have been able to reduce or even eliminate rabies in developing countries, the disease still affects poor population mainly in Africa and Asia. According to the WHO, post-bite treatment and vaccination is provided for 15 million people annually.

[1806] Rabies is a vaccine-preventable disease and especially systematic vaccination of dogs has been a cost-effective strategy for prevention of rabies. Post-exposure prophylaxis (PEP), the treatment of bite victims immediately after the exposure, includes local treatment of the wound, rabies vaccination and administration of rabies immunoglobulin. Though efficient vaccines for rabies have been developed, there remains a need for treatment/or management of rabies to prevent death after rabies virus has entered the central nervous system (see, e.g., Hicks et al., 2012, Clin Exp Immunol.; 169(3): 199-204, and references therein). The genome of rabies virus codes for five viral proteins. Out of the five, G protein, which is an external surface glycoprotein, forms protrusions that cover the outer surface of the virion envelope and is known to induce neutralizing antibodies. Also, nucleoprotein (N) molecules and the phospho-protein (NS) participate in immune responses. G protein has been the target of antibody developments. For example, therapeutic antibodies against rabies virus are taught in US Patents U.S. Pat. Nos. 7,071,319, 6,890,532, and 9,005,624, the contents of each of which are incorporated herein by reference in their entirety.

[1807] In some embodiments, methods of the present disclosure may be used to prevent, manage and/or treat infections and complications caused by rabies virus.

[1808] AAV particles and methods of using the AAV particles described in the present disclosure may be used to prevent, manage and/or treat rabies virus related infections and/or conditions. As a non-limiting example, the AAV particles of the present disclosure comprise a nucleic acid sequence encoding at least one of the sequences described in Table 3 (SEQ ID NO: 1740-2141).

### Foodborne Illnesses and Gastroenteritis

[1809] AAV particles and methods of using the AAV particles described in the present disclosure may be used to prevent, manage and/or treat infectious disease. As a non-limiting example, the AAV particles of the present disclosure comprise a nucleic acid sequence encoding at least one of the sequences described in Table 3 (SEQ ID NO: 1740-2141).

[1810] Foodborne illnesses, also known as food poisoning, are a common and costly public health problem. The illnesses are typically transmitted by the fecal-oral-route. The transmission to humans is by consuming contaminated food or beverage. More than 250 different foodborne diseases, mostly infections caused by viruses, bacteria, parasites or fungus, are identified by the CDC. CDC estimates that approximately 48 million individuals are affected by foodborne illnesses annually in the United States. Gastroenteritis is an inflammation of the gastrointestinal tract involving stomach and small intestine. Gastroenteritis is also caused by an infection caused by viruses, bacteria, parasites or fungus. The transmission to humans is by person-to-person contact, or by consuming contaminated food or beverage. Foodborne illnesses and gastroenteritis have similar symptoms including diarrhea, vomiting, abdominal pain, dehydration. In some cases, the diseases may require hospitalization or be fatal. Both illnesses are best prevented by proper hand hygiene, proper hygiene while preparing food, treatments to kill bacteria such as pasteurizing, cooking or heating food, and proper methods to store food.

### Rotavirus

[1811] Rotavirus is a double-stranded RNA virus belonging to the family of Reoviridae. The rotavirus genome consists of 10 segments coding for a single protein, and segment 11 coding for two proteins. The virions are non-enveloped, triple-layered and icosahedral in structure (see, e.g. Alyegbo et al., 2013, Plos One 8, 61101, and references therein). The virus is spread by the fecal-oral-route. Rotavirus is very common especially among infants and young children and spreads easily. Almost all children worldwide are infected with rotavirus by the age of 5, and the disease leads to death of half a million children annually. Rotavirus causes rotavirus gastroenteritis with symptoms including nausea, vomiting, diarrhea and fever. Rotavirus is associated with dehydration. The disease is milder in adults and more severe in young children, infants and the elderly. Though infection does not provide full immunity to the virus, the first infection is typically the most severe in symptoms.

[1812] As of today, there is no specific treatment rotavirus infections. Present treatment includes good supportive care including drinking of fluids to prevent dehydration. In severe cases, the rotavirus gastroenteritis requires hospital care e.g. treatment with intravenous fluids. Vaccines for prevention of the disease have been developed and CDC recommends rotavirus vaccination for infants as part of the routine vaccinations. There remains a need for medical treatment therapies for the infection. Development has been done in the field of antibodies. E.g. Alyegbo et al., in Plos One 8, 61101 (2013, teach antibodies targeting the intermediate capsid layer of VP6 of the triple-layered particle and Frenken et al. teach anti-rotavirus antibodies in US Patent U.S. Pat. No. 8,105,592, the contents of which are incorporated herein by reference in their entirety.

[1813] In some embodiments, methods of the present disclosure may be used to prevent, manage and/or treat infections and complications caused by rotavirus.

[1814] AAV particles and methods of using the AAV particles described in the present disclosure may be used to prevent, manage and/or treat rotavirus related infections and/or conditions. As a non-limiting example, the AAV particles of the present disclosure comprise a nucleic acid sequence encoding at least one of the sequences described in Table 3 (SEQ ID NO: 1740-2141).

### Norwalk Virus/Norovirus

[1815] Norwalk virus, also known as winter vomiting bug, is the only member of genus norovirus belonging to the family of Caliciviridae. Norwalk virus is a single-stranded RNA with three open-reading frames that encode a polyprotein precursor to non-structural proteins, and two polypeptides of different sizes (see e.g. Jiang et al., 1993, Virology; 195(1):51-61, and references therein). Norwalk virus is spread by the fecal-oral-route. Norwalk virus is extremely contagious and can be transmitted through contaminated food or drink, touching contaminated surfaces or objects or from a contact with an infected individual. The Norwalk virus causes an inflammation of stomach and/or intestines. The symptoms associated with the infection include stomach pain, nausea, vomiting and diarrhea. The disease can be dangerous, especially for your children or young adults. According to CDC, every year 19-21 million infections occur leading to 570-800 deaths in the US.

[1816] As of today, there is no vaccine or specific treatment for Norwalk virus associated gastroenteritis. Antibodies for prevention and treatment of Norwalk virus have been developed. For example, International Patent publication WO2014126921 and WO2014183052, the contents of each of which are incorporated herein by reference in their entirety, teach neutralizing antibodies binding to the polypeptides of Norwalk virus.

[1817] In some embodiments, methods of the present disclosure may be used to prevent, manage and/or treat infections and complications caused by Norwalk virus.

[1818] AAV particles and methods of using the AAV particles described in the present disclosure may be used to prevent, manage and/or treat Norwalk virus related infections and/or conditions. As a non-limiting example, the AAV particles of the present disclosure comprise a nucleic acid sequence encoding at least one of the sequences described in Table 3 (SEQ ID NO: 1740-2141).

Campylobacter jejuni

[1819] Campylobacter jejuni(C. jejuni) is an oxidase-positive, catalase-positive, non-fermentative Gram-negative bacteria with a helical shape. The C. jejuni inhabits in the intestinal tract of animals (e.g. poultry, cattle, pigs, sheep, ostriches and shellfish), and in pets (e.g. cats and dogs). The bacteria may be transmitted to humans foodborne, e.g. when eating contaminated food or drink, such as unpasteurized milk. According to the WHO, campylobacter is the most common cause of gastroenteritis worldwide. C. jejuni causes campylobacteriosis infection. The typical symptoms include diarrhea with blood in the feces, abdominal pain, fever, headache, nausea and/or vomiting. The infection may be dangerous to young children, the elderly and individuals with immunodeficiency and is most abundant with malnourished children. C. jejuni infections have been associated with severe long-term complications such as Guillain-Barre Syndrome, inflammatory bowel disease and reactive arthritis (see, e.g., Platts-Mills and Kosek, 2014, Curr Opin infect Dis.; 27(5): 444-450, and references therein).

[1820] Typically, C. jejuni infection does not require specific treatment in addition to good supportive care. In more severe cases, in humans and in poultry, the infection has been treated with antibiotics such as fluoroquinoles and macrolides. However, spread of antibiotic-resistant strains is an increasing concern. The treatment with antibiotics is recommended in cases where the bacteria has invaded the intestinal mucosa cell and damaged the tissues, or to eliminate the carrier state. There remains a need for prevention therapies, as well as improved, non-antibiotic, therapies for treatment of the infection. Antibodies targeting C. jejuni have been taught e.g. in International Patent publication WO2014063253, the contents of which are incorporated herein by reference in their entirety.

[1821] In some embodiments, methods of the present disclosure may be used to prevent, manage and/or treat infections and complications caused by C. Jejuni.

[1822] AAV particles and methods of using the AAV particles described in the present disclosure may be used to prevent, manage and/or treat C. Jejuni related infections and/or conditions. As a non-limiting example, the AAV particles of the present disclosure comprise a nucleic acid sequence encoding at least one of the sequences described in Table 3 (SEQ ID NO: 1740-2141).

Clostridium difficile

[1823] Clostridium difficile bacteria (C. difficile) is a Gram-positive, anaerobic spore-forming bacteria belonging to the genus of Clostridium. C. difficile inhabits in the soil. C. difficile produces toxins, most commonly enterotoxin A and cytotoxin B. Toxins A and B both have a C-terminal receptor-binding domain containing repeating sequences, a central hydrophobic domain and N-terminal glucosyltranferase domain. The toxins bind to the intestinal epithelial cells leading to glucosylation of target Rho GTPases, disruption of the cytoskeleton and cell death. C. difficile toxins A and Bare a common cause C. difficile associated diarrhea and Clostridium difficile colitis, which is an inflammation of the large intestine. Typical symptoms of the colitis include flu-like symptoms, bloating, diarrhea, and/or abdominal pain. The disease may lead to dehydration, kidney failure, bowel perforation, toxic megacolon resulting in colon rupture. The elderly and individuals with a weakened immunity are more susceptible to severe and recurring infections which can be life-threatening. C. difficile is transmitted by the fecal-oral-route. Due to the ability to form heat-resistant spores, the bacteria is not killed by alcohol-based cleansers or routine surface cleaning. The bacteria may be cultured on almost any surface and survives in clinical environments, such as hospitals. C. difficile is one of the most common and severe healthcare-associated infections. According to CDC, an estimated about half a million infections occur in the United States annually. In 2011, 29, 000 deaths related to C. difficile were reported.

[1824] Currently C. difficile infections are treated with antibiotics such as vancomycin and metronidazole. However, increasing an antibiotic-resistance to the bacteria is a concern. Especially in cases of recurring infections, antibiotic treatments have an incomplete response and they disrupt the normal colonic flora. There remains a need for prevention and improved treatment therapies for the infection. Antibodies targeting C. difficile have been developed. For example, actoxumab and bezlotoxumab (developed by Medarex Inc. and the University of Massachusetts Medical School) are human monoclonal antibodies targeting C. difficile toxin A and toxin B, respectively. The antibodies may be administered as a combination for the prevention of recurring C. difficile infection.

[1825] In some embodiments, methods of the present disclosure may be used to prevent, manage and/or treat infections and complications caused by C. difficile.

[1826] AAV particles and methods of using the AAV particles described in the present disclosure may be used to prevent, manage and/or treat C. difficile related infections and/or conditions. As a non-limiting example, the AAV particles of the present disclosure comprise a nucleic acid sequence encoding at least one of the sequences described in Table 3 (SEQ ID NO: 1740-2141).

Entamoeba histolytica

[1827] Entamoeba histolytica (E. histolytica) is an anaerobic one-celled parasite protozoan belonging to the genus of Entamoeba. The active stage of the protozoan exists only in the host and in fresh feces. Cysts survive outside the host in water, soil and food in moist conditions. E. histolytica causes an infection called amebiasis, also known as amoebiasis or entamoebiasis. In majority of cases, amebiasis is symptomless. In 10-20% of individuals infected have symptoms that include loose feces, stomach pain and cramping. The severe more form of amebiasis called amebic dysentery is associated with stomach pain, blood stools and fever. In rare cases, E. histolytica invades the liver, forms an abscess and may spread to other parts of the body, such as the lungs or brain. The transmission to humans is mostly via the fecal-oral-route. The disease is typically caused by ingestion of mature cysts in contaminated food, water or via hands. The disease may also be transmitted in close person-to-person contact, e.g. sexual contact. E. histolytica infections are most common in tropical areas and especially in poor sanitary conditions. It is estimated that 50 million cases of amebiasis occur annually, leading to 100, 000 deaths.

[1828] As of today, there are no preventive vaccines for E. histolytica infections, though cellular immunity is important for the prevention of liver invasive amebiasis. Amebiasis is typically treated with amebicides, which are medicines targeting E. histolytica at specific parts of the body, e.g. the intestine tissue or liver. Optionally, the treatment may involve one or more antibiotics, as well as steroids. However, increasing antibiotic-resistance of E. histolytica is a concern. There remains a need for prevention therapy as well as for improved treatments. Antibodies targeting E. histolytica are taught in, e.g., 2009, infect Immun.; 77(1): 549-556, and Tachibana et al., 1999, Clin Diagn Lab Immunol.; 6(3):383-7, the contents of which are incorporated herein by reference in their entirety.

[1829] In some embodiments, methods of the present disclosure may be used to prevent, manage and/or treat infections and complications caused by E. histolytica.

[1830] AAV particles and methods of using the AAV particles described in the present disclosure may be used to prevent, manage and/or treat E. histolytica related infections and/or conditions. As a non-limiting example, the AAV particles of the present disclosure comprise a nucleic acid sequence encoding at least one of the sequences described in Table 3 (SEQ ID NO: 1740-2141).

Helicobacter pylori

[1831] Helicobacter pylori (H. pylori) is a Gram-negative, spiral-shaped microaerophilic bacterium. H. pylori infection is typically asymptomatic and is suggested to be transmitted through the fecal-oral route or oral-oral route. According to CDC, two-thirds of the world's population is infected with H. pylori. The infection may cause chronic active, chronic, persistent, and atrophic gastritis, duodenal and gastric ulcers and is associated with cancer. CDC reposts 25 million Americans suffering from an ulcer during their lifetime. Typical symptoms associated with ulcer are gnawing or burning pain in the epigastrium, especially between meals. Additional symptoms include nausea, vomiting, loss of appetite, internal bleeding leading to anemia and fatigue.

[1832] Typical treatment for H. pylori infection involves antibiotics. Increasing antibiotic resistance and patient noncompliance are major challenges associated with the antibiotic treatment. There remains a need for improved, non-antibiotic, treatment and prevention therapies targeting H. pylori. Antibodies targeting H. pylori infection have been developed. For example, Boren et al. teach antibodies targeting the BAbA antigen expressed by H. pylori in US patent U.S. Pat. No. 8,025,880, the contents of which are incorporated herein by reference in their entirety.

[1833] In some embodiments, methods of the present disclosure may be used to prevent, manage and/or treat infections and complications caused by H. pylori.

[1834] AAV particles and methods of using the AAV particles described in the present disclosure may be used to prevent, manage and/or treat H. pylori related infections and/or conditions. As a non-limiting example, the AAV particles of the present disclosure comprise a nucleic acid sequence encoding at least one of the sequences described in Table 3 (SEQ ID NO: 1740-2141).

### Enterotoxin B

[1835] Enterotoxin B is a toxin produced by certain strains of Gram-positive bacteria Staphylococcus aureus and is a common cause for food poisoning. Staphylococcus species thrive and produce toxins in unrefrigerated meats, dairy, and bakery products. The symptoms associated with enterotoxin B infection are severe diarrhea, nausea and intestinal cramping. The toxin may remain active in the human body after the bacteria has been killed. Enterotoxin B is a so-called superantigen. Superantigens are toxins that may activate T cells by forming a bridge between a MHC II on antigen presenting cells (APCs) and the T cell receptors (TCR). Due to binding of enterotoxin B, the T cells release large amount of cytokines leading to an inflammation and gastroenteritis. Though enterotoxin B infection is typically not life threatening, enterotoxin B has been identified as a potential chemical and biological warfare agent.

[1836] As of today, there is no specific prevention or treatment for enterotoxin B infection. Antibodies that neutralize enterotoxin B have been investigated, e.g. as described in US Patent U.S. Pat. No. 8,895,704.

[1837] In some embodiments, methods of the present disclosure may be used to prevent, manage and/or treat infections and complications caused by enterotoxin B.

[1838] AAV particles and methods of using the AAV particles described in the present disclosure may be used to prevent, manage and/or treat enterotoxin B related infections and/or conditions. As a non-limiting example, the AAV particles of the present disclosure comprise a nucleic acid sequence encoding at least one of the sequences described in Table 3 (SEQ ID NO: 1740-2141).

### Toxins

[1839] AAV particles and methods of using the AAV particles described in the present disclosure may be used to prevent, manage and/or treat infectious disease. As a non-limiting example, the AAV particles of the present disclosure comprise a nucleic acid sequence encoding at least one of the sequences described in Table 3 (SEQ ID NO: 1740-2141).

[1840] Toxins are a group of substances that are highly poisonous and dangerous to humans. Toxins are infectious agents in form of bacteria, viruses, fungi, proteins, and other chemical and/or biological substances. Toxins may lead to fatal conditions. Toxins are produced by nature, and may be produced synthetically. Exposure to toxins may be unintentional and occur when in contact with toxic plants, or contaminated food, water, livestock or animals. Due to the life-threatening impact of toxins, they are considered to be potential biological and/or chemical warfare agents that may be applied as weapons of mass destruction in war field. They also impose a threat to be used as means for terrorist attacks.

### Ricin

[1841] Is a naturally occurring carbohydrate-binding lectin protein produced by castor oil plant growing in Eastern Africa, India, Southeastern Mediterranean basin area, and in tropical regions. Ricin may also be manufactured from the waste products when processing castor beans. Ricin has a globular structure with two toxin chains, chain A and chain B, which both need to be present for the cytotoxic affect. Ricin kills cells by inhibiting protein synthesis. Chain B penetrates to the cell whereas the disulfide bond joining chain A to chain B lectin has an affinity to bind to cell surface carbohydrates, (see, e.g. Friedman and Rasooly, 2013, Toxins (Basel); 5(4): 743-775). Ricin is highly toxic to humans with median lethal dose (LD₅₀) of 22 micrograms per kilogram of body weight. The exposure to Ricin may be by inhaling, ingestion or by injection. The symptoms are dependent of the method of exposure. When inhaled, ricing causes severe inflammation of the lungs, causing would has symptoms including coughing, difficulty breathing, muscle ache and nausea. When ingested, ricin induces internal bleeding of the stomach and intestines leading to pain, vomiting and bloody diarrhea, and eventual failure of the kidneys, liver and spleen. When injected, ricin induces failure of the muscles and lymph nodes, and eventually failure of the liver, kidney and spleen. There is no known treatment for Ricin poisoning.

[1842] Unintentional poisoning by Ricin is uncommon. However, Ricin is a potential biological and chemical warfare agent creating a need for treatment and prevention therapies for ricin poisoning. Antibodies targeting ricin have been developed, as described e.g. in International publication WO2015100409, the contents of which are herein incorporated by reference in their entirety.

[1843] In some embodiments, methods of the present disclosure may be used to prevent, manage and/or treat infections and complications caused by ricin.

[1844] AAV particles and methods of using the AAV particles described in the present disclosure may be used to prevent, manage and/or treat Ricin related infections and/or conditions. As a non-limiting example, the AAV particles of the present disclosure comprise a nucleic acid sequence encoding at least one of the sequences described in Table 3 (SEQ ID NO: 1740-2141).

Bacillus anthracis

[1845] Bacillus anthracis is a Gram-positive, rod-shaped bacterium causing anthrax disease (see, e.g. Spencer, 2003, J Clin Pathol.; 56(3): 182-187, and references therein). Most animals, especially herbivores, are susceptible to infection of Bacillus anthracis. Anthrax may be infected via respiratory exposure, skin contact or eating contaminated food, in most cases meat. Inhaled anthrax causes flu-like symptoms, pneumonia and severe respiratory collapse. Gastrointestinal anthrax causes severe diarrhea, acute inflammation of the intestinal tract, and vomiting of blood. Skin exposure to the bacteria will lead to boil-like skin lesions forming an ulcer with black center. Typically, infection to humans occurs by eating contaminated meat or while handling infected animals or their product, such as skin, wool or meat. Bacillus anthracis is a potential biological warfare agent. In 2001, weeks following the September 11 terrorist attacks, letters containing Bacillus anthracis were mailed to news media offices and two U.S. Senators resulting in death of five people and infected many more.

[1846] Anthrax may be treated with antibiotics, such as penicillin and amoxicillin, and may be prevented by vaccines, developed both for humans and animals. However, due to increased threat of biological warfare and terrorism, improved methods of treatment are in demand. Anthrax may also be treated by antibody therapy. For example, Raxibacumab (developed by Cambridge Antibody Technology and Human Genome Sciences) is an antibody for the prophylaxis and treatment of inhaled anthrax.

[1847] In some embodiments, methods of the present disclosure may be used to prevent, manage and/or treat infections and complications caused by Bacillus anthracis.

[1848] AAV particles and methods of using the AAV particles described in the present disclosure may be used to prevent, manage and/or treat Bacillus anthracis related infections and/or conditions. As a non-limiting example, the AAV particles of the present disclosure comprise a nucleic acid sequence encoding at least one of the sequences described in Table 3 (SEQ ID NO: 1740-2141).

### Shiga Toxin and Shiga-Like Toxin

[1849] Shiga toxin, including two major types Stx1 and Stx2, is a toxin produced by Shigella dysenteriae, a rod-shaped bacteria belonging to bacterial genus Shigella. Shiga toxin inhibits protein synthesis within cells. The toxin enters cell via a marcopinosome and inhibits the protein synthesis by cleaving a specific nucleobase RNA of the 60S subunit of ribosome. Shiga-like toxins 1 and 2 are structurally similar to Stx1 and Stx2 and are produced by enterohemorrhagic strains of Escherichia coli (EHEC) strains. (see, e.g. Friedman and Rasooly, Toxins (Basel). 2013 April; 5(4): 743-775). EHEC type 0157 is the most common pathogen causing E. Coli outbreaks in the US. Stx2 is considered to be orders of magnitude more toxic that Stx1. The severity of Shiga toxin foodborne illnesses range from mild diarrhea to a life-threatening complication known as hemolytic uremic syndrome (HUS). HUS is a disease associated with hemolytic anemia, acute kidney failure and low platelet count. Cattle is the major source or infection to humans, but the disease may be spread by birds or pigs. Shiga infection is typically obtained from contaminated food or drink, such as meat, unpasteurized milk, or contaminated water, or by contact with cattle. Shiga toxin and Shiga-like toxins considered to be potential chemical and biological warfare agents.

[1850] As of today, there is no prevention therapy or specific treatment for Shiga and Shiga-like toxins. Recent developments have been made in antibody therapy of Shiga toxin induced HUS. For example, SHIGAMAB™ (developed by Bellus Health Inc.) is a monoclonal antibody for treatment of Shiga toxin induced HUS.

[1851] In some embodiments, methods of the present disclosure may be used to prevent, manage and/or treat infections and complications caused by Shigella dysenteriae.

[1852] AAV particles and methods of using the AAV particles described in the present disclosure may be used to prevent, manage and/or treat Shigella dysenteriae related infections and/or conditions. As a non-limiting example, the AAV particles of the present disclosure comprise a nucleic acid sequence encoding at least one of the sequences described in Table 3 (SEQ ID NO: 1740-2141).

### Botulinum Toxins

[1853] Botulinum toxins are neurotoxins produced by Clostridium bacteria and they cause a disease called botulism which is characterized by weakness, problems in vision, tiredness, and problems with speech, followed by weakness of the arms, chest muscles and legs. Botulism may be fatal. There are seven different botulinum neurotoxins with a four-domain structure varying in antigenic properties and interactions with intracellular targets. L-chain enters the cytosol, cleaves the synaptosome protein and blocks neurotransmitter release resulting in peripheral neuromuscular blockade and flaccid paralysis in humans. (see, e.g. Friedman and Rasooly, Toxins (Basel). 2013 April; 5(4): 743-775) Botulinum neurotoxins are highly dangerous to humans, serotype A having a median lethal dose (LD₅₀) of 0.8 micrograms for a human of 70 kg weight. The bacteria is common in soil and water and may produce the botulinum toxins when exposed to low oxygen levels and certain temperatures. Outbreaks of foodborne botulism occur occasionally. Most susceptible to contamination by botulinum are baked products, fresh mussels, canned fruit and vegetables. Infant botulism occurs when the toxins are produced and released by bacteria in the infant's intestines. Botulism may also occur in wounds where the bacteria in the absence of oxygen produces and releases the toxins. Wound botulism is most common in cases where contaminated needles are used for injection. Botulinum toxins are potential biological and chemical warfare agents.

[1854] As of today, there is no prevention therapy for botulism. Botulism may be treated with antitoxins that block the circulation of toxins in the blood and prevent worsening of the disease. However, the antitoxins are expensive and not easily available. In cases of wound botulism, the area infected may be removed surgically. Additionally, good supportive care therapy is applied. There remains a need for therapies to prevent and treat botulism. Antibodies targeting botulinum toxins are developed, as described e.g. in US Patent publication US20130058962, and International publication WO2015100409, the contents of each of which are herein incorporated by reference in their entirety.

[1855] In some embodiments, methods of the present disclosure may be used to prevent, manage and/or treat infections and complications caused by botulinum toxins.

[1856] AAV particles and methods of using the AAV particles described in the present disclosure may be used to prevent, manage and/or treat botulinum toxin related infections and/or conditions. As a non-limiting example, the AAV particles of the present disclosure comprise a nucleic acid sequence encoding at least one of the sequences described in Table 3 (SEQ ID NO: 1740-2141).

### Therapeutic Applications: Non-Infectious Disease

[1857] The present disclosure additionally provides a method for treating non-infectious diseases and/or disorders in a mammalian subject, including a human subject, comprising administering to the subject any of the AAV particles or pharmaceutical compositions of the disclosure. In some embodiments, non-infectious diseases and/or disorders treated according to the methods described herein include, but are not limited to, Parkinson's Disease (PD), Dementia with Lewy Bodies (DLB), Multiple System Atrophy (MSA), Decreased muscle mass, Spinal muscular atrophy (SMA) Alzheimer's disease (AD), Amyotrophic lateral sclerosis (ALS), Huntington's Disease (HD), Multiple sclerosis (MS), Stroke, Migraine, Pain, Neuropathies, Psychiatric disorders including schizophrenia, bipolar disorder, and autism, Cancer, ocular diseases, systemic diseases of the blood, heart and bone, Immune system and Autoimmune diseases and Inflammatory diseases.

[1858] In some embodiments, methods of treating non-infectious diseases and/or disorders in a subject in need thereof may comprise the steps of: (1) deriving, generating and/or selecting an antibody, antibody-based composition or fragment thereof that targets the antigen of interest; (2) producing an AAV particle with a viral genome that includes a payload region encoding the selected antibody of (1); and (3) administering the AAV particle (or pharmaceutical composition thereof) to the subject.

[1859] The present disclosure provides a method for administering to a subject in need thereof, including a human subject, a therapeutically effective amount of the AAV particles of the disclosure to slow, stop or reverse disease progression. As a non-limiting example, disease progression may be measured by tests or diagnostic tool(s) known to those skilled in the art. As another non-limiting example, disease progression may be measured by change in the pathological features of the brain, CSF or other tissues of the subject.

### Therapeutic Applications: Non-Infectious Disease

[1860] The present disclosure additionally provides a method for treating non-infectious diseases and/or disorders in a mammalian subject, including a human subject, comprising administering to the subject any of the AAV particles or pharmaceutical compositions of the disclosure. In some embodiments, non-infectious diseases and/or disorders treated according to the methods described herein include, but are not limited to, Parkinson's Disease (PD), Dementia with Lewy Bodies (DLB), Multiple System Atrophy (MSA), decreased muscle mass, spinal muscular atrophy (SMA) Alzheimer's disease (AD), Amyotrophic lateral sclerosis (ALS), Huntington's Disease (HD), multiple sclerosis (MS), stroke, migraine, pain, neuropathies, psychiatric disorders including schizophrenia, bipolar disorder, and autism, cancer, ocular diseases, systemic diseases of the blood, heart and bone, immune system and autoimmune diseases and inflammatory diseases.

[1861] In some embodiments, methods of treating non-infectious diseases and/or disorders in a subject in need thereof may comprise the steps of: (1) deriving, generating and/or selecting an antibody, antibody-based composition or fragment thereof that targets the antigen of interest; (2) producing an AAV particle with a viral genome that includes a payload region encoding the selected antibody of (1); and (3) administering the AAV particle (or pharmaceutical composition thereof) to the subject.

[1862] The present disclosure provides a method for administering to a subject in need thereof, including a human subject, a therapeutically effective amount of the AAV particles of the disclosure to slow, stop or reverse disease progression. As a non-limiting example, disease progression may be measured by tests or diagnostic tool(s) known to those skilled in the art. As another non-limiting example, disease progression may be measured by change in the pathological features of the brain, CSF or other tissues of the subject.

### Cancer and Immunoinflammatory Diseases

### Cancer

[1863] Cancer is a group of more than 100 diseases associated with abnormal division and cell growth with characteristic spreading in the body. Many cancers are in the form of tumors, e.g. breast cancer, lung cancer, colon cancer, ovarian cancer, renal cancer, prostate cancer, head and neck cancer, pancreas cancer, bone cancer, and thyroid cancer. Cancers associated with blood and lymphold tissues may be referred to as liquid tumors, e.g. leukemia, lymphoma and myeloma. Cancer is caused by failure of tissue growth regulation. Genes associated with cancer include oncogenes, that promote cell growth and reproduction, and tumor suppressor genes, that inhibit cell division. Oncogenes include, but are not limited to, growth factors, receptor and cytoplasmic tyrosine kinases, transcription factors, serine/threonine kinases and regulatory GTPases. Tumor protein p53 is the most common tumor suppressor protein found in more than half of cancer types. Susceptibility to cancer is involved with environmental factors, as well as genetic. Though progress with prevention, diagnosis and treatment of cancer has been tremendous, cancer remains a severe and life-threatening disease. According to American Cancer Society, an estimated 1.6 cancers are diagnosed annually in the US, leading to more than a half a million deaths.

[1864] In one embodiment, the cancer may be Leptomeningial metastases and/or glioblastoma.

[1865] Therapies associated with cancer treatment include surgery, chemotherapy, radiation and antibody therapies. Antibodies for treatment and/or prevention of cancers have been on the market for nearly two decades, and are considered one of the most important strategies for treatment of e.g. hematological malignancies and solid tumors. A number of cancer-associated antigens have been identified for treatment of cancers. Antibodies targeting such antigens may be used to diagnose, prevent and/or treat the associated cancers (see, e.g. Scott et al, 2012, Nature Reviews Cancer 12, 278-287, and references therein).

[1866] Some solid cancer tumors are associated with expressed glycoproteins antigens. Such antigens include, but are not limited to, EPCAM (Epithelial cell adhesion molecule), CEA (Carcinoembryonic antigen), gpA33 (Glycoprotein A33 (Transmembrane)), mucins, TAG-72 (Tumor-associated glycoprotein 72), CAIX (Carbonic anhydrase IX), PSMA (Prostate-specific membrane antigen), and FBP (Folate-binding protein). Antibodies targeting the expressed glycoproteins may be used to treat associated tumors. Such solid tumors include, but are not limited to, breast, colon cancer, lung, colorectal, ovarian, renal cell, and/or prostate tumors.

[1867] Some solid cancer tumors are associated with growth factor and differentiation signaling associated antigens. Such antigens include, but are not limited to, EGFR/ERBB1/HER1 (epidermal growth factor receptor 1), ERBB2 (epidermal growth factor receptor 2), ERBB3 (epidermal growth factor receptor 3), MET (Tyrosine-Protein Kinase Met), IGF1R (insulin-like growth factor 1 receptor), EPHA3 (EPH Receptor A3), TRAILR1, (Death receptor 4), and (Receptor activator of nuclear factor kappa-B ligand), Cancers that may be treated with antibodies targeting the growth factor and differentiation signaling include, but are not limited to, breast, colon, lung, ovarian, prostate, head and neck, pancreas, thyroid, kidney, and colon tumors, melanoma, glioma, bone metastases, and hematological malignancies.

[1868] Some cancer tumors are associated with antigens of stromal and extracellular matrix, Such antigens include, but are not limited to, tenascin and FAP (Fibroblast Activation Protein, Alpha). Cancers that may be treated with antibodies targeting the stromal and extracellular matrix antibodies include, but are not limited to, breast, prostate, colon, lung, pancreas and head and neck tumors and glioma.

[1869] Some cancer tumors are associated with such as Lewis-Y Le(y) antigen. Le(y) antigen has been found expressed on a number of cancers, such as, but not limited to, ovarian, breast, colon, lung and prostate cancer. Antibodies targeting Le(y) antigen may be used to treat the associated cancers.

[1870] Some cancer tumors are associated with glycolipid antigens. Such antigens include, but are not limited to, gangliosides, such as GD2, GD3, and GM2 (monosialotetrahexosylganglioside 2). Cancers that may be treated with antibodies targeting the glycolipid antigens include, but are not limited to, epithelial tumors (e.g. breast, colon and lung tumors) and neuroectodermal tumors (tumors of the central and peripheral nervous system).

[1871] The vasculature of solid tumors is abnormal, compared to normal vasculature. Antigens supporting the formation of abnormal microvasculature and progress of cancer include, but are not limited to, VEGF (Vascular endothelial growth factor), VEGFR (vascular endothelial growth factor receptor), integrin αVβ3 and integrin α5β1. Antibodies targeting such antigens may be used to treat a number of solid tumors such as, but not limited to, lung, breast, renal, brain, eye, colorectal, melanoma, ovarian, and/or other tumors, by preventing the formation of abnormal vasculature.

[1872] Hematopoietic and lymphoid malignancies are cancers affecting the blood, bone marrow, lymph and lymphatic system. Such cancers include e.g. leukemias (acute and chronic lymphoblastic leukemia, acute and chronic myelogenous leukemia), lymphomas (Hodgkin's lymphoma, Non-Hodgkin's lymphoma) and myelomas. Tumors of the hematopoietic and lymphoid tissues are closely related to immune systems. Hematological tumors may be caused by chromosomal abnormalities derived from the myeloid and lymphoid cell lines. The lymphoid cell line produces T and B cells, whereas myeloid cell line produces granulocytes, erythrocytes, thrombocytes, macrophages and mast cells. T and B cell associated hematopoietic differentiation antigens are glycoproteins that are usually from cluster of differentiation (CD) group, such as, but not limited to, CD20, CD30, CD33 and CD52. Antibodies targeting such antigens may be used for prevention and/or treatment of hematopoietic and lymphoid cancers.

[1873] In some embodiments, methods of the present disclosure may be used to treat subjects suffering from a cancer. In some cases, methods of the present disclosure may be used to treat subjects suspected of developing a cancer.

[1874] In some embodiments, methods of the present disclosure may be used for immuno-oncology (I-O) applications. AAV particles or pharmaceutical compositions of the present disclosure may be used to develop an immunotherapy or as an immunotherapy in an I-O treatment of a subject suffering from cancer. Non-limiting examples of I-O applications include active, passive or hybrid immunotherapies, checkpoint blockade, adoptive cell transfer (ACT), cancer vaccines, CAR or CAR-T therapies, dendritic cell therapy, stem cell therapies, natural killer (NK) cell-based therapies, and interferon or interleukin based methods.

[1875] AAV particles and methods of using the AAV particles described in the present disclosure may be used to prevent, manage and/or treat cancer. As a non-limiting example, the AAV particles of the present disclosure comprise a nucleic acid sequence encoding at least one of the sequences described in Table 4 (SEQ ID NO: 2142-7346).

### Immune and Autoimmune Diseases

[1876] The human immune system is a complex mechanism for identifying and removing harmful environmental agents and repairing the harm and damage caused by them. In general, immune system identifies the body's own substances from substances acquired, in other words, the self from the non-self. The immune system can be subdivided into innate and adaptive systems. The innate system is always present and includes macrophages, dendritic cells, myeloid cells (neutrophils, mast cells, basophils, eosinophils) NK cells, complement factors and cytokines. The adaptive system responds to infectious agents, and includes T and B lymphocytes, antibodies and cytokines. Activation of T and B cells in the absence of an infectious agents leads to autoimmune diseases (see, e.g. Mackay et al., 2001, N Engl J Med, Vol. 345, No. 5, and references therein). Autoimmune diseases may affect several tissues and biological functions, e.g. joints, skin, blood vessels, muscles, organs, intestine etc. Autoimmune diseases arise from an overactive and misguided immune response to the body's natural tissues and species. Autoimmune diseases and conditions include, but are not limited to, rheumatoid arthritis, diabetes type 1, systemic lupus erythematosus, celiac sprue, psoriasis, Graves' disease, and Lyme disease. Autoimmune diseases may be caused by infections, drugs, environmental irritants, toxins, and/or genetic factors. Autoimmune diseases affect up to 50 million individuals in the US. Two most common autoimmune diseases are rheumatoid arthritis and autoimmune thyroiditis, together affecting approximately 5% of population in Western countries.

[1877] Though medical therapies for autoimmune diseases exits, the diseases may still significantly lower the quality of life, or even be fatal. There remains a need for medical therapies affecting the pathophysiology of autoimmune diseases. Autoimmune disease pathophysiology is associated with several factors and may be prevented and/or treated by antibodies targeting associated proteins. Such targets include, but are not limited to, infectious agents; environmental triggers (e.g. gliadin); targets affecting cytokine production or signaling (e.g. TNFa (tumor necrosis factor alpha), IL-1 (interleukin 1-receptor), IL-2 (interleukin-2), IL-2R (interleukin-2 receptor), IL-7 (interleukin-7), IL-10 (interleukin-10), IL-10R (interleukin-10 receptor), interferon-y, STAT-3 (Signal transducer and activator of transcription 3), STAT-4 (Signal transducer and activator of transcription 4), TGF beta (transforming growth factor beta), T cell trans TGF beta); T cell regulators (e.g. CTLA4 (Cytotoxic T-Lymphocyte-Associated Protein 4)); complement components (e.g. C1 and C4); TNFa (tumor necrosis factor alpha) and TNFb (tumor necrosis factor beta); T cell regulators (e.g. CD1); epitopes of Band T cells; and/or other targets, such as those associated with B and C cells. (see, e.g. Mackay et al., 2001, N Engl J Med, Vol. 345, No. 5, and references therein).

[1878] In some embodiments, methods of the present disclosure may be used to treat subjects suffering from an autoimmune disease. In some cases, methods of the present disclosure may be used to treat subjects suspected of developing an autoimmune disease.

[1879] In some embodiments, AAV particles and/or the methods of the present disclosure may be used to treat autoimmune diseases such as systemic sclerosis (SSc). In one embodiment, the payload region may encode antibodies or fragments thereof that target anti-neutrophil cytoplasmic antibodies (ANCA). In one embodiment, the AAV particles may be used to treat ANCA-associated vasculitis.

[1880] AAV particles and methods of using the AAV particles described in the present disclosure may be used to prevent, manage and/or treat immune system and autoimmune disease. As a non-limiting example, the AAV particles of the present disclosure comprise a nucleic acid sequence encoding at least one of the sequences described in Table 4 (SEQ ID NO: 2142-7346).

### Inflammatory Disorders

[1881] Inflammation is a natural response of the body to an irritation e.g. by infection, damaged cells or other harmful agents. The purpose of the inflammation is to remove the cause of irritation and necrotic cells and damaged tissues and to initiate cell and tissue repair. Inflammation has a role in most diseases. Inflammatory disorders are abnormalities in the body's ability to regulate inflammation. Over 100 disorders associated with high levels of inflammation have been identified, including, but not limited to, Alzheimer's disease, ankylosing spondylitis, arthritis (osteoarthritis, rheumatoid arthritis (RA), psoriatic arthritis), asthma, atherosclerosis, Crohn's disease, colitis, dermatitis, diverticulitis, fibromyalgia, hepatitis, irritable bowel syndrome (IBS), systemic lupus erythematous (SLE), nephritis, Parkinson's disease, and ulcerative colitis. Many inflammatory disorders are severe, and even life-threatening. Antibodies targeting proteins associated with inflammation may be used to prevent, manage or treat inflammatory disorders as well as inflammation associated diseases.

[1882] A large number of proteins are associated in inflammation, including, but not limited to, TNF (anti-tumor necrosis factor), IL-1R (Interleukin-1 receptor), IL-6R (Interleukin-6 receptor), Alpha integrin subunit, CTLA4 (Cytotoxic T-Lymphocyte. Associated Protein 4), and CD20 (see, e.g. Kotsovilis and Andreakos, 2014, Michael Steinitz (ed.), Human Monoclonal Antibodies: Methods and Protocols, Methods in Molecular Biology, vol. 1060, and references therein). For example, adalimumab (developed by Abbot Laboratories) is a TNF-targeting antibody for rheumatoid arthritis and other arthritis, psoriasis, and Crohn's disease and Natalizumab (developed by Biogen Idec) is an antibody targeting alpha 4-integrin for treatment of Crohn's disease. Additionally, plethora of cytokines, chemokines, adhesion and co-stimulatory molecules, receptors, as well as diverse cell types, may have a role in inflammatory diseases.

[1883] In some embodiments, methods of the present disclosure may be used to treat subjects suffering from an inflammatory disease. In some cases, methods of the present disclosure may be used to treat subjects suspected of developing an inflammatory disease.

[1884] AAV particles and methods of using the AAV particles described in the present disclosure may be used to prevent, manage and/or treat inflammatory disorders and inflammation. As a non-limiting example, the AAV particles of the present disclosure comprise a nucleic acid sequence encoding at least one of the sequences described in Table 4 (SEQ ID NO: 2142-7346).

### Blood and Blood Vessel Diseases

[1885] Systemic diseases are a category of conditions affecting the whole body, or many tissues and organs of the body. Systemic conditions associated with the blood, blood vessels, and cardiovascular system, include, but are not limited to, heart failure, acute coronary syndrome, atherosclerosis, hypertension, lung disease, cardiomyopathy, hyperlipidemia, hypercholesterolemia, hypertriglyceridemia, blood clotting, cardiopulmonary bypass, myocardial infection, platelet aggregation and hemolytic diseases. In general, such conditions affect quality of life and may ultimately be life-threatening. Cardiovascular diseases, referring to heart- and blood vessel-related conditions, are the leading cause of death worldwide. There remains a need for therapies affecting the pathophysiology of systemic heart, blood and blood circulation diseases. Antibodies for treating such conditions have been developed, targeting proteins such as, but not limited to, selectin P, integrin αIIbβ3, GPIIb/IIIa, RHD (Rh blood group, D antigen), PCSK9 (proprotein convertase subtilisin/kexin type 9), oxLDL (Oxidized low-density lipoprotein), CD20 (B-lymphocyte antigen), ANGPTL3 (Angiopoietin-Like 3), F9 (human factor 9), F10 (human factor 10), TFPI (Tissue Factor Pathway Inhibitor (Lipoprotein-Associated Coagulation Inhibitor)), CD41 (Integrin, Alpha 2b (Platelet Glycoprotein IIb Of IIb/IIIa Complex, Antigen CD41).

[1886] In some embodiments, methods of the present disclosure may be used to treat subjects suffering from blood-, blood circulation- and heart-related systemic diseases. In some cases, methods of the present disclosure may be used to treat subjects suspected of developing systemic blood-, blood circulation- and heart-related systemic diseases.

[1887] Stroke is a medical emergency characterized either by a burst, in particular, of a blood vessel in the brain, referred to as hemorrhagic stroke, or by an interruption of blood supply in the brain, referred to as ischemic stroke. Stroke triggers inflammation and causes brain cell death as oxygen and nutrient supplies are suddenly restricted. Typical symptoms include numbness or weakness, especially on one side of the body, confusion, trouble speaking and understanding speech, vision problems, dizziness and loss of balance. Typically, patients recovering from stroke have permanent disabilities, such as those affecting, e.g., movement, speech, coordination, vision and balance. Medical conditions, e.g., diabetes, high blood pressure, high cholesterol, and obesity, as well as, cigarette smoking and poor nutrition, increase susceptibility to a stroke. According to CDC, stroke affects about 800,000 people in the US annually and is the fifth most common cause of death.

[1888] Typical recovery from a stroke is slow and often impartial. The inability of the central nervous system (CNS) to repair after injury has been partly attributed to inhibitory proteins associated with the CNS. For example, myelin-associated proteins, such as, but not limited to, myelin associated glycoprotein (MAG), myelin associated inhibitor (MAI), and their receptors, proteoglycans, versican V2, oligodendrocyte myelin glycoprotein (Omgp), and neurite outgrowth inhibitor (Nogo) have been identified to inhibit neurite outgrowth (see, e.g. Yu et al., 2013, Transl Stroke Res, 4(5):477-83, and references therein). Cell death in ischemic stroke has been associated with excessive activation of glutamate receptors such as, but not limited to, N-methyl-D-aspartic acid (NMDA) receptors and DL-α-amino-3-hydroxy-5-methyl-4-isoxazole propionic acid (AMPA). Inflammatory signaling triggered after stroke has been associated with adhesion molecules of the endothelial cells, such as, but not limited to, those represented in the selectin family, intercellular adhesion molecule-1 (ICAM-1, also known as CD54), and 02-integrins.

[1889] Therapies to prevent stroke are typically focused on treatment of underlying medical conditions. Acute treatment following ischemic stroke involves dissolution of the blood clot, e.g., by antiplatelet agents, anticoagulants and thrombolytics. Treatment of hemorrhagic stroke involves quenching of bleeding. There is presently no effective preventative therapy for stroke. There remains a need for therapy addressing the underlying pathophysiology of stroke. Antibodies targeting stroke-associated proteins have been developed. For example, Refanezumab is a monoclonal antibody targeting myelin-associated glycoprotein, MAG, for improvement and recovery of motor function after stroke.

[1890] In some embodiments, methods of the present disclosure may be used to prevent a stroke, or treat individuals recovering from a stroke.

[1891] AAV particles and methods of using the AAV particles described in the present disclosure may be used to prevent, manage and/or treat blood- and blood vessel-related diseases, including those related to the cardiovascular system, and stroke. As a non-limiting example, the AAV particles of the present disclosure comprise a nucleic acid sequence encoding at least one of the sequences described in Table 5 (SEQ ID NO: 7347-7517).

### Respiratory Diseases

[1892] Respiratory diseases are characterized by the dysfunction of any organ, tissue and/or structure that allows for breathing, air distribution and/or for the exchange of gases, e.g., oxygen and carbon dioxide, between the air and blood, e.g., nasal cavity and sinuses, larynx, pharynx, trachea, bronchi, and lungs, including alveoli and alveolar ducts. Individuals with respiratory diseases may have impaired breathing, which is often associated with reduced quality of life and, ultimately, can be fatal. Respiratory diseases that are specifically associated with the lungs may be termed pulmonary diseases.

[1893] Several diseases, disorders, and conditions are associated with respiratory and/or pulmonary health. For example, such diseases, disorders, and conditions include, but are not limited to, Bronchitis, Acute Respiratory Distress Syndrome (ARDS), Alpha-1 Antitrypsin Deficiency, Asbestosis, Asthma, Bronchiectasis, Bronchiolitis, Bronchiolitis Obliterans with Organizing Pneumonia (BOOP), Bronchopulmonary Dysplasia, Byssinosis, Chronic Bronchitis, Chronic Cough, Chronic Obstructive Pulmonary Disease (COPD), Chronic Thromboembolic Pulmonary Hypertension (CTEPH), Coccidioidomycosis, Cough, Cryptogenic Organizing Pneumonia (COP), Cystic Fibrosis (CF), Deep Vein Thrombosis (DVT)/Blood Clots, Emphysema, Hantavirus Pulmonary Syndrome (HPS), Histoplasmosis, Human Metapneumovirus (hMPV), Hypersensitivity Pneumonitis, Idiopathic Pulmonary Fibrosis (IPF), Influenza (Flu), Interstitial Lung Disease (ILD), Lung Cancer, Lymphangioleiomyomatosis (LAM), Mesothelioma, Middle Eastern Respiratory Syndrome (MERS), Nontuberculosis Mycobacteria (NTM), Pertussis, Pneumoconiosis, Pneumonia, Primary Ciliary Dyskinesia (PCD), Pulmonary Arterial Hypertension (PAH), Pulmonary Fibrosis (PF), Pulmonary Hypertension, Respiratory Syncytial Virus (RSV), Sarcoidosis, Severe Acute Respiratory Syndrome (SARS), Shortness of Breath, Silicosis, Sleep Apnea (OSA), Sudden Infant Death Syndrome (SIDS), Tuberculosis (TB).

[1894] There are medical therapies for the management of respiratory and/or pulmonary diseases such as, but not limited to, aclidinium (Tudorza), arformoterol (Brovana), formoterol (Foradil, Perforomist), glycopyrrolate (Seebri Neohaler), indacaterol (Arcapta), Kalydeco (ivacaftor), olodaterol (Striverdi Respimat), Roflumilast (Daliresp), salmeterol (Serevent), tiotropium (Spiriva), glycopyrrolate/formoterol (Bevespi Aerosphere), glycopyrrolate/indacaterol (Utibron Neohaler), tiotropium/olodaterol (Stiolto Respimat), umeclidinium/vilanterol (Anoro Ellipta), budesonide/formoterol (Symbicort), fluticasone/salmeterol (Advair), fluticasone/vilanterol (Breo Ellipta). Several therapies for the management of respiratory and/or pulmonary diseases may include, but are not limited to, one or more of corticosteroids, cystic fibrosis transmembrane conductance regulator (CFTR) modulators, short- and long-acting bronchodilators, digestive enzymes, Methylxanthines, mucolytics, antibiotics, and vitamins. However, the present medical therapies have side effects and/or require frequent administration. There remains a need for efficient and long-lasting medical therapy affecting the pathophysiology of respiratory- and/or pulmonary-associated disease.

[1895] In some embodiments, methods of the present disclosure may be used to treat subjects suffering from respiratory- and/or pulmonary-associated disease, and/or other conditions associated with breathing, air distribution, and/or the exchange of gases between the air and the blood. In some cases, methods of the present disclosure may be used to treat subjects suspected of developing respiratory- and/or pulmonary-associated disease, and/or other conditions associated with breathing, air distribution, and/or the exchange of gases between the air and the blood.

[1896] AAV particles and methods of using the AAV particles described in the present disclosure may be used to prevent, manage and/or treat respiratory- and/or pulmonary-associated disease, and/or other conditions associated with breathing, air distribution and/or the exchange of gases between the air and the blood. As a non-limiting example, the AAV particles of the present disclosure comprise a nucleic acid sequence encoding at least one of the sequences described herein.

[1897] As a non-limiting example, the AAV particles of the present disclosure comprise a nucleic acid sequence encoding at least one of the sequences described in Table 6 (SEQ ID NO: 7518-7574).

### Muscle Diseases

[1898] Several diseases, disorders and condition are associated with muscle weakness, which refers to reduced muscle mass, muscle strength and muscle function. For example, such disorders include myopathies, which are neuromuscular disorders characterized by muscle weakness due to dysfunction of muscle fiber. Myopathies include, but are not limited to, congenital myopathies, muscular dystrophies, mitochondrial myopathies, glycogen storage diseases of muscle, myoglobinurias, dermatomyositis, myositis ossificans, familial periodic paralysis, polymyositis, inclusion body myositis, and related myopathies, neuromyotonia, stiff-man syndrome, common muscle cramps and stiffness, and tetany. Muscle weakness may also be caused by ageing, diabetes, obesity, chronic pain, peripheral vascular disease, chronic lung diseases, heart diseases, cancers, anemia, arthritis, chronic renal failure and renal diseases, chronic obstructive pulmonary disease, multiple sclerosis (MS), stroke, muscular dystrophy, motor neuron neuropathy, amyotrophic lateral sclerosis (ALS), Parkinson's disease, osteoporosis, osteoarthritis, fatty acid liver disease, liver cirrhosis, Addison's disease, Cushing's syndrome, acute respiratory distress syndrome, steroid induced muscle wasting, myositis, scoliosis, or infections e.g. influenza, Epstein-Barr virus infection, HIV/AIDS, Lyme disease, and hepatitis C infection. Muscle weakness may occur after surgery, burn trauma, medical treatment, or trauma through an injury. Severity of muscle weakness varies. In many cases the muscle dysfunction, including weakness, reduces quality of life significantly, or may be life-threatening.

[1899] A regulator protein associated with muscles is myostatin (MSTN), also known as growth and differentiation factor 8 (GDF8). Myostatin is a protein encoded by the MSTN gene, released in the myocytes. Myostatin and myostatin receptors (e.g. ACVR2A and ACVR2B), have a role in suppressing the growth and development of muscle tissue in the body.

[1900] Treatment of muscle weakness depends on the underlying disease or condition, and may include, e.g., drug therapy, good nutrition, physiotherapy, mechanical support for weakened muscles such as those that may arise following surgery. However, efficient therapy to treat a combination of loss of muscle mass, muscle strength and muscle function are needed. Antibodies targeting myostatin may be used in the treatment and prophylaxis of diseases associated with such conditions. For example, bimagrumab (developed by Novartis) is a monoclonal antibody targeting ACVR2B myostatin receptor, and used for therapy of musculoskeletal diseases and domagrozumab (developed by Pfizer) is an antibody targeting myostatin, and used for therapy of muscle degeneration and muscle weakness.

[1901] In some embodiments, methods of the present disclosure may be used to treat subjects suffering from loss of muscle mass, muscle strength and/or muscle function. In some cases, methods of the present disclosure may be used to treat subjects suspected of developing such conditions.

[1902] AAV particles and methods of using the AAV particles described in the present disclosure may be used to prevent, manage and/or treat diseases associated with muscle mass, muscle strength and/or muscle function. As a non-limiting example, the AAV particles of the present disclosure comprise a nucleic acid sequence encoding at least one of the sequences described herein.

### Bone Diseases

[1903] Osteoporosis is a disease characterized by a reduced bone mineral density, and disrupted bone microarchitecture. Individuals with osteoporosis have a high susceptibility to bone fractures. Osteoporosis causes disability, especially in the elderly, and may be fatal.

[1904] There are medical therapies for management of the osteoporosis, and other conditions associated with reduced bone density, such as calcitonin, bisphosphonates, estrogen replacement and selective estrogen modulators for prevention of bone loss, and anabolic agents to increase bone mass and bone mineral density. However, the present medical therapies have side effects and/or require frequent administration. There remains a need for efficient and long-lasting medical therapy affecting the pathophysiology of osteoporosis and other conditions associated with reduced bone density, such as antibody therapies. Antibodies for treatment of osteoporosis are on the market, e.g. blosozumab (developed by Eli Lilly and Co.) targeting sclerostin (SOST) for increasing bone density, and denosumab (developed by Amgen) targeting TNFSF11 (Tumor Necrosis Factor (Ligand) Superfamily, Member 11) for treatment of bone loss.

[1905] In some embodiments, methods of the present disclosure may be used to treat subjects suffering from osteoporosis and/or other conditions associated with reduced bone density. In some cases, methods of the present disclosure may be used to treat subjects suspected of developing osteoporosis and/or other conditions associated with reduced bone density.

[1906] AAV particles and methods of using the AAV particles described in the present disclosure may be used to prevent, manage and/or treat systemic diseases of the blood, heart and/or bone. As a non-limiting example, the AAV particles of the present disclosure comprise a nucleic acid sequence encoding at least one of the sequences described herein.

### Endocrine and Metabolic Diseases

[1907] Endocrine diseases are characterized by the dysfunction of a network of glands and organs that produce and release specific hormones to regulate and control critical body processes such as growth and development, sexual function, reproduction, mood, and metabolism. Endocrine glands include the adrenal glands, ovaries, pancreatic islet cells, parathyroid, pineal gland, pituitary gland, testes, thymus, and thyroid. The thyroid gland is specifically important for the regulation of metabolism, and in turn, digestion, elimination, breathing, blood circulation and homeostatic mechanisms, from cellular to organismal levels. Metabolic diseases and disorders occupy a substantial proportion of all endocrine diseases and disorders, representing their own subclass. Such diseases, however, more broadly involve impaired chemical processing of e.g., amino acids, carbohydrates, lipids to acquire or generate energy. Generally, endocrine disorders involve either hormone over or under production/secretion, in other words, hyper or hypo function, respectively. Individuals with endocrine diseases, including those that are metabolic in nature, may experience diverse symptoms including abnormal heart rate/rhythms, anxiety, weight gain/loss, excess body fat or obesity, weakness, abnormal blood glucose, sleep problems, etc.

[1908] Several diseases, disorders, and conditions are associated with endocrine and/or metabolic health. For example, such diseases, disorders, and conditions include, but are not limited to, Acromegaly, Addison's Disease, Adrenal Cancer, Adrenal Disorders, Anaplastic Thyroid Cancer, Cushing's Syndrome, De Quervain's Thyroiditis, Diabetes, Follicular Thyroid Cancer, Gestational Diabetes, Goiters, Graves'Disease, Growth Disorders, Growth Hormone Deficiency, Hashimoto's Thyroiditis, Heart Disease, Hurthle Cell Thyroid Cancer, Hyperglycemia, Hyperparathyroidism, Hyperthyroidism, Hypoglycemia, Hypoparathyroidism, Hypothyroidism, Low Testosterone, Medullary Thyroid Cancer, MEN 1, MEN 2A, MEN 2B, Menopause, Metabolic Syndrome, Obesity, Osteoporosis, Papillary Thyroid Cancer, Parathyroid Diseases, Pheochromocytoma, Pituitary Disorders, Pituitary Tumors, Polycystic Ovary Syndrome, Prediabetes, Reproduction, Silent Thyroiditis, Thyroid Cancer, Thyroid Diseases, Thyroid Nodules, Thyroiditis, Turner Syndrome, Type 1 Diabetes, Type 2 Diabetes.

[1909] There are medical therapies for the management of endocrine and/or metabolic diseases such as, but not limited to, abaloparatide, acarbose, Acthar Gel, Actonel, Actonel with Calcium, ACTOplus Met, ACTOplus Met XR, Adagen, ADH, Adlyxin, Afrezza, agalsidase alfa, agalsidase beta, AHydrocort, albiglutide, Aldurazyme, alendronate, alglucerase, alglucosidase alfa, alogliptin, alogliptin/metformin, alogliptin/pioglitazone, Alphosyl, Amaryl, A-Methapred, Anadrol-50, Androderm, AndroGel, Android, Androxy, Apidra, Apidra Solostar, Aquacort, Aredia, Armour Thyroid, asfotase alfa, Atelvia, Avandamet, Aveed, Axiron, Basaglar, Baycadron, becaplermin, beta glucuronidase, recombinant, betaine, Betaject, betamethasone, Betamethasone IM/PO, Binosto, Boniva, Brineura, bromocriptine, Bydureon, Bydureon BCise, Byetta, calcifediol, Calcijex, calcitonin salmon, calcitriol, canagliflozin/metformin, carnitine, Carnitor, Celestone, Celestone Soluspan, Cerdelga, Ceredase, Cerezyme, cerliponase alfa, chlorpropamide, cinacalcet, conivaptan, Contributor Login, Cortef, Cortenema, corticotropin, cortisone, Covaryx, Cycloset, Cystadane, Cystagon, cysteamine, Cytomel, D50W, danazol, dapagliflozin/metformin, dapagliflozin/saxagliptin, DDAVP, Decadron, deflazacort, Delatestryl, Deltasone, denosumab, DepoMedrol, Depo-Testosterone, desmopressin, dexamethasone, Dexamethasone Intensol, Dexasone, dextrose, DGlucose, Diabeta, Diabinese, diazoxide, dichlorphenamide, Didronel, doxercalciferol, dulaglutide, eculizumab, Elaprase, Elelyso, eliglustat, elosulfase alfa, Emflaza, empagliflozin/linagliptin, empagliflozin/metformin, ertugliflozin/metformin, ertugliflozin/sitagliptin, Estratest, Estratest H.S., estrogens esterified/methyltestosterone, etelcalcetide, etidronate, Evenity, exenatide injectable solution, exenatide injectable suspension, exenatide subdermal implant, Fabrazyme, Flasp, FloPred, Florinef, Florinef Acetate, fludrocortisone, fluoxymesterone, Fortamet, Forteo, Fortesta, Fosamax, Fosamax Plus D, galsulfase, Genotropin, Genotropin Miniquick, Genotropin Pen 12, glimepiride, glipizide, Glucagen, GlucaGen HypoKit, glucagon, Glucagon Emergency Kit, Glucophage, Glucophage XR, glucose, Glucotrol, Glucotrol XL, Glumetza, glyburide, Glynase, Glynase PresTab, Glyset, Glyxambi, Halotestin, Hectorol, Hicon, HP Acthar Gel, Humalog, Humalog Junior KwikPen, Humalog Kwikpen, Humalog Mix 50/50, Humalog Mix 50/50 Kwikpen, Humalog Mix 75/25, Humalog Mix 75/25 Kwikpen, human parathyroid hormone, recombinant, Humatrope, HumatroPen, Humulin 70/30, Humulin N, Humulin R, Humulin R U-500, hydrocortisone, ibandronate, idursulfase, imiglucerase, Increlex, insulin aspart, insulin aspart protamine/insulin aspart, insulin degludec, Insulin degludec/insulin aspart, insulin detemir, insulin glargine, insulin glargine/lixisenatide, insulin glulisine, insulin inhaled, insulin isophane human/insulin regular human, insulin lispro, insulin lispro protamine/insulin lispro, insulin NPH, insulin regular human, Invokamet, lnvokamet-XR, losat, Janumet, Janumet XR, Januvia, Jentadueto, Jentadueto XR, Juvisync, Kanuma, Kazano, Kenalog-10, Kenalog-40, Keveyis, Kombiglyze XR, Korlym, L Thyroxine, lanreotide, Lantus, Lantus SoloStar, laronidase, Levemir, Levemir FlexTouch, Levo T, levocaritine, Levothyroid, levothyroxine, Levothyroxine T4, Levoxine, Levoxyl, linagliptin, linagliptin/metformin, liothyronine, Liothyronine T3, liotrix, liraglutide, liraglutide/insulin degludec, lixisenatide, Lumizyme, macimorelin, Macrilen, mecasermin, Medrol, Medrol Dosepak, metformin, metformin/pioglitazone, metformin/repaglinide, metformin/rosiglitazone, metformin/sitagliptin, methimazole, Methitest, methylprednisolone, methyltestosterone, metreleptin, Miacalcin, Mifeprex, mifepristone, miglitol, Millipred, Millipred DP, Minirin, Minodiab, mometasone sinus implant, Myalept, Myozyme, Naglazyme, Natesto, Natpara, Nature-Throid, Nesina, nitisinone, Nityr, Noctiva, Norditropin FlexPro, Norditropin NordiFlex, Northyx, Novolin 70/30, Novolin N, Novolin R, NovoLog, NovoLog FlexPen, NovoLog FlexTouch, NovoLog Mix 50/50, NovoLog Mix 70/30, NovoLog Mix 70/30 FlexPen, NovoPen Echo, Nutropin, Nutropin AQ, Nutropin AQ NuSpin 10, Nutropin AQ NuSpin 20, Nutropin AQ NuSpin 5, Nutropin AQ Pen 10, Nutropin AQ Pen 20, octreotide, Omnitrope, Onglyza, Orapred, Orapred ODT, Orfadin, Orinase, Oseni, Oxandrin, oxandrolone, Oxymetholone, pamidronate, parathyroid hormone, paricalcitol, Parlodel, Parsabiv, pasireotide, Pediapred, pegademase, pegvaliase, pegvisomant, pegylated phenylalanine ammonia lyase (PAL), Pima Syrup, potassium iodide, pramlintide, PrandiMet, Precose, prednisolone, prednisone, Prednisone Intensol, Prelone Syrup, Procysbi, Proglycem, Prolia, Propel, Propel Contour, Propel Mini, propylthiouracil, PropylThyracil, PTU, Qtern, Rayaldee, Rayos, Reclast, recombinant human tripeptidyl peptidase 1 (rhtpp1), Regranex Gel, Replagal, rhGUS, Riomet, risedronate, Rocaltrol, romosozumab, ru486, Ryzodeg, sacrosidase, Salzen, Samsca, Sandostatin, Sandostatin LAR, saxagliptin, saxagliptin/metformin, Saxenda, sebelipase alfa, semaglutide, Sensipar, Serostim, Signifor, Signifor LAR, sitagliptin, sitagliptin/simvastatin, Skelid, sodium iodide I-131, Soliqua 100/33, Soliris, SoluCortef, SoluMedrol, Solurex, somatropin, Somatuline Depot, Somavert, SSKI, Sterapred, Sterapred DS, Stimate, Strensiq, Striant, Sucraid, Symlin, SymlinPen 120, SymlinPen 60, Synjardy, Synjardy XR, Synthroid, Syprine, taliglucerase alfa, Tanzeum, Tapazole, teriparatide, Testim, Testopel, testosterone, testosterone buccal system, testosterone intranasal, testosterone topical, Testred, thyroid desiccated, Thyroid Hormone, Thyrolar, ThyroSafe, ThyroShield, tiludronate, Tirosint, Tirosint-SOL, tolazamide, tolbutamide, Tolinase, tolvaptan, Toujeo, Tradjenta, Tresiba, triamcinolone, Trientine, Triostat, Trulicity, Tymlos, Unithroid, uridine triacetate, Vaprisol, vasopressin, Vasostrict, velaglucerase alfa, Veripred 20, Victoza, Vimizim, Vistogard, Vogelxo, VPRIV, Xgeva, Xigduo XR, Xultophy, Xuriden, Zempla, Zilretta, zoledronic acid, Zomacton, Zometa, and Zorbtive. However, the present medical therapies have side effects and/or require frequent administration. There remains a need for efficient and long-lasting medical therapy affecting the pathophysiology of endocrine- and/or metabolism-associated disease.

[1910] In some embodiments, methods of the present disclosure may be used to treat subjects suffering from of endocrine- and/or metabolism-associated disease. In some cases, methods of the present disclosure may be used to treat subjects suspected of developing of endocrine- and/or metabolism-associated disease.

[1911] AAV particles and methods of using the AAV particles described in the present disclosure may be used to prevent, manage and/or treat endocrine- and/or metabolism-associated disease. As a non-limiting example, the AAV particles of the present disclosure comprise a nucleic acid sequence encoding at least one of the sequences described herein.

### Nervous System Diseases

### Alzheimer's Disease

[1912] Alzheimer's Disease (AD) is a debilitating neurodegenerative disease and the most common form of dementia affecting the memory, thinking and behavior. A typical early symptom is difficulty remembering newly learned information. As the disease advances, symptoms include disorientation, changes in sleep, changes in mood and behavior, confusion, unfound suspicions and eventually difficulty to speak, swallow and walk. AD currently afflicts more than 35 million people worldwide, with that number expected to double in coming decades.

[1913] As of today, no cure or prevention therapy for AD has been identified. Drug therapy to treat memory loss, behavioral changes and sleep changes, and to slow down the progression of AD are available. However, these symptomatic treatments do not address the underlying pathophysiology.

[1914] The AD brain is characterized by dual aggregates, the extracellular β-amyloid plaques and the intracellular neurofibrillary tangles (NFT) of misfolded, hyperphosphorylated microtubule associated tau protein. β-amyloid plaques may lead to pathological cascades that are associated with a number of proteins, such as, but not limited to, APP (amyloid beta (A4) precursor protein), A beta (amyloid beta), BACE (Beta-secretases), and APOE (apolipoprotein E). Historically, it has been thought that amyloid pathology precedes the appearance of NFT, and therefore, that tau pathology in the form of aggregates is symbolic of impending cell death (Selkoe, D. J., 2001, Physiological Reviews, 81(2):741-66). However, clinical trials addressing amyloid pathology have largely failed thus far and advances in the field suggest that targeting tau aggregates may be advantageous and lead to improved cognitive ability.

[1915] In some embodiments, methods of the present disclosure may be used to treat subjects suffering from AD. In some cases, methods of the present disclosure may be used to treat subjects suspected of developing AD.

[1916] AAV particles and methods of using the AAV particles described in the present disclosure may be used to prevent, manage and/or treat AD. As a non-limiting example, the AAV particles of the present disclosure comprise a nucleic acid sequence encoding at least one of the sequences described in Table 7 (SEQ ID NO:7575-7966).

[1917] As a non-limiting example, the AAV particles of the present disclosure comprise a nucleic acid sequence encoding at least one of the sequences described in Table 8 (SEQ ID NO: 7697-84026).

[1918] As a non-limiting example, the AAV particles of the present disclosure comprise a nucleic acid sequence encoding at least one of the sequences described in Table 10 (SEQ ID NO: 8077-8174).

### Parkinson's Disease

[1919] Parkinson's Disease (PD) is a progressive disorder of the nervous system affecting especially the substantia nigra of the brain. PD develops because of the loss of dopamine-producing brain cells. Typical early symptoms of PD include shaking or trembling of a limb, e.g. hands, arms, legs, feet and face. Additional characteristic symptoms are stiffness of the limbs and torso, slow movement or an inability to move, impaired balance and coordination, cognitional changes, and psychiatric conditions, e.g. depression and visual hallucinations. PD has both familial and idiopathic forms and it has been suggested that PD arises from both genetic and environmental origins. PD affects more than 4 million people worldwide. In the US, approximately 60,000 cases are identified annually. Generally, PD begins at the age of 50 or older. An early-onset form of the condition begins at an age younger than 50, and juvenile-onset PD begins before age of 20.

[1920] Death of dopamine producing brain cells related to PD has been associated with aggregation, deposition and dysfunction of alpha-synuclein protein (see, e.g. Marques and Outeiro, 2012, Cell Death Dis. 3:e350, Jenner, 1989, J Neurol Neurosurg Psychiatry. Special Supplement, 22-28, and references therein). Studies have suggested that alpha-synuclein has a role in presynaptic signaling, membrane trafficking and regulation of dopamine release and transport. Alpha-synuclein aggregates, e.g. in the form of oligomers, have been suggested as the species responsible for neuronal dysfunction and death. Mutations of the alpha-synuclein gene (SNCA) have been identified in the familial forms of PD, but also environmental factors, e.g. neurotoxin affect alpha-synuclein aggregation, may contribute to disease pathogenesis. Other suggested causes of brain cell death in PD are dysfunction of proteasomal and lysosomal systems, reduced mitochondrial activity.

[1921] PD is related to other diseases associated with alpha-synuclein aggregation, referred to as “synucleinopathies.” Such diseases include, but are not limited to, Parkinson's Disease Dementia (PDD), multiple system atrophy (MSA), dementia with Lewy bodies, juvenile-onset generalized neuroaxonal dystrophy (Hallervorden-Spatz disease), pure autonomic failure (PAF), neurodegeneration with brain iron accumulation type-1 (NBIA-1) and combined Alzheimer's and Parkinson's disease.

[1922] As of today, no cure or prevention therapy for PD has yet been identified. A variety of drug therapies available provide relief to the symptoms. Non-limiting examples of symptomatic medical treatments include carbidopa and levodopa combination reducing stiffness and slow movement, and anticholinergics to reduce trembling and stiffness. Other optional therapies include. e.g. deep brain stimulation and surgery. There remains a need for therapy affecting the underlying pathophysiology of PD. For example, antibodies targeting alpha-synuclein protein, or other proteins relevant for brain cell death in PD, may be used to prevent and/or treat PD.

[1923] In some embodiments, methods of the present disclosure may be used to treat subjects suffering from PD and other synucleinopathies. In some cases, methods of the present disclosure may be used to treat subjects suspected of developing PD and other synucleinopathies.

[1924] AAV particles and methods of using the AAV particles described in the present disclosure may be used to prevent, manage and/or treat PD. As a non-limiting example, the AAV particles of the present disclosure comprise a nucleic acid sequence encoding at least one of the sequences described in Table 7 (SEQ ID NO:7755-7966).

[1925] As a non-limiting example, the AAV particles of the present disclosure may include a nucleic acid sequence encoding at least one of the sequences described in Table 9 (SEQ ID NO: 8027-8076).

Dementia with Lewy Bodies

[1926] Dementia with Lewy Bodies (DLB), also known as diffuse Lewy body disease, is a form of progressive dementia, characterized by cognitive decline, fluctuating alertness and attention, visual hallucinations and parkinsonian motor symptoms. DLB may be inherited by an autosomal dominant pattern. DLB affects more than 1 million individuals in the US. The condition typically shows symptoms at the age of 50 or older.

[1927] DLB is caused by the abnormal build-up of Lewy bodies, aggregates of the alpha-synuclein protein, in the cytoplasm of neurons in the brain areas controlling memory and motor control. The pathophysiology of these aggregates is very similar to aggregates observed in Parkinson's disease and DLB also has similarities to Alzheimer's disease. Inherited DLB has been associated with gene mutations in SNCA and SNCB genes, producing synuclein proteins.

[1928] As of today, there is no cure or prevention therapy for DLB. A variety of drug therapies available are aimed at managing the cognitive, psychiatric and motor control symptoms of the condition. Non-limiting examples of symptomatic medical treatments include e.g. acetylcholinesterase inhibitors to reduce cognitive symptoms, and levodopa to reduce stiffness and loss of movement. There remains a need for therapy affecting the underlying pathophysiology. Antibodies targeting alpha-synuclein protein may be used to prevent and/or treat DLB.

[1929] In some embodiments, methods of the present disclosure may be used to treat subjects suffering from DLB. In some cases, methods of the present disclosure may be used to treat subjects suspected of developing DLB.

[1930] AAV particles and methods of using the AAV particles described in the present disclosure may be used to prevent, manage and/or treat DLB. As a non-limiting example, the AAV particles of the present disclosure comprise a nucleic acid sequence encoding at least one of the sequences described in Table 7 (SEQ ID NO: 7755-7966) and/or Table 11 (SEQ ID NO: 13165-13518).

### Huntington's Disease

[1931] Huntington's disease (HD) is a rare, inherited disorder causing degeneration of neurons in the motor control region of the brain, as well as other areas. Typical symptoms of the disease include uncontrolled movements (chorea), abnormal postures, impaired coordination, slurred speech and difficulty of feeding and swallowing accompanied by changes in behavior, judgment and cognition. HD is caused by mutations in the gene associated with the huntingtin (HTT) protein. The mutation causes the (CAG) blocks of DNA to repeat abnormally many times. HD affects approximately 30, 000 individuals in the US.

[1932] HD is characterized by mutations of the huntingtin (HTT) protein with abnormal expansions of polyglutamine tracts, e.g. expansion of the length of glutamine residues encoded by CAG repeats. The expansion threshold for occurrence of the disease is considered to be approximately 35-40 residues. HD is also associated with beta sheet rich aggregates in striatal neurons formed by N-terminal region of HTT. The expansions and aggregates lead to gradual loss of neurons as HD progresses. Additionally, the cell death in HD is associated with death receptor 6 (DR6) which is known to induce apoptosis.

[1933] As of today, there is no therapy to cure, or prevent the progression of the disease. Drug therapies available are aimed at management of the symptoms. For example, FDA has approved tetrabenazine to be prescribed for prevention of chorea. Additionally, e.g. antipsychotic drugs may help to control delusions, hallucinations and violent outbursts. There remains a need for therapy affecting the underlying pathophysiology, such as antibody therapies targeting the HTT protein, DR6 protein, and/or other HD associated proteins.

[1934] In some embodiments, methods of the present disclosure may be used to treat subjects suffering from HD. In some cases, methods of the present disclosure may be used to treat subjects suspected of developing HD.

[1935] AAV particles and methods of using the AAV particles described in the present disclosure may be used to prevent, manage and/or treat HD. As a non-limiting example, the AAV particles of the present disclosure comprise a nucleic acid sequence encoding at least one of the sequences described in Table 7 (SEQ ID NO: 7755-7966).

### Amyotrophic Lateral Sclerosis

[1936] Amyotrophic Lateral Sclerosis (ALS), also known as Lou Gehrig's disease or classical motor neuron disease, is a rapidly progressive and fatal neurological disease. ALS is associated with cell degeneration and death of the upper and lower motor neurons, leading to enablement of muscle movement, weakening, wasting and loss of control over voluntary muscle movement. Early symptoms include muscle weakness of hands, legs and swallowing muscles, eventually progressing to inability to breathe due to diaphragm failure. According to Centers for Disease Control and Prevention (CDC), ALS affects an estimated 12, 000-15,000 individuals in the US. About 5-10% of cases are familial.

[1937] ALS, as other non-infectious neurodegenerative diseases, has been characterized by presence of misfolded proteins, including, but not limited to, tau, amyloid-beta (A beta), alpha-synuclein, HTT (huntingtin) or SOD (superoxide dismutase 1 protein), and myelin associated inhibitors and their receptors, (see, e.g., Krishnamurthy and Sigurdsson, 2011, N Biotechnol. 28(5):511-7, and Musaro, 2013, FEBS J; 280(17):4315-22, and references therein). Familial ALS has been associated with mutations of TAR DNA-binding protein 43 (TDP-43) and RNA-binding protein FUS/TLS. Some proteins have been identified to slow down progression of ALS, such as, but not limited, to growth factors, e.g. insulin-like growth factor 1 (IGF-1), glial cell line-derived growth factor, brain-derived growth factor, vascular endothelial growth factor and ciliary neurotrophic factor, or growth factors promoting muscle growth, e.g. myostatin.

[1938] As of today, there is no prevention or cure for ALS. FDA approved drug riluzole has been approved to prolong the life, but does not have an effect on symptoms. Additionally, drugs and medical devices are available to tolerate pain and attacks associated with ALS. There remains a need for therapy affecting the underlying pathophysiology.

[1939] In some embodiments, methods of the present disclosure may be used to treat subjects suffering from ALS. In some cases, methods of the present disclosure may be used to treat subjects suspected of developing ALS.

[1940] AAV particles and methods of using the AAV particles described in the present disclosure may be used to prevent, manage and/or treat MS. As a non-limiting example, the AAV particles of the present disclosure comprise a nucleic acid sequence encoding at least one of the sequences described in Table 7 (SEQ ID NO: 7755-7966).

[1941] As a non-limiting example, the AAV particles of the present disclosure comprise a nucleic acid sequence encoding at least one of the sequences described in Table 8 (SEQ ID NO: 7697-8026).

[1942] As a non-limiting example, the AAV particles of the present disclosure may include a nucleic acid sequence encoding at least one of the sequences described in Table 9 (SEQ ID NO: 8027-8076).

### Multiple Sclerosis

[1943] Multiple sclerosis is a disease of the central nervous system (CNS). The typical early symptoms occurring between the ages of 20 to 40 include blurring vision, red-green color distortion, partial blindness, extreme muscle weakness, feeling of numbness or prickling, difficulties with coordination and balance. In severe cases MS may lead to a partial or complete paralysis. MS is believed to be an autoimmune disease as the communication between the brain and other parts of the body being disrupted as the immune system causes an inflammation within the central nervous system. MS is caused by both genetic and environmental factors, e.g. viral infections. MS is the most common neurological condition of young adults globally, affecting more than 2.3 million individuals.

[1944] At present time, the pathophysiology of MS is not fully understood. The disease is associated with a complex combination related to formation of lesions in the central nervous system, inflammation and demyelination (destruction of the protective myelin surrounding the nerve fibers) in white matter and cortex, and axon destruction (see, e.g. Longbrake et al., 2013, Curr Neurol Neurosci Rep., 13(11), and references therein). A number of myelin inhibitory proteins have been characterized in association with MS, including, but not limited to, NogoA ((Neurite outgrowth inhibitor A), Nogo receptor-1 (NgR1), myelin associated glycoprotein (MAG), oligodendrocyte glycoprotein (OM-gp), LINGO-1 (Leucine rich repeat and immunoglobin-like domain-containing protein 1), and MAI (myelin associated inhibitor). MS is also affiliated with many immune response related proteins. Non-limiting examples of such proteins include e.g. B-cell and T-cell associated proteins, such as, but not limited to, leukocyte surface antigen CD52, alpha chain of the IL-2 receptor CD25, B-cell surface molecule CD20, T helper cell CD4, and/or cytokine IL2123. Alpha 4-integrin, has been associated with inflammation of CNS, as it has a role in leukocyte adhesion and migration to the inflamed CNS. Additionally, MS patients have been characterized with elevated tumor necrosis factor (TNF) levels.

[1945] As of today, there is no prevention therapy or cure for MS. Patients in need of medical therapy may be treated with e.g. synthetic form of myelin basic protein, (Copaxone, copolymer I), antiviral proteins known as interferons, or immunosuppressant drugs e.g. mitoxantore. Some drugs are aimed at treating a symptom of MS, such as dalapridine, which is aimed at improving walking of individuals with MS. Antibodies for MS have been developed. For example, natalizumab is a monoclonal antibody targeting alpha 4 integrin, (developed by Elan Pharmaceuticals and Biogen) approved by the FDA for treatment of relapsing MS under treatment guidelines to monitor patients by physicians. Other non-limiting examples for MS antibody drugs include alemtuzumab (CD52), daclizumab (CD25), rituximab (CD20), ocrelizumab (CD20), ofatumumab (CD20), (see, e.g. Longbrake et al., 2013, Curr Neurol Neurosci Rep., 13(11), and references therein). However, many current medications have serious side effects, and there remains a need for therapy affecting the underlying pathophysiology, such as improved antibody therapies.

[1946] In some embodiments, methods of the present disclosure may be used to treat subjects suffering from MS. In some cases, methods of the present disclosure may be used to treat subjects suspected of developing MS.

[1947] AAV particles and methods of using the AAV particles described in the present disclosure may be used to prevent, manage and/or treat MS. As a non-limiting example, the AAV particles of the present disclosure comprise a nucleic acid sequence encoding at least one of the sequences described in Table 7 (SEQ ID NO: 7755-7966).

### Multiple System Atrophy

[1948] Multiple system atrophy (MSA), also known as Shy-Drager Syndrome, is a progressive neurodegenerative disorder. The characteristic symptoms are associated with failure of autonomic nervous system causing dizziness, fainting, bladder control problems, and problems regulating heart rate, blood pressure and breathing, accompanied by motor control symptoms similar to Parkinson's disease, e.g. tremor, rigidity and loss of muscle coordination. The symptoms are a reflection of the loss of nerve cells in certain areas of the brain and spinal cord. The disease typically develops around ages of 50 or 60 years. MSA affects approximately 50,000 individuals in the US.

[1949] MSA belongs to the synucleinopathies and is characterized by the appearance of glial cytoplasmic inclusions (GCIs) in oligodendrocytes, which are the myelin producing support cells of the central nervous system (see, e.g. Bleasel et al. 2014, Acta Neuropathologica Communications, 2014, 2:15, and references therein). GCIs comprise insoluble proteinaceous filaments composed of the alpha-synuclein protein. Also, tau proteins have been identified in GCIs. The pathophysiology of the CGIs is not yet fully understood but alpha-synuclein and tau proteins are suggested to have a role in the development and progression of SMA.

[1950] As of today, there is no cure or prevention therapy for MSA. A variety of drug therapies available are aimed at managing the symptoms. Non-limiting examples of symptomatic medical treatments include those used for Parkinson's disease to relief symptoms related motor movement, increased salt intake and steroid hormones for increasing blood pressure. There remains a need for therapy affecting the underlying pathophysiology. Antibodies targeting tau and alpha-synuclein proteins may be used to prevent and/or treat MSA.

[1951] In some embodiments, methods of the present disclosure may be used to treat subjects suffering from MSA. In some cases, methods of the present disclosure may be used to treat subjects suspected of developing MSA.

[1952] AAV particles and methods of using the AAV particles described in the present disclosure may be used to prevent, manage and/or treat MSA. As a non-limiting example, the AAV particles of the present disclosure comprise a nucleic acid sequence encoding at least one of the sequences described in Table 7 (SEQ ID NO: 7755-7966).

### Spinal Muscular Atrophy

[1953] Spinal muscular atrophy (SMA) is a hereditary disease causing weakness and wasting of the voluntary muscles in the arms and legs of infants and children. SMA is associated with abnormalities in the protein production of the survival motor neuron gene 1 (SMN1). Lack of the protein affects degeneration and death of lower motor neurons. Typical symptoms include floppy limbs and trunk, feeble movement of the arms and legs, difficulties in swallowing and eating, and impaired breathing. SMA is the most common genetic disorder leading to death of children under 2 years of age. SMA affects one in 6,000 to 10,000 people.

[1954] As of today, there is no cure for SMA. Therapies available are aimed at management of the symptoms and prevention of additional complications. Such therapies are associated e.g. with cardiology, movement management, respiratory care and mental health. There remains a need for therapy affecting the underlying pathophysiology of SMA.

[1955] In some embodiments, methods of the present disclosure may be used to treat subjects suffering from SMA. In some cases, methods of the present disclosure may be used to treat subjects suspected of developing SMA.

[1956] AAV particles and methods of using the AAV particles described in the present disclosure may be used to prevent, manage and/or treat SMA. As a non-limiting example, the AAV particles of the present disclosure comprise a nucleic acid sequence encoding at least one of the sequences described in Table 7 (SEQ ID NO: 7755-7966).

### Neuropathies

[1957] Neuropathies are a group of diseases or conditions affecting the nerves. Typical symptoms of neuropathies include impaired movement and sensation, cramping, pain and abnormal organ functions. Neuropathies include e.g. diabetic neuropathy, cisplatin-induced neuropathy, mononeuropathy, pyridoxine-induced neuropathy, peripheral neuropathy, small fiber peripheral neuropathy, polyneuropathy and cisplatin/pyridoxine-induced neuropathy.

[1958] As of today, there is no prevention or treatment therapy specific for neuropathies on the market. Typical treatment involves with treatment of underlying diseases, e.g. diabetes, or management of the symptoms. Therefore, there remains a need for therapy affecting the underlying pathophysiology of neuropathies, such as efficient antibody therapies. Tyrosine kinases, such as Trk receptors, have a role in regulation of the nervous system, neuronal survival and signal cascades. Antibodies targeting e.g. Trk C may be used for prevention, treatment and/or management of neuropathies, as described in US Patent U.S. Pat. No. 7,615,383, the contents of which are herein incorporated by reference in their entirety.

[1959] In some embodiments, methods of the present disclosure may be used to treat subjects suffering from neuropathies. In some cases, methods of the present disclosure may be used to treat subjects suspected of developing neuropathies.

[1960] AAV particles and methods of using the AAV particles described in the present disclosure may be used to prevent, manage and/or treat neuropathies. As a non-limiting example, the AAV particles of the present disclosure comprise a nucleic acid sequence encoding at least one of the sequences described in Table 7 (SEQ ID NO: 7755-7966) and/or Table 11 (SEQ ID NO: 13165-13518).

### Psychiatric Disorders

[1961] Psychiatric disorders are characterized by behavioral or mental condition that affects individual's ordinary ability to function. Common psychiatric disorders include, but are not limited to, Tourette syndrome, bipolar disorder, schizophrenia, anxiety, depression, panic disorder, obsessive-compulsive disorder (OCD), eating disorders (e.g. anorexia, bulimia, orthorexia, obesity), substance abuse (e.g. alcohol or drug), addiction, psychosis, phobias, mood disorders, manic-depression disorder, insomnia and other sleep disorders. Psychiatric disorders may significantly affect individual's quality of life, and in severe cases lead to harmful behavior, such as suicidal or homicidal behavior. The diseases are typically managed and treated with psychotherapy, behavioral therapy, medical therapy (e.g. antipsychotic drugs), and/or other therapies. There remains a need for improved medical therapies affecting the underlying pathophysiology of psychiatric disorders, such as antibodies targeting proteins associated with such disorders.

[1962] For example, ghrelin hormone has been associated with eating disorders, including obesity and anorexia. Antibodies targeting ghrelin may be used for prevention, management and/or treatment of eating disorders, e.g. as described in US Patent application US20060233788, the contents of which are herein incorporated by reference in their entirety.

[1963] Depression has been associated with an inhibition of peripheral cytokine activity, especially TNFa (tumor necrosis factor alpha). Antibodies targeting TNF alpha may be used for prevention, management and/or treatment of depression, e.g. as described in US Patent application US20140296493, the contents of which are herein incorporated by reference in their entirety.

[1964] OCD and OCD related diseases have been associated T-cell activation. Anx-A1 (annexin A1) is a protein promoting T-cell activation, and antibodies binding Annexin-1 may be used for prevention, management and/or treatment of OCD and related diseases, e.g. as described in US Patent application US20150004164, the contents of which are herein incorporated by reference in their entirety.

[1965] In some embodiments, methods of the present disclosure may be used to treat subjects suffering from a psychiatric disorder. In some cases, methods of the present disclosure may be used to treat subjects suspected of developing a psychiatric disorder.

[1966] AAV particles and methods of using the AAV particles described in the present disclosure may be used to prevent, manage and/or treat psychiatric disorder. As a non-limiting example, the AAV particles of the present disclosure comprise a nucleic acid sequence encoding at least one of the sequences described in Table 7 (SEQ ID NO: 7755-7966).

### Migraine

[1967] Migraine is a neurological condition characterized by reoccurring attacks of severe headache, accompanied by nausea, light visions, and sensitivity to light, sound and movement. Migraine attacks may last from hours to days. The cause of migraine is unknown, but it is associated with some underlying diseases, as well as environmental and genetic factors. Migraine affects about 12% of population in the US.

[1968] Present methods for management and treatment of migraine include medical therapies (e.g. analgesics, triptans, ergotamines), surgery, and neurostimulation. As of today, there is no therapy to prevent or cure migraine, and a need for medical therapy focusing on the pathophysiology of migraine remains. CGRP (calcitonin gene-related peptide) vasodilatation has been associated with migraine and photophobia, which is a typical symptom of a migraine attach. Antibodies targeting CGRP may be used for treatment and/or management of migraine, e.g. as described in US Patents U.S. Pat. Nos. 9,115,194, and 9,102,731, and US Patent application US20120294802, the contents of which are herein incorporated by reference in their entirety.

[1969] In some embodiments, methods of the present disclosure may be used to treat subjects suffering from migraine. In some cases, methods of the present disclosure may be used to treat subjects suspected of developing migraine.

[1970] AAV particles and methods of using the AAV particles described in the present disclosure may be used to prevent, manage and/or treat migraine. As a non-limiting example, the AAV particles of the present disclosure comprise a nucleic acid sequence encoding at least one of the sequences described in Table 12 (SEQ ID NO: 8175-8716).

### Pain

[1971] Pain is a complex symptom associated with a variety of diseases and disorders and may be acute or chronic. Pain is challenging to treat, and many anti-pain medications have side effects, and/or they can be addictive. There remains a need for pain medications affecting the underlying pathophysiology of a pain. Antibodies for treatment for pain are on the market. For example, fasinumab (developed by Regeneron Pharmaceuticals Inc.), Fulranumab (developed by Johnson & Johnson) and tanezumab (developed by Pfizer) are antibodies against NGF (nerve growth factor) for treatment of pain, such as, osteoarthritis knee pain, chronic low back pain, bone cancer pain and/or pain associated with interstitial cystitis.

[1972] In some embodiments, methods of the present disclosure may be used to treat subjects suffering from pain. In some cases, methods of the present disclosure may be used to treat subjects suspected of developing pain.

[1973] AAV particles and methods of using the AAV particles described in the present disclosure may be used to prevent, manage and/or treat pain. As a non-limiting example, the AAV particles of the present disclosure comprise a nucleic acid sequence encoding at least one of the sequences described in Table 13 (SEQ ID NO: 8717-10586).

### Ocular Diseases

[1974] Eye is an organ comprising a number of components, including the cornea, aqueous humor, lens, vitreous humor, retina, the retinal pigment epithelium, and choroid. Ocular diseases are conditions affecting the different tissues of the eye. A number of diseases and disorders affect the different components of the eye, and may cause impaired vision, full or partial blindness, irritation, dryness, sensitivity, photophobia, and/or light aversion.

[1975] Complement in the eye has an important role in protecting the eye from infections and in modulation of the immune and inflammatory responses. In normal eye, the complement activity is at low level and is regulated by membrane bound and soluble intraocular complement regulatory proteins. Disturbance of the balance between complement activation and complement inhibition may lead to damage to self-tissue (see, e.gg, Jha et al., 2007, Mol Immunol.; 44(16): 3901-3908, and references therein). The complement system may be activated in three pathways. The classical pathway is activated by immune complexes or substances and involves e.g. complement components C1, C2, C3, C4, C3a, C5, C5a, C5b, C6, C7, C8, C9 and C5b-9. The alternative pathway activates complement component C3 when in interaction with e.g. zymosan, or lipopolysaccharide surfaces, additionally involving, e.g. Factor B, Factor Ba, Factor Bb, Factor D, and Factor P. The third activation pathway is the lectin pathway, and is related to interaction of certain serum lectins, e.g. mannose binding lectin (MBL), mannose and N-acetyl glucosamine residues present in bacterial cell walls. Complement activation is associated with a number of ocular diseases, such as, but not related, age-related macular degeneration (AMD), diabetic retinopathy, choroidal neovascularization (CNV), uveitis, diabetic macular edema, pathological myopia, von Hippel-Lindau disease, histoplasmosis of the eye, Central Retinal Vein Occlusion (CRVO), corneal neovascularization, and retinal neovascularization, choroidal neovascularization, and other ocular conditions involving complement activation. Antibodies targeting the associated complement components may be used to diagnose, manage and/or treat such ocular diseases.

[1976] Age-related macular degeneration (AMD) is a major cause of irreversible loss of central vision in the elderly worldwide. AMD leads to gradually worsening vision. AMD does not result in blindness, but may affect daily life. Wet AMD is caused by abnormal blood vessels behind the retina grow under the macula and leak blood and fluid that damage the macula. Wet AMD may be treated with laser coagulation and medication to reverse or stop the growth of blood vessels. Dry AMD is caused by break down of the light sensitive cells in the macula. As of today, there is no treatment for dry AMD.

[1977] There remains a need for prevention, management and treatment therapies for wet and dry AMD. AMD is associated with complement components, as described above. In addition, AMD is associated with proteins such as, but not limited to, VEGF (Vascular endothelial growth factor), EPO (Erythropoietin), EPOR (EPO receptor), Interleukins IL-10, IL-17A, 11-10, TNFa (tumor necrosis factor alpha), or FGFR2 (Fibroblast Growth Factor Receptor). Antibodies targeting the AMD associated complement and growth proteins may be used to treat AMD. For example, bevacizumab and ranibizumab (developed by Genentech Inc.) are antibodies targeting VEGF-A to slow down growth of new blood vessels.

[1978] Corneal diseases affect the cornea and the conjunctiva. Cornea and conjunctiva form the outer surface of the eye, which is exposed to external environment, and are susceptible to infection agents, trauma, and/or exposure to chemicals, toxins, allergens etc. Cornea is also affected by autoimmune conditions, nutritional deficiencies and cancer. Corneal diseases may cause e.g. loss of vision, blurred vision, tearing, light sensitivity and pain. Diseases affecting cornea include, but are not limited to, keratitis, corneal dystrophy, corneal degeneration, Fuchs' dystrophy, cancer of cornea, and keratoconjuctivitis. Though surgical and medical treatment therapies for corneal diseases exist, in some cases, the diseases still remain severe and may cause blindness. There remains a need to efficient therapies for prevention, management and treatment of corneal diseases. Complement components of the cornea and the conjunctiva present in a normal eye include, but are not limited to, C1, C2, C3, C4, C5, C6, C7, Factor P (properdin) and factor B. Complement may have a role in corneal diseases, and antibodies targeting complement components of the eye may be used for prevention, treatment and/or management of corneal diseases.

[1979] Uveitis is an inflammation of the uvea, comprising the iris, choroids, and ciliary body. Early symptoms include eye redness, pain, irritation and blurred vision. Uveitis may lead to transient or permanent loss of vision. Uveitis may be associated with other diseases and conditions, such as infections, systemic diseases, non-infectious and autoimmune diseases. Complement components associated with an autoimmune form of uveitis include C3b and C4b. Uveitis may be managed or treated with vitrectomy, immunosuppressive drugs, corticosteroids or cytotoxic medication. However, despite the existing therapies, autoimmune uveitis is a serious condition and may lead to full or partial blindness. There remains a need for therapies for prevention, management, and treatment of uveitis targeting pathophysiology of the disease.

[1980] Retinopathy is a disease resulting from neovascularization (excessive growth of blood vessels) in the light-sensitive tissue of the eye, retina. Retinopathy may result in impaired vision or partial or full blindness. Retinopathy may be caused by systemic diseases, e.g. diabetes, or hypertension, trauma, excessive sun light exposure or ionizing radiation. Retinopathy is often treated with laser therapy. Medical treatments, such as antibodies, to control the growth of blood vessels, are also applied. However, despite the existing treatment methods, retinopathy is still a severe condition and may lead to blindness. Diabetic retinopathy is one of the leading causes of vision loss in middle-aged individuals. There remains a need for new therapies for prevention, management and/or treatment of retinopathy. For example, antibodies targeting blood vessel growth (e.g. vascular endothelial growth factor (VEGF), complement components (e.g. C3, C4, C1q, C9, C4b), and cluster of differentiation proteins (e.g. CD55, CD59) may be used for prevention, management and/or treatment of different retinopathies.

[1981] Photophobia is a condition referring to abnormal sensitivity or aversion to light. Photophobia is related to a number of ocular and nervous system diseases and disorders. Photophobia may be caused by damage to cornea or retina, albinism, overstimulation of the photoreceptors, excessive electric pulses to the central nervous system, or optic nerve. Photophobia may be associated with migraine, nervous system disorders (e.g. autism, dyslexia, encephalitis), infections (e.g. rabies, Lyme disease, mononucleosis), eye disorders (e.g. uveitis, corneal diseases, retinal diseases, scarring or trauma to cornea). As of today, there is no medical treatment for photophobia on the market. Photophobia is associated with calcitonin gene related peptide (CGRP) and CGRP receptors, and antibodies targeting CGRP may be used to prevent and/or treat photophobia, as described in US Patent application US20120294802, the contents of which are herein incorporated by their reference.

[1982] In some embodiments, methods of the present disclosure may be used to treat subjects suffering from ocular diseases. In some cases, methods of the present disclosure may be used to treat subjects suspected of developing ocular diseases.

[1983] AAV particles and methods of using the AAV particles described in the present disclosure may be used to prevent, manage and/or treat psychiatric disorder. As a non-limiting example, the AAV particles of the present disclosure comprise a nucleic acid sequence encoding at least one of the sequences described herein.

[1984] As a non-limiting example, the AAV particles of the present disclosure comprise a nucleic acid sequence encoding at least one of the sequences described in Table 14 (SEQ ID NO: 10587-10682).

### Other Therapeutic Targets

[1985] The AAV particles or pharmaceutical compositions of the present disclosure useful in preventing or treating tauopathies or tau-associated diseases may alternatively, or in combination, encode an antibody that does not bind to the tau protein (e.g., the antigen is a polypeptide other than tau). Non-limiting examples of other target antigens include any of the following, including fragments or variants thereof, α-synuclein (monomers, oligomers, aggregates, fragments), ABCA1 (ATP-binding cassette, sub-family A, member 1), ABCA4 (ATP-binding cassette, sub-family A, member 4), ABCB1 (ATP-binding cassette, sub-family B, member 1), ACE (angiotensin I converting enzyme), ACKR1 (atypical chemokine receptor 1 (Duffy blood group)), AMPA (DL-α-amino-3-hydroxy-5-methyl-4-isoxazole propionic acid), ACTH (Adrenocorticotropic Hormone), ACVR2A (Activin receptor type-2A), ACVR2B (Activin receptor type-2B), ADDL (Adducin-Like Protein 70), ADORA2A (adenosine A2a receptor), ADRA2A (adrenoceptor alpha 2A), AIFM1 (apoptosis-inducing factor), AKT1 (RAC-alpha serine/threonine-protein kinase), ALK-1 (activin receptor-like kinase 1), Alpha beta fibril, alpha subunit (basic helix-loop-helix transcription factor), AMT (Aminomethyltransferase), Amyloid β (monomers, oligomers, aggregates, fragments), amyloid or amyloid-like proteins, ANGPTL3 (Angiopoletin-Like 3), ANGTP1 (angiopoitin 1), ANGTP2 (angiopoletin 2), ANK3 (ankyrin 3), ANKG (ankyrin G), Annexin IV, phospholipid, Anx-A1 (annexin A1), APOE (apolipoprotein E), APP (amyloid beta precursor protein), ARSD (Arylsulfatase D), ATM (Ataxia Telangiectasia Mutated serine/threonine kinase), ATXN1 (ataxin 1), ATXN2 (ataxin 2), ATXN3 (ataxin 3), ATXN7 (ataxin 7), B Lymphocyte Stimulator, BDNF (brain-derived neurotrophic factor), beta A4 peptide/Alpha beta 4, beta A4 peptide, Alpha beta 5, bAlpha beta 6, Alpha beta 7, Alpha beta 8, Alpha beta 9, Beta-secretases (BACE), BRAF (B-Raf Proto-Oncogene, Serine/Threonine Kinase), Properdin (factor P), Factors Ba and Bb, C1, C1q (complement component 1, subcomponent q), C2, C3, C4, C3a, C3b, C5, C5a, C5b, C6, C7, CB, C9 and C5b-9 (complement components), CAIX (Carbonic anhydrase IX), CA 125 (cancer antigen 125), CACNA1A (calcium channel voltage-dependent P/Q type alpha 1A subunit), cadherins, CA-IX (carbonic anhydrase 9), CALCA (calcitonin-related polypeptide alpha), CCKBR (cholecystokinin B receptor), CCL11 (eotaxin-1), CCL2 (Chemokine (C-C Motif) Ligand 2), CD11 (integrin alpha component), CD147 (basigin), CD154 (CD40L), CD19 (Cluster of Differentiation 19), CD2 (cluster of differentiation 2), CD20 (B-lymphocyte antigen), CD200 (cluster of differentiation 200), CD22 (cluster of differentiation 22), CD221 (insulin-like growth factor 1 (IGF-1) receptor), CD248 (Endosialin), CD26 (Dipeptidyl peptidase-4), CD27 (antigen precursor), CD274 (cluster of differentiation 274), CD28 (Cluster of Differentiation 28), CD29 (Integrin, Beta 1), CD3 (cluster of differentiation 3), CD30 (cluster of differentiation 30), CD31 (cluster of differentiation 31), CD33 (cluster of differentiation 33), CD37 (Leukocyte antigen), CD38 (cyclic ADP ribose hydrolase), CD3E (T-Cell Surface Antigen T3/Leu-4 Epsilon Chain), CD4 (T-Cell Surface Antigen T4/Leu. 3), CD40 (CD40 Molecule, TNF Receptor Superfamily Member 5), CD41 (Integrin, Alpha 2b (Platelet Glycoprotein IIb Of IIb/IIIa Complex, Antigen CD41)), CD44 (cluster of differentiation 44), CD51 (integrin alpha 1), CD52 (Human Epididymis-Specific Protein 5), CD55 (Decay Accelerating Factor For Complement (Cromer Blood Group)), CD58 (lymphocyte function-associated antigen 3), CD59 (MAC-inhibitory protein), CD6 (cluster of differentiation 6), CD70 (cluster of differentiation 70, ligand for CD27), CD74 (HLA class II histocompatibility antigen gamma chain), CD79B (immunoglobulin-associated beta), CEA (Carcinoembryonic antigen), CFHR1 (Complement Factor H-Related 1), CGRP (Calcitonin gene-related peptide), CHMP2B (charged multivesicular body protein 2B), CHRNA4 (cholinergic receptor nicotinic alpha 4 (neuronal)), CHRNB2 (cholinergic receptor nicotinic beta 2 (neuronal)), CISD2 (CDGSH iron sulfur domain 2), CLEC16A (C-type lectin domain family 16 member A), CLRN1 (clarin 1), CNR1 (cannabinoid receptor 1), CNTNAP2 (contactin associated protein-like 2), COMT (catechol-O-methyltransferase), CRB1 (crumbs family member 1, photoreceptor morphogenesis associated), CRX (cone-rod homeobox), CRY (crystallin), CSF1R (Colony Stimulating Factor 1 Receptor), CSF2 (Colony Stimulating Factor 2 (Granulocyte-Macrophage)), CSF2RA (Colony Stimulating Factor 2 Receptor, Alpha, Low-Affinity), CTGF (Connective Tissue Growth Factor), CTLA4 (Cytotoxic T-Lymphocyte-Associated Protein 4), CXC (chemokine receptor type 4), CXCL10 (Chemokine (C-X-C Motif) Ligand 10), DDC (dopa decarboxylase (aromatic L-amino acid decarboxylase)), DIABLO (IAP-Binding Mitochondrial Protein), differentiation factor 8 (GDF8), DISC1 (disrupted in schizophrenia 1), DLL3 (Delta-Like 3 (Drosophila)), DLL4 (Delta-Like 4 (Drosophila)), DPP4 (dipeptyl-peptidase 4), DPP6 (dipeptidyl-peptidase 6), DR6 (Death receptor 6), DRD1 (dopamine receptor D1), DRD2 (dopamine receptor D2), DRD4 (dopamine receptor D4), DRD5 (dopamine receptor 5), DRD5 (dopamine receptor D5), DTNBP1 (dystrobrevin binding protein 1), EAG1 (Ether-A-Go-Go Potassium Channel 1), EDB (fibronectin extra domain-B), EDNRA (endothelin receptor type A), EFNA1 (Ephrin-A1), EGFL7 (EGF-Like-Domain, Multiple 7), EGFR/ERBB1/HER1 (epidermal growth factor receptor 1), EN2 (Engrailed Homeobox 2), EPCAM (Epithelial cell adhesion molecule), EPHA3 (EPH Receptor A3), episialin (a carcinoma-associated mucin, MUC-1), ERBB2 (epidermal growth factor receptor 2), ERBB3 (epidermal growth factor receptor 3), ESR1 (estrogen receptor 1), F3 (coagulation factor Ill), F9 (human factor 9), F10 (human factor 10), FAAH (fatty acid amide hydrolase), Factor D C3 proactivator convertase), humanized IgG1, humanized IgG2, FAP (Fibroblast Activation Protein, Alpha), FBN2 (fibrillin 2), FBP (Folate-binding protein), FcγRIIB (Fc receptor gamma B), FcγRIIIA (Fc receptor gamma A), FLT1 (Fms-Related Tyrosine Kinase 1), FOLR1 (folate receptor alpha), Frizzled receptor, FXN (frataxin), FUS/TLS (RNA binding protein), G protein-coupled, GAA (glucosidase alpha acid), Gc-globulin (Vitamin D binding protein), Gangliosides, GD2 (ganglioside G2), GD3 (ganglioside g3), GM2 (monosialotetrahexosylganglioside 2) (GDF-8 (myostatin), GDNF (glial cell derived neurotrophic factor), GDNF (glial cell derived neurotrophic factor), GFAP (glial fibrillary acidic protein), GFRα3 (GDNF family receptor alpha-3), ghrelin, GIT1 (G protein-coupled receptor kinase interacting ArfGAP 1), GJA (Gap junction protein), GLDC Glycine Dehydrogenase (Decarboxylating), glycoprotein NMB (GPNMB), gpA33 (Glycoprotein A33 (Transmembrane)), GPC3 (glypican 3), GRIN2B (glutamate receptor ionotropic N-methyl D-aspartate 2B), GRN (granulin), GDF8 (growth differentiation factor 8), GTPases (guanosine triphosphate), GSTP1 (glutathione S-transferase pi 1), GUCA1A (guanylate cyclase activator 1A (retina), GUCY2C (anti-GCC), HMCN1 (hemicentin 1), HGF (Hepatocyte Growth Factor), HIF1A (hypoxia inducible factor 1, HINT1 (histidine triad nucleotide binding protein 1), HIST3H3 (Histone H3), histone, HLA-DQB1 (major histocompatibility complex class II DQ beta 1), HLA-DR (MHC class II cell surface receptor), HLA-DRB1 (major histocompatibility complex class II DR beta 1), hNav1.7 (sodium ion channel), HTR1A (5-hydroxytryptamine (serotonin) receptor 1A G protein-coupled), HTR2A (5-hydroxytryptamine (serotonin) receptor 2A, HTR2A (5-hydroxytryptamine (serotonin) receptor 2A G protein-coupled), HTT (huntingtin), IAP-binding mitochondrial protein, IFNAR1 (Interferon (Alpha, Beta And Omega) Receptor 1), IFNB1 (interferon beta 1 fibroblast), IFN-γ (Interferon gamma), IGF-1 receptor, IGF1R (insulin-like growth factor 1 receptor), IGF-1 (insulin-like growth factor 1), IGG1 (immunoglobulin subclass 1), IgG2 (immunoglobulin subclass 2), IgG4 (immunoglobulin subclass 4), IGHE (Immunoglobulin Heavy Constant Epsilon), IL 1B (interleukin 1 beta), IL12 (interleukin 12), IL12B (interleukin 12B), IL13 (interleukin 13), IL17A (interleukin 17A), IL17F (interleukin 17F), ILIA (interleukin 1A), IL1B (interleukin 1 beta), IL1-Ri (Interleukin 1 receptor, type 1), IL20 (Interleukin 20), IL23A (interleukin 23A), IL-23p19 subunit (interleukin 23 subunit p19), IL2RA (interleukin 2 receptor alpha), IL4R (interleukin 4 receptor alpha, IL6 (interleukin 6), IL6R (interleukin 6 receptor), IL7R (interleukin 7 receptor), ILGF2 (insulin like growth factor 2), INS (insulin), Integrin α5β1, Integrin αVβ3, integrin αIIbβ3/GPIIb/IIIa, IP6K2 (inositol hexakisphosphate kinase 2), ITGA4 (Integrin, Alpha 4 (Antigen CD49D, Alpha 4 Subunit Of VLA-4 Receptor)), ITGB7 (integrin, Alpha 7 (Antigen CD49D, Alpha 4 Subunit Of VLA-7 Receptor)), ITGAL (integrin alpha L chain), ITGAV ((Vitronectin Receptor, Alpha Polypeptide, Antigen CD51), ITGB3 (Integrin alpha-V/beta-3), KCNQ2 (potassium channel voltage gated KQT-like subfamily Q member 2), KDR (Kinase Insert Domain Receptor), KIR2D (killer immunoglobulin-like receptor (KIR) 2D subtype), KLRC1 (Killer Cell Lectin-Like Receptor Subfamily C, Member 1), LAG-3 (Lymphocyte-activation gene 3), Le (y) (Lewis y) antigen, LINGO (Leucine rich repeat and immunoglobin-like domain-containing protein 1), LOXL2 (Lysyl oxidase homolog 2), LPG (lysophosphatidylglucoside), LPS (Lipopolysaccharides), LRP1 (low density lipoprotein receptor-related protein 1), LRRC6 (Leucine Rich Repeat Containing 6), LRRK2 (leucine-rich repeat kinase 2), LTA (Lymphotoxin Alpha), MAF (maf avian musculoaponeurotic fibrosarcoma oncogene homolog), MAG (Myelin Associated Glycoprotein), MAI (myelin associated inhibitor), MAO8 (monoamine oxidase 8), MAPT (microtubule-associated protein tau), MBP (myelin basic protein), MCAF (rmonocyte chemotactic and activating factor), MCP-1 (Monocyte chemoattractant protein-1), MBL (mannose binding lectin), mannose, MET (Tyrosine-Protein Kinase Met), MIF (Macrophage Migration Inhibitory Factor (Glycosylation-inhibiting Factor), MS4A1 (Membrane. Spanning 4-Domains, Subfamily A, Member 1), MSLN (Mesothelin), MST1R (Macrophage Stimulating 1 Receptor), MSTN (myostatin), MUC1/Episialin, MUC5AC (Mucin 5AC, Oligomeric Mucus/Gel-Forming), mucin CanAg (glycoform MUC-1), Mucins, myostatin, myostatin antagonists, N-acetyl glucosamine, NCAM1 (Neural Cell Adhesion Molecule 1), Neu5Gc/NGNA (Neurogenin A), neuregulin (NRG), neurokinin B, NGF (Nerve growth factor), NMDA (N-methyl-D-aspartate), NOGO (Neurite outgrowth inhibitor), NOGO receptor-1, Nogo-66, NOGOA/NiG (Neurite Outgrowth Inhibitory Fragments of NOGOA), Notch receptor, NOTCH-1 (Notch homolog 1, translocation-associated (Drosophila)), NRG1 (neuregulin 1), NRP1 (Neuropilin 1), NT-3 trkC ligand, N-terminal region of A08-x peptide, OGG1 (8-oxoguanine DNA glycosylase), oligomers of N-terminal truncated Aβ, OPA2 (Optic Atrophy 2), OPA3 (Optic Atrophy 3), oxLDL (Oxidized low-density lipoprotein), P75 (Low-affinity Nerve Growth Factor Receptor), PAND1 9Panic disorder 1), PAND2 (Panic disorder 2), PAND39Panic disorder 3), PARK2 (parkin RBR E3 ubiquitin protein ligase), PCSK9 (proprotein convertase subtilisin/kexin type 9), PD-1 (Programmed cell death protein 1), PD-2 (Programmed cell death protein 2), PD-3 (Programmed cell death protein 3), PD-4 (Programmed cell death protein 4), PD-5 (Programmed cell death protein 5), PD-6 (Programmed cell death protein 6), PD-7 (Programmed cell death protein 7), PD-8 (Programmed cell death protein 8), PDGFRA (Platelet-derived growth factor receptor alpha), PDGFRB (Platelet-derived growth factor receptor beta), PD-L1 (Programmed cell death protein 1 ligand), PEX7 ((Peroxisomal Biogenesis Factor 7), PHOBS (phobia specific), PhosphatidyL-serine, chimeric IgG1, Phosphatide L-serine, Chimeric IgG2, PINK1 (PTEN induced putative kinase 1), platelet-derived growth factor receptor beta PDGFRB, PLAU (plasminogen activator urokinase), PLP (protelopid protein), PMP22 (peripheral myelin protein 22), POLG (polymerase (DNA directed) gamma), PRDM16 (PR domain containing 16), Prion proteins, PrP, PrPC, PrPSc, PRKCG (protein kinase C gamma), PSEN1 (presenilin 1), PSEN2 (presenilin 2), PSMA (Prostate-specific membrane antigen), PTGS2 (prostaglandin-endoperoxide synthase 2 (prostaglandin G/H synthase and cyclooxygenase)), PTPN11 (Tyrosine-protein phosphatase non-receptor type 11), PVRL4 (Poliovirus Receptor-Related 4), PVRL5 (Poliovirus Receptor-Related 5), pyroglutamated A β, RAf1 (proto-oncogene serine/threonine-protein kinase), RAGE protein, RANKL (Receptor activator of nuclear factor kappa-B ligand), RCAN1 (regulator of calcineurin 1), RDh12 (retinol dehydrogenase 12 (all-trans/9-cis/11-cis), RGM A (Repulsive guidance molecule A), RHD (Rh blood group, D antigen), RHO (rhodopsin), RPE65 (retinal pigment epithelium-specific protein 65 kDa), RTN4 (Reticulon-4, NOGO), S100B (calcium-binding protein B), S1P4 (Type 4 sphingosine I-phosphate G protein-coupled receptor), SCN1A (Sodium Channel, Voltage Gated, Type I Alpha Subunit), SDC1 (Syndecan 1), selectin P, SHANK3 (SH3 And Multiple Ankyrin Repeat Domains 3), SLAMF7 (SLAM Family Member 7), SLC18A2 (solute carrier family 18 (vesicular monoamine transporter, member 2), SLC1A2 (solute carrier family 1 (glial high affinity glutamate transporter, member 2), SLC34A2 (Solute Carrier Family 34 (Type II Sodium/Phosphate Cotransporter), SLC6A3 (solute carrier family 6 (neurotransmitter transporter) member 3), SLC6A4 (Solute Carrier Family 6 (Neurotransmitter Transporter), SMN1 (survival of motor neuron 1 telomeric), SMN2 (survival of motor neuron 2 centromeric), SNCA (synuclein alpha (non A4 component of amyloid precursor)), SNCA (synuclein alpha (non A4 component of amyloid precursor), SNCB (synuclein beta), SOD1 (superoxide dismutase 1 soluble), SOST (Sclerostin), sphingosine-1-phosphate, SQSTM1 (sequestosome 1), STEAP1 (Six Transmembrane Epithelial Antigen Of The Prostate 1), SULF2 (Sulfatase 2), TACR1 (tachykinin receptor 1), TAG-72 (Tumor-associated glycoprotein 72), TARDBP (TAR DNA binding protein), tau antigen, tau protein, tau pS422, TDP-43, tenascin, tenascin C, TFPI (Tissue Factor Pathway Inhibitor (Lipoprotein-Associated Coagulation Inhibitor)), TGF beta (Transforming growth factor beta), TH (Tyrosine hydroxylase), TkrC (Tropomyosin receptor kinase C), TMEFF2 (Transmembrane Protein With EGF-Like And Two Follistatin-Like Domains 2), TMEFF3 (Transmembrane Protein With EGF-Like And Two Follistatin-Like Domains 3), TNF (tumor necrosis factor), TNFa (tumor necrosis factor alpha), TNFRSF10B (Tumor Necrosis Factor Receptor Superfamily, Member 10b), TNFRSF12A (Tumor Necrosis Factor Receptor Superfamily, Member 12A), TNFRSF8 (Tumor Necrosis Factor Receptor Superfamily, Member 8), TNFRSF9 (Tumor Necrosis Factor Receptor Superfamily, Member 9), TNFSF11 (Tumor Necrosis Factor Receptor Superfamily, Member 11), TNFSF13B (Tumor Necrosis Factor Receptor Superfamily, Member 13b), TNF-α (Tumor Necrosis Factor alpha), TNNT2 (troponin T type 2), TOR1A (torsin family 1 member A (torsin A)), TPBG (Trophoblast Glycoprotein), TPH2 (tryptophan hydroxylase 2), TRAILR1 (Death receptor 4), TRAILR2 (Death receptor 5), TrkA (Tropomyosin receptor kinase A), TRPV4 (Transient Receptor Potential Cation Channel, Subfamily V, Member 4), TSC2 (tuberous sclerosis 2), TULP1 (tubby like protein 1), tumor necrosis factor related protein 5, tumor specific glycosylation of MUC1, tumor-associated calcium signal transducer 2, tumor protein p53, TYRP1 (glycoprotein 75), UCHI1 (ubiquitin carboxyl-terminal esterase L1 (ubiquitin thiolesterase), UNC-13A (unc-13 homolog A), USH1C (Usher Syndrome 1C), USH2A (Usher Syndrome 2A (Autosomal Recessive, Mild), VEGF (Vascular endothelial growth factor), VEGF A (Vascular endothelial growth factor A), C5, Factor P, Factor D, EPO (Erythropoletin), EPOR (EPO receptor), Interleukins, IL-1β, IL-17A, 11-10, TNFα, FGFR2 (Fibroblast Growth Factor Receptor 2), VEGFR (vascular endothelial growth factor receptor), VEGFR2 (vascular endothelial growth factor receptor 2), vimentin, voltage gated ion channels, VWF (Von Willebrand Factor), WFS1 (Wolfram syndrome 1 (wolframin)), YES1 (Yamaguchi Sarcoma Viral Oncogene Homolog 1).

[1986] In some embodiments, the AAV particle of the present disclosure, useful in treating a non-infectious disease, targets an antigen considered to be useful in the treatment of a different disease. As a non-limiting example, an AAV particle or pharmaceutical composition thereof used for the treatment of cancer, immune system dysfunctions or inflammatory disease may likewise be used for the treatment of a neurodegenerative disorder such as, but not limited to, AD, PD, HD, ALS, SMA, or DLB.

Multiple Specific Diseases and/or Targets

[1987] In some embodiments, methods of the present disclosure may be used to treat subjects suffering from a disease, disorder, and/or condition that may be associated with one or multiple disease-related epitopes and/or targets. In certain embodiments, the AAV particle of the present disclosure targets one or more antigens considered to be useful in the treatment of such a disease. As a non-limiting example, an AAV particle or pharmaceutical composition thereof used for the treatment of one or multiple diseases may be associated with one or multiple disease-related epitopes and/or targets that may comprise antibodies that are multispecific. In some cases, methods of the present disclosure may be used to treat subjects suspected of developing a disease associated with multiple disease-related epitopes and/or targets.

[1988] AAV particles and methods of using the AAV particles described in the present disclosure may be used to prevent, manage, and/or treat disease associated with multiple disease-related epitopes and/or targets. As a non-limiting example, the AAV particles of the present disclosure comprise a nucleic acid sequence encoding at least one of the sequences described in Table 16 (SEQ ID NO: 10764-10916).

[1989] As a non-limiting example, the AAV particles of the present disclosure comprise a nucleic acid sequence encoding at least one of the sequences described in Table 15 (SEQ ID NO: 10683-10763).

### Diagnostic Applications

[1990] The AAV particles of the present disclosure may be used for diagnostic purposes or as diagnostic tools for any of the aforementioned diseases or disorders. As a non-limiting example, the AAV particles of the present disclosure or the antibodies encoded within the viral genome therein may be used as a biomarker for disease diagnosis. As a second non-limiting example, the AAV particles of the present disclosure or the antibodies encoded within the viral genome therein may be used for diagnostic imaging purposes, e.g., MRI, PET, CT or ultrasound.

### Preventative Applications

[1991] The AAV particles of the present disclosure or the antibodies encoded by the viral genome therein may be used to prevent disease or stabilize the progression of disease. In some embodiments, the AAV particles of the present disclosure are used as a prophylactic to prevent a disease or disorder in the future. In some embodiments, the AAV particles of the present disclosure are used to halt further progression of a disease or disorder. As a non-limiting example, the AAV particles of the disclosure may be used as, and/or in a manner similar to that of a vaccine. As a non-limiting example of the payload of the present disclosure may encode Influenza associated antibodies such as, but not limited to SD36, SD38, SD83, and SD84 and/or sdAbs SD38.SD36, MD2407 and MD3606 as described by Laursen et al. Science 2018:Vol. 362, Issue 6414, pp. 598.602 for preventing and/or stabilizing the progression of Influenza.

[1992] The AAV particles of the present disclosure and/or the antibodies encoded by the viral genome therein may be used as a contraceptive. As used herein, the term, “contraceptive” may be defined as any agent or method that may be used to prevent pregnancy. In some embodiments, the contraceptive may be used short-term or long-term. The contraceptive may be reversible or permanent. In one embodiments, the antibodies of the present disclosure may bind to human CD52. In some embodiments, the antibody may bind to a carbohydrate epitope expressed specifically on CD52 in the human male reproductive system. In some embodiments, the antibodies of the present disclosure may bind to epitopes in targets such as but not limited to gonadotropin-releasing hormone (GnRH), luteinizing hormone (LH), Zona pellucida (ZP), follicle-stimulating hormone (FSH), chorionic gonadotropin, Anti-Mullerian Hormone/Mullerian Inhibiting Substance (AMH/MIS) and/or testosterone.

### Research Applications

[1993] The AAV particles of the present disclosure or the antibodies encoded by the viral genome therein may also be used as research tools. The AAV particles of the disclosure may be used as in any research experiment, e.g., in vivo or in vitro experiments. In a non-limiting example, the AAV particles of the disclosure may be used in cultured cells. The cultured cells may be derived from any origin known to one with skill in the art, and may be as non-limiting examples, derived from a stable cell line, an animal model or a human patient or control subject. In a non-limiting example, the AAV particles of the disclosure may be used in in vivo experiments in animal models (i.e., mouse, rat, rabbit, dog, cat, non-human primate, guinea pig, ferret, c-elegans, drosophila, zebrafish, or any other animal used for research purposes, known in the art). In another non-limiting example, the AAV particles of the disclosure may be used in human research experiments or human clinical trials.

### Combination Applications

[1994] The AAV particles of the disclosure may be used as a combination therapy with any other therapeutic molecule known in the art. The therapeutic molecule may be approved by the US Food and Drug Administration or may be in clinical trial or at the preclinical research stage. The therapeutic molecule may utilize any therapeutic modality known in the art, with non-limiting examples including gene silencing or interference (i.e., miRNA, siRNA, RNAi, shRNA), gene editing (i.e., TALEN, CRISPR/Cas9 systems, zinc finger nucleases), and gene, protein or enzyme replacement.

[1995] As a non-limiting example, AAV particles encoding antibody BAN2401 or 158, or fragments thereof may be used in combination therapy with therapeutic molecules such as but not limited to beta amyloid cleaving enzyme (BACE) inhibitor e.g. Elenbecestat.

### V. Kits and Devices

### Kits

[1996] In some embodiments, the disclosure provides a variety of kits for conveniently and/or effectively carrying out methods of the present disclosure. Typically, kits will comprise sufficient amounts and/or numbers of components to allow a user to perform multiple treatments of a subject(s) and/or to perform multiple experiments.

[1997] Any of the AAV particles of the present disclosure may be comprised in a kit. In some embodiments, kits may further include reagents and/or instructions for creating and/or synthesizing compounds and/or compositions of the present disclosure. In some embodiments, kits may also include one or more buffers. In some embodiments, kits of the disclosure may include components for making protein or nucleic acid arrays or libraries and thus, may include, for example, solid supports.

[1998] In some embodiments, kit components may be packaged either in aqueous media or in lyophilized form. The container means of the kits will generally include at least one vial, test tube, flask, bottle, syringe or other container means, into which a component may be placed, and preferably, suitably aliquoted. Where there is more than one kit component, (labeling reagent and label may be packaged together), kits may also generally contain second, third or other additional containers into which additional components may be separately placed. In some embodiments, kits may also comprise second container means for containing sterile, pharmaceutically acceptable buffers and/or other diluents. In some embodiments, various combinations of components may be comprised in one or more vial. Kits of the present disclosure may also typically include means for containing compounds and/or compositions of the present disclosure, e.g., proteins, nucleic acids, and any other reagent containers in close confinement for commercial sale. Such containers may include injection or blow-molded plastic containers into which desired vials are retained.

[1999] In some embodiments, kit components are provided in one and/or more liquid solutions. In some embodiments, liquid solutions are aqueous solutions, with sterile aqueous solutions being particularly preferred. In some embodiments, kit components may be provided as dried powder(s). When reagents and/or components are provided as dry powders, such powders may be reconstituted by the addition of suitable volumes of solvent. In some embodiments, it is envisioned that solvents may also be provided in another container means. In some embodiments, labeling dyes are provided as dried powders. In some embodiments, it is contemplated that 10, 20, 30, 40, 50, 60, 70, 80, 90, 100, 120, 120, 130, 140, 150, 160, 170, 180, 190, 200, 300, 400, 500, 600, 700, 800, 900, 1000 micrograms or at least or at most those amounts of dried dye are provided in kits of the disclosure. In such embodiments, dye may then be resuspended in any suitable solvent, such as DMSO.

[2000] In some embodiments, kits may include instructions for employing kit components as well the use of any other reagent not included in the kit. Instructions may include variations that may be implemented.

### Devices

[2001] In some embodiments, the AAV particles may delivered to a subject using a device to deliver the AAV particles and a head fixation assembly. The head fixation assembly may be, but is not limited to, any of the head fixation assemblies sold by MRI interventions. As a non-limiting example, the head fixation assembly may be any of the assemblies described in U.S. Pat. Nos. 8,099,150, 8,548,569 and 9,031,636 and International Patent Publication Nos. WO201108495 and WO2014014585, the contents of each of which are incorporated by reference in their entireties. A head fixation assembly may be used in combination with an MRI compatible drill such as, but not limited to, the MRI compatible drills described in International Patent Publication No. WO2013181008 and US Patent Publication No. US20130325012, the contents of which are herein incorporated by reference in its entirety.

[2002] In some embodiments, the AAV particles may be delivered using a method, system and/or computer program for positioning apparatus to a target point on a subject to deliver the AAV particles. As a non-limiting example, the method, system and/or computer program may be the methods, systems and/or computer programs described in U.S. Pat. No. 8,340,743, the contents of which are herein incorporated by reference in its entirety. The method may include: determining a target point in the body and a reference point, wherein the target point and the reference point define a planned trajectory line (PTL) extending through each; determining a visualization plane, wherein the PTL intersects the visualization plane at a sighting point; mounting the guide device relative to the body to move with respect to the PTL, wherein the guide device does not intersect the visualization plane; determining a point of intersection (GPP) between the guide axis and the visualization plane; and aligning the GPP with the sighting point in the visualization plane.

[2003] In some embodiments, the AAV particles may be delivered to a subject using a convention-enhanced delivery device. Non-limiting examples of targeted delivery of drugs using convection are described in US Patent Publication Nos. US20100217228, US20130035574 and US20130035660 and International Patent Publication No. WO2013019830 and WO2008144585, the contents of each of which are herein incorporated by reference in their entireties.

[2004] In some embodiments, a subject may be imaged prior to, during and/or after delivery of the AAV particles. The imaging method may be a method known in the art and/or described herein, such as but not limited to, magnetic resonance imaging (MRI). As a non-limiting example, imaging may be used to assess therapeutic effect. As another non-limiting example, imaging may be used for assisted delivery of AAV particles.

[2005] In some embodiments, the AAV particles may be delivered using an MRI-guided device. Non-limiting examples of MRI-guided devices are described in U.S. Pat. Nos. 9,055,884, 9,042,958, 8,886,288, 8,768,433, 8,396,532, 8,369,930, 8,374,677 and 8,175,677 and US Patent Application No. US20140024927 the contents of each of which are herein incorporated by reference in their entireties. As a non-limiting example, the MRI-guided device may be able to provide data in real time such as those described in U.S. Pat. Nos. 8,886,288 and 8,768,433, the contents of each of which is herein incorporated by reference in its entirety. As another non-limiting example, the MRI-guided device or system may be used with a targeting cannula such as the systems described in U.S. Pat. Nos. 8,175,677 and 8,374,677, the contents of each of which are herein incorporated by reference in their entireties. As yet another non-limiting example, the MRI-guided device includes a trajectory guide frame for guiding an interventional device as described, for example, in U.S. Pat. No. 9,055,884 and US Patent Application No. US20140024927, the contents of each of which are herein incorporated by reference in their entireties.

[2006] In some embodiments, the AAV particles may be delivered using an MRI-compatible tip assembly. Non-limiting examples of MRI-compatible tip assemblies are described in US Patent Publication No. US20140275980, the contents of which is herein incorporated by reference in its entirety.

[2007] In some embodiments, the AAV particles may be delivered using a cannula which is MRI-compatible. Non-limiting examples of MRI-compatible cannulas include those taught in International Patent Publication No. WO2011130107, the contents of which are herein incorporated by reference in its entirety.

[2008] In some embodiments, the AAV particles may be delivered using a catheter which is MRI-compatible. Non-limiting examples of MRI-compatible catheters include those taught in International Patent Publication No. WO2012116265, U.S. Pat. No. 8,825,133 and US Patent Publication No. US20140024909, the contents of each of which are herein incorporated by reference in their entireties.

[2009] In some embodiments, the AAV particles may be delivered using a device with an elongated tubular body and a diaphragm as described in US Patent Publication Nos. US20140276582 and US20140276614, the contents of each of which are herein incorporated by reference in their entireties.

[2010] In some embodiments, the AAV particles may be delivered using an MRI compatible localization and/or guidance system such as, but not limited to, those described in US Patent Publication Nos. US20150223905 and US20150230871, the contents of each of which are herein incorporated by reference in their entireties. As a non-limiting example, the MRI compatible localization and/or guidance systems may comprise a mount adapted for fixation to a patient, a targeting cannula with a lumen configured to attach to the mount so as to be able to controllably translate in at least three dimensions, and an elongate probe configured to snugly advance via slide and retract in the targeting cannula lumen, the elongate probe comprising at least one of a stimulation or recording electrode.

[2011] In some embodiments, the AAV particles may be delivered to a subject using a trajectory frame as described in US Patent Publication Nos. US20150031982 and US20140066750 and International Patent Publication Nos. WO2015057807 and WO2014039481, the contents of each of which are herein incorporated by reference in their entireties.

[2012] In some embodiments, the AAV particles may be delivered to a subject using a gene gun.

### VI. Definitions

[2013] At various places in the present specification, substituents of compounds of the present disclosure are disclosed in groups or in ranges. It is specifically intended that the present disclosure include each and every individual subcombination of the members of such groups and ranges.

[2014] About: As used herein, the term “about” means+/−10% of the recited value.

[2015] Adeno-associated virus: The term “adeno-associated virus” or “AAV” as used herein refers to members of the dependovirus genus comprising any particle, sequence, gene, protein, or component derived therefrom.

[2016] AAV Particle: As used herein, an “AAV particle” is a virus which comprises a viral genome with at least one payload region and at least one ITR region. V vectors of the present disclosure may be produced recombinantly and may be based on adeno-associated virus (AAV) parent or reference sequences. AAV particle may be derived from any serotype, described herein or known in the art, including combinations of serotypes (i.e., “pseudotyped” AAV) or from various genomes (e.g., single stranded or self-complementary). In addition, the AAV particle may be replication defective and/or targeted.

[2017] Activity: As used herein, the term “activity” refers to the condition in which things are happening or being done. Compositions of the disclosure may have activity and this activity may involve one or more biological events.

[2018] Administered in combination: As used herein, the term “administered in combination” or “combined administration” means that two or more agents are administered to a subject at the same time or within an interval such that there may be an overlap of an effect of each agent on the patient. In some embodiments, they are administered within about 60, 30, 15, 10, 5, or 1 minute of one another. In some embodiments, the administrations of the agents are spaced sufficiently closely together such that a combinatorial (e.g., a synergistic) effect is achieved.

[2019] Amelioration: As used herein, the term “amelioration” or “ameliorating” refers to a lessening of severity of at least one indicator of a condition or disease. For example, in the context of neurodegeneration disorder, amelioration includes the reduction of neuron loss.

[2020] Animal: As used herein, the term “animal” refers to any member of the animal kingdom. In some embodiments, “animal” refers to humans at any stage of development. In some embodiments, “animal” refers to non-human animals at any stage of development. In certain embodiments, the non-human animal is a mammal (e.g., a rodent, a mouse, a rat, a rabbit, a monkey, a dog, a cat, a sheep, cattle, a primate, or a pig). In some embodiments, animals include, but are not limited to, mammals, birds, reptiles, amphibians, fish, and worms. In some embodiments, the animal is a transgenic animal, genetically-engineered animal, or a clone.

[2021] Antibody: As used herein, the term “antibody” is referred to in the broadest sense and specifically covers various embodiments including, but not limited to monoclonal antibodies, polyclonal antibodies, multispecific antibodies (e.g. bispecific antibodies formed from at least two intact antibodies), and antibody fragments (e.g., diabodies) so long as they exhibit a desired biological activity (e.g., “functional”). Antibodies are primarily amino-acid based molecules but may also comprise one or more modifications (including, but not limited to the addition of sugar moieties, fluorescent moieties, chemical tags, etc.). Non-limiting examples of antibodies or fragments thereof include V_{H} and V_{L} domains, scFvs, Fab, Fab′, F(ab′), Fv fragment, diabodies, linear antibodies, single chain antibody molecules, multispecific antibodies, bispecific antibodies, intrabodies, monoclonal antibodies, polyclonal antibodies, humanized antibodies, codon-optimized antibodies, tandem scFv antibodies, bispecific T-cell engagers, mAb2 antibodies, chimeric antigen receptors (CAR), tetravalent bispecific antibodies, biosynthetic antibodies, native antibodies, miniaturized antibodies, unibodies, maxibodies, antibodies to senescent cells, antibodies to conformers, antibodies to disease specific epitopes or antibodies to innate defense molecules.

[2022] Antibody-based composition: As used herein, “antibody-based” or “antibody-derived” compositions are monomeric or multi-meric polypeptides which comprise at least one amino-acid region derived from a known or parental antibody sequence and at least one amino acid region derived from a non-antibody sequence, e.g., mammalian protein.

[2023] Approximately: As used herein, the term “approximately” or “about,” as applied to one or more values of interest, refers to a value that is similar to a stated reference value. In certain embodiments, the term “approximately” or “about” refers to a range of values that fall within 25%, 20%, 19%, 18%, 17%, 16%, 15%, 14%, 13%, 12%, 11%, 10%, 9%, 8%, 7%,6%, 5%, 4%, 3%, 2%, 1%, or less in either direction (greater than or less than) of the stated reference value unless otherwise stated or otherwise evident from the context (except where such number would exceed 100% of a possible value).

[2024] Associated with: As used herein, the terms “associated with,” “conjugated,” “linked,” “attached,” and “tethered,” when used with respect to two or more moieties, means that the moieties are physically associated or connected with one another, either directly or via one or more additional moieties that serves as a linking agent, to form a structure that is sufficiently stable so that the moieties remain physically associated under the conditions in which the structure is used, e.g., physiological conditions. An “association” need not be strictly through direct covalent chemical bonding. It may also suggest ionic or hydrogen bonding or a hybridization based connectivity sufficiently stable such that the “associated” entities remain physically associated.

[2025] Bifunctional: As used herein, the term “bifunctional” refers to any substance, molecule or moiety which is capable of or maintains at least two functions. The functions may effect the same outcome or a different outcome. The structure that produces the function may be the same or different.

[2026] Biocompatible: As used herein, the term “biocompatible” means compatible with living cells, tissues, organs or systems posing little to no risk of injury, toxicity or rejection by the immune system.

[2027] Biodegradable: As used herein, the term “biodegradable” means capable of being broken down into innocuous products by the action of living things.

[2028] Biologically active: As used herein, the phrase “biologically active” refers to a characteristic of any substance that has activity in a biological system and/or organism. For instance, a substance that, when administered to an organism, has a biological effect on that organism, is considered to be biologically active. In particular embodiments, an AAV particle of the present disclosure may be considered biologically active if even a portion of the encoded payload is biologically active or mimics an activity considered biologically relevant.

[2029] Capsid: As used herein, the term “capsid” refers to the protein shell of a virus particle.

[2030] Chimeric antigen receptor (CAR): As used herein, the term “chimeric antigen receptor” or “CAR” refers to an artificial chimeric protein comprising at least one antigen specific targeting region (ASTR), a transmembrane domain and an intracellular signaling domain, wherein the antigen specific targeting region comprises a full-length antibody or a fragment thereof. As a non-limiting example, the ASTR of a CAR may be any of the antibodies listed in Tables 3-16, antibody-based compositions or fragments thereof. Any molecule that is capable of binding a target antigen with high affinity can be used in the ASTR of a CAR. The CAR may optionally have an extracellular spacer domain and/or a co-stimulatory domain. A CAR may also be used to generate a cytotoxic cell carrying the CAR.

[2031] Complementary and substantially complementary: As used herein, the term “complementary” refers to the ability of polynucleotides to form base pairs with one another. Base pairs are typically formed by hydrogen bonds between nucleotide units in antiparallel polynucleotide strands. Complementary polynucleotide strands can form base pair in the Watson-Crick manner (e.g., A to T, A to U, C to G), or in any other manner that allows for the formation of duplexes. As persons skilled in the art are aware, when using RNA as opposed to DNA, uracil rather than thymine is the base that is considered to be complementary to adenosine. However, when a U is denoted in the context of the present disclosure, the ability to substitute a T is implied, unless otherwise stated. Perfect complementarity or 100% complementarity refers to the situation in which each nucleotide unit of one polynucleotide strand can form hydrogen bond with a nucleotide unit of a second polynucleotide strand. Less than perfect complementarity refers to the situation in which some, but not all, nucleotide units of two strands can form hydrogen bond with each other. For example, for two 20-mers, if only two base pairs on each strand can form hydrogen bond with each other, the polynucleotide strands exhibit 10% complementarity. In the same example, if 18 base pairs on each strand can form hydrogen bonds with each other, the polynucleotide strands exhibit 90% complementarity. As used herein, the term “substantially complementary” means that the siRNA has a sequence (e.g., in the antisense strand) which is sufficient to bind the desired target mRNA, and to trigger the RNA silencing of the target mRNA.

[2032] Compound: Compounds of the present disclosure include all of the isotopes of the atoms occurring in the intermediate or final compounds. “Isotopes” refers to atoms having the same atomic number but different mass numbers resulting from a different number of neutrons in the nuclei. For example, isotopes of hydrogen include tritium and deuterium.

[2033] The compounds and salts of the present disclosure can be prepared in combination with solvent or water molecules to form solvates and hydrates by routine methods.

[2034] Comprehensive Positional Evolution (CPE™): As used herein, the term “comprehensive positional evolution” refers to an antibody evolution technology that allows for mapping of the effects of amino acid changes at every position along an antibody variable domain's sequence. This comprehensive mutagenesis technology can be used to enhance one or more antibody properties or characteristics.

[2035] Comprehensive Protein Synthesis (CPS™): As used herein, the term “comprehensive protein synthesis” refers to a combinatorial protein synthesis technology that can be used to optimize antibody properties or characteristics by combining the best properties into a new, high-performance antibody.

[2036] Conditionally active: As used herein, the term “conditionally active” refers to a mutant or variant of a wild-type polypeptide, wherein the mutant or variant is more or less active at physiological conditions than the parent polypeptide. Further, the conditionally active polypeptide may have increased or decreased activity at aberrant conditions as compared to the parent polypeptide. A conditionally active polypeptide may be reversibly or irreversibly inactivated at normal physiological conditions or aberrant conditions.

[2037] Conserved: As used herein, the term “conserved” refers to nucleotides or amino acid residues of a polynucleotide sequence or polypeptide sequence, respectively, that are those that occur unaltered in the same position of two or more sequences being compared. Nucleotides or amino acids that are relatively conserved are those that are conserved amongst more related sequences than nucleotides or amino acids appearing elsewhere in the sequences.

[2038] In some embodiments, two or more sequences are said to be “completely conserved” if they are 100% identical to one another. In some embodiments, two or more sequences are said to be “highly conserved” if they are at least 70% identical, at least 80% identical, at least 90% identical, or at least 95% identical to one another. In some embodiments, two or more sequences are said to be “highly conserved” if they are about 70% identical, about 80% identical, about 90% identical, about 95%, about 98%, or about 99% identical to one another. In some embodiments, two or more sequences are said to be “conserved” if they are at least 30% identical, at least 40% identical, at least 50% identical, at least 60% identical, at least 70% identical, at least 80% identical, at least 90% identical, or at least 95% identical to one another. In some embodiments, two or more sequences are said to be “conserved” if they are about 30% identical, about 40% identical, about 50% identical, about 60% identical, about 70% identical, about 80% identical, about 90% identical, about 95% identical, about 98% identical, or about 99% identical to one another. Conservation of sequence may apply to the entire length of an polynucleotide or polypeptide or may apply to a portion, region or feature thereof.

[2039] Control Elements: As used herein, “control elements”, “regulatory control elements” or “regulatory sequences” refers to promoter regions, polyadenylation signals, transcription termination sequences, upstream regulatory domains, origins of replication, internal ribosome entry sites (“IRES”), enhancers, and the like, which provide for the replication, transcription and translation of a coding sequence in a recipient cell. Not all of these control elements need always be present as long as the selected coding sequence is capable of being replicated, transcribed and/or translated in an appropriate host cell.

[2040] Controlled Release: As used herein, the term “controlled release” refers to a pharmaceutical composition or compound release profile that conforms to a particular pattern of release to effect a therapeutic outcome.

[2041] Cytostatic: As used herein, “cytostatic” refers to inhibiting, reducing, suppressing the growth, division, or multiplication of a cell (e.g., a mammalian cell (e.g., a human cell)), bacterium, virus, fungus, protozoan, parasite, prion, or a combination thereof.

[2042] Cytotoxic: As used herein, “cytotoxic” refers to killing or causing injurious, toxic, or deadly effect on a cell (e.g., a mammalian cell (e.g., a human cell)), bacterium, virus, fungus, protozoan, parasite, prion, or a combination thereof.

[2043] Delivery: As used herein, “delivery” refers to the act or manner of delivering an AAV particle, a compound, substance, entity, moiety, cargo or payload.

[2044] Delivery Agent: As used herein, “delivery agent” refers to any substance which facilitates, at least in part, the in vivo delivery of an AAV particle to targeted cells.

[2045] Destabilized: As used herein, the term “destable,” “destabilize,” or “destabilizing region” means a region or molecule that is less stable than a starting, wild-type or native form of the same region or molecule.

[2046] Detectable label: As used herein, “detectable label” refers to one or more markers, signals, or moieties which are attached, incorporated or associated with another entity that is readily detected by methods known in the art including radiography, fluorescence, chemiluminescence, enzymatic activity, absorbance and the like. Detectable labels include radioisotopes, fluorophores, chromophores, enzymes, dyes, metal ions, ligands such as biotin, avidin, streptavidin and haptens, quantum dots, and the like. Detectable labels may be located at any position in the peptides or proteins disclosed herein. They may be within the amino acids, the peptides, or proteins, or located at the N- or C-termini.

[2047] Digest: As used herein, the term “digest” means to break apart into smaller pieces or components. When referring to polypeptides or proteins, digestion results in the production of peptides.

[2048] Distal: As used herein, the term “distal” means situated away from the center or away from a point or region of interest.

[2049] Dosing regimen: As used herein, a “dosing regimen” is a schedule of administration or physician determined regimen of treatment, prophylaxis, or palliative care.

[2050] Encapsulate: As used herein, the term “encapsulate” means to enclose, surround or encase.

[2051] Engineered: As used herein, embodiments of the disclosure are “engineered” when they are designed to have a feature or property, whether structural or chemical, that varies from a starting point, wild type or native molecule.

[2052] Effective Amount: As used herein, the term “effective amount” of an agent is that amount sufficient to effect beneficial or desired results, for example, clinical results, and, as such, an “effective amount” depends upon the context in which it is being applied. For example, in the context of administering an agent that treats cancer, an effective amount of an agent is, for example, an amount sufficient to achieve treatment, as defined herein, of cancer, as compared to the response obtained without administration of the agent.

[2053] Epitope: As used herein, an “epitope” refers to a surface or region on a molecule that is capable of interacting with a biomolecule. For example, a protein may contain one or more amino acids, e.g., an epitope, which interacts with an antibody, e.g., a biomolecule. In some embodiments, when referring to a protein or protein module, an epitope may comprise a linear stretch of amino acids or a three-dimensional structure formed by folded amino acid chains.

[2054] EvoMap™: As used herein, an EvoMap™ refers to a map of a polypeptide, wherein detailed informatics are presented about the effects of single amino acid mutations within the length of the polypeptide and their influence on the properties and characteristics of that polypeptide.

[2055] Expression: As used herein, “expression” of a nucleic acid sequence refers to one or more of the following events: (1) production of an RNA template from a DNA sequence (e.g., by transcription); (2) processing of an RNA transcript (e.g., by splicing, editing, 5′ cap formation, and/or 3′ end processing); (3) translation of an RNA into a polypeptide or protein; and (4) post-translational modification of a polypeptide or protein.

[2056] Feature: As used herein, a “feature” refers to a characteristic, a property, or a distinctive element.

[2057] Formulation: As used herein, a “formulation” includes at least one AAV particle and a delivery agent.

[2058] Fragment: A “fragment,” as used herein, refers to a portion. For example, fragments of proteins may comprise polypeptides obtained by digesting full-length protein isolated from cultured cells.

[2059] Functional: As used herein, a “functional” biological molecule is a biological molecule in a form in which it exhibits a property and/or activity by which it is characterized.

[2060] Gene expression: The term “gene expression” refers to the process by which a nucleic acid sequence undergoes successful transcription and in most instances translation to produce a protein or peptide. For clarity, when reference is made to measurement of “gene expression”, this should be understood to mean that measurements may be of the nucleic acid product of transcription, e.g., RNA or mRNA or of the amino acid product of translation, e.g., polypeptides or peptides. Methods of measuring the amount or levels of RNA, mRNA, polypeptides and peptides are well known in the art.

[2061] Homology: As used herein, the term “homology” refers to the overall relatedness between polymeric molecules, e.g. between polynucleotide molecules (e.g. DNA molecules and/or RNA molecules) and/or between polypeptide molecules. In some embodiments, polymeric molecules are considered to be “homologous” to one another if their sequences are at least 25%, 30%, 35%, 40%, 45%, 50%, 55%, 60%, 65%, 70%,75%, 80%, 85%, 90%, 95%, or 99% identical or similar. The term “homologous” necessarily refers to a comparison between at least two sequences (polynucleotide or polypeptide sequences). In accordance with the disclosure, two polynucleotide sequences are considered to be homologous if the polypeptides they encode are at least about 50%, 60%, 70%, 80%, 90%, 95%, or even 99% for at least one stretch of at least about 20 amino acids. In some embodiments, homologous polynucleotide sequences are characterized by the ability to encode a stretch of at least 4-5 uniquely specified amino acids. For polynucleotide sequences less than 60 nucleotides in length, homology is determined by the ability to encode a stretch of at least 4-5 uniquely specified amino acids. In accordance with the disclosure, two protein sequences are considered to be homologous if the proteins are at least about 50%, 60%, 70%, 80%, or 90% identical for at least one stretch of at least about 20 amino acids.

[2062] Heterologous Region: As used herein the term “heterologous region” refers to a region which would not be considered a homologous region.

[2063] Homologous Region: As used herein the term “homologous region” refers to a region which is similar in position, structure, evolution origin, character, form or function.

[2064] Identity: As used herein, the term “identity” refers to the overall relatedness between polymeric molecules, e.g., between polynucleotide molecules (e.g. DNA molecules and/or RNA molecules) and/or between polypeptide molecules. Calculation of the percent identity of two polynucleotide sequences, for example, can be performed by aligning the two sequences for optimal comparison purposes (e.g., gaps can be introduced in one or both of a first and a second nucleic acid sequences for optimal alignment and non-identical sequences can be disregarded for comparison purposes). In certain embodiments, the length of a sequence aligned for comparison purposes is at least 30%, at least 40%, at least 50%, at least 60%, at least 70%, at least 80%, at least 90%, at least 95%, or 100% of the length of the reference sequence. The nucleotides at corresponding nucleotide positions are then compared. When a position in the first sequence is occupied by the same nucleotide as the corresponding position in the second sequence, then the molecules are identical at that position. The percent identity between the two sequences is a function of the number of identical positions shared by the sequences, taking into account the number of gaps, and the length of each gap, which needs to be introduced for optimal alignment of the two sequences. The comparison of sequences and determination of percent identity between two sequences can be accomplished using a mathematical algorithm. For example, the percent identity between two nucleotide sequences can be determined using methods such as those described in Computational Molecular Biology, Lesk, A. M., ed., Oxford University Press, New York, 1988; Biocomputing: Informatics and Genome Projects, Smith, D. W., ed., Academic Press, New York, 1993; Sequence Analysis in Molecular Biology, von Heinje, G., Academic Press, 1987; Computer Analysis of Sequence Data, Part I, Griffin, A. M., and Griffin, H. G., eds., Humana Press, New Jersey, 1994; and Sequence Analysis Primer, Gribskov, M. and Devereux, J., eds., M Stockton Press, New York, 1991; each of which is incorporated herein by reference. For example, the percent identity between two nucleotide sequences can be determined using the algorithm of Meyers and Miller (CABIOS, 1989, 4:11-17), which has been incorporated into the ALIGN program (version 2.0) using a PAM120 weight residue table, a gap length penalty of 12 and a gap penalty of 4 The percent identity between two nucleotide sequences can, alternatively, be determined using the GAP program in the GCG software package using an NWSgapdna.CMP matrix. Methods commonly employed to determine percent identity between sequences include, but are not limited to those disclosed in Carillo, H., and Lipman, D., SIAM J Applied Math., 48:1073 (1988); incorporated herein by reference. Techniques for determining identity are codified in publicly available computer programs. Exemplary computer software to determine homology between two sequences include, but are not limited to, GCG program package, Devereux, J., et al., Nucleic Acids Research, 12(1), 387 (1984)), BLASTP, BLASTN, and FASTA Altschul, S. F. et al., J. Molec. Biol., 215, 403 (1990)

[2065] Infectious disease: As used herein, the term “infectious disease” refers to any disorder and/or condition caused by invasion into the body of an exogenous organism or infection agent that is not typically present such as, but not limited to, viruses, bacteria, prions, nematodes, fungus, parasites or arthropods.

[2066] Inhibit expression of a gene: As used herein, the phrase “inhibit expression of a gene” means to cause a reduction in the amount of an expression product of the gene. The expression product can be an RNA transcribed from the gene (e.g., an mRNA) or a polypeptide translated from an mRNA transcribed from the gene. Typically, a reduction in the level of an mRNA results in a reduction in the level of a polypeptide translated therefrom. The level of expression may be determined using standard techniques for measuring mRNA or protein.

[2067] In vitro: As used herein, the term “in vitro” refers to events that occur in an artificial environment, e.g., in a test tube or reaction vessel, in cell culture, in a Petri dish, etc., rather than within an organism (e.g., animal, plant, or microbe).

[2068] In vivo: As used herein, the term “in vivo” refers to events that occur within an organism (e.g., animal, plant, or microbe or cell or tissue thereof).

[2069] Isolated: As used herein, the term “isolated” refers to a substance or entity that has been separated from at least some of the components with which it was associated (whether in nature or in an experimental setting). Isolated substances may have varying levels of purity in reference to the substances from which they have been associated. Isolated substances and/or entities may be separated from at least about 10%, about 20%, about 30%, about 40%, about 50%, about 60%, about 70%, about 80%, about 90%, or more of the other components with which they were initially associated. In some embodiments, isolated agents are more than about 80%, about 85%, about 90%, about 91%, about 92%, about 93%, about 94%, about 95%, about 96%, about 97%, about 98%, about 99%, or more than about 99% pure. As used herein, a substance is “pure” if it is substantially free of other components.

[2070] Substantially isolated: By “substantially isolated” is meant that a substance is substantially separated from the environment in which it was formed or detected. Partial separation can include, for example, a composition enriched in the substance or AAV particles of the present disclosure. Substantial separation can include compositions containing at least about 50%, at least about 60%, at least about 70%, at least about 80%, at least about 90%, at least about 95%, at least about 97%, or at least about 99% by weight of the compound of the present disclosure, or salt thereof. Methods for isolating compounds and their salts are routine in the art.

[2071] Linker: As used herein “linker” refers to a molecule or group of molecules which connects two molecules, such as a W chain and V_{L} chain or an antibody. A linker may be a nucleic acid sequence connecting two nucleic acid sequences encoding two different polypeptides. The linker may or may not be translated. The linker may be a cleavable linker.

[2072] MicroRNA (miRNA) binding site: As used herein, a microRNA (mRNA) binding site represents a nucleotide location or region of a nucleic acid transcript to which at least the “seed” region of a miRNA binds.

[2073] Modified: As used herein “modified” refers to a changed state or structure of a molecule of the disclosure. Molecules may be modified in many ways including chemically, structurally, and functionally.

[2074] Naturally Occurring: As used herein, “naturally occurring” or “wild-type” means existing in nature without artificial aid, or involvement of the hand of man.

[2075] Non-human vertebrate: As used herein, a “non-human vertebrate” includes all vertebrates except Homo sapiens, including wild and domesticated species. Examples of non-human vertebrates include, but are not limited to, mammals, such as alpaca, banteng, bison, camel, cat, cattle, deer, dog, donkey, gayal, goat, guinea pig, horse, llama, mule, pig, rabbit, reindeer, sheep water buffalo, and yak.

[2076] Off-target: As used herein, “off target” refers to any unintended effect on any one or more target, gene, or cellular transcript.

[2077] Open reading frame: As used herein, “open reading frame” or “ORF” refers to a sequence which does not contain a stop codon in a given reading frame.

[2078] Operably linked: As used herein, the phrase “operably linked” refers to a functional connection between two or more molecules, constructs, transcripts, entities, moieties or the like.

[2079] Particle: As used herein, a “particle” is a virus comprised of at least two components, a protein capsid and a polynucleotide sequence enclosed within the capsid.

[2080] Patient: As used herein, “patient” refers to a subject who may seek or be in need of treatment, requires treatment, is receiving treatment, will receive treatment, or a subject who is under care by a trained professional for a particular disease or condition.

[2081] Payload: As used herein, “payload” or “payload region” refers to one or more polynucleotides or polynucleotide regions encoded by or within a viral genome or an expression product of such polynucleotide or polynucleotide region, e.g., a transgene, a polynucleotide encoding a polypeptide or multi-polypeptide or a modulatory nucleic acid or regulatory nucleic acid.

[2082] Payload construct: As used herein, “payload construct” is one or more polynucleotide regions encoding or comprising a payload that is flanked on one or both sides by an inverted terminal repeat (ITR) sequence. The payload construct is a template that is replicated in a viral production cell to produce a viral genome.

[2083] Payload construct vector: As used herein, “payload construct vector” is a vector encoding or comprising a payload construct, and regulatory regions for replication and expression in bacterial cells.

[2084] Payload construct expression vector: As used herein, a “payload construct expression vector” is a vector encoding or comprising a payload construct and which further comprises one or more polynucleotide regions encoding or comprising components for viral expression in a viral replication cell.

[2085] Peptide: As used herein, “peptide” is less than or equal to 50 amino acids long, e.g., about 5, 10, 15, 20, 25, 30, 35, 40, 45, or 50 amino acids long.

[2086] Pharmaceutically acceptable: The phrase “pharmaceutically acceptable” is employed herein to refer to those compounds, materials, compositions, and/or dosage forms which are, within the scope of sound medical judgment, suitable for use in contact with the tissues of human beings and animals without excessive toxicity, irritation, allergic response, or other problem or complication, commensurate with a reasonable benefit/risk ratio.

[2087] Pharmaceutically acceptable excipients: The phrase “pharmaceutically acceptable excipient,” as used herein, refers any ingredient other than the compounds described herein (for example, a vehicle capable of suspending or dissolving the active compound) and having the properties of being substantially nontoxic and non-inflammatory in a patient. Excipients may include, for example: antiadherents, antioxidants, binders, coatings, compression aids, disintegrants, dyes (colors), emollients, emulsifiers, fillers (diluents), film formers or coatings, flavors, fragrances, glidants (flow enhancers), lubricants, preservatives, printing inks, sorbents, suspensing or dispersing agents, sweeteners, and waters of hydration. Exemplary excipients include, but are not limited to: butylated hydroxytoluene (BHT), calcium carbonate, calcium phosphate (dibasic), calcium stearate, croscarmellose, crosslinked polyvinyl pyrrolidone, citric acid, crospovidone, cysteine, ethylcellulose, gelatin, hydroxypropyl cellulose, hydroxypropyl methylcellulose, lactose, magnesium stearate, maltitol, mannitol, methionine, methylcellulose, methyl paraben, microcrystalline cellulose, polyethylene glycol, polyvinyl pyrrolidone, povidone, pregelatinized starch, propyl paraben, retinyl palmitate, shellac, silicon dioxide, sodium carboxymethyl cellulose, sodium citrate, sodium starch glycolate, sorbitol, starch (corn), stearic acid, sucrose, talc, titanium dioxide, vitamin A, vitamin E, vitamin C, and xylitol.

[2088] Pharmaceutically acceptable salts: The present disclosure also includes pharmaceutically acceptable salts of the compounds described herein. As used herein, “pharmaceutically acceptable salts” refers to derivatives of the disclosed compounds wherein the parent compound is modified by converting an existing acid or base moiety to its salt form (e.g., by reacting the free base group with a suitable organic acid). Examples of pharmaceutically acceptable salts include, but are not limited to, mineral or organic acid salts of basic residues such as amines; alkali or organic salts of acidic residues such as carboxylic acids; and the like. Representative acid addition salts include acetate, acetic acid, adipate, alginate, ascorbate, aspartate, benzenesulfonate, benzene sulfonic acid, benzoate, bisulfate, borate, butyrate, camphorate, camphorsulfonate, citrate, cyclopentanepropionate, digluconate, dodecylsulfate, ethanesulfonate, fumarate, glucoheptonate, glycerophosphate, hemisulfate, heptonate, hexanoate, hydrobromide, hydrochloride, hydroiodide, 2-hydroxy-ethanesulfonate, lactobionate, lactate, laurate, lauryl sulfate, malate, maleate, malonate, methanesulfonate, 2-naphthalenesulfonate, nicotinate, nitrate, oleate, oxalate, palmitate, pamoate, pectinate, persulfate, 3-phenylpropionate, phosphate, picrate, pivalate, propionate, stearate, succinate, sulfate, tartrate, thiocyanate, toluenesulfonate, undecanoate, valerate salts, and the like. Representative alkali or alkaline earth metal salts include sodium, lithium, potassium, calcium, magnesium, and the like, as well as nontoxic ammonium, quaternary ammonium, and amine cations, including, but not limited to ammonium, tetramethylammonium, tetraethylammonium, methylamine, dimethylamine, trimethylamine, triethylamine, ethylamine, and the like. The pharmaceutically acceptable salts of the present disclosure include the conventional non-toxic salts of the parent compound formed, for example, from non-toxic inorganic or organic acids. The pharmaceutically acceptable salts of the present disclosure can be synthesized from the parent compound which contains a basic or acidic moiety by conventional chemical methods. Generally, such salts can be prepared by reacting the free acid or base forms of these compounds with a stoichiometric amount of the appropriate base or acid in water or in an organic solvent, or in a mixture of the two; generally, nonaqueous media like ether, ethyl acetate, ethanol, isopropanol, or acetonitrile are preferred. Lists of suitable salts are found in Remington's Pharmaceutical Sciences, 17^{th} ed., Mack Publishing Company, Easton, Pa., 1985, p. 1418, Pharmaceutical Salts: Properties, Selection, and Use, P. H. Stahl and C. G. Wermuth (eds.), Wiley-VCH, 2008, and Berge et al., Journal of Pharmaceutical Science, 66, 1-19 (1977), each of which is incorporated herein by reference in its entirety.

[2089] Pharmaceutically acceptable solvate: The term “pharmaceutically acceptable solvate,” as used herein, means a compound of the disclosure wherein molecules of a suitable solvent are incorporated in the crystal lattice. A suitable solvent is physiologically tolerable at the dosage administered. For example, solvates may be prepared by crystallization, recrystallization, or precipitation from a solution that includes organic solvents, water, or a mixture thereof. Examples of suitable solvents are ethanol, water (for example, mono-, di-, and tri-hydrates), N-methylpyrrolidinone (NMP), dimethyl sulfoxide (DMSO), N,N′-dimethylformamide (DMF), N,N′-dimethylacetamide (DMAC), 1,3-dimethyl-2-imidazolidinone (DMEU), 1,3-dimethyl-3,4,5,6-tetrahydro-2-(1H)-pyrimidinone (DMPU), acetonitrile (ACN), propylene glycol, ethyl acetate, benzyl alcohol, 2-pyrrolidone, benzyl benzoate, and the like. When water is the solvent, the solvate is referred to as a “hydrate.”

[2090] Pharmacokinetic: As used herein, “pharmacokinetic” refers to any one or more properties of a molecule or compound as it relates to the determination of the fate of substances administered to a living organism. Pharmacokinetics is divided into several areas including the extent and rate of absorption, distribution, metabolism and excretion. This is commonly referred to as ADME where: (A) Absorption is the process of a substance entering the blood circulation; (D) Distribution is the dispersion or dissemination of substances throughout the fluids and tissues of the body; (M) Metabolism (or Biotransformation) is the irreversible transformation of parent compounds into daughter metabolites; and (E) Excretion (or Elimination) refers to the elimination of the substances from the body. In rare cases, some drugs irreversibly accumulate in body tissue.

[2091] Physicochemical: As used herein, “physicochemical” means of or relating to a physical and/or chemical property.

[2092] Preventing: As used herein, the term “preventing” refers to partially or completely delaying onset of an infection, disease, disorder and/or condition; partially or completely delaying onset of one or more symptoms, features, or clinical manifestations of a particular infection, disease, disorder, and/or condition; partially or completely delaying onset of one or more symptoms, features, or manifestations of a particular infection, disease, disorder, and/or condition; partially or completely delaying progression from an infection, a particular disease, disorder and/or condition; and/or decreasing the risk of developing pathology associated with the infection, the disease, disorder, and/or condition.

[2093] Proliferate: As used herein, the term “proliferate” means to grow, expand or increase or cause to grow, expand or increase rapidly. “Proliferative” means having the ability to proliferate. “Anti-proliferative” means having properties counter to or inapposite to proliferative properties.

[2094] Prophylactic: As used herein, “prophylactic” refers to a therapeutic or course of action used to prevent the spread of disease.

[2095] Prophylaxis: As used herein, a “prophylaxis” refers to a measure taken to maintain health and prevent the spread of disease.

[2096] Protein of interest: As used herein, the terms “proteins of interest” or “desired proteins” include those provided herein and fragments, mutants, variants, and alterations thereof.

[2097] Proximal: As used herein, the term “proximal” means situated nearer to the center or to a point or region of interest.

[2098] Purified: As used herein, “purify,” “purified,” “purification” means to make substantially pure or clear from unwanted components, material defilement, admixture or imperfection. “Purified” refers to the state of being pure. “Purification” refers to the process of making pure.

[2099] Region: As used herein, the term “region” refers to a zone or general area. In some embodiments, when referring to a protein or protein module, a region may comprise a linear sequence of amino acids along the protein or protein module or may comprise a three-dimensional area, an epitope and/or a cluster of epitopes. In some embodiments, regions comprise terminal regions. As used herein, the term “terminal region” refers to regions located at the ends or termini of a given agent. When referring to proteins, terminal regions may comprise N- and/or C-termini. N-termini refer to the end of a protein comprising an amino acid with a free amino group. C-termini refer to the end of a protein comprising an amino acid with a free carboxyl group. N- and/or C-terminal regions may there for comprise the N- and/or C-termini as well as surrounding amino acids. In some embodiments, N- and/or C-terminal regions comprise from about 3 amino acid to about 30 amino acids, from about 5 amino acids to about 40 amino acids, from about 10 amino acids to about 50 amino acids, from about 20 amino acids to about 100 amino acids and/or at least 100 amino acids. In some embodiments, N-terminal regions may comprise any length of amino acids that includes the N-terminus, but does not include the C-terminus. In some embodiments, C-terminal regions may comprise any length of amino acids, which include the C-terminus, but do not comprise the N-terminus.

[2100] In some embodiments, when referring to a polynucleotide, a region may comprise a linear sequence of nucleic acids along the polynucleotide or may comprise a three-dimensional area, secondary structure, or tertiary structure. In some embodiments, regions comprise terminal regions. As used herein, the term “terminal region” refers to regions located at the ends or termini of a given agent. When referring to polynucleotides, terminal regions may comprise 5′ and 3′ termini. 5′ termini refer to the end of a polynucleotide comprising a nucleic acid with a free phosphate group. 3′ termini refer to the end of a polynucleotide comprising a nucleic acid with a free hydroxyl group. 5′ and 3′ regions may there for comprise the 5′ and 3′ termini as well as surrounding nucleic acids. In some embodiments, 5′ and 3′ terminal regions comprise from about 9 nucleic acids to about 90 nucleic acids, from about 15 nucleic acids to about 120 nucleic acids, from about 30 nucleic acids to about 150 nucleic acids, from about 60 nucleic acids to about 300 nucleic acids and/or at least 300 nucleic acids. In some embodiments, 5′ regions may comprise any length of nucleic acids that includes the 5 terminus, but does not include the 3′ terminus. In some embodiments, 3′ regions may comprise any length of nucleic acids, which include the 3′ terminus, but does not comprise the 5 terminus.

[2101] RNA or RNA molecule: As used herein, the term “RNA” or “RNA molecule” or “ribonucleic acid molecule” refers to a polymer of ribonucleotides; the term “DNA” or “DNA molecule” or “deoxyribonucleic acid molecule” refers to a polymer of deoxyribonucleotides. DNA and RNA can be synthesized naturally, e.g., by DNA replication and transcription of DNA, respectively; or be chemically synthesized. DNA and RNA can be single-stranded (i.e., ssRNA or ssDNA, respectively) or multi-stranded (e.g., double stranded, i.e., dsRNA and dsDNA, respectively). The term “mRNA” or “messenger RNA”, as used herein, refers to a single stranded RNA that encodes the amino acid sequence of one or more polypeptide chains.

[2102] Sample: As used herein, the term “sample” or “biological sample” refers to a subset of its tissues, cells or component parts (e.g. body fluids, including but not limited to blood, mucus, lymphatic fluid, synovial fluid, cerebrospinal fluid, saliva, amniotic fluid, amniotic cord blood, urine, vaginal fluid and semen). A sample further may include a homogenate, lysate or extract prepared from a whole organism or a subset of its tissues, cells or component parts, or a fraction or portion thereof, including but not limited to, for example, plasma, serum, spinal fluid, lymph fluid, the external sections of the skin, respiratory, intestinal, and genitourinary tracts, tears, saliva, milk, blood cells, tumors, organs. A sample further refers to a medium, such as a nutrient broth or gel, which may contain cellular components, such as proteins or nucleic acid molecule.

[2103] Self-complementary viral particle: As used herein, a “self-complementary viral particle” is a particle comprised of at least two components, a protein capsid and a polynucleotide sequence encoding a self-complementary genome enclosed within the capsid.

[2104] Signal Sequences: As used herein, the phrase “signal sequences” refers to a sequence which can direct the transport or localization of a protein.

[2105] Single unit dose: As used herein, a “single unit dose” is a dose of any therapeutic administered in one dose/at one time/single route/single point of contact, i.e., single administration event. In some embodiments, a single unit dose is provided as a discrete dosage form (e.g., a tablet, capsule, patch, loaded syringe, vial, etc.).

[2106] Similarity: As used herein, the term “similarity” refers to the overall relatedness between polymeric molecules, e.g. between polynucleotide molecules (e.g. DNA molecules and/or RNA molecules) and/or between polypeptide molecules. Calculation of percent similarity of polymeric molecules to one another can be performed in the same manner as a calculation of percent identity, except that calculation of percent similarity takes into account conservative substitutions as is understood in the art.

[2107] Split dose: As used herein, a “split dose” is the division of single unit dose or total daily dose into two or more doses.

[2108] Stable: As used herein “stable” refers to a compound that is sufficiently robust to survive isolation to a useful degree of purity from a reaction mixture, and preferably capable of formulation into an efficacious therapeutic agent.

[2109] Stabilized: As used herein, the term “stabilize”, “stabilized,” “stabilized region” means to make or become stable.

[2110] Subject: As used herein, the term “subject” or “patient” refers to any organism to which a composition in accordance with the disclosure may be administered, e.g., for experimental, diagnostic, prophylactic, and/or therapeutic purposes. Typical subjects include animals (e.g., mammals such as mice, rats, rabbits, non-human primates, and humans) and/or plants.

[2111] Substantially: As used herein, the term “substantially” refers to the qualitative condition of exhibiting total or near-total extent or degree of a characteristic or property of interest. One of ordinary skill in the biological arts will understand that biological and chemical phenomena rarely, if ever, go to completion and/or proceed to completeness or achieve or avoid an absolute result. The term “substantially” is therefore used herein to capture the potential lack of completeness inherent in many biological and chemical phenomena.

[2112] Substantially equal: As used herein as it relates to time differences between doses, the term means plus/minus 2%.

[2113] Substantially simultaneously: As used herein and as it relates to plurality of doses, the term means within 2 seconds.

[2114] Suffering from: An individual who is “suffering from” a disease, disorder, and/or condition has been diagnosed with or displays one or more symptoms of a disease, disorder, and/or condition.

[2115] Susceptible to: An individual who is “susceptible to” a disease, disorder, and/or condition has not been diagnosed with and/or may not exhibit symptoms of the disease, disorder, and/or condition but harbors a propensity to develop a disease or its symptoms. In some embodiments, an individual who is susceptible to a disease, disorder, and/or condition (for example, cancer) may be characterized by one or more of the following: (1) a genetic mutation associated with development of the disease, disorder, and/or condition; (2) a genetic polymorphism associated with development of the disease, disorder, and/or condition; (3) increased and/or decreased expression and/or activity of a protein and/or nucleic acid associated with the disease, disorder, and/or condition; (4) habits and/or lifestyles associated with development of the disease, disorder, and/or condition; (5) a family history of the disease, disorder, and/or condition; and (6) exposure to and/or infection with a microbe associated with development of the disease, disorder, and/or condition. In some embodiments, an individual who is susceptible to a disease, disorder, and/or condition will develop the disease, disorder, and/or condition. In some embodiments, an individual who is susceptible to a disease, disorder, and/or condition will not develop the disease, disorder, and/or condition.

[2116] Sustained release: As used herein, the term “sustained release” refers to a pharmaceutical composition or compound release profile that conforms to a release rate over a specific period of time.

[2117] Synthetic: The term “synthetic” means produced, prepared, and/or manufactured by the hand of man. Synthesis of polynucleotides or polypeptides or other molecules of the present disclosure may be chemical or enzymatic.

[2118] Targeting: As used herein, “targeting” means the process of design and selection of nucleic acid sequence that will hybridize to a target nucleic acid and induce a desired effect.

[2119] Targeted Cells: As used herein, “targeted cells” refers to any one or more cells of interest. The cells may be found in vitro, in vivo, in situ or in the tissue or organ of an organism. The organism may be an animal, preferably a mammal, more preferably a human and most preferably a patient.

[2120] Therapeutic Agent: The term “therapeutic agent” refers to any agent that, when administered to a subject, has a therapeutic, diagnostic, and/or prophylactic effect and/or elicits a desired biological and/or pharmacological effect.

[2121] Therapeutically effective amount: As used herein, the term “therapeutically effective amount” means an amount of an agent to be delivered (e.g., nucleic acid, drug, therapeutic agent, diagnostic agent, prophylactic agent, etc.) that is sufficient, when administered to a subject suffering from or susceptible to an infection, disease, disorder, and/or condition, to treat, improve symptoms of, diagnose, prevent, and/or delay the onset of the infection, disease, disorder, and/or condition. In some embodiments, a therapeutically effective amount is provided in a single dose. In some embodiments, a therapeutically effective amount is administered in a dosage regimen comprising a plurality of doses. Those skilled in the art will appreciate that in some embodiments, a unit dosage form may be considered to comprise a therapeutically effective amount of a particular agent or entity if it comprises an amount that is effective when administered as part of such a dosage regimen.

[2122] Therapeutically effective outcome: As used herein, the term “therapeutically effective outcome” means an outcome that is sufficient in a subject suffering from or susceptible to an infection, disease, disorder, and/or condition, to treat, improve symptoms of, diagnose, prevent, and/or delay the onset of the infection, disease, disorder, and/or condition.

[2123] Total daily dose: As used herein, a “total daily dose” is an amount given or prescribed in 24 hr period. It may be administered as a single unit dose.

[2124] Transfection: As used herein, the term “transfection” refers to methods to introduce exogenous nucleic acids into a cell. Methods of transfection include, but are not limited to, chemical methods, physical treatments and cationic lipids or mixtures.

[2125] Treating: As used herein, the term “treating” refers to partially or completely alleviating, ameliorating, improving, relieving, delaying onset of, inhibiting progression of, reducing severity of, and/or reducing incidence of one or more symptoms or features of a particular infection, disease, disorder, and/or condition. For example, “treating” cancer may refer to inhibiting survival, growth, and/or spread of a tumor. Treatment may be administered to a subject who does not exhibit signs of a disease, disorder, and/or condition and/or to a subject who exhibits only early signs of a disease, disorder, and/or condition for the purpose of decreasing the risk of developing pathology associated with the disease, disorder, and/or condition.

[2126] Unmodified: As used herein, “unmodified” refers to any substance, compound or molecule prior to being changed in any way. Unmodified may, but does not always, refer to the wild type or native form of a biomolecule. Molecules may undergo a series of modifications whereby each modified molecule may serve as the “unmodified” starting molecule for a subsequent modification.

[2127] Vector: As used herein, a “vector” is any molecule or moiety which transports, transduces or otherwise acts as a carrier of a heterologous molecule. Vectors of the present disclosure may be produced recombinantly and may be based on and/or may comprise adeno-associated virus (AAV) parent or reference sequence. Such parent or reference AAV sequences may serve as an original, second, third or subsequent sequence for engineering vectors. In non-limiting examples, such parent or reference V sequences may comprise any one or more of the following sequences: a polynucleotide sequence encoding a polypeptide or multi-polypeptide, which sequence may be wild-type or modified from wild-type and which sequence may encode full-length or partial sequence of a protein, protein domain, or one or more subunits of a protein; a polynucleotide comprising a modulatory or regulatory nucleic acid which sequence may be wild-type or modified from wild-type; and a transgene that may or may not be modified from wild-type sequence. These AAV sequences may serve as either the “donor” sequence of one or more codons (at the nucleic acid level) or amino acids (at the polypeptide level) or “acceptor” sequences of one or more codons (at the nucleic acid level) or amino acids (at the polypeptide level).

[2128] Viral genome: As used herein, a “viral genome” or “vector genome” is a polynucleotide comprising at least one inverted terminal repeat (ITR) and at least one encoded payload. A viral genome encodes at least one copy of the payload.

[2129] Described herein are compositions, methods, processes, kits and devices for the design, preparation, manufacture and/or formulation of AAV particles. In some embodiments, payloads, such as but not limited to AAV polynucleotides, may be encoded by payload constructs or contained within plasmids or vectors or recombinant adeno-associated viruses (AAVs).

[2130] The details of one or more embodiments of the disclosure are set forth in the accompanying description below. Although any materials and methods similar or equivalent to those described herein can be used in the practice or testing of the present disclosure, the preferred materials and methods are now described. Other features, objects and advantages of the disclosure will be apparent from the description. In the description, the singular forms also include the plural unless the context clearly dictates otherwise. Unless defined otherwise, all technical and scientific terms used herein have the same meaning as commonly understood by one of ordinary skill in the art to which this disclosure belongs. In the case of conflict, the present description will control.

[2131] The present disclosure is further illustrated by the following non-limiting examples.

### VII. Examples

### Example 1. Production and Purification of AAV Particles

[2132] AAV particles described herein may be produced using methods known in the art, such as, for example, triple transfection or baculovirus mediated virus production. Any suitable permissive or packaging cell known in the art may be employed to produce the vectors. Mammalian cells are often preferred. Also preferred are trans-complementing packaging cell lines that provide functions deleted from a replication-defective helper virus, e.g., 293 cells or other Ela trans-complementing cells.

[2133] The gene cassette may contain some or all of the parvovirus (e.g., AAV) cap and rep genes. Preferably, however, some or all of the cap and rep functions are provided in trans by introducing a packaging vector(s) encoding the capsid and/or Rep proteins into the cell. Most preferably, the gene cassette does not encode the capsid or Rep proteins. Alternatively, a packaging cell line is used that is stably transformed to express the cap and/or rep genes

[2134] Recombinant AAV virus particles are, in some cases, produced and purified from culture supernatants according to the procedure as described in US20160032254, the contents of which are incorporated by reference. Production may also involve methods known in the art including those using 293T cell, sf9 insect cells, triple transfection or any suitable production method.

[2135] In some cases, 293 cells are transfected with CaPO4 with plasmids required for production of AAV, i.e., AAV2 rep, an adenoviral helper construct and a ITR flanked transgene cassette. The AAV2 rep plasmid also contains the cap sequence of the particular virus being studied. Twenty-four hours after transfection, which occurs in serum containing DMEM, the medium is replaced with fresh medium with or without serum. Three (3) days after transfection, a sample is taken from the culture medium of the 293 adherent cells. Subsequently cells are scraped and transferred into a receptacle. After centrifugation to remove cellular pellet, a second sample is taken from the supernatant after scraping. Next cell lysis is achieved by three consecutive freeze-thaw cycles (−80 C. to 37 C.). Cellular debris is removed and sample 3 is taken from the medium. The samples are quantified for AAV particles by DNase resistant genome titration by Taqman™ PCR. The total production yield from such a transfection is equal to the particle concentration from sample 3.

[2136] AAV vector titers are measured according to genome copy number (genome particles per milliliter). Genome particle concentrations are based on Taqman® PCR of the vector DNA as previously reported (Clark et al, (1999) Hum. Gene Ther., 10:1031-1039; Veldwijk et al. (2002) Mol. Ther., 6:272-278).

### Example 2. Tissue Specific Expression

[2137] To evaluate the expression of various encoded antibody payloads in tissues, a series of AAV particles carrying the encoded antibody sequences driven by a panel of ubiquitous and tissue-specific promoters are made. These particles are administered to the specific tissue, e.g., intramuscularly, via an appropriate route, e.g., a single injection in the gastrocnemius muscle and expression is monitored to determine the relative expression potential of the payload as well as of each promoter in this target tissue. Measurement of antibody production is performed using standard techniques, for example by ELISA.

[2138] In some cases, the cytomegalovirus immediate early promoter (CMV), chimeric chicken-beta-actin (CAG), and ubiquitin C (UBC), CBA, H1 promoters provide robust expression.

### Example 3. Generation of Antibodies

### Antibody Production by Hybridoma Technology

[2139] Host animals (e.g. mice, rabbits, goats, and llamas) are immunized by an injection with an antigenic protein to elicit lymphocytes that specifically bind to the antigen. Lymphocytes are collected and fused with immortalized cell lines to generate hybridomas. Hybridomas are cultured in a suitable culture medium that is enriched with appropriate selection agents to promote growth.

[2140] Antibodies produced by the cultured hybridomas are subjected to analysis to determine binding specificity of the antibodies for the target antigen. Once antibodies with desirable characteristics are identified, corresponding hybridomas are subcloned through limiting dilution procedures and grown by standard methods. Antibodies produced by these cells are isolated and purified using standard immunoglobulin purification procedures.

### Recombinant Antibody Production

[2141] Recombinant antibodies are produced using heavy and light chain variable region cDNA sequences selected from hybridomas or from other sources. Sequences encoding antibody variable domains expressed by hybridomas are determined by extracting RNA molecules from antibody-producing hybridoma cells and producing cDNA by reverse transcriptase polymerase chain reaction (PCR). PCR is used to amplify cDNA using primers specific for heavy and light chain sequences. PCR products are then subcloned into plasmids for sequence analysis. Antibodies are produced by insertion of resulting variable domain sequences into expression vectors.

[2142] Recombinant antibodies are also produced using phage display technology. Target antigens are screened, in vitro, using phage display libraries having millions to billions of phage particles expressing unique single chain variable fragments (scFvs) on their viral coat. Precipitated phage particles are analyzed and sequences encoding expressed scFvs are determined. Sequences encoding antibody variable domains and/or CDRs are inserted into expression vectors for antibody production.

[2143] Recombinant antibodies are further produced using yeast surface display technology, wherein antibody variable domain sequences are expressed on the cell surface of Saccharomyces cerevisiae. Recombinant antibodies are developed by displaying the antibody fragment of interest as a fusion to e.g. Aga2p protein on the surface of the yeast, where the protein interacts with proteins and small molecules in a solution. scFvs with affinity towards desired receptors are isolated from the yeast surface using magnetic separation and flow cytometry. Several cycles of yeast surface display and isolation will be done to attain scFvs with desired properties through directed evolution.

### Example 4. Optimization of the Encoded Antibody

[2144] To design an optimal framework for the expression of an antibody, the heavy and light chains of several antibodies separated by an F2A self-processing peptide sequence are cloned into a mammalian expression vector under the control of the CMV promoter. 293T cells or any suitable cell line transfected with these vectors exhibit secretion of human IgG into the culture supernatant that is then detected by ELISA.

[2145] To increase expression, the antibody chains and/or the processing peptide are codon optimized for mammalian expression. In some instances, a furin cleavage site at the N-terminus is inserted for better processing.

[2146] To improve secretion of the antibody, the endogenous signal sequences are replaced with a sequence which may or may not be codon optimized, derived from any gene. In some cases, the human growth hormone signal sequence is used. Any of the heavy, light or both chains may be driven by any signal sequence, whether the same or different. Antibody expression is confirmed using standard immunohistochemical techniques, including ELISA.

### Example 5. Vectored Antibodies

[2147] Viral genomes are designed for AAV delivery of antibodies to cells. The viral genome comprises a payload region and at least one inverted terminal repeat (ITR) region. The payload region may optionally encode regulatory elements e.g., a promoter region, an intronic region, or a polyadenylation sequence. The payload region comprises a sequence encoding one or more polypeptides selected from the group consisting of those listed in Table 3. An exemplary payload region comprises a sequence encoding an antibody heavy chain, a region encoding an antibody light chain and a region encoding a linker connecting the heavy and light chain sequences or polypeptides before further processing. A promoter is selected to target the desired tissue or for desired regulation of expression, or both. The promoter may be selected from human EF1α, CMV, CBA, and its derivative CAG, GUSB, UBC, or any other promoter known to one with skill in the art, or combinations thereof. The 5′ and 3′ ITRs may or may not be of the same serotype as the capsid of the AAV particle.

[2148] Payload regions may optionally encode a linker between light and heavy antibody chain sequences or polypeptides. Sequence encoding linkers are derived from an internal ribosome entry site (IRES; SEQ ID NO: 1732), foot and mouth disease virus 2A (F2A; SEQ ID NO: 1727), porcine teschovirus-1 virus 2A (P2A; SEQ ID NO: 1728), a furin cleavage site (Furin; SEQ ID NO: 1724), or a 5xG4S (SEQ ID NO: 1729; “5xG4S” peptide sequence disclosed as SEQ ID NO: 13144) linker sequence. In various payload regions, the order of heavy and light chains is alternated with respect to 5′ to 3′ direction. Payloads are further designed to encode protein signal sequences (to aid in protein processing, localization, and/or secretion) as well as an untranslated poly A tail.

[2149] Each viral genome is then incorporated into an AAV cloning vector to create payload expression vectors.

[2150] The payload expression vectors are expressed in e.g. Expi 293 cells. The supernatants are collected and expressed antibodies are purified using protein AG beads. Supernatants are diluted with a loading buffer and applied to a column prepared with A/G beads. Unbound proteins are washed through with loading buffer. Elution buffer is added to the column, fractions collected, and fractions containing proteins of interest are identified with absorption spectroscopy technique, pooled together, and neutralized. Western blotting techniques are used to identify payload regions producing the antibody proteins of interest. Purified antibodies are then tested for their affinity to their specific target by e.g. ELISA essay technique and antibodies with the highest affinity are identified and selected.

[2151] Finally, the rAAVs are produced using, for example, HEK293T cells. The cells are transfected simultaneously with the viral genome of the present disclosure, a viral genome encoding helper proteins and a viral genome encoding replication and capsid proteins.

### Example 6. In Vivo Expression and Efficacy of Antibody Payloads

[2152] To determine the efficacy or comparative expression of encoded antibodies, dose-dependent expression is determined at a series of time points. Samples from mice treated with AAV particles encoding antibodies or luciferase at various levels are examined for expression using standard techniques such as nucleic acid analyses for RNA levels, protein analyses for antibody levels and compared to the expression of the luciferase control.

### Example 7. Treatment of Non-Infectious Disease

[2153] AAV particles of the current disclosure encoding an antibody are administered to a patient who has been diagnosed with a non-infectious disease, disorder or condition. The non-infectious disease, disorder or condition may be e.g. a central nervous system disease, muscular disease, neuropathy, psychiatric disorder, ocular disease, pain disorder, migraine, cancer, systemic disease, inflammation, or an immune system disease. The purpose of the treatment may be aimed to manage the disease, prevent or slow the progression of the disease, treat the symptoms associated with the disease and/or cure the disease.

[2154] The AAV particles may be administered through an intramuscular injection to the skeletal muscle. The administration may include one or more injections over a period of time. The level and distribution of AAV particles and antibody expression is monitored by standard diagnostic techniques known in the art. Such diagnostic techniques include e.g. (e.g. from blood, urine, or saliva), cerebrospinal fluid (CSF) testing, or any other testing useful for monitoring antibody levels in the body.

[2155] Additionally, the progression of the disease and the health of the patient is monitored by standard diagnostic techniques known in the art. Such techniques may include diagnostic imaging (e.g. X-ray, MRA scans, Ultrasound scans, PET scans, Nuclear scans, mammography), biopsy, laboratory tests (e.g. from blood, urine, or saliva), cerebrospinal fluid (CSF) testing, vital signs, clinical tests (cognitive, motor or reflex tests) and other relevant techniques. Treatment with the AAV particles may results in cure of the non-infectious disease, slowing down or stabilizing the progression of the disease, or have no effect on the progression of the disease. Additionally, the treatment may reduce severity of one or more symptoms associated with the disease, eliminate one or more symptoms associated with the disease or have no effect on the symptoms.

### VIII. Equivalents and Scope

[2156] Those skilled in the art will recognize, or be able to ascertain using no more than routine experimentation, many equivalents to the specific embodiments in accordance with the disclosure described herein. The scope of the present disclosure is not intended to be limited to the above Description, but rather is as set forth in the appended claims.

[2157] In the claims, articles such as “a,” “an,” and “the” may mean one or more than one unless indicated to the contrary or otherwise evident from the context. Claims or descriptions that include “or” between one or more members of a group are considered satisfied if one, more than one, or all of the group members are present in, employed in, or otherwise relevant to a given product or process unless indicated to the contrary or otherwise evident from the context. The disclosure includes embodiments in which exactly one member of the group is present in, employed in, or otherwise relevant to a given product or process. The disclosure includes embodiments in which more than one, or the entire group members are present in, employed in, or otherwise relevant to a given product or process.

[2158] It is also noted that the term “comprising” is intended to be open and permits but does not require the inclusion of additional elements or steps. When the term “comprising” is used herein, the term “consisting of” is thus also encompassed and disclosed.

[2159] Where ranges are given, endpoints are included. Furthermore, it is to be understood that unless otherwise indicated or otherwise evident from the context and understanding of one of ordinary skill in the art, values that are expressed as ranges can assume any specific value or subrange within the stated ranges in different embodiments of the disclosure, to the tenth of the unit of the lower limit of the range, unless the context clearly dictates otherwise.

[2160] In addition, it is to be understood that any particular embodiment of the present disclosure that falls within the prior art may be explicitly excluded from any one or more of the claims. Since such embodiments are deemed to be known to one of ordinary skill in the art, they may be excluded even if the exclusion is not set forth explicitly herein. Any particular embodiment of the compositions of the disclosure (e.g., any antibiotic, therapeutic or active ingredient; any method of production; any method of use; etc.) can be excluded from any one or more claims, for any reason, whether or not related to the existence of prior art.

[2161] It is to be understood that the words which have been used are words of description rather than limitation, and that changes may be made within the purview of the appended claims without departing from the true scope and spirit of the disclosure in its broader aspects.

[2162] While the present disclosure has been described at some length and with some particularity with respect to the several described embodiments, it is not intended that it should be limited to any such particulars or embodiments or any particular embodiment, but it is to be construed with reference to the appended claims so as to provide the broadest possible interpretation of such claims in view of the prior art and, therefore, to effectively encompass the intended scope of the disclosure.

The application's sequence listing, which the Patent Office published only in electronic form, follows.

SEQUENCE LISTING (13580 sequences)

SEQ ID NO: 1 - protein, 743 aa, Artificial Sequence
  source: /note="Description of Artificial Sequence: Synthetic polypeptide"
MAADGYLPDWLEDNLSEGIREWWALKPGAPQPKANQQHQDNARGLVLPGYKYLGPGNGLDKGEPVNAADAAALEHDKAYDQQLKAGDNPYLKYNHADAEFQERLKEDTSFGGNLGRAVFQAKKRLLEPLGLVEEAAKTAPGKKRPVEQSPQEPDSSAGIGKSGAQPAKKRLNFGQTGDTESVPDPQPIGEPPAAPSGVGSLTMASGGGAPVADNNEGADGVGSSSGNWHCDSQWLGDRVITTSTRTWALPTYNNHLYKQISNSTSGGSSNDNAYFGYSTPWGYFDFNRFHCHFSPRDWQRLINNNWGFRPKRLNFKLFNIQVKEVTDNNGVKTIANNLTSTVQVFTDSDYQLPYVLGSAHEGCLPPFPADVFMIPQYGYLTLNDGSQAVGRSSFYCLEYFPSQMLRTGNNFQFSYEFENVPFHSSYAHSQSLDRLMNPLIDQYLYYLSKTINGSGQNQQTLKFSVAGPSNMAVQGRNYIPGPSYRQQRVSTTVTQNNNSEFAWPGASSWALNGRNSLMNPGPAMASHKEGEDRFFPLSGSLIFGKQGTGRDNVDADKVMITNEEEIKTTNPVATESYGQVATNHQSDGTLAVPFKAQAQTGWVQNQGILPGMVWQDRDVYLQGPIWAKIPHTDGNFHPSPLMGGFGMKHPPPQILIKNTPVPADPPTAFNKDKLNSFITQYSTGQVSVEIEWELQKENSKRWNPEIQYTSNYYKSNNVEFAVNTEGVYSEPRPIGTRYLTRNL

SEQ ID NO: 2 - DNA, 2232 bp, Artificial Sequence
  source: /note="Description of Artificial Sequence: Synthetic polynucleotide"
atggctgccgatggttatcttccagattggctcgaggacaaccttagtgaaggaattcgcgagtggtgggctttgaaacctggagcccctcaacccaaggcaaatcaacaacatcaagacaacgctcgaggtcttgtgcttccgggttacaaataccttggacccggcaacggactcgacaagggggagccggtcaacgcagcagacgcggcggccctcgagcacgacaaggcctacgaccagcagctcaaggccggagacaacccgtacctcaagtacaaccacgccgacgccgagttccaggagcggctcaaagaagatacgtcttttgggggcaacctcgggcgagcagtcttccaggccaaaaagaggcttcttgaacctcttggtctggttgaggaagcggctaagacggctcctggaaagaagaggcctgtagagcagtctcctcaggaaccggactcctccgcgggtattggcaaatcgggtgcacagcccgctaaaaagagactcaatttcggtcagactggcgacacagagtcagtcccagaccctcaaccaatcggagaacctcccgcagccccctcaggtgtgggatctcttacaatggcttcaggtggtggcgcaccagtggcagacaataacgaaggtgccgatggagtgggtagttcctcgggaaattggcattgcgattcccaatggctgggggacagagtcatcaccaccagcacccgaacctgggccctgcccacctacaacaatcacctctacaagcaaatctccaacagcacatctggaggatcttcaaatgacaacgcctacttcggctacagcaccccctgggggtattttgacttcaacagattccactgccacttctcaccacgtgactggcagcgactcatcaacaacaactggggattccggcctaagcgactcaacttcaagctcttcaacattcaggtcaaagaggttacggacaacaatggagtcaagaccatcgccaataaccttaccagcacggtccaggtcttcacggactcagactatcagctcccgtacgtgctcgggtcggctcacgagggctgcctcccgccgttcccagcggacgttttcatgattcctcagtacgggtatctgacgcttaatgatggaagccaggccgtgggtcgttcgtccttttactgcctggaatatttcccgtcgcaaatgctaagaacgggtaacaacttccagttcagctacgagtttgagaacgtacctttccatagcagctacgctcacagccaaagcctggaccgactaatgaatccactcatcgaccaatacttgtactatctctcaaagactattaacggttctggacagaatcaacaaacgctaaaattcagtgtggccggacccagcaacatggctgtccagggaagaaactacatacctggacccagctaccgacaacaacgtgtctcaaccactgtgactcaaaacaacaacagcgaatttgcttggcctggagcttcttcttgggctctcaatggacgtaatagcttgatgaatcctggacctgctatggccagccacaaagaaggagaggaccgtttctttcctttgtctggatctttaatttttggcaaacaaggaactggaagagacaacgtggatgcggacaaagtcatgataaccaacgaagaagaaattaaaactactaacccggtagcaacggagtcctatggacaagtggccacaaaccaccagagtgatgggactttggcggtgccttttaaggcacaggcgcagaccggctgggttcaaaaccaaggaatacttccgggtatggtttggcaggacagagatgtgtacctgcaaggacccatttgggccaaaattcctcacacggacggcaactttcacccttctccgctgatgggagggtttggaatgaagcacccgcctcctcagatcctcatcaaaaacacacctgtacctgcggatcctccaacggccttcaacaaggacaagctgaactctttcatcacccagtattctactggccaagtcagcgtggagatcgagtgggagctgcagaaggaaaacagcaagcgctggaacccggagatccagtacacttccaactattacaagtctaataatgttgaatttgctgttaatactgaaggtgtatatagtgaaccccgccccattggcaccagatacctgactcgtaatctgtaa

SEQ ID NO: 3 - DNA, 2232 bp, Artificial Sequence
  source: /note="Description of Artificial Sequence: Synthetic polynucleotide"
atggctgccgatggttatcttccagattggctcgaggacaaccttagtgaaggaattcgcgagtggtgggctttgaaacctggagcccctcaacccaaggcaaatcaacaacatcaagacaacgctcgaggtcttgtgcttccgggttacaaataccttggacccggcaacggactcgacaagggggagccggtcaacgcagcagacgcggcggccctcgagcacgacaaggcctacgaccagcagctcaaggccggagacaacccgtacctcaagtacaaccacgccgacgccgagttccaggagcggctcaaagaagatacgtcttttgggggcaacctcgggcgagcagtcttccaggccaaaaagaggcttcttgaacctcttggtctggttgaggaagcggctaagacggctcctggaaagaagaggcctgtagagcagtctcctcaggaaccggactcctccgcgggtattggcaaatcgggtgcacagcccgctaaaaagagactcaatttcggtcagactggcgacacagagtcagtcccagaccctcaaccaatcggagaacctcccgcagccccctcaggtgtgggatctcttacaatggcttcaggtggtggcgcaccagtggcagacaataacgaaggtgccgatggagtgggtagttcctcgggaaattggcattgcgattcccaatggctgggggacagagtcatcaccaccagcacccgaacctgggccctgcccacctacaacaatcacctctacaagcaaatctccaacagcacatctggaggatcttcaaatgacaacgcctacttcggctacagcaccccctgggggtattttgacttcaacagattccactgccacttctcaccacgtgactggcagcgactcatcaacaacaactggggattccggcctaagcgactcaacttcaagctcttcaacattcaggtcaaagaggttacggacaacaatggagtcaagaccatcgccaataaccttaccagcacggtccaggtcttcacggactcagactatcagctcccgtacgtgctcgggtcggctcacgagggctgcctcccgccgttcccagcggacgttttcatgattcctcagtacgggtatctgacgcttaatgatggaagccaggccgtgggtcgttcgtccttttactgcctggaatatttcccgtcgcaaatgctaagaacgggtaacaacttccagttcagctacgagtttgagaacgtacctttccatagcagctacgctcacagccaaagcctggaccgactaatgaatccactcatcgaccaatacttgtactatctctcaaagactattaacggttctggacagaatcaacaaacgctaaaattcagtgtggccggacccagcaacatggctgtccagggaagaaactacatacctggacccagctaccgacaacaacgtgtctcaaccactgtgactcaaaacaacaacagcgaatttgcttggcctggagcttcttcttgggctctcaatggacgtaatagcttgatgaatcctggacctgctatggccagccacaaagaaggagaggaccgtttctttcctttgtctggatctttaatttttggcaaacaaggaactggaagagacaacgtggatgcggacaaagtcatgataaccaacgaagaagaaattaaaactactaacccggtagcaacggagtcctatggacaagtggccacaaaccaccagagtgcccaaactttggcggtgccttttaaggcacaggcgcagaccggctgggttcaaaaccaaggaatacttccgggtatggtttggcaggacagagatgtgtacctgcaaggacccatttgggccaaaattcctcacacggacggcaactttcacccttctccgctgatgggagggtttggaatgaagcacccgcctcctcagatcctcatcaaaaacacacctgtacctgcggatcctccaacggccttcaacaaggacaagctgaactctttcatcacccagtattctactggccaagtcagcgtggagatcgagtgggagctgcagaaggaaaacagcaagcgctggaacccggagatccagtacacttccaactattacaagtctaataatgttgaatttgctgttaatactgaaggtgtatatagtgaaccccgccccattggcaccagatacctgactcgtaatctgtaa

SEQ ID NO: 4 - protein, 743 aa, Artificial Sequence
  source: /note="Description of Artificial Sequence: Synthetic polypeptide"
MAADGYLPDWLEDNLSEGIREWWALKPGAPQPKANQQHQDNARGLVLPGYKYLGPGNGLDKGEPVNAADAAALEHDKAYDQQLKAGDNPYLKYNHADAEFQERLKEDTSFGGNLGRAVFQAKKRLLEPLGLVEEAAKTAPGKKRPVEQSPQEPDSSAGIGKSGAQPAKKRLNFGQTGDTESVPDPQPIGEPPAAPSGVGSLTMASGGGAPVADNNEGADGVGSSSGNWHCDSQWLGDRVITTSTRTWALPTYNNHLYKQISNSTSGGSSNDNAYFGYSTPWGYFDFNRFHCHFSPRDWQRLINNNWGFRPKRLNFKLFNIQVKEVTDNNGVKTIANNLTSTVQVFTDSDYQLPYVLGSAHEGCLPPFPADVFMIPQYGYLTLNDGSQAVGRSSFYCLEYFPSQMLRTGNNFQFSYEFENVPFHSSYAHSQSLDRLMNPLIDQYLYYLSRTINGSGQNQQTLKFSVAGPSNMAVQGRNYIPGPSYRQQRVSTTVTQNNNSEFAWPGASSWALNGRNSLMNPGPAMASHKEGEDRFFPLSGSLIFGKQGTGRDNVDADKVMITNEEEIKTTNPVATESYGQVATNHQSDGTLAVPFKAQAQTGWVQNQGILPGMVWQDRDVYLQGPIWAKIPHTDGNFHPSPLMGGFGMKHPPPQILIKNTPVPADPPTAFNKDKLNSFITQYSTGQVSVEIEWELQKENSKRWNPEIQYTSNYYKSNNVEFAVNTEGVYSEPRPIGTRYLTRNL

SEQ ID NO: 5 - protein, 743 aa, Artificial Sequence
  source: /note="Description of Artificial Sequence: Synthetic polypeptide"
MAADGYLPDWLEDNLSEGIREWWALKPGAPQPKANQQHQDNARGLVLPGYKYLGPGNGLDKGEPVNAADAAALEHDKAYDQQLKAGDNPYLKYNHADAEFQERLKEDTSFGGNLGRAVFQAKKRLLEPLGLVEEAAKTAPGKKRPVEQSPQEPDSSAGIGKSGAQPAKKRLNFGQTGDTESVPDPQPIGEPPAAPSGVGSLTMASGGGAPVADNNEGADGVGSSSGNWHCDSQWLGDRVITTSTRTWALPTYNNHLYKQISNSTSGGSSNDNAYFGYSTPWGYFDFNRFHCHFSPRDWQRLINNNWGFRPKRLNFKLFNIQVKEVTDNNGVKTIANNLTSTVQVFTDSDYQLPYVLGSAHEGCLPPFPADVFMIPQYGYLTLNDGSQAVGRSSFYCLEYFPSQMLRTGNNFQFSYEFENVPFHSSYAHSQSLDRLMNPLIDQYLYYLSRTINGSGQNQQTLKFSVAGPSNMAVQGRNYIPGPSYRQQRVSTTVTQNNNSEFAWPGASSWALNGRNSLMNPGPAMASHKEGEDRFFPLSGSLIFGKQGTGRDNVDADKVMITNEEEIKTTNPVATESYGQVATNHQSAQTLAVPFKAQAQTGWVQNQGILPGMVWQDRDVYLQGPIWAKIPHTDGNFHPSPLMGGFGMKHPPPQILIKNTPVPADPPTAFNKDKLNSFITQYSTGQVSVEIEWELQKENSKRWNPEIQYTSNYYKSNNVEFAVNTEGVYSEPRPIGTRYLTRNL

SEQ ID NO: 6 - DNA, 2232 bp, Artificial Sequence
  source: /note="Description of Artificial Sequence: Synthetic polynucleotide"
atggctgccgatggttatcttccagattggctcgaggacaaccttagtgaaggaattcgcgagtggtgggctttgaaacctggagcccctcaacccaaggcaaatcaacaacatcaagacaacgctcgaggtcttgtgcttccgggttacaaataccttggacccggcaacggactcgacaagggggagccggtcaacgcagcagacgcggcggccctcgagcacgacaaggcctacgaccagcagctcaaggccggagacaacccgtacctcaagtacaaccacgccgacgccgagttccaggagcggctcaaagaagatacgtcttttgggggcaacctcgggcgagcagtcttccaggccaaaaagaggcttcttgaacctcttggtctggttgaggaagcggctaagacggctcctggaaagaagaggcctgtagagcagtctcctcaggaaccggactcctccgcgggtattggcaaatcgggtgcacagcccgctaaaaagagactcaatttcggtcagactggcgacacagagtcagtcccagaccctcaaccaatcggagaacctcccgcagccccctcaggtgtgggatctcttacaatggcttcaggtggtggcgcaccagtggcagacaataacgaaggtgccgatggagtgggtagttcctcgggaaattggcattgcgattcccaatggctgggggacagagtcatcaccaccagcacccgaacctgggccctgcccacctacaacaatcacctctacaagcaaatctccaacagcacatctggaggatcttcaaatgacaacgcctacttcggctacagcaccccctgggggtattttgacttcaacagattccactgccacttctcaccacgtgactggcagcgactcatcaacaacaactggggattccggcctaagcgactcaacttcaagctcttcaacattcaggtcaaagaggttacggacaacaatggagtcaagaccatcgccaataaccttaccagcacggtccaggtcttcacggactcagactatcagctcccgtacgtgctcgggtcggctcacgagggctgcctcccgccgttcccagcggacgttttcatgattcctcagtacgggtatctgacgcttaatgatggaagccaggccgtgggtcgttcgtccttttactgcctggaatatttcccgtcgcaaatgctaagaacgggtaacaacttccagttcagctacgagtttgagaacgtacctttccatagcagctacgctcacagccaaagcctggaccgactaatgaatccactcatcgaccaatacttgtactatctctctagaactattaacggttctggacagaatcaacaaacgctaaaattcagtgtggccggacccagcaacatggctgtccagggaagaaactacatacctggacccagctaccgacaacaacgtgtctcaaccactgtgactcaaaacaacaacagcgaatttgcttggcctggagcttcttcttgggctctcaatggacgtaatagcttgatgaatcctggacctgctatggccagccacaaagaaggagaggaccgtttctttcctttgtctggatctttaatttttggcaaacaaggtaccggcagagacaacgtggatgcggacaaagtcatgataaccaacgaagaagaaattaaaactactaacccggtagcaacggagtcctatggacaagtggccacaaaccaccagagtgcccaaactttggcggtgccttttaaggcacaggcgcagaccggttgggttcaaaaccaaggaatacttccgggtatggtttggcaggacagagatgtgtacctgcaaggacccatttgggccaaaattcctcacacggacggcaactttcacccttctccgctgatgggagggtttggaatgaagcacccgcctcctcagatcctcatcaaaaacacacctgtacctgcggatcctccaacggccttcaacaaggacaagctgaactctttcatcacccagtattctactggccaagtcagcgtggagatcgagtgggagctgcagaaggaaaacagcaagcgctggaacccggagatccagtacacttccaactattacaagtctaataatgttgaatttgctgttaatactgaaggtgtatatagtgaaccccgccccattggcaccagatacctgactcgtaatctgtaa

SEQ ID NO: 7 - protein, 736 aa, Artificial Sequence
  source: /note="Description of Artificial Sequence: Synthetic polypeptide"
MAADGYLPDWLEDNLSEGIREWWALKPGAPQPKANQQHQDNARGLVLPGYKYLGPGNGLDKGEPVNAADAAALEHDKAYDQQLKAGDNPYLKYNHADAEFQERLKEDTSFGGNLGRAVFQAKKRLLEPLGLVEEAAKTAPGKKRPVEQSPQEPDSSAGIGKSGAQPAKKRLNFGQTGDTESVPDPQPIGEPPAAPSGVGSLTMASGGGAPVADNNEGADGVGSSSGNWHCDSQWLGDRVITTSTRTWALPTYNNHLYKQISNSTSGGSSNDNAYFGYSTPWGYFDFNRFHCHFSPRDWQRLINNNWGFRPKRLNFKLFNIQVKEVTDNNGVKTIANNLTSTVQVFTDSDYQLPYVLGSAHEGCLPPFPADVFMIPQYGYLTLNDGSQAVGRSSFYCLEYFPSQMLRTGNNFQFSYEFENVPFHSSYAHSQSLDRLMNPLIDQYLYYLSRTIQSSQTPRQTLKFSVAGPSNMAVQGRNYIPGPSYRQQRVSTTVTQNNNSEFAWPGASSWALNGRNSLMNPGPAMASHKEGEDRFFPLSGSLIFGKQGTGRDNVDADKVMITNEEEIKTTNPVATESYGQVATNHQSAQAQAQTGWVQNQGILPGMVWQDRDVYLQGPIWAKIPHTDGNFHPSPLMGGFGMKHPPPQILIKNTPVPADPPTAFNKDKLNSFITQYSTGQVSVEIEWELQKENSKRWNPEIQYTSNYYKSNNVEFAVNTEGVYSEPRPIGTRYLTRNL

SEQ ID NO: 8 - protein, 743 aa, Artificial Sequence
  source: /note="Description of Artificial Sequence: Synthetic polypeptide"
MAADGYLPDWLEDNLSEGIREWWALKPGAPQPKANQQHQDNARGLVLPGYKYLGPGNGLDKGEPVNAADAAALEHDKAYDQQLKAGDNPYLKYNHADAEFQERLKEDTSFGGNLGRAVFQAKKRLLEPLGLVEEAAKTAPGKKRPVEQSPQEPDSSAGIGKSGAQPAKKRLNFGQTGDTESVPDPQPIGEPPAAPSGVGSLTMASGGGAPVADNNEGADGVGSSSGNWHCDSQWLGDRVITTSTRTWALPTYNNHLYKQISNSTSGGSSNDNAYFGYSTPWGYFDFNRFHCHFSPRDWQRLINNNWGFRPKRLNFKLFNIQVKEVTDNNGVKTIANNLTSTVQVFTDSDYQLPYVLGSAHEGCLPPFPADVFMIPQYGYLTLNDGSQAVGRSSFYCLEYFPSQMLRTGNNFQFSYEFENVPFHSSYAHSQSLDRLMNPLIDQYLYYLSRTIILGTGTSQTLKFSVAGPSNMAVQGRNYIPGPSYRQQRVSTTVTQNNNSEFAWPGASSWALNGRNSLMNPGPAMASHKEGEDRFFPLSGSLIFGKQGTGRDNVDADKVMITNEEEIKTTNPVATESYGQVATNHQSAQTRTNPEAAQAQTGWVQNQGILPGMVWQDRDVYLQGPIWAKIPHTDGNFHPSPLMGGFGMKHPPPQILIKNTPVPADPPTAFNKDKLNSFITQYSTGQVSVEIEWELQKENSKRWNPEIQYTSNYYKSNNVEFAVNTEGVYSEPRPIGTRYLTRNL

SEQ ID NO: 9 - protein, 743 aa, Artificial Sequence
  source: /note="Description of Artificial Sequence: Synthetic polypeptide"
MAADGYLPDWLEDNLSEGIREWWALKPGAPQPKANQQHQDNARGLVLPGYKYLGPGNGLDKGEPVNAADAAALEHDKAYDQQLKAGDNPYLKYNHADAEFQERLKEDTSFGGNLGRAVFQAKKRLLEPLGLVEEAAKTAPGKKRPVEQSPQEPDSSAGIGKSGAQPAKKRLNFGQTGDTESVPDPQPIGEPPAAPSGVGSLTMASGGGAPVADNNEGADGVGSSSGNWHCDSQWLGDRVITTSTRTWALPTYNNHLYKQISNSTSGGSSNDNAYFGYSTPWGYFDFNRFHCHFSPRDWQRLINNNWGFRPKRLNFKLFNIQVKEVTDNNGVKTIANNLTSTVQVFTDSDYQLPYVLGSAHEGCLPPFPADVFMIPQYGYLTLNDGSQAVGRSSFYCLEYFPSQMLRTGNNFQFSYEFENVPFHSSYAHSQSLDRLMNPLIDQYLYYLSRTIILGTGTSQTLKFSVAGPSNMAVQGRNYIPGPSYRQQRVSTTVTQNNNSEFAWPGASSWALNGRNSLMNPGPAMASHKEGEDRFFPLSGSLIFGKQGTGRDNVDADKVMITNEEEIKTTNPVATESYGQVATNHQSAQNGGTSSSAQAQTGWVQNQGILPGMVWQDRDVYLQGPIWAKIPHTDGNFHPSPLMGGFGMKHPPPQILIKNTPVPADPPTAFNKDKLNSFITQYSTGQVSVEIEWELQKENSKRWNPEIQYTSNYYKSNNVEFAVNTEGVYSEPRPIGTRYLTRNL

SEQ ID NO: 10 - protein, 743 aa, Artificial Sequence
  source: /note="Description of Artificial Sequence: Synthetic polypeptide"
MAADGYLPDWLEDNLSEGIREWWALKPGAPQPKANQQHQDNARGLVLPGYKYLGPGNGLDKGEPVNAADAAALEHDKAYDQQLKAGDNPYLKYNHADAEFQERLKEDTSFGGNLGRAVFQAKKRLLEPLGLVEEAAKTAPGKKRPVEQSPQEPDSSAGIGKSGAQPAKKRLNFGQTGDTESVPDPQPIGEPPAAPSGVGSLTMASGGGAPVADNNEGADGVGSSSGNWHCDSQWLGDRVITTSTRTWALPTYNNHLYKQISNSTSGGSSNDNAYFGYSTPWGYFDFNRFHCHFSPRDWQRLINNNWGFRPKRLNFKLFNIQVKEVTDNNGVKTIANNLTSTVQVFTDSDYQLPYVLGSAHEGCLPPFPADVFMIPQYGYLTLNDGSQAVGRSSFYCLEYFPSQMLRTGNNFQFSYEFENVPFHSSYAHSQSLDRLMNPLIDQYLYYLSRTINGSGQNQQTLKFSVAGPSNMAVQGRNYIPGPSYRQQRVSTTVTQNNNSEFAWPGASSWALNGRNSLMNPGPAMASHKEGEDRFFPLSGSLIFGKQGTGRDNVDADKVMITNEEEIKTTNPVATESYGQVATNHQSAQQAVRTSLAQAQTGWVQNQGILPGMVWQDRDVYLQGPIWAKIPHTDGNFHPSPLMGGFGMKHPPPQILIKNTPVPADPPTAFNKDKLNSFITQYSTGQVSVEIEWELQKENSKRWNPEIQYTSNYYKSNNVEFAVNTEGVYSEPRPIGTRYLTRNL

SEQ ID NO: 11 - protein, 736 aa, Artificial Sequence
  source: /note="Description of Artificial Sequence: Synthetic polypeptide"
MAADGYLPDWLEDNLSEGIREWWALKPGAPQPKANQQHQDNARGLVLPGYKYLGPGNGLDKGEPVNAADAAALEHDKAYDQQLKAGDNPYLKYNHADAEFQERLKEDTSFGGNLGRAVFQAKKRLLEPLGLVEEAAKTAPGKKRPVEQSPQEPDSSAGIGKSGAQPAKKRLNFGQTGDTESVPDPQPIGEPPAAPSGVGSLTMASGGGAPVADNNEGADGVGSSSGNWHCDSQWLGDRVITTSTRTWALPTYNNHLYKQISNSTSGGSSNDNAYFGYSTPWGYFDFNRFHCHFSPRDWQRLINNNWGFRPKRLNFKLFNIQVKEVTDNNGVKTIANNLTSTVQVFTDSDYQLPYVLGSAHEGCLPPFPADVFMIPQYGYLTLNDGSQAVGRSSFYCLEYFPSQMLRTGNNFQFSYEFENVPFHSSYAHSQSLDRLMNPLIDQYLYYLSRTINGSGQNQQTLKFSVAGPSNMAVQGRNYIPGPSYRQQRVSTTVTQNNNSEFAWPGASSWALNGRNSLMNPGPAMASHKEGEDRFFPLSGSLIFGKQGTGRDNVDADKVMITNEEEIKTTNPVATESYGQVATNHQSAQAQAQTGWVQNQGILPGMVWQDRDVYLQGPIWAKIPHTDGNFHPSPLMGGFGMKHPPPQILIKNTPVPADPPTAFNKDKLNSFITQYSTGQVSVEIEWELQKENSKRWNPEIQYTSNYYKSNNVEFAVNTEGVYSEPRPIGTRYLTRNL

SEQ ID NO: 12 - DNA, 2211 bp, Artificial Sequence
  source: /note="Description of Artificial Sequence: Synthetic polynucleotide"
atggctgccgatggttatcttccagattggctcgaggacaacctctctgagggcattcgcgagtggtgggacttgaaacctggagccccgaagcccaaagccaaccagcaaaagcaggacgacggccggggtctggtgcttcctggctacaagtacctcggacccttcaacggactcgacaagggggagcccgtcaacgcggcggacgcagcggccctcgagcacgacaaggcctacgaccagcagctcaaagcgggtgacaatccgtacctgcggtataaccacgccgacgccgagtttcaggagcgtctgcaagaagatacgtcttttgggggcaacctcgggcgagcagtcttccaggccaagaagcgggttctcgaacctctcggtctggttgaggaaggcgctaagacggctcctggaaagaaacgtccggtagagcagtcgccacaagagccagactcctcctcgggcatcggcaagacaggccagcagcccgctaaaaagagactcaattttggtcagactggcgactcagagtcagtccccgatccacaacctctcggagaacctccagcaacccccgctgctgtgggacctactacaatggcttcaggcggtggcgcaccaatggcagacaataacgaaggcgccgacggagtgggtaatgcctcaggaaattggcattgcgattccacatggctgggcgacagagtcatcaccaccagcacccgcacctgggccttgcccacctacaataaccacctctacaagcaaatctccagtgcttcaacgggggccagcaacgacaaccactacttcggctacagcaccccctgggggtattttgatttcaacagattccactgccacttttcaccacgtgactggcagcgactcatcaacaacaattggggattccggcccaagagactcaacttcaaactcttcaacatccaagtcaaggaggtcacgacgaatgatggcgtcacaaccatcgctaataaccttaccagcacggttcaagtcttctcggactcggagtaccagcttccgtacgtcctcggctctgcgcaccagggctgcctccctccgttcccggcggacgtgttcatgattccgcaatacggctacctgacgctcaacaatggcagccaagccgtgggacgttcatccttttactgcctggaatatttcccttctcagatgctgagaacgggcaacaactttaccttcagctacacctttgaggaagtgcctttccacagcagctacgcgcacagccagagcctggaccggctgatgaatcctctcatcgaccaatacctgtattacctgaacagaactcaaaatcagtccggaagtgcccaaaacaaggacttgctgtttagccgtgggtctccagctggcatgtctgttcagcccaaaaactggctacctggaccctgttatcggcagcagcgcgtttctaaaacaaaaacagacaacaacaacagcaattttacctggactggtgcttcaaaatataacctcaatgggcgtgaatccatcatcaaccctggcactgctatggcctcacacaaagacgacgaagacaagttctttcccatgagcggtgtcatgatttttggaaaagagagcgccggagcttcaaacactgcattggacaatgtcatgattacagacgaagaggaaattaaagccactaaccctgtggccaccgaaagatttgggaccgtggcagtcaatttccagagcagcagcacagaccctgcgaccggagatgtgcatgctatgggagcattacctggcatggtgtggcaagatagagacgtgtacctgcagggtcccatttgggccaaaattcctcacacagatggacactttcacccgtctcctcttatgggcggctttggactcaagaacccgcctcctcagatcctcatcaaaaacacgcctgttcctgcgaatcctccggcggagttttcagctacaaagtttgcttcattcatcacccaatactccacaggacaagtgagtgtggaaattgaatgggagctgcagaaagaaaacagcaagcgctggaatcccgaagtgcagtacacatccaattatgcaaaatctgccaacgttgattttactgtggacaacaatggactttatactgagcctcgccccattggcacccgttaccttacccgtcccctgtaa

SEQ ID NO: 13 - protein, 736 aa, Adeno-associated virus 1
MAADGYLPDWLEDNLSEGIREWWDLKPGAPKPKANQQKQDDGRGLVLPGYKYLGPFNGLDKGEPVNAADAAALEHDKAYDQQLKAGDNPYLRYNHADAEFQERLQEDTSFGGNLGRAVFQAKKRVLEPLGLVEEGAKTAPGKKRPVEQSPQEPDSSSGIGKTGQQPAKKRLNFGQTGDSESVPDPQPLGEPPATPAAVGPTTMASGGGAPMADNNEGADGVGNASGNWHCDSTWLGDRVITTSTRTWALPTYNNHLYKQISSASTGASNDNHYFGYSTPWGYFDFNRFHCHFSPRDWQRLINNNWGFRPKRLNFKLFNIQVKEVTTNDGVTTIANNLTSTVQVFSDSEYQLPYVLGSAHQGCLPPFPADVFMIPQYGYLTLNNGSQAVGRSSFYCLEYFPSQMLRTGNNFTFSYTFEEVPFHSSYAHSQSLDRLMNPLIDQYLYYLNRTQNQSGSAQNKDLLFSRGSPAGMSVQPKNWLPGPCYRQQRVSKTKTDNNNSNFTWTGASKYNLNGRESIINPGTAMASHKDDEDKFFPMSGVMIFGKESAGASNTALDNVMITDEEEIKATNPVATERFGTVAVNFQSSSTDPATGDVHAMGALPGMVWQDRDVYLQGPIWAKIPHTDGHFHPSPLMGGFGLKNPPPQILIKNTPVPANPPAEFSATKFASFITQYSTGQVSVEIEWELQKENSKRWNPEVQYTSNYAKSANVDFTVDNNGLYTEPRPIGTRYLTRPL

SEQ ID NO: 14 - DNA, 4718 bp, Adeno-associated virus 1
ttgcccactccctctctgcgcgctcgctcgctcggtggggcctgcggaccaaaggtccgcagacggcagagctctgctctgccggccccaccgagcgagcgagcgcgcagagagggagtgggcaactccatcactaggggtaatcgcgaagcgcctcccacgctgccgcgtcagcgctgacgtaaattacgtcataggggagtggtcctgtattagctgtcacgtgagtgcttttgcgacattttgcgacaccacgtggccatttagggtatatatggccgagtgagcgagcaggatctccattttgaccgcgaaatttgaacgagcagcagccatgccgggcttctacgagatcgtgatcaaggtgccgagcgacctggacgagcacctgccgggcatttctgactcgtttgtgagctgggtggccgagaaggaatgggagctgcccccggattctgacatggatctgaatctgattgagcaggcacccctgaccgtggccgagaagctgcagcgcgacttcctggtccaatggcgccgcgtgagtaaggccccggaggccctcttctttgttcagttcgagaagggcgagtcctacttccacctccatattctggtggagaccacgggggtcaaatccatggtgctgggccgcttcctgagtcagattagggacaagctggtgcagaccatctaccgcgggatcgagccgaccctgcccaactggttcgcggtgaccaagacgcgtaatggcgccggaggggggaacaaggtggtggacgagtgctacatccccaactacctcctgcccaagactcagcccgagctgcagtgggcgtggactaacatggaggagtatataagcgcctgtttgaacctggccgagcgcaaacggctcgtggcgcagcacctgacccacgtcagccagacccaggagcagaacaaggagaatctgaaccccaattctgacgcgcctgtcatccggtcaaaaacctccgcgcgctacatggagctggtcgggtggctggtggaccggggcatcacctccgagaagcagtggatccaggaggaccaggcctcgtacatctccttcaacgccgcttccaactcgcggtcccagatcaaggccgctctggacaatgccggcaagatcatggcgctgaccaaatccgcgcccgactacctggtaggccccgctccgcccgcggacattaaaaccaaccgcatctaccgcatcctggagctgaacggctacgaacctgcctacgccggctccgtctttctcggctgggcccagaaaaggttcgggaagcgcaacaccatctggctgtttgggccggccaccacgggcaagaccaacatcgcggaagccatcgcccacgccgtgcccttctacggctgcgtcaactggaccaatgagaactttcccttcaatgattgcgtcgacaagatggtgatctggtgggaggagggcaagatgacggccaaggtcgtggagtccgccaaggccattctcggcggcagcaaggtgcgcgtggaccaaaagtgcaagtcgtccgcccagatcgaccccacccccgtgatcgtcacctccaacaccaacatgtgcgccgtgattgacgggaacagcaccaccttcgagcaccagcagccgttgcaggaccggatgttcaaatttgaactcacccgccgtctggagcatgactttggcaaggtgacaaagcaggaagtcaaagagttcttccgctgggcgcaggatcacgtgaccgaggtggcgcatgagttctacgtcagaaagggtggagccaacaaaagacccgcccccgatgacgcggataaaagcgagcccaagcgggcctgcccctcagtcgcggatccatcgacgtcagacgcggaaggagctccggtggactttgccgacaggtaccaaaacaaatgttctcgtcacgcgggcatgcttcagatgctgtttccctgcaagacatgcgagagaatgaatcagaatttcaacatttgcttcacgcacgggacgagagactgttcagagtgcttccccggcgtgtcagaatctcaaccggtcgtcagaaagaggacgtatcggaaactctgtgccattcatcatctgctggggcgggctcccgagattgcttgctcggcctgcgatctggtcaacgtggacctggatgactgtgtttctgagcaataaatgacttaaaccaggtatggctgccgatggttatcttccagattggctcgaggacaacctctctgagggcattcgcgagtggtgggacttgaaacctggagccccgaagcccaaagccaaccagcaaaagcaggacgacggccggggtctggtgcttcctggctacaagtacctcggacccttcaacggactcgacaagggggagcccgtcaacgcggcggacgcagcggccctcgagcacgacaaggcctacgaccagcagctcaaagcgggtgacaatccgtacctgcggtataaccacgccgacgccgagtttcaggagcgtctgcaagaagatacgtcttttgggggcaacctcgggcgagcagtcttccaggccaagaagcgggttctcgaacctctcggtctggttgaggaaggcgctaagacggctcctggaaagaaacgtccggtagagcagtcgccacaagagccagactcctcctcgggcatcggcaagacaggccagcagcccgctaaaaagagactcaattttggtcagactggcgactcagagtcagtccccgatccacaacctctcggagaacctccagcaacccccgctgctgtgggacctactacaatggcttcaggcggtggcgcaccaatggcagacaataacgaaggcgccgacggagtgggtaatgcctcaggaaattggcattgcgattccacatggctgggcgacagagtcatcaccaccagcacccgcacctgggccttgcccacctacaataaccacctctacaagcaaatctccagtgcttcaacgggggccagcaacgacaaccactacttcggctacagcaccccctgggggtattttgatttcaacagattccactgccacttttcaccacgtgactggcagcgactcatcaacaacaattggggattccggcccaagagactcaacttcaaactcttcaacatccaagtcaaggaggtcacgacgaatgatggcgtcacaaccatcgctaataaccttaccagcacggttcaagtcttctcggactcggagtaccagcttccgtacgtcctcggctctgcgcaccagggctgcctccctccgttcccggcggacgtgttcatgattccgcaatacggctacctgacgctcaacaatggcagccaagccgtgggacgttcatccttttactgcctggaatatttcccttctcagatgctgagaacgggcaacaactttaccttcagctacacctttgaggaagtgcctttccacagcagctacgcgcacagccagagcctggaccggctgatgaatcctctcatcgaccaatacctgtattacctgaacagaactcaaaatcagtccggaagtgcccaaaacaaggacttgctgtttagccgtgggtctccagctggcatgtctgttcagcccaaaaactggctacctggaccctgttatcggcagcagcgcgtttctaaaacaaaaacagacaacaacaacagcaattttacctggactggtgcttcaaaatataacctcaatgggcgtgaatccatcatcaaccctggcactgctatggcctcacacaaagacgacgaagacaagttctttcccatgagcggtgtcatgatttttggaaaagagagcgccggagcttcaaacactgcattggacaatgtcatgattacagacgaagaggaaattaaagccactaaccctgtggccaccgaaagatttgggaccgtggcagtcaatttccagagcagcagcacagaccctgcgaccggagatgtgcatgctatgggagcattacctggcatggtgtggcaagatagagacgtgtacctgcagggtcccatttgggccaaaattcctcacacagatggacactttcacccgtctcctcttatgggcggctttggactcaagaacccgcctcctcagatcctcatcaaaaacacgcctgttcctgcgaatcctccggcggagttttcagctacaaagtttgcttcattcatcacccaatactccacaggacaagtgagtgtggaaattgaatgggagctgcagaaagaaaacagcaagcgctggaatcccgaagtgcagtacacatccaattatgcaaaatctgccaacgttgattttactgtggacaacaatggactttatactgagcctcgccccattggcacccgttaccttacccgtcccctgtaattacgtgttaatcaataaaccggttgattcgtttcagttgaactttggtctcctgtccttcttatcttatcggttaccatggttatagcttacacattaactgcttggttgcgcttcgcgataaaagacttacgtcatcgggttacccctagtgatggagttgcccactccctctctgcgcgctcgctcgctcggtggggcctgcggaccaaaggtccgcagacggcagagctctgctctgccggccccaccgagcgagcgagcgcgcagagagggagtgggcaa

SEQ ID NO: 15 - DNA, 3131 bp, Artificial Sequence
  source: /note="Description of Artificial Sequence: Synthetic polynucleotide"
gcggccgcgaattcgcccttggctgcgtcaactggaccaatgagaactttcccttcaatgattgcgtcgacaagatggtgatctggtgggaggagggcaagatgacggccaaggtcgtggagtccgccaaggccattctcggcggcagcaaggtgcgcgtggaccaaaagtgcaagtcgtccgcccagatcgaccccacccccgtgatcgtcacctccaacaccaacatgtgcgccgtgattgacgggaacagcaccaccttcgagcaccagcagcctctccaggaccggatgtttaagttcgaactcacccgccgtctggagcacgactttggcaaggtgacaaagcaggaagtcaaagagttcttccgctgggccagtgatcacgtgaccgaggtggcgcatgagttttacgtcagaaagggcggagccagcaaaagacccgcccccgatgacgcggataaaagcgagcccaagcgggcctgcccctcagtcgcggatccatcgacgtcagacgcggaaggagctccggtggactttgccgacaggtaccaaaacaaatgttctcgtcacgcgggcatgcttcagatgctgtttccctgcaaaacgtgcgagagaatgaatcggaatttcaacatttgcttcacacacggggtcagagactgctcagagtgtttccccggcgtgtcagaatctcaaccggtcgtcagaaagaggacgtatcggaaactccgtgcgattcatcatctgctggggcgggctcccgagattgcttgctcggcctgcgatctggtcaacgtggacctggatgactgtgtttctgagcaataaatgacttaaaccaggtatggctgccgatggttatcttccagattggctcgaggacaacctctctgagggcattcgcgagtggtgggcgctgaaacctggagccccgaagcccaaagccaaccagcaaaagcaggacgacggccggggtctggtgcttcctggctacaagtacctcggacccttcaacggactcgacaagggggagcccgtcaacgcggcggacgcagcggccctcgagcacgacaaggcttacgaccagcagctgcaggcgggtgacaatccgtacctgcggtataaccacgccgacgccgagtttcaggagcgtctgcaagaagatacgtcttttgggggcaacctcgggcgagcagtcttccaggccaagaagcgggttctcgaacctctcggtctggttgaggaaggcgctaagacggctcctggaaagaagagaccggtagagccatcaccccagcgttctccagactcctctacgggcatcggcaagaaaggccaacagcccgccagaaaaagactcaattttggtcagactggcgactcagagtcagttccagaccctcaacctctcggagaacctccagcagcgccctctggtgtgggacctaatacaatggctgcaggcggtggcgcaccaatggcagacaataacgaaggcgccgacggagtgggtagttcctcgggaaattggcattgcgattccacatggctgggcgacagagtcatcaccaccagcacccgaacctgggccctgcccacctacaacaaccacctctacaagcaaatctccaacgggacatcgggaggagccaccaacgacaacacctacttcggctacagcaccccctgggggtattttgactttaacagattccactgccacctttcaccacgtgactggcagcgactcatcaacaacaactggggattccgacccaagagactcagcttcaagctcttcaacatccaggtcaaggaggtcacgcagaatgaaggcaccaagaccatcgccaataacctcaccagcaccatccaggtgtttacggactcggagtaccagctgccgtacgttctcggctctgtccaccagggctgcctgcctccgttcccggcggacgtgttcatgattccccagtacggctacctaacactcaacaacggtagtcaggccgtgggacgctcctccttctactgcctggaatactttccttcgcagatgctgagaaccggcaacaacttccagtttacttacaccttcgaggacgtgcctttccacagcagctacgcccacagctagagcttggaccggctgatgaatcctctgattgaccagtacctgtactacttgtctcggactcaaacaacaggaggcacggcaaatacgcagactctgggcttcagccaaggtgggcctaatacaatggccaatcaggcaaagaactggctgccaggaccctgttaccgccaacaacgcgtctcaacgacaaccgggcaaaacaacaatagcaactttgcctggactgctgggaccaaataccatctgaatggaagaaattcattggctaatcctggcatcgctatggcaacacacaaagacgacgaggagcgtttttttcccagtaacgggatcctgatttttggcaaacaaaatgctgccagagacaatgcggattacagcgatgtcatgctcaccagcgaggaagaaatcaaaaccactaaccctgtggctacagaggaatacggtatcgtggcagataacttgcagcagcaaaacacggctcctcaaattggaactgtcaacagccagggggccttacccggtatggtctggcagaaccgggacgtgtacctgcagggtcccatctgggccaagattcctcacacggacggcaacttccacccgtctccgctgatgggcggctttggcctgaaacatcctccgcctcagatcctgatcaagaacacgcctgtacctgcggatcctccgaccaccttcaaccagtcaaagctgaactctttcatcacgcaatacagcaccggacaggtcagcgtggaaattgaatgggagctgcagaaggaaaacagcaagcgctggaaccccgagatccagtacacctccaactactacaaatctataagtgtggactttgctgttaatacagaaggcgtgtactctgaaccccgccccattggcacccgttacctcacccgtaatctgtaattgcctgttaatcaataaaccggttgattcgtttcagttgaactttggtctctgcgaagggcgaattc

SEQ ID NO: 16 - DNA, 255 bp, Adeno-associated virus 10
ggtaattcctccggaaattggcattgcgattccacatggctgggcgacagagtcatcaccaccagcacccgaacctgggtcctgcccacctacaacaaccacatctacaagcaaatctccagcgagacaggagccaccaacgacaaccactacttcggctacagcaccccctgggggtattttgactttaacagattccactgccacttttcaccacgtgactggcagcgactcatcaacaacaactggggattc

SEQ ID NO: 17 - protein, 738 aa, Adeno-associated virus 10
MAADGYLPDWLEDNLSEGIREWWDLKPGAPKPKANQQKQDDGRGLVLPGYKYLGPFNGLDKGEPVNAADAAALEHDKAYDQQLKAGDNPYLRYNHADAEFQERLQEDTSFGGNLGRAVFQAKKRVLEPLGLVEEAAKTAPGKKRPVEPSPQRSPDSSTGIGKKGQQPAKKRLNFGQTGESESVPDPQPIGEPPAGPSGLGSGTMAAGGGAPMADNNEGADGVGSSSGNWHCDSTWLGDRVITTSTRTWALPTYNNHLYKQISNGTSGGSTNDNTYFGYSTPWGYFDFNRFHCHFSPRDWQRLINNNWGFRPKRLSFKLFNIQVKEVTQNEGTKTIANNLTSTIQVFTDSEYQLPYVLGSAHQGCLPPFPADVFMIPQYGYLTLNNGSQAVGRSSFYCLEYFPSQMLRTGNNFEFSYTFEDVPFHSSYAHSQSLDRLMNPLIDQYLYYLSRTQSTGGTQGTQQLLFSQAGPANMSAQAKNWLPGPCYRQQRVSTTLSQNNNSNFAWTGATKYHLNGRDSLVNPGVAMATHKDDEERFFPSSGVLMFGKQGAGRDNVDYSSVMLTSEEEIKTTNPVATEQYGVVADNLQQANTGPIVGNVNSQGALPGMVWQNRDVYLQGPIWAKIPHTDGNFHPSPLMGGFGLKHPPPQILIKNTPVPADPPTTFSQAKLASFITQYSTGQVSVEIEWELQKENSKRWNPEIQYTSNYYKSTNVDFAVNTEGTYSEPRPIGTRYLTRNL

SEQ ID NO: 18 - protein, 738 aa, Adeno-associated virus 10
MAADGYLPDWLEDNLSEGIREWWDLKPGAPKPKANQQKQDDGRGLVLPGYKYLGPFNGLDKGEPVNAADAAALEHDKAYDQQLKAGDNPYLRYNHADAEFQERLQEDTSFGGNLGRAVFQAKKRVLEPLGLVEEGAKTAPGKKRPVEPSPQRSPDSSTGIGKKGQQPAKKRLNFGQTGDSESVPDPQPIGEPPAGPSGLGSGTMAAGGGAPMADNNEGADGVGSSSGNWHCDSTWLGDRVITTSTRTWALPTYNNHLYKQISNGTSGGSTNDNTYFGYSTPWGYFDFNRFHCHFSPRDWQRLINNNWGFRPKRLNFKLFNIQVKEVTQNEGTKTIANNLTSTIQVFTDSEYQLPYVLGSAHQGCLPPFPADVFMIPQYGYLTLNNGSQAVGRSSFYCLEYFPSQMLRTGNNFEFSYQFEDVPFHSSYAHSQSLDRLMNPLIDQYLYYLSRTQSTGGTAGTQQLLFSQAGPNNMSAQAKNWLPGPCYRQQRVSTTLSQNNNSNFAWTGATKYHLNGRDSLVNPGVAMATHKDDEERFFPSSGVLMFGKQGAGKDNVDYSSVMLTSEEEIKTTNPVATEQYGVVADNLQQQNAAPIVGAVNSQGALPGMVWQNRDVYLQGPIWAKIPHTDGNFHPSPLMGGFGLKHPPPQILIKNTPVPADPPTTFSQAKLASFITQYSTGQVSVEIEWELQKENSKRWNPEIQYTSNYYKSTNVDFAVNTDGTYSEPRPIGTRYLTRNL

SEQ ID NO: 19 - DNA, 258 bp, Adeno-associated virus 11
ggtaattcctccggaaattggcattgcgattccacatggctgggcgacagagtcatcaccaccagcacccgaacctgggccctgccaacctacaacaaccacctctacaaacaaatctccagcgcttcaacgggggccagcaacgacaaccactactttggctacagcaccccctgggggtattttgactttaacagattccactgccacttctcaccacgtgactggcagcgactcatcaacaacaactggggattc

SEQ ID NO: 20 - DNA, 255 bp, Adeno-associated virus 12
ggtaattcctccggaaattggcattgcgattccacatggctgggcgaccgagtcattaccaccagcacccggacttgggccctgcccacctacaacaaccacctctacaagcaaatctccagccaatcgggtgccaccaacgacaaccactacttcggctacagcaccccttgggggtattttgatttcaacagattccactgccatttctcaccacgtgactggcagcgactcatcaacaacaactggggattc

SEQ ID NO: 21 - DNA, 2208 bp, Adeno-associated virus 2
atggctgccgatggttatcttccagattggctcgaggacactctctctgaaggaataagacagtggtggaagctcaaacctggcccaccaccaccaaagcccgcagagcggcataaggacgacagcaggggtcttgtgcttcctgggtacaagtacctcggacccttcaacggactcgacaagggagagccggtcaacgaggcagacgccgcggccctcgagcacgacaaagcctacgaccggcagctcgacagcggagacaacccgtacctcaagtacaaccacgccgacgcggagtttcaggagcgccttaaagaagatacgtcttttgggggcaacctcggacgagcagtcttccaggcgaaaaagagggttcttgaacctctgggcctggttgaggaacctgttaagacggctccgggaaaaaagaggccggtagagcactctcctgtggagccagactcctcctcgggaaccggaaaggcgggccagcagcctgcaagaaaaagattgaattttggtcagactggagacgcagactcagtacctgacccccagcctctcggacagccaccagcagccccctctggtctgggaactaatacgatggctacaggcagtggcgcaccaatggcagacaataacgagggcgccgacggagtgggtaattcctcgggaaattggcattgcgattccacatggatgggcgacagagtcatcaccaccagcacccgaacctgggccctgcccacctacaacaaccacctctacaaacaaatttccagccaatcaggagcctcgaacgacaatcactactttggctacagcaccccttgggggtattttgacttcaacagattccactgccacttttcaccacgtgactggcaaagactcatcaacaacaactggggattccgacccaagagactcaacttcaagctctttaacattcaagtcaaagaggtcacgcagaatgacggtacgacgacgattgccaataaccttaccagcacggttcaggtgtttactgactcggagtaccagctcccgtacgtcctcggctcggcgcatcaaggatgcctcccgccgttcccagcagacgtcttcatggtgccacagtatggatacctcaccctgaacaacgggagtcaggcagtaggacgctcttcattttactgcctggagtactttccttctcagatgctgcgtaccggaaacaactttaccttcagctacacttttgaggacgttcctttccacagcagctacgctcacagccagagtctggaccgtctcatgaatcctctcatcgaccagtacctgtattacttgagcagaacaaacactccaagtggaaccaccacgcagtcaaggcttcagttttctcaggccggagcgagtgacattcgggaccagtctaggaactggcttcctggaccctgttaccgccagcagcgagtatcaaagacatctgcggataacaacaacagtgaatactcgtggactggagctaccaagtaccacctcaatggcagagactctctggtgaatccgggcccggccatggcaagccacaaggacgatgaagaaaagttttttcctcagagcggggttctcatctttgggaagcaaggctcagagaaaacaaatgtggacattgaaaaggtcatgattacagacgaagaggaaatcaggacaaccaatcccgtggctacggagcagtatggttctgtatctaccaacctccagagaggcaacagacaagcagctaccgcagatgtcaacacacaaggcgttcttccaggcatggtctggcaggacagagatgtgtaccttcaggggcccatctgggcaaagattccacacacggacggacattttcacccctctcccctcatgggtggattcggacttaaacaccctcctccacagattctcatcaagaacaccccggtacctgcgaatccttcgaccaccttcagtgcggcaaagtttgcttccttcatcacacagtactccacgggacaggtcagcgtggagatcgagtgggagctgcagaaggaaaacagcaaacgctggaatcccgaaattcagtacacttccaactacaacaagtctgttaatgtggactttactgtggacactaatggcgtgtattcagagcctcgccccattggcaccagatacctgactcgtaatctgtaa

SEQ ID NO: 22 - protein, 735 aa, Adeno-associated virus 2 [sequence omitted]

SEQ ID NO: 23 - protein, 621 aa, Adeno-associated virus 2
MPGFYEIVIKVPSDLDGHLPGISDSFVNWVAEKEWELPPDSDMDLNLIEQAPLTVAEKLQRDFLTEWRRVSKAPEALFFVQFEKGESYFHMHVLVETTGVKSMVLGRFLSQIREKLIQRIYRGIEPTLPNWFAVTKTRNGAGGGNKVVDECYIPNYLLPKTQPELQWAWTNMEQYLSACLNLTERKRLVAQHLTHVSQTQEQNKENQNPNSDAPVIRSKTSARYMELVGWLVDKGITSEKQWIQEDQASYISFNAASNSRSQIKAALDNAGKIMSLTKTAPDYLVGQQPVEDISSNRIYKILELNGYDPQYAASVFLGWATKKFGKRNTIWLFGPATTGKTNIAEAIAHTVPFYGCVNWTNENFPFNDCVDKMVIWWEEGKMTAKVVESAKAILGGSKVRVDQKCKSSAQIDPTPVIVTSNTNMCAVIDGNSTTFEHQQPLQDRMFKFELTRRLDHDFGKVTKQEVKDFFRWAKDHVVEVEHEFYVKKGGAKKRPAPSDADISEPKRVRESVAQPSTSDAEASINYADRYQNKCSRHVGMNLMLFPCRQCERMNQNSNICFTHGQKDCLECFPVSESQPVSVVKKAYQKLCYIHHIMGKVPDACTACDLVNVDLDDCIFEQ

SEQ ID NO: 24 - DNA, 4675 bp, Adeno-associated virus 2
ttggccactccctctctgcgcgctcgctcgctcactgaggccgggcgaccaaaggtcgcccgacgcccgggctttgcccgggcggcctcagtgagcgagcgagcgcgcagagagggagtggccaactccatcactaggggttcctggaggggtggagtcgtgacgtgaattacgtcatagggttagggaggtcctgtattagaggtcacgtgagtgttttgcgacattttgcgacaccatgtggtcacgctgggtatttaagcccgagtgagcacgcagggtctccattttgaagcgggaggtttgaacgcgcagccgccatgccggggttttacgagattgtgattaaggtccccagcgaccttgacgggcatctgcccggcatttctgacagctttgtgaactgggtggccgagaaggaatgggagttgccgccagattctgacatggatctgaatctgattgagcaggcacccctgaccgtggccgagaagctgcagcgcgactttctgacggaatggcgccgtgtgagtaaggccccggaggcccttttctttgtgcaatttgagaagggagagagctacttccacatgcacgtgctcgtggaaaccaccggggtgaaatccatggttttgggacgtttcctgagtcagattcgcgaaaaactgattcagagaatttaccgcgggatcgagccgactttgccaaactggttcgcggtcacaaagaccagaaatggcgccggaggcgggaacaaggtggtggatgagtgctacatccccaattacttgctccccaaaacccagcctgagctccagtgggcgtggactaatatggaacagtatttaagcgcctgtttgaatctcacggagcgtaaacggttggtggcgcagcatctgacgcacgtgtcgcagacgcaggagcagaacaaagagaatcagaatcccaattctgatgcgccggtgatcagatcaaaaacttcagccaggtacatggagctggtcgggtggctcgtggacaaggggattacctcggagaagcagtggatccaggaggaccaggcctcatacatctccttcaatgcggcctccaactcgcggtcccaaatcaaggctgccttggacaatgcgggaaagattatgagcctgactaaaaccgcccccgactacctggtgggccagcagcccgtggaggacatttccagcaatcggatttataaaattttggaactaaacgggtacgatccccaatatgcggcttccgtctttctgggatgggccacgaaaaagttcggcaagaggaacaccatctggctgtttgggcctgcaactaccgggaagaccaacatcgcggaggccatagcccacactgtgcccttctacgggtgcgtaaactggaccaatgagaactttcccttcaacgactgtgtcgacaagatggtgatctggtgggaggaggggaagatgaccgccaaggtcgtggagtcggccaaagccattctcggaggaagcaaggtgcgcgtggaccagaaatgcaagtcctcggcccagatagacccgactcccgtgatcgtcacctccaacaccaacatgtgcgccgtgattgacgggaactcaacgaccttcgaacaccagcagccgttgcaagaccggatgttcaaatttgaactcacccgccgtctggatcatgactttgggaaggtcaccaagcaggaagtcaaagactttttccggtgggcaaaggatcacgtggttgaggtggagcatgaattctacgtcaaaaagggtggagccaagaaaagacccgcccccagtgacgcagatataagtgagcccaaacgggtgcgcgagtcagttgcgcagccatcgacgtcagacgcggaagcttcgatcaactacgcagacaggtaccaaaacaaatgttctcgtcacgtgggcatgaatctgatgctgtttccctgcagacaatgcgagagaatgaatcagaattcaaatatctgcttcactcacggacagaaagactgtttagagtgctttcccgtgtcagaatctcaacccgtttctgtcgtcaaaaaggcgtatcagaaactgtgctacattcatcatatcatgggaaaggtgccagacgcttgcactgcctgcgatctggtcaatgtggatttggatgactgcatctttgaacaataaatgatttaaatcaggtatggctgccgatggttatcttccagattggctcgaggacactctctctgaaggaataagacagtggtggaagctcaaacctggcccaccaccaccaaagcccgcagagcggcataaggacgacagcaggggtcttgtgcttcctgggtacaagtacctcggacccttcaacggactcgacaagggagagccggtcaacgaggcagacgccgcggccctcgagcacgtacaaagcctacgaccggcagctcgacagcggagacaacccgtacctcaagtacaaccacgccgacgcggagtttcaggagcgccttaaagaagatacgtcttttgggggcaacctcggacgagcagtcttccaggcgaaaaagagggttcttgaacctctgggcctggttgaggaacctgttaagacggctccgggaaaaaagaggccggtagagcactctcctgtggagccagactcctcctcgggaaccggaaaggcgggccagcagcctgcaagaaaaagattgaattttggtcagactggagacgcagactcagtacctgacccccagcctctcggacagccaccagcagccccctctggtctgggaactaatacgatggctacaggcagtggcgcaccaatggcagacaataacgagggcgccgacggagtgggtaattcctccggaaattggcattgcgattccacatggatgggcgacagagtcatcaccaccagcacccgaacctgggccctgcccacctacaacaaccacctctacaaacaaatttccagccaatcaggagcctcgaacgacaatcactactttggctacagcaccccttgggggtattttgacttcaacagattccactgccacttttcaccacgtgactggcaaagactcatcaacaacaactggggattccgacccaagagactcaacttcaagctctttaacattcaagtcaaagaggtcacgcagaatgacggtacgacgacgattgccaataaccttaccagcacggttcaggtgtttactgactcggagtaccagctcccgtacgtcctcggctcggcgcatcaaggatgcctcccgccgttcccagcagacgtcttcatggtgccacagtatggatacctcaccctgaacaacgggagtcaggcagtaggacgctcttcattttactgcctggagtactttccttctcagatgctgcgtaccggaaacaactttaccttcagctacacttttgaggacgttcctttccacagcagctacgctcacagccagagtctggaccgtctcatgaatcctctcatcgaccagtacctgtattacttgagcagaacaaacactccaagtggaaccaccacgcagtcaaggcttcagttttctcaggccggagcgagtgacattcgggaccagtctaggaactggcttcctggaccctgttaccgccagcagcgagtatcaaagacatctgcggataacaacaacagtgaatactcgtggactggagctaccaagtaccacctcaatggcagagactctctggtgaatccggccatggcaagccacaaggacgatgaagaaaagttttttcctcagagcggggttctcatctttgggaagcaaggctcagagaaaacaaatgtgaacattgaaaaggtcatgattacagacgaagaggaaatcggaacaaccaatcccgtggctacggagcagtatggttctgtatctaccaacctccagagaggcaacagacaagcagctaccgcagatgtcaacacacaaggcgttcttccaggcatggtctggcaggacagagatgtgtaccttcaggggcccatctgggcaaagattccacacacggacggacattttcacccctctcccctcatgggtggattcggacttaaacaccctcctccacagattctcatcaagaacaccccggtacctgcgaatccttcgaccaccttcagtgcggcaaagtttgcttccttcatcacacagtactccacgggacacggtcagcgtggagatcgagtgggagctgcagaaggaaaacagcaaacgctggaatcccgaaattcagtacacttccaactacaacaagtctgttaatcgtggacttaccgtggatactaatggcgtgtattcagagcctcgccccattggcaccagatacctgactcgtaatctgtaattgcttgttaatcaataaaccgtttaattcgtttcagttgaactttggtctctgcgtatttctttcttatctagtttccatggctacgtagataagtagcatggcgggttaatcattaactacaaggaacccctagtgatggagttggccactccctctctgcgcgctcgctcgctcactgaggccgggcgaccaaaggtcgcccgacgcccgggctttgcccgggcggcctcagtgagcgagcgagcgcgcagagagggagtggccaa

SEQ ID NO: 25 - DNA, 4679 bp, Adeno-associated virus 2
ttggccactccctctctgcgcgctcgctcgctcactgaggccgggcgaccaaaggtcgcccgacgcccgggctttgcccgggcggcctcagtgagcgagcgagcgcgcagagagggagtggccaactccatcactaggggttcctggaggggtggagtcgtgacgtgaattacgtcatagggttagggaggtcctgtattagaggtcacgtgagtgttttgcgacattttgcgacaccatgtggtcacgctgggtatttaagcccgagtgagcacgcagggtctccattttgaagcgggaggtttgaacgcgcagccgccatgccggggttttacgagattgtgattaaggtccccagcgaccttgacgggcatctgcccggcatttctgacagctttgtgaactgggtggccgagaaggaatgggagttgccgccagattctgacatggatctgaatctgattgagcaggcacccctgaccgtggccgagaagctgcagcgcgactttctgacggaatggcgccgtgtgagtaaggccccggaggcccttttctttgtgcaatttgagaagggagagagctacttccacatgcacgtgctcgtggaaaccaccggggtgaaatccatggttttgggacgtttcctgagtcagattcgcgaaaaactgattcagagaatttaccgcgggatcgagccgactttgccaaactggttcgcggtcacaaagaccagaaatggcgccggaggcgggaacaaggtggtggatgagtgctacatccccaattacttgctccccaaaacccagcctgagctccagtgggcgtggactaatatggaacagtatttaagcgcctgtttgaatctcacggagcgtaaacggttggtggcgcagcatctgacgcacgtgtcgcagacgcaggagcagaacaaagagaatcagaatcccaattctgatgcgccggtgatcagatcaaaaacttcagccaggtacatggagctggtcgggtggctcgtggacaaggggattacctcggagaagcagtggatccaggaggaccaggcctcatacatctccttcaatgcggcctccaactcgcggtcccaaatcaaggctgccttggacaatgcgggaaagattatgagcctgactaaaaccgcccccgactacctggtgggccagcagcccgtggaggacatttccagcaatcggatttataaaattttggaactaaacgggtacgatccccaatatgcggcttccgtctttctgggatgggccacgaaaaagttcggcaagaggaacaccatctggctgtttgggcctgcaactaccgggaagaccaacatcgcggaggccatagcccacactgtgcccttctacgggtgcgtaaactggaccaatgagaactttcccttcaacgactgtgtcgacaagatggtgatctggtgggaggaggggaagatgaccgccaaggtcgtggagtcggccaaagccattctcggaggaagcaaggtgcgcgtggaccagaaatgcaagtcctcggcccagatagacccgactcccgtgatcgtcacctccaacaccaacatgtgcgccgtgattgacgggaactcaacgaccttcgaacaccagcagccgttgcaagaccggatgttcaaatttgaactcacccgccgtctggatcatgactttgggaaggtcaccaagcaggaagtcaaagactttttccggtgggcaaaggatcacgtggttgaggtggagcatgaattctacgtcaaaaagggtggagccaagaaaagacccgcccccagtgacgcagatataagtgagcccaaacgggtgcgcgagtcagttgcgcagccatcgacgtcagacgcggaagcttcgatcaactacgcagacaggtaccaaaacaaatgttctcgtcacgtgggcatgaatctgatgctgtttccctgcagacaatgcgagagaatgaatcagaattcaaatatctgcttcactcacggacagaaagactgtttagagtgctttcccgtgtcagaatctcaacccgtttctgtcgtcaaaaaggcgtatcagaaactgtgctacattcatcatatcatgggaaaggtgccagacgcttgcactgcctgcgatctggtcaatgtggatttggatgactgcatctttgaacaataaatgatttaaatcaggtatggctgccgatggttatcttccagattggctcgaggacactctctctgaaggaataagacagtggtggaagctcaaacctggcccaccaccaccaaagcccgcagagcggcataaggacgacagcaggggtcttgtgcttcctgggtacaagtacctcggacccttcaacggactcgacaagggagagccggtcaacgaggcagacgccgcggccctcgagcacgacaaagcctacgaccggcagctcgacagcggagacaacccgtacctcaagtacaaccacgccgacgcggagtttcaggagcgccttaaagaagatacgtcttttgggggcaacctcggacgagcagtcttccaggcgaaaaagagggttcttgaacctctgggcctggttgaggaacctgttaagacggctccgggaaaaaagaggccggtagagcactctcctgtggagccagactcctcctcgggaaccggaaaggcgggccagcagcctgcaagaaaaagattgaattttggtcagactggagacgcagactcagtacctgacccccagcctctcggacagccaccagcagccccctctggtctgggaactaatacgatggctacaggcagtggcgcaccaatggcagacaataacgagggcgccgacggagtgggtaattcctccggaaattggcattgcgattccacatggatgggcgacagagtcatcaccaccagcacccgaacctgggccctgcccacctacaacaaccacctctacaaacaaatttccagccaatcaggagcctcgaacgacaatcactactttggctacagcaccccttgggggtattttgacttcaacagattccactgccacttttcaccacgtgactggcaaagactcatcaacaacaactggggattccgacccaagagactcaacttcaagctctttaacattcaagtcaaagaggtcacgcagaatgacggtacgacgacgattgccaataaccttaccagcacggttcaggtgtttactgactcggagtaccagctcccgtacgtcctcggctcggcgcatcaaggatgcctcccgccgttcccagcagacgtcttcatggtgccacagtatggatacctcaccctgaacaacgggagtcaggcagtaggacgctcttcattttactgcctggagtactttccttctcagatgctgcgtaccggaaacaactttaccttcagctacacttttgaggacgttcctttccacagcagctacgctcacagccagagtctggaccgtctcatgaatcctctcatcgaccagtacctgtattacttgagcagaacaaacactccaagtggaaccaccacgcagtcaaggcttcagttttctcaggccggagcgagtgacattcgggaccagtctaggaactggcttcctggaccctgttaccgccagcagcgagtatcaaagacatctgcggataacaacaacagtgaatactcgtggactggagctaccaagtaccacctcaatggcagagactctctggtgaatccgggcccggccatggcaagccacaaggacgatgaagaaaagttttttcctcagagcggggttctcatctttgggaagcaaggctcagagaaaacaaatgtggacattgaaaaggtcatgattacagacgaagaggaaatcaggacaaccaatcccgtggctacggagcagtatggttctgtatctaccaacctccagagaggcaacagacaagcagctaccgcagatgtcaacacacaaggcgttcttccaggcatggtctggcaggacagagatgtgtaccttcaggggcccatctgggcaaagattccacacacggacggacattttcacccctctcccctcatgggtggattcggacttaaacaccctcctccacagattctcatcaagaacaccccggtacctgcgaatccttcgaccaccttcagtgcggcaaagtttgcttccttcatcacacagtactccacgggacaggtcagcgtggagatcgagtgggagctgcagaaggaaaacagcaaacgctggaatcccgaaattcagtacacttccaactacaacaagtctgttaatgtggactttactgtggacactaatggcgtgtattcagagcctcgccccattggcaccagatacctgactcgtaatctgtaattgcttgttaatcaataaaccgtttaattcgtttcagttgaactttggtctctgcgtatttctttcttatctagtttccatggctacgtagataagtagcatggcgggttaatcattaactacaaggaacccctagtgatggagttggccactccctctctgcgcgctcgctcgctcactgaggccgggcgaccaaaggtcgcccgacgcccgggctttgcccgggcggcctcagtgagcgagcgagcgcgcagagagggagtggccaa

SEQ ID NO: 26 - protein, 725 aa, Adeno-associated virus-5
MAADGYLPDWLEDTLSEGIRQWWKLKPGPPPPKPAERHKDDSRGLVLPGYKYLGPFNGLDKGEPVNEADAAALEHDKAYDRQLDSGDNPYLKYNHADAEFQERLKEDTSFGGNLGRAVFQAKKRVLEPFGLVEEGAKTAPTGKRIDDHFPKRKKARTEEDSKPSTSSDAEAGPSGSQQLQIPAQPASSLGADTMSAGGGGPLGDNNQGADGVGNASGDWHCDSTWMGDRVVTKSTRTWVLPSYNNHQYREIKSGSVDGSNANAYFGYSTPWGYFDFNRFHSHWSPRDWQRLINNYWGFRPRSLRVKIFNIQVKEVTVQDSTTTIANNLTSTVQVFTDDDYQLPYVVGNGTEGCLPAFPPQVFTLPQYGYATLNRDNTENPTERSSFFCLEYFPSKMLRTGNNFEFTYNFEEVPFHSSFAPSQNLFKLANPLVDQYLYRFVSTNNTGGVQFNKNLAGRYANTYKNWFPGPMGRTQGWNLGSGVNRASVSAFATTNRMELEGASYQVPPQPNGMTNNLQGSNTYALENTMIFNSQPANPGTTATYLEGNMLITSESETQPVNRVAYNVGGQMATNNQSSTTAPTTGTYNLQEIVPGSVWMERDVYLQGPIWAKIPETGAHFHPSPAMGGFGLKHPPPMMLIKNTPVPGNITSFSDVPVSSFITQYSTGQVTVEMEWELKKENSKRWNPEIQYTNNYNDPQFVDFAPDSTGEYRTTRPIGTRYLTRPL

SEQ ID NO: 27 - protein, 644 aa, Artificial Sequence
  source: /note="Description of Artificial Sequence: Synthetic polypeptide"
  MOD_RES (434)..(434): Any amino acid
KAYDQQLKAGDNPYLRYNHADAEFQERLQEDTSFGGNLGRAVFQAKKRVLEPLGLVETPAKTAPGKKRPVDSPDSTSGIGKKGQQPAKKRLNFGQTGDSESVPDPQPIGEPPAGPSGLGSGTMAAGGGAPMADNNEGADGVGNASGNWHCDSTWLGDRVITTSTRTWALPTYNNHLYKQISSQSAGSTNDNVYFGYSTPWGYFDFNRFHCHFSPRDWQRLINNNWGFRPKKLNFKLFNIQVKEVTTNDGVTTIANNLTSTVQVFSDSEYQLPYVLGSAHQGCLPPFPADVFMIPQYGYLTLNNGSQSVGRSSFYCLEYFPSQMLRTGNNFTFSYTFEDVPFHSSYAHSQSLDRLMNPLIDQYLYYLARTQSNAGGTAGNRELQFYQGGPTTMAEQAKNWLPGPCFRQQRVSKTLDQNNNSNFAWTGATKYHLNXRNSLVNPGVAMATHKDDEERFFPSSGVLIFGKTGAANKTTLENVLMTNEEEIRPTNPVATEEYGIVSSNLQAASTAAQTQVVNNQGALPGMVWQNRDVYLQGPIWAKIPHTDGNFHPSPLMGGFGLKHPPPQILIKNTPVPANPPEVFTPAKFASFITQYSTGQVSVEIEWELQKENSKRWNPEIQYTSNFDKQTGVDFAVDSQGVYSEP

SEQ ID NO: 28 - DNA, 1933 bp, Artificial Sequence
  source: /note="Description of Artificial Sequence: Synthetic polynucleotide"
caaggcctacgaccagcagctcaaagcgggtgacaatccgtacctgcggtataaccacgccgacgccgagtttcaggagtgtcttcaagaagatacgtcttttgggggcaacctcgggcgagcagtcttccaggccaaaaagcgggttctcgaacctcttggtctggttgagacgccagctaagacggcacctggaaagaagcgaccggtagactcgccagactccacctcgggcatcggcaagaaaggccagcagcccgcgaaaaagagactcaactttgggcagactggcgactcagagtcagtccccgaccctcaaccaatcggagaaccaccagcaggcccctctggtctgggatctggtacaatggttgcaggcggtggcgcaccaatggctgacaataacgagggcgccgacggagtgggtaatgcctcaggaaattggcattgcgattccacatggctgggcgacagagtcatcaccaccagcacccgaacctgggccctgcccacctacaacaaccacctctacaagcaaatctccagtcagtcagcagggagcaccaacgataacgtctatttcggctacagcaccccctgggggtattttgacttcaacagattccattgccacttctcaccacgtgactggcagcgacttatcaacaacaactggggattccggcccaagaagctcaacttcaagctcttcaacatccaggtcaaggaggtcacgacgaatgacggtgtcacaaccatcgctaataaccttaccagcacggttcaggtcttttcggactcggaatatcaactgccgtacgtcctcggctccgcgcaccagggctgcctgcctccgttcccggcagacgtgttcatgattccgcagtacggatacctgactctgaacaatggcagccaatcggtaggccgttcctccttctactgcctggagtactttccttctcagatgctgagaacgggcaacaacttcacctttagctacaccttcgaggacgtgcctttccacagcagctacgcgcacagccagagtctggaccggctgatgaatcccctcatcgaccagtacctgtactacttggccagaacacagagcaacgcaggaggtactgctggcaatcgggaactgcagttttatcagggcggacctaccaccatggccgaacaagcaaagaactggctgcccggaccttgcttccggcaacagagagtatccaagacgctggatcaaaataacaacagcaactttgcctggactggtgccacaaaataccatttaaatggaagaaattcattggttaatcccggtgtcgccatggcaacccacaaggacgacgaggaacgcttctccccttcgagcggagttctaatttttggcaaaactggagcagctaataaaactacattagaaaacgtgctcatgacaaatgaagaagaaattcgtcctaccaacccggtagctaccgaggaatacgggattgtaagcagcaacttgcaggcggctagcaccgcagcccagacacaagttgttaacaaccagggagccttacctggcatggtctggcagaaccgggacgtgtacctgcaaggtcccatttgggccaagattcctcacacggacggcaactttcacccgtctcctctaatgggtggctttggactgaaacacccgcctccccagatcctgatcaaaaacacgccggtacctgctaatcctccagaagtgtttactcctgccaagtttgcttccttcatcacgcagtacagcaccgggcaagtcagcgttgagatcgagtgggagctgcagaaagagaacagcaagcgctggaacccagagattcagtacacctccaactttgacaaacagactggagtggactttgctgttgacagccagggtgtttactctgagcct

SEQ ID NO: 29 - protein, 644 aa, Artificial Sequence
  source: /note="Description of Artificial Sequence: Synthetic polypeptide"
KAYDQQLKAGDNPYLRYNHADAEFQECLQEDTSFGGNLGRAVFQAKKRVLEPLGLVETPAKTAPGKKRPVDSPDSTSGIGKKGQQPAKKRLNFGQTGDSESVPDPQPIGEPPAGPSGLGSGTMVAGGGAPMADNNEGADGVGNASGNWHCDSTWLGDRVITTSTRTWALPTYNNHLYKQISSQSAGSTNDNVYFGYSTPWGYFDFNRFHCHFSPRDWQRLINNNWGFRPKKLNFKLFNIQVKEVTTNDGVTTIANNLTSTVQVFSDSEYQLPYVLGSAHQGCLPPFPADVFMIPQYGYLTLNNGSQSVGRSSFYCLEYFPSQMLRTGNNFTFSYTFEDVPFHSSYAHSQSLDRLMNPLIDQYLYYLARTQSNAGGTAGNRELQFYQGGPTTMAEQAKNWLPGPCFRQQRVSKTLDQNNNSNFAWTGATKYHLNGRNSLVNPGVAMATHKDDEERFSPSSGVLIFGKTGAANKTTLENVLMTNEEEIRPTNPVATEEYGIVSSNLQAASTAAQTQVVNNQGALPGMVWQNRDVYLQGPIWAKIPHTDGNFHPSPLMGGFGLKHPPPQILIKNTPVPANPPEVFTPAKFASFITQYSTGQVSVEIEWELQKENSKRWNPEIQYTSNFDKQTGVDFAVDSQGVYSEP

SEQ ID NO: 30 - DNA, 1933 bp, Artificial Sequence
  source: /note="Description of Artificial Sequence: Synthetic polynucleotide"
caaggcctacgaccagcagctcaaagcgggtgacaatccgtacctgcggtataaccacgccgacgccgagtttcaggagcgtcttcaagaagatacgtcttttgggggcaacctcgggcgagcagtcttccaggccaaaaagcgggttctcgaacctcttggtctggttgagacgccagctaagacggcacctggaaagaagcgaccggtagactcgccagactccacctcgggcatcggcaagaaaggccagcagcccgcgaaaaagagactcaactttgggcagactggcgactcagagccagtccccgaccctcaaccaatcggagaaccaccagcaggcccctctggtctgggatctggtacaatggctgcaggcggtggcgcaccaatggctgacaataacgagggcgccgacggagtgggtaatgcctcaggaaattggcattgcgattccacacggctgggcgacagagtcatcaccaccagcacccgaacctgggccctgcccacctacaacaaccacctctacaagcaaatctccagtcagtcagcagggagcaccaacgataacgtctatttcggctacagcaccccctgggggtattttgacttcaacagattccattgccacttctcaccacgtgactggcagcgacttatcaacaacaactggggattccggcccaagaagctcaacttcaagctcttcaacatccaggtcaaggaggtcacgacgaatgacggcgtcacaaccatcgctaataaccttaccagcacggttcaggtcttttcggactcggaatatcaactgccgtacgtcctcggctccgcgcaccagggctgcctgcctccgttcccggcagacgtgttcatgattccgcagtacggatacctgactctgaacaatggcagccaatcggtaggccgttcctccttctactgcctggagtactttccttctcagatgctgagaacgggcaacaacttcacctttagctacaccttcgaggacgtgcctttccacagcagctacgcgcacagccagagtctgggccggctgatgaatcccctcatcgaccagtacctgtactacttggccagaacacagagcaacgcaggaggtactgctggcaatcgggaactgcagttttatcagggcggacctaccaccatggccgaacaagcaaagaactggctgcccggaccttgcttccggcaacagagagtatccaagacgctggatcaaaataacaacagcaactttgcctggactggtgccacaaaataccatttaaatggaagaaattcattggttaatcccggtgtcgccatggcaacccacaaggacgacgaggaacgcttcttcccttcgagcggagttctaatttttggcaaaactggagcagctaataaaactacattagaaaacgtgctcatgacaaatgaagaagaaattcgtcctaccaacccggtagctaccgaggaatacgggattgtaagcagcaacttgcaggcggctagcaccgcagcccagacacaagttgttaacaaccagggagccttacctggcatggtctggcagaaccgggacgtgtacctgcaaggtcccatttgggccaagattcctcacacggacggcaactttcacccgtctcctctaatgggtggctttggactgaaacacccgcctccccagatcctgatcaaaaacacaccggtacctgctaatcctccagaagtgtttactcctgccaagtttgcttccttcatcacgcagtacagcaccgggcaagtcagcgttgagatcgaatgggagctgcagaaagagaacagcaagcgctggaacccagagattcagtacacctccaactttgacaaacagactggagtggactttgctgttgacagccagggtgtttactctgagcct

SEQ ID NO: 31 - protein, 644 aa, Artificial Sequence
  source: /note="Description of Artificial Sequence: Synthetic polypeptide"
KAYDQQLKAGDNPYLRYNHADAEFQERLQEDTSFGGNLGRAVFQAKKRVLEPLGLVETPAKTAPGKKRPVDSPDSTSGIGKKGQQPAKKRLNFGQTGDSEPVPDPQPIGEPPAGPSGLGSGTMAAGGGAPMADNNEGADGVGNASGNWHCDSTRLGDRVITTSTRTWALPTYNNHLYKQISSQSAGSTNDNVYFGYSTPWGYFDFNRFHCHFSPRDWQRLINNNWGFRPKKLNFKLFNIQVKEVTTNDGVTTIANNLTSTVQVFSDSEYQLPYVLGSAHQGCLPPFPADVFMIPQYGYLTLNNGSQSVGRSSFYCLEYFPSQMLRTGNNFTFSYTFEDVPFHSSYAHSQSLGRLMNPLIDQYLYYLARTQSNAGGTAGNRELQFYQGGPTTMAEQAKNWLPGPCFRQQRVSKTLDQNNNSNFAWTGATKYHLNGRNSLVNPGVAMATHKDDEERFFPSSGVLIFGKTGAANKTTLENVLMTNEEEIRPTNPVATEEYGIVSSNLQAASTAAQTQVVNNQGALPGMVWQNRDVYLQGPIWAKIPHTDGNFHPSPLMGGFGLKHPPPQILIKNTPVPANPPEVFTPAKFASFITQYSTGQVSVEIEWELQKENSKRWNPEIQYTSNFDKQTGVDFAVDSQGVYSEP

SEQ ID NO: 32 - DNA, 1933 bp, Artificial Sequence; identical to SEQ ID NO: 30
  source: /note="Description of Artificial Sequence: Synthetic polynucleotide"

SEQ ID NO: 33 - protein, 644 aa, Artificial Sequence; identical to SEQ ID NO: 31
  source: /note="Description of Artificial Sequence: Synthetic polypeptide"

SEQ ID NO: 34 - DNA, 1933 bp, Artificial Sequence
  source: /note="Description of Artificial Sequence: Synthetic polynucleotide"
caaggcctacgaccagcagctcaaagcgggtgacaatccgtacctgcggtataaccacgccgacgccgagtttcaggagcgtcttcaagaagatacgtcttttgggggcaacctcgggcgagcagtcttccaggccaaaaagcgggttctcgaacctcttggtctggttgagacgccagctaagacggcacctggaaagaagcgaccggtagactcgccagactccacctcgggcatcggcaagaaaggccagcagcccgcgaaaaagagactcaactttgggcagactggcgactcagagtcagtccccgaccctcaaccaatcggagaaccaccagcaggcccctctggtctgggatctggtacaatggctgcaggcggtggcgcaccaatggctgacaatagcgagggcgccgacggagtgggtaatgcctcaggaaattggcattgcgattccacatggctgggcgacagagtcatcaccaccagcacccgaacctgggccctgcccacctacaacaaccacctctacaagcaaatctccagtcagtcagcagggagcaccaacgataacgtctatttcggctacagcaccccctgggggtattttgacttcaacagattccattgccacttctcaccacgtgactggcagcgacttatcaacaacaactggggattccggcccaagaagctcaacttcaagctcttcaacatccaggtcaaggaggtcacgacgaatgacggtgtcacaaccatcgctaataaccttaccagcacggttcaggtcttttcggactcggaatatcaactgccgtacgtcctcggctccgcgcaccagggctgcctgcctccgttcccggcagacgtgttcatgattccgcagtacggatacctgactctgaacaatggcagccaatcggtaggccgttcctccttctactgcctggagtactttccttctcagatgctgagaacgggcaacaacttcacctttagctacaccttcgaggacgtgcctttccacagcagctacgcgcacagccagagtctggaccggctgatgaatcccctcatcgaccagtacctgtactacttggccagaacacagagcaacgcaggaggtactgctggcaatcgggaactgcagttttatcagggcggacctaccaccatggccgaacaagcaaagaactggctgcccggaccttgcttccggcaacagagagtatccaagacgctggatcaaaataacaacagcaactttgcctggactggtgccacaaaataccatttaaatggaagaaattcattggttaatcccggtgtcgccatggcaacccacaaggacgacgaggaacgcttcttcccttcgagcggagttctaatttttggcaaaactggagcagctaataaaactacattagaaaacgtgctcatgacaaatgaagaagaaattcgtcctaccaacccggtagctaccgaggaatacgggattgtaagcagcaacttgcaggcggctagcaccgcagcccagacacaagttgttaacaaccagggagccttacctggcatggtctggcagaaccgggacgtgtacctgcaaggtcccatttgggccaagattcctcacacggacggcaactttcacccgtctcctctaatgggtggctttggactgaaacacccgcctccccagatcctgatcaaaaacacaccggtacctgctaatcctccagaagtgtttactcctgccaagcttgcttccttcatcacgcagtacagcaccgggcaagtcagcgttgagatcgagtgggagctgcagaaagagaacagcaagcgctggaacccagagattcagtacacctccaactttgacaaacagactggagtggactttgctgttgacagccagggtgtttactctgagcct

SEQ ID NO: 35 - protein, 644 aa, Artificial Sequence
  source: /note="Description of Artificial Sequence: Synthetic polypeptide"
KAYDQQLKAGDNPYLRYNHADAEFQERLQEDTSFGGNLGRAVFQAKKRVLEPLGLVETPAKTAPGKKRPVDSPDSTSGIGKKGQQPAKKRLNFGQTGDSESVPDPQPIGEPPAGPSGLGSGTMAAGGGAPMADNSEGADGVGNASGNWHCDSTWLGDRVITTSTRTWALPTYNNHLYKQISSQSAGSTNDNVYFGYSTPWGYFDFNRFHCHFSPRDWQRLINNNWGFRPKKLNFKLFNIQVKEVTTNDGVTTIANNLTSTVQVFSDSEYQLPYVLGSAHQGCLPPFPADVFMIPQYGYLTLNNGSQSVGRSSFYCLEYFPSQMLRTGNNFTFSYTFEDVPFHSSYAHSQSLDRLMNPLIDQYLYYLARTQSNAGGTAGNRELQFYQGGPTTMAEQAKNWLPGPCFRQQRVSKTLDQNNNSNFAWTGATKYHLNGRNSLVNPGVAMATHKDDEERFFPSSGVLIFGKTGAANKTTLENVLMTNEEEIRPTNPVATEEYGIVSSNLQAASTAAQTQVVNNQGALPGMVWQNRDVYLQGPIWAKIPHTDGNFHPSPLMGGFGLKHPPPQILIKNTPVPANPPEVFTPAKLASFITQYSTGQVSVEIEWELQKENSKRWNPEIQYTSNFDKQTGVDFAVDSQGVYSEP

SEQ ID NO: 36 - DNA, 1933 bp, Artificial Sequence
  source: /note="Description of Artificial Sequence: Synthetic polynucleotide"
caaggcctacgaccagcagctcaaagcgggtgacaatccgtacctgcggtataaccacgccgacgccgagtttcaggagcgtcttcaagaagatacgtcttttgggggcaacctcgggcgagcagtcttccaggccaaaaagcgggttctcgaacctcttggtctggttgagacgccagctaagacggcacctggaaagaagcgaccggtagactcgccagactccacctcgggcatcggcaagaaaggccagcagcccgcgaaaaagagactcaactttgggcagactggcgactcagagtcagtccccgaccctcaaccaatcggagaaccaccagcaggcccctctggtctgggatctggtacaatggctgcaggcggtggcgcaccaatggctgacaataacgagggcgccgacggagtgggtaatgcctcaggaaattggcattgcgattccacatggctgggcgacagagtcatcaccaccagcacccgaacctgggccctgcccacctacaacaaccacctctacaagcaaatctccagtcagtcagcagggagcaccaacgataacgtctatttcggctacagcaccccctgggggtattttgacttcaacagattccattgccacttctcaccacgtgactggcagcgacttatcaacaacaactggggattccggcccaagaagctcaacttcaagctcttcaacatccaggtcaaggaggtcacgacgaatgacggcgtcacaaccatcgctaataaccttaccagcacggttcaggtcttttcggacccggaatatcaactgccgtacgtcctcggctccgcgcaccagggctgcctgcctccgttcccggcagacgtgttcatgattccgcagtacggatacctgactctgaacaatggcagccaatcggtaggccgttcctccttctactgcctggagtactttccttctcagatgctgagaacgggcaacaacttcacctttagctacaccttcgaggacgtgcctttccacagcagctacgcgcacagccagagtctggaccggctgatgaatcccctcatcgaccagtacctgtactacttggccagaacacagagcaacgcaggaggtactgctggcaatcgggaactgcagttttatcagggcggacctaccaccatggccgaacaagcaaagaactggctgcccggaccttgcttccggcaacagagagtatccaagacgctggatcaaaataacaacagcaactttgcctggactggtgccacaaaataccatttaaatggaagaaattcattggttaatcccggtgtcgccatggcaacccacaaggacgacgaggaacgcttcttcccttcgagcggagttctaatttttggcaaaactggagcagctaataaaactacattagaaaacgtgctcatgacaaatgaagaagaaattcgtcctaccaacccggtagctaccgaggaatacgggattgtaagcagcaacttgcaggcggctagcaccgcagcccagacacaagttgttaacaaccagggagccttacctggcatggtctggcagaaccgggacgtgtacctgcaaggtcccatttgggccaagattcctcacacggacggcaactttcacccgtctcctctaatgggtggctttggactgaaacacccgcctccccagatcctgatcaaaaacacaccggtacctgctaatcctccagaagtgtttactcctgccaagattgcttccttcatcacgcagtacagcaccgggcaagtcagcgttgagatcgagtgggagctgcagaaagagaacagcaagcgctggaacccagagattcagtacacctccaactttgacaaacagactggagtggactttgctgttgacagccagggtgtttactctgagcct

SEQ ID NO: 37 - protein, 644 aa, Artificial Sequence
  source: /note="Description of Artificial Sequence: Synthetic polypeptide"
KAYDQQLKAGDNPYLRYNHADAEFQERLQEDTSFGGNLGRAVFQAKKRVLEPLGLVETPAKTAPGKKRPVDSPDSTSGIGKKGQQPAKKRLNFGQTGDSESVPDPQPIGEPPAGPSGLGSGTMAAGGGAPMADNNEGADGVGNASGNWHCDSTWLGDRVITTSTRTWALPTYNNHLYKQISSQSAGSTNDNVYFGYSTPWGYFDFNRFHCHFSPRDWQRLINNNWGFRPKKLNFKLFNIQVKEVTTNDGVTTIANNLTSTVQVFSDPEYQLPYVLGSAHQGCLPPFPADVFMIPQYGYLTLNNGSQSVGRSSFYCLEYFPSQMLRTGNNFTFSYTFEDVPFHSSYAHSQSLDRLMNPLIDQYLYYLARTQSNAGGTAGNRELQFYQGGPTTMAEQAKNWLPGPCFRQQRVSKTLDQNNNSNFAWTGATKYHLNGRNSLVNPGVAMATHKDDEERFFPSSGVLIFGKTGAANKTTLENVLMTNEEEIRPTNPVATEEYGIVSSNLQAASTAAQTQVVNNQGALPGMVWQNRDVYLQGPIWAKIPHTDGNFHPSPLMGGFGLKHPPPQILIKNTPVPANPPEVFTPAKIASFITQYSTGQVSVEIEWELQKENSKRWNPEIQYTSNFDKQTGVDFAVDSQGVYSEP

SEQ ID NO: 38 - protein, 738 aa, Artificial Sequence
  source: /note="Description of Artificial Sequence: Synthetic polypeptide"
MAADGYLPDWLEDNLSEGIREWWALKPGAPKPKANQQKQDDGRGLVLPGYKYLGPFNGLDKGEPVNAADAAALEHDKAYDQQLKAGDNPYLRYNHADAEFQERLQEDTSFGGNLGRAVFQAKKRVLEPLGLVEEGAKTAPGKKRPVEPSPQRSPDSTTGIGKKGQQPAKKRLNFGQTGDSESVPDPQPIGEPPAGPSGLGSGTMAAGGGAPMADNNEGADGVGSSSGNWHCDSTWLGDRVITTSTRTWALPTYNNHLYKQISNGTSGGSTNDNTYFGYSTPWGYFDFNRFHCHFSPRDWQRLINNNWGFRPKRLNFKLFNIQVKEVTQNEGTKTIANNLTSTIQVFTDSEYQLPYVLGSARQGCLPPFPADVFMIPQYGYLTLNNGSQAVGRSSFYCLEYFPSQMLRTGNNFEFSYQFEDVPFHSSYAHSQSLDRLMNPLIDQYLYYLSRTQSTGGTAGTQQLLFSQAGPNNMSAQAKNWLPGPCYRQQRVSTTLSQNNNSNFAWTGATKYHLNGRDSLVNPGVAMATHKDDEERFFPSSGVLMFGKQGAGKGNVDYSSVMLTSEEEIKTTNPVATEQYGVVADNLQQQNAAPIVGAVNSQGALPGMVWQNRDVYLQGPIWAKIPHTDGNFHPSPLMGGFGLKHPPPQILIKNTPVPADPPTTFSQAKLASFITQYSTGQVSVEIEWELQKENSKRWNPEIQYTSNYYKSTNVDFAVNTDGTYSEPRPIGTRYLTRNL

SEQ ID NO: 39 - DNA, 3121 bp, Artificial Sequence
  source: /note="Description of Artificial Sequence: Synthetic polynucleotide"
gaattcgcccttctacggctgcgtcaactggaccaatgagaactttcccttcaacgactgtgtcgacaagatggtgatctggtgggaggaggggaagatgaccgccaaggtcgtggagtcggccaaagccattctcggaggaagcaaggtgcgcgtggaccagaaatgcaagtcctcggcccagatagacccgactcccgtgatcgtcacctccaacaccaacatgtgcgccgtgattgacgggaactcaacgaccttcgaacaccagcagccgttgcaagaccggatgttcaaatttgaactcacccgccgtctggatcatgactttgggaaggtcaccaagcaggaagtcaaagactttttccggtgggcaaaggatcacgtggttgaggtggagcacgaattctacgtcaaaaagggtggagccaagaaaagacccgcccccagtgacgcagatataagtgagcccaaacgggtgcgcgagtcagttgcgcagccatcgacgtcagacgcggaagcttcgatcaactacgcagacaggtaccaaaacaaatgttctcgtcacgcgggcatgaatctgatgctgtttccctgcagacaatgcgagagaatgaatcagaattcaaatatctgcttcactcacggacagaaagactgtttagagtgctttcccgtgtcagaatctcaacccgtttctgtcgtcaaaaaggcgtatcagaaactgtgctacattcatcatatcatgggaaaggtgccagacgcttgcactgcctgcgatctggtcgatgtggatttggatgactgcatctttgaacaataaatgatttaaatcaggtatggctgccgatggttatcttccagattggctcgaggacaacctctctgagggcattcgcgagtggtgggcgctgaaacctggagccccgaagcccaaagccaaccagcaaaagcaggacggcggccggggtctggtgcttcctggctacaagtacctcggacccttcaacggactcgacaagggggagcccgtcaacgcggcggacgcagcggccctcgagcacgacaaggcctacgaccagcagctcaaagcgggtgacaatccgtacctgcggtataaccacgccgacgccgagtttcaggagcgtctgcaagaagatacgtcttttgggggcaacctcgggcgagcagtcttccaggccaagaagcgggttctcgaacctctcggtctggttgaggaaggcgctaagacggctcctggaaagaagagaccggtagagccatcaccccagcgttctccagactcctctacgggcatcggcaagaaaggccagcagcccgcgaaaaagagactcaactttgggcagactggcgactcagagtcagtgcccgaccctcaaccaatcggagaaccccccgcaggcccctctggtctgggatctggtacaatggctgcaggcggtggcgctccaatggcagacaataacgaaggcgccgacggagtgggtagttcctcaggaaattggcattgcgattccacatggctgggcgactgagtcatcaccaccagcacccgaacctgggccctccccacctacaacaaccacctctacaagcaaatctccaacgggacttcgggaggaagcaccaacgacaacacctacttcggctacagcaccccctgggggtattttgactttaacagattccactgccacttctcaccacgtgactggcagcgactcatcaacaacaactggggattccggcccaagagactcaacttcaagctcttcaacatccaggtcaaggaggtcacgcagaatgaaggcaccaagaccatcgccaataaccttaccagcacgattcaggtctttacggactcggaataccagctcccgtacgtcctcggctctgcgcaccagggctgcctgcctccgttcccggcggacgtcttcatgattcctcagtacgggtacctgactctgaacaatggcagtcaggccgtgggccgttcctccttctactgcctggagtactttccttctcaaatgctgagaacgggcaacaactttgagttcagctaccagtttgaggacgtgccttttcacagcagctacgcgcacagccaaagcctggaccggctgatgaaccccctcatcgaccagtacctgtactacctgtctcggactcagtccacgggaggtaccgcaggaactcagcagttgctattttctcaggccgggcctaataacatgtcggctcaggccaaaaactggctacccgggccctgctaccggcagtaacgcgtctccacgacactgtcgcaaaataacaacagcaactttgtctggaccggtgccaccaagtatcatctgaatggcagagactctctggtagatcccggtgtcgctatggcaacccacaaggacgacgaagagcgattttttccgtccagcggagtcataatgtttgggaaacagggagctggaaaagacaacgtggactatagcagcgtcatgctaaccagtgaggaagaaattaaaaccaccaacccagtggccacagaacagtacggcgtggtggccgataacctgcaacagcaaaacgccgctcctattgtaggggccgtcaacagtcaaggagccttacctggcatggtctggcagaaccgggacgtgtacctgcagggtcctacctgggccaagattcctcacacggacggaaactttcatccctcgccgctgatgggaggctttggactgaaacacccgcctcctcagatcctgattaagaatacacctgttcccgcggatcctccaactaccttcagtcaagctaagctggcgtcgttcatcacgcagtacagcaccggacaggtcagcgtggaaattgaatgggagctgcaggaagaaaacagcaaacgctggaacccagagattcaatacacttccaactactacaaatctacaaatgtggactttgctgttaacacagatggcacttattctgagcctcgccccatcggcacccgttacctcacccgtaatctgtaattgcttgttaatcaataaaccggttgattcgtttcagttgaactttggtctctgcgaagggcgaattc

SEQ ID NO: 40 - protein, 738 aa, Artificial Sequence
  source: /note="Description of Artificial Sequence: Synthetic polypeptide"
MAADGYLPDWLEDNLSEGIREWWALKPGAPKPKANQQKQDDGRGLVLPGYKYLGPFNGLDKGEPVNAADAAALEHDKAYDQQLKAGDNPYLRYNHADAEFQERLQEDTSFGGNLGRAVFQAKKRVLEPLGLVEEGAKTAPGKKRPVEPSPQRSPDSSTGIGKKGQQPAKKRLNFGQTGDSESVPDPQPIGEPPAGPSGLGSGTMAAGGGAPMADNNEGADGVGSSSGNWHCDSTWLGDGVITTSTRTWALPTYNNHLYKQISNGTSGGSTNDNTYFGYSTPWGYFDFNRFHCHFSPRDWQRLINNNWGFRPKSLNFKLFNIQVKEVTQNEGTKTIANNLTSTIQVFTDSEYQLPYVLGSAHQGCLPPFPADVFMIPQYGYLTLNNGSQAVGRSSFYCLEYFPSQMLRTGNNFEFSYQFEDVPFHSSYAHSQSLDRLMNPLIDQYLYYLSRTQSTGGTAGTQQLLFSQAGPNNMSAQAKNWLPGPCYRQQRVSTTLSQNDNSNFAWTGATKYHLNGRDSLVNPGVAMATHKDDEERFFPSSGVLMFGKQGAGKDNVDYSSVMLTSEEEIKTTNPVATEQYGVVADNLQQQNAAPIVGAVNSQGALPGMVWQNRDVYLQGPIWAKIPHTDGNFHPSPLMGGFGLKHPPPQILIKNTPVPADPPTTFSQAKLASFITQYSTGQVSVEIEWELQKENSKRWNPEIQYTSNYYKSTNVDFAVNTDGTYSEPRPIGTRYLTRNL

SEQ ID NO: 41 - DNA, 3121 bp, Artificial Sequence
  source: /note="Description of Artificial Sequence: Synthetic polynucleotide"
gaattcgcccttcgcgagaccaaagttcaactgaaacgaatcaaccggtttattgattaacaagcaattacagattacgggtgaggtaacgggtgccgatggggcgaggctcagaataagtgccatctgtgttaacagcaaagtccacatttgtagatttgtagtagttggaagtgtattgaatctctgggttccagcgtttgctgttttctttctgcagctcccattcaatttccacgctgacctgtccggtgctgtactgcgtgatgaacgacgccagcttagcttgactgaaggtagttggaggatccgcgggaacaggtgtattcttaatcaggatctgaggaggcgggtgtttcagtccaaagcctcccatcagcggcgagggatgaaagtttccgtccgtgtgaggaatcttggcccagataggaccctgcaggtacacgtcccggttctgccagaccatgccaggtaaggctccttgactgttgacggcccctacaataggagcggcgttttgctgttgcaggttatcggccaccacgccgtactgttctgtggccactgggttggtggttttaatttcttcctcactggttagcataacgctgctatagtccacgttgtcttttccagctccctgtttcccaaacattaagactccgctggacggaaaaaatcgctcttcgtcgtccttgtgggttgccatagcgacaccgggatttaccagagagtctctgccattcagatgatacttggtggcaccggtccaggcaaagttgctgttgtcattttgcgacagtgtcgtggagacgcgttgctgccggtagcagggcccgggtagccagtttttggcctgagccgacatgttattaggcccggcctgagaaaatagcaactgctgagttcctgcggtacctcccgtggactgagtccgagacaggtagtacaggtactggtcgatgagggggttcatcagccggtccaggctttggctgtgcgcgtagctgctgtgaaaaggcacgtcctcaaactggtagctgaactcaaagttgttgcccgttctcagcatttgagaaggaaagtactccaggcagtagaaggaggaacggcccacggcctgactgccattgttcagagtcaggtacccgtactgaggaatcatgaagacgtccgccgggaacggaggcaggcagccctggtgcgcagagccgaggacgtacgggagctggtattccgagtccgtaaagacctgaatcgtgctggtaaggttattggcgatggtcttggtgccttcattctgcgtgacctccttgacctggatgttgaagagcttgaagttgaggctcttgggccggaatccccagttgttgttgatgagtcgctgccagtcacgtggtgagaagtggcagtggaatctgttaaagtcaaaatacccccagggggtgctgtagccgaagtaggtgttgtcgttggtgcttcctcccgaagtcccgttggagatttgcttgtagaggtggttgttgtaggtggggagggcccaggttcgggtgctggtggtgatgactccgtcgcccagccatgtggaatcgcaatgccaatttcctgaggaactacccactccgtcggcgccttcgttattgtctgccattggagcgccaccgcctgcagccattgtaccagatcccagaccagaggggcctgcggggggttctccgattggttgagggtcgggcactgactctgagtcgccagtctgcccaaagttgagtctctttttcgcgggctgctggcctttcttgccgatgcccgtagaggagtctggagaacgctggggtgatggctctaccggtctcttctttccaggagccgtcttagcgccttcctcaaccagaccgagaggttcgagaacccgcttcttggcctggaagactgctcgcccgaggttgcccccaaaagacgtatcttcttgcagacgctcctgaaactcggcgtcggcgtggttataccgcaggtacggattgtcacccgctttgagctgctggtcgtaggccttgtcgtgctcgagggccgctgcgtccgccgcgttgacgggctcccccttgtcgagtccgttgaagggtccgaggtacttgtagccaggaagcaccagaccccggccgtcgtcctgcttttgctggttggctttgggcttcggggctccaggtttcagcgcccaccactcgcgaatgccctcagagaggttgtcctcgagccaatctggaagataaccatcggcagccatacctgatttaaatcatttattgttcaaagatgcagtcatccaaatccacattgaccagatcgcaggcagtgcaagcgtctggcacctttcccatgatatgatgaatgtagcacagtttctgatacgcctttttgacgacagaaacgggttgagattctgacacgggaaagcactctaaacagtctttctgtccgtgagtgaagcagatatttgaattctgattcattctctcgcattgtctgcagggaaacagcatcagattcatgcccacgtgacgagaacatttgttttggtacctgtctgcgtagttgatcgaagcttccgcgtctgacgtcgatggctgcgcaactgactcgcgcacccgtttgggctcacttatatctgcgtcactgggggcgggtcttttcttggctccaccctttttgacgtagaattcatgctccacctcaaccacgtgatcctttgcccaccggaaaaagtctttgacttcctgcttggtgaccttcccaaagtcatgatccagacggcgggtgagttcaaatttgaacatccggtcttgcaacggctgctggtgttcgaaggtcgttgagttcccgtcaatcacggcgcacatgttggtgttggaggtgacgatcacgggagtcgggtctatctgggccgaggacttgcatttctggtccacgcgcaccttgcttcctccgagaatggctttggccgactccacgaccttggcggtcatcttcccctcctcccaccagatcaccatcttgtcgacacagtcgttgaagggaaagttctcattggtccagttgacgcagccgtagaaagggcgaattc

SEQ ID NO: 42 - DNA, 2211 bp, Artificial Sequence
  source: /note="Description of Artificial Sequence: Synthetic polynucleotide"
atggctgctgacggttatcttccagattggctcgaggacaacctttctgaaggcattcgtgagtggtgggctctgaaacctggagtccctcaacccaaagcgaaccaacaacaccaggacaaccgtcggggtcttgtgcttccgggttacaaatacctcggacccggtaacggactcgacaaaggagagccggtcaacgaggcggacgcggcagccctcgaacacgacaaagcttacgaccagcagctcaaggccggtgacaacccgtacctcaagtacaaccacgccgacgccgagtttcaggagcgtcttcaagaagatacgtcttttgggggcaaccttggcagagcagtcttccaggccaaaaagaggatccttgagcctcttggtctggttgaggaagcagctaaaacggctcctggaaagaagggggctgtagatcagtctcctcaggaaccggactcatcatctggtgttggcaaatcgggcaaacagcctgccagaaaaagactaaatttcggtcagactggagactcagagtcagtcccagaccctcaacctctcggagaaccaccagcagcccccacaagtttgggatctaatacaatggcttcaggcggtggcgcaccaatggcagacaataacgagggtgccgatggagtgggtaattcctcaggaaattggcattgcgattcccaatggctgggcgacagagtcatcaccaccagcaccagaacctgggccctgcccacttacaacaaccatctctacaagcaaatctccagccaatcaggagcttcaaacgacaaccactactttggctacagcaccccttgggggtattttgactttaacagattccactgccacttctcaccacgtgactggcagcgactcattaacaacaactggggattccggcccaagaaactcagcttcaagctcttcaacatccaagttagaggggtcacgcagaacgatggcacgacgactattgccaataaccttaccagcacggttcaagtgtttacggactcggagtatcagctcccgtacgtgctcgggtcggcgcaccaaggctgtctcccgccgtttccagcggacgtcttcatggtccctcagtatggatacctcaccctgaacaacggaagtcaagcggtgggacgctcatccttttactgcctggagtacttcccttcgcagatgctaaggactggaaataacttccaattcagctataccttcgaggatgtaccttttcacagcagctacgctcacagccagagtttggatcgcttgatgaatcctcttattgatcagtatctgtactacctgaacagaacgcaaggaacaacctctggaacaaccaaccaatcacggctgctttttagccaggctgggcctcagtctatgtctttgcaggccagaaattggctacctgggccctgctaccggcaacagagactttcaaagactgctaacgacaacaacaacagtaactttccttggacagcggccagcaaatatcatctcaatggccgcgactcgctggtgaatccaggaccagctatggccagtcacaaggacgatgaagaaaaatttttccctatgcacggcaatctaatatttggcaaagaagggacaacggcaagtaacgcagaattagataatgtaatgattacggatgaagaagagattcgtaccaccaatcctgtggcaacagagcagtatggaactgtggcaaataacttgcagagctcaaatacagctcccacgactggaactgtcaatcatcagggggccttacctggcatggtgtggcaagatcgtgacgtgtaccttcaaggacctatctgggcaaagattcctcacacggatggacactttcatccttctcctctgatgggaggctttggactgaaacatccgcctcctcaaatcatgatcaaaaatactccggtaccggcaaatcctccgacgactttcagcccggccaagtttgcttcatttatcactcagtactccactggacaggtcagcgtggaaattgagtgggagctacagaaagaaaacagcaaacgttggaatccagagattcagtacacttccaactacaacaagtctgttaatgtggactttactgtagacactaatggtgtttatagtgaacctcgccctattggaacccggtatctcacacgaaacttgtga

SEQ ID NO: 43 - protein, 736 aa, Adeno-associated virus 3
MAADGYLPDWLEDNLSEGIREWWALKPGVPQPKANQQHQDNRRGLVLPGYKYLGPGNGLDKGEPVNEADAAALEHDKAYDQQLKAGDNPYLKYNHADAEFQERLQEDTSFGGNLGRAVFQAKKRILEPLGLVEEAAKTAPGKKGAVDQSPQEPDSSSGVGKSGKQPARKRLNFGQTGDSESVPDPQPLGEPPAAPTSLGSNTMASGGGAPMADNNEGADGVGNSSGNWHCDSQWLGDRVITTSTRTWALPTYNNHLYKQISSQSGASNDNHYFGYSTPWGYFDFNRFHCHFSPRDWQRLINNNWGFRPKKLSFKLFNIQVRGVTQNDGTTTIANNLTSTVQVFTDSEYQLPYVLGSAHQGCLPPFPADVFMVPQYGYLTLNNGSQAVGRSSFYCLEYFPSQMLRTGNNFQFSYTFEDVPFHSSYAHSQSLDRLMNPLIDQYLYYLNRTQGTTSGTTNQSRLLFSQAGPQSMSLQARNWLPGPCYRQQRLSKTANDNNNSNFPWTAASKYHLNGRDSLVNPGPAMASHKDDEEKFFPMHGNLIFGKEGTTASNAELDNVMITDEEEIRTTNPVATEQYGTVANNLQSSNTAPTTGTVNHQGALPGMVWQDRDVYLQGPIWAKIPHTDGHFHPSPLMGGFGLKHPPPQIMIKNTPVPANPPTTFSPAKFASFITQYSTGQVSVEIEWELQKENSKRWNPEIQYTSNYNKSVNVDFTVDTNGVYSEPRPIGTRYLTRNL

SEQ ID NO: 44 - DNA, 4726 bp, Adeno-associated virus 3
ttggccactccctctatgcgcactcgctcgctcggtggggcctggcgaccaaaggtcgccagacggacgtgctttgcacgtccggccccaccgagcgagcgagtgcgcatagagggagtggccaactccatcactagaggtatggcagtgacgtaacgcgaagcgcgcgaagcgagaccacgcctaccagctgcgtcagcagtcaggtgacccttttgcgacagtttgcgacaccacgtggccgctgagggtatatattctcgagtgagcgaaccaggagctccattttgaccgcgaaatttgaacgagcagcagccatgccggggttctacgagattgtcctgaaggtcccgagtgacctggacgagcgcctgccgggcatttctaactcgtttgttaactgggtggccgagaaggaatgggacgtgccgccggattctgacatggatccgaatctgattgagcaggcacccctgaccgtggccgaaaagcttcagcgcgagttcctggtggagtggcgccgcgtgagtaaggccccggaggccctcttttttgtccagttcgaaaagggggagacctacttccacctgcacgtgctgattgagaccatcggggtcaaatccatggtggtcggccgctacgtgagccagattaaagagaagctggtgacccgcatctaccgcggggtcgagccgcagcttccgaactggttcgcggtgaccaaaacgcgaaatggcgccgggggcgggaacaaggtggtggacgactgctacatccccaactacctgctccccaagacccagcccgagctccagtgggcgtggactaacatggaccagtatttaagcgcctgtttgaatctcgcggagcgtaaacggctggtggcgcagcatctgacgcacgtgtcgcagacgcaggagcagaacaaagagaatcagaaccccaattctgacgcgccggtcatcaggtcaaaaacctcagccaggtacatggagctggtcgggtggctggtggaccgcgggatcacgtcagaaaagcaatggattcaggaggaccaggcctcgtacatctccttcaacgccgcctccaactcgcggtcccagatcaaggccgcgctggacaatgcctccaagatcatgagcctgacaaagacggctccggactacctggtgggcagcaacccgccggaggacattaccaaaaatcggatctaccaaatcctggagctgaacgggtacgatccgcagtacgcggcctccgtcttcctgggctgggcgcaaaagaagttcgggaagaggaacaccatctggctctttgggccggccacgacgggtaaaaccaacatcgcggaagccatcgcccacgccgtgcccttctacggctgcgtaaactggaccaatgagaactttcccttcaacgattgcgtcgacaagatggtgatctggtgggaggagggcaagatgacggccaaggtcgtggagagcgccaaggccattctgggcggaagcaaggtgcgcgtggaccaaaagtgcaagtcatcggcccagatcgaacccactcccgtgatcgtcacctccaacaccaacatgtgcgccgtgattgacgggaacagcaccaccttcgagcatcagcagccgctgcaggaccggatgtttgaatttgaacttacccgccgtttggaccatgactttgggaaggtcaccaaacaggaagtaaaggactttttccggtgggcttccgatcacgtgactgacgtggctcatgagttctacgtcagaaagggtggagctaagaaacgccccgcctccaatgacgcggatgtaagcgagccaaaacgggagtgcacgtcacttgcgcagccgacaacgtcagacgcggaagcaccggcggactacgcggacaggtaccaaaacaaatgttctcgtcacgtgggcatgaatctgatgctttttccctgtaaaacatgcgagagaatgaatcaaatttccaatgtctgttttacgcatggtcaaagagactgtggggaatgcttccctggaatgtcagaatctcaacccgtttctgtcgtcaaaaagaagacttatcagaaactgtgtccaattcatcatatcctgggaagggcacccgagattgcctgttcggcctgcgatttggccaatgtggacttggatgactgtgtttctgagcaataaatgacttaaaccaggtatggctgctgacggttatcttccagattggctcgaggacaacctttctgaaggcattcgtgagtggtgggctctgaaacctggagtccctcaacccaaagcgaaccaacaacaccaggacaaccgtcggggtcttgtgcttccgggttacaaatacctcggacccggtaacggactcgacaaaggagagccggtcaacgaggcggacgcggcagccctcgaacacgacaaagcttacgaccagcagctcaaggccggtgacaacccgtacctcaagtacaaccacgccgacgccgagtttcaggagcgtcttcaagaagatacgtcttttgggggcaaccttggcagagcagtcttccaggccaaaaagaggatccttgagcctcttggtctggttgaggaagcagctaaaacggctcctggaaagaagggggctgtagatcagtctcctcaggaaccggactcatcatctggtgttggcaaatcgggcaaacagcctgccagaaaaagactaaatttcggtcagactggagactcagagtcagtcccagaccctcaacctctcggagaaccaccagcagcccccacaagtttgggatctaatacaatggcttcaggcggtggcgcaccaatggcagacaataacgagggtgccgatggagtgggtaattcctcaggaaattggcattgcgattcccaatggctgggcgacagagtcatcaccaccagcaccagaacctgggccctgcccacttacaacaaccatctctacaagcaaatctccagccaatcaggagcttcaaacgacaaccactactttggctacagcaccccttgggggtattttgactttaacagattccactgccacttctcaccacgtgactggcagcgactcattaacaacaactggggattccggcccaagaaactcagcttcaagctcttcaacatccaagttagaggggtcacgcagaacgatggcacgacgactattgccaataaccttaccagcacggttcaagtgtttacggactcggagtatcagctcccgtacgtgctcgggtcggcgcaccaaggctgtctcccgccgtttccagcggacgtcttcatggtccctcagtatggatacctcaccctgaacaacggaagtcaagcggtgggacgctcatccttttactgcctggagtacttcccttcgcagatgctaaggactggaaataacttccaattcagctataccttcgaggatgtaccttttcacagcagctacgctcacagccagagtttggatcgcttgatgaatcctcttattgatcagtatctgtactacctgaacagaacgcaaggaacaacctctggaacaaccaaccaatcacggctgctttttagccaggctgggcctcagtctatgtctttgcaggccagaaattggctacctgggccctgctaccggcaacagagactttcaaagactgctaacgacaacaacaacagtaactttccttggacagcggccagcaaatatcatctcaatggccgcgactcgctggtgaatccaggaccagctatggccagtcacaaggacgatgaagaaaaatttttccctatgcacggcaatctaatatttggcaaagaagggacaacggcaagtaacgcagaattagataatgtaatgattacggatgaagaagagattcgtaccaccaatcctgtggcaacagagcagtatggaactgtggcaaataacttgcagagctcaaatacagctcccacgactggaactgtcaatcatcagggggccttacctggcatggtgtggcaagatcgtgacgtgtaccttcaaggacctatctgggcaaagattcctcacacggatggacactttcatccttctcctctgatgggaggctttggactgaaacatccgcctcctcaaatcatgatcaaaaatactccggtaccggcaaatcctccgacgactttcagcccggccaagtttgcttcatttatcactcagtactccactggacaggtcagcgtggaaattgagtgggagctacagaaagaaaacagcaaacgttggaatccagagattcagtacacttccaactacaacaagtctgttaatgtggactttactgtagacactaatggtgtttatagtgaacctcgccctattggaacccggtatctcacacgaaacttgtgaatcctggttaatcaataaaccgtttaattcgtttcagttgaactttggctcttgtgcacttctttatctttatcttgtttccatggctactgcgtagataagcagcggcctgcggcgcttgcgcttcgcggtttacaactgctggttaatatttaactctcgccatacctctagtgatggagttggccactccctctatgcgcactcgctcgctcggtggggcctggcgaccaaaggtcgccagacggacgtgctttgcacgtccggccccaccgagcgagcgagtgcgcatagagggagtggccaa

SEQ ID NO: 45 - protein, 737 aa, Artificial Sequence
  source: /note="Description of Artificial Sequence: Synthetic polypeptide"
MAADGYLPDWLEDNLSEGIREWWDLKPGAPKPKANQQKQDNGRGLVLPGYKYLGPFNGLDKGEPVNAADAAALEHDKAYDQQLNAGDNPYLRYNHADAEFQERLQEDTSFGGNLGRAVFQAKKRVLEPLGLVEEGAKTAPAKKRPVEPSPQRSPDSSTGIGKKGQQPARKRLNFGQTGDSESVPDPQPLGEPPAAPSSVGSGTVAAGGGAPMADNNEGADGVGNASGNWHCDSTWLGDRVITTSTRTWALPTYNNHLYEQISSETAGSTNDNTYFGYSTPWGYFDFNRFHCHFSPRDWQRLINNNWGFRPKKLRFKLFNIQVKEVTTNDGVTTIANNLTSTIQVFSDSEYQLPYVLGSAHQGCLPPFPADVFMIPQYGYLTLNNGSQSVGRSSFYCLEYFPSQMLRTGNNFEFSYSFEDVPFHSSYAHSQSLDRLMNPLIDQYLYYLARTQSDPGGTAGNRELQFYQGGPSTMAEQAKNWLPGPCFRQQRVSKTLDQNNNSNFAWTGATKYHLNGRNSLVNPGVAMATHKDDEDRFFPSSGVLIFGKTGATNKTTLENVLMTNEEEIRPTNPVATEEYGIVSSNLQAANTAAQTQVVNNQGALPGMVWQNRDVYLQGPIWAKIPHTDGNFHPSPLMGGFGLKHPPPQILIKNTPVPANPPEVFTPAKFASFITQYSTGQVSVEIEWELQKENSKRWDPEIQYTSNFEKQTGVDFAVDSQGVYSEPRPIGTRYLTRNL

SEQ ID NO: 46 - DNA, 2211 bp, Artificial Sequence
  source: /note="Description of Artificial Sequence: Synthetic polynucleotide"
atggctgctgacggttatcttccagattggctcgaggacaacctttctgaaggcattcgtgagtggtgggctctgaaacctggagtccctcaacccaaagcgaaccaacaacaccaggacaaccgtcggggtcttgtgcttccgggttacaaatacctcggacccggtaacggactcgacaaaggagagccggtcaacgaggcggacgcggcagccctcgaacacgacaaagcttacgaccagcagctcaaggccggtgacaacccgtacctcaagtacaaccacgccgacgccgagtttcaggagcgtcttcaagaagatacgtcttttgggggcaaccttggcagagcagtcttccaggccaaaaagaggatccttgagcctcttggtctggttgaggaagcagctaaaacggctcctggaaagaagggggctgtagatcagtctcctcaggaaccggactcatcatctggtgttggcaaatcgggcaaacagcctgccagaaaaagactaaatttcggtcagactggagactcagagtcagtcccagaccctcaacctctcggagaaccaccagcagcccccacaagtttgggatctaatacaatggcttcaggcggtggcgcaccaatggcagacaataacgagggtgccgatggagtgggtaattcctcaggaaattggcattgcgattcccaatggctgggcgacagagtcatcaccaccagcaccagaacctgggccctgcccacttacaacaaccatctctacaagcaaatctccagccaatcaggagcttcaaacgacaaccactactttggctacagcaccccttgggggtattttgactttaacagattccactgccacttctcaccacgtgactggcagcgactcattaacaacaactggggattccggcccaagaaactcagcttcaagctcttcaacatccaagttagaggggtcacgcagaacgatggcacgacgactattgccaataaccttaccagcacggttcaagtgtttacggactcggagtatcagctcccgtacgtgctcgggtcggcgcaccaaggctgtctcccgccgtttccagcggacgtcttcatggtccctcagtatggatacctcaccctgaacaacggaagtcaagcggtgggacgctcatccttttactgcctggagtacttcccttcgcagatgctaaggactggaaataacttccaattcagctataccttcgaggatgtaccttttcacagcagctacgctcacagccagagtttggatcgcttgatgaatcctcttattgatcagtatctgtactacctgaacagaacgcaaggaacaacctctggaacaaccaaccaatcacggctgctttttagccaggctgggcctcagtctatgtctttgcaggccagaaattggctacctgggccctgctaccggcaacagagactttcaaagactgctaacgacaacaacaacagtaactttccttggacagcggccagcaaatatcatctcaatggccgcgactcgctggtgaatccaggaccagctatggccagtcacaaggacgatgaagaaaaatttttccctatgcacggcaatctaatatttggcaaagaagggacaacggcaagtaacgcagaattagataatgtaatgattacggatgaagaagagattcgtaccaccaatcctgtggcaacagagcagtatggaactgtggcaaataacttgcagagctcaaatacagctcccacgactggaactgtcaatcatcagggggccttacctggcatggtgtggcaagatcgtgacgtgtaccttcaaggacctatctgggcaaagattcctcacacggatggacactttcatccttctcctctgatgggaggctttggactgaaacatccgcctcctcaaatcatgatcaaaaatactccggtaccggcaaatcctccgacgactttcagcccggccaagtttgcttcatttatcactcagtactccactggacaggtcagcgtggaaattgagtgggagctacagaaagaaaacagcaaacgttggaatccagagattcagtacacttccaactacaacaagtctgttaatgtggactttactgtagacactaatggtgtttatagtgaacctcgccctattggaacccggtatctcacacgaaacttgtaa

SEQ ID NO: 47 - protein, 736 aa, Artificial Sequence; identical to SEQ ID NO: 43
  source: /note="Description of Artificial Sequence: Synthetic polypeptide"

SEQ ID NO: 48 - protein, 736 aa, Adeno-associated virus 3A; identical to SEQ ID NO: 43

SEQ ID NO: 49 - protein, 624 aa, Adeno-associated virus 3A
MPGFYEIVLKVPSDLDERLPGISNSFVNWVAEKEWDVPPDSDMDPNLIEQAPLTVAEKLQREFLVEWRRVSKAPEALFFVQFEKGETYFHLHVLIETIGVKSMVVGRYVSQIKEKLVTRIYRGVEPQLPNWFAVTKTRNGAGGGNKVVDDCYIPNYLLPKTQPELQWAWTNMDQYLSACLNLAERKRLVAQHLTHVSQTQEQNKENQNPNSDAPVIRSKTSARYMELVGWLVDRGITSEKQWIQEDQASYISFNAASNSRSQIKAALDNASKIMSLTKTAPDYLVGSNPPEDITKNRIYQILELNGYDPQYAASVFLGWAQKKFGKRNTIWLFGPATTGKTNIAEAIAHAVPFYGCVNWTNENFPFNDCVDKMVIWWEEGKMTAKVVESAKAILGGSKVRVDQKCKSSAQIEPTPVIVTSNTNMCAVIDGNSTTFEHQQPLQDRMFEFELTRRLDHDFGKVTKQEVKDFFRWASDHVTDVAHEFYVRKGGAKKRPASNDADVSEPKRECTSLAQPTTSDAEAPADYADRYQNKCSRHVGMNLMLFPCKTCERMNQISNVCFTHGQRDCGECFPGMSESQPVSVVKKKTYQKLCPIHHILGRAPEIACSACDLANVDLDDCVSEQ

SEQ ID NO: 50 - protein, 736 aa, Adeno-associated virus 3B
MAADGYLPDWLEDNLSEGIREWWALKPGVPQPKANQQHQDNRRGLVLPGYKYLGPGNGLDKGEPVNEADAAALEHDKAYDQQLKAGDNPYLKYNHADAEFQERLQEDTSFGGNLGRAVFQAKKRILEPLGLVEEAAKTAPGKKRPVDQSPQEPDSSSGVGKSGKQPARKRLNFGQTGDSESVPDPQPLGEPPAAPTSLGSNTMASGGGAPMADNNEGADGVGNSSGNWHCDSQWLGDRVITTSTRTWALPTYNNHLYKQISSQSGASNDNHYFGYSTPWGYFDFNRFHCHFSPRDWQRLINNNWGFRPKKLSFKLFNIQVKEVTQNDGTTTIANNLTSTVQVFTDSEYQLPYVLGSAHQGCLPPFPADVFMVPQYGYLTLNNGSQAVGRSSFYCLEYFPSQMLRTGNNFQFSYTFEDVPFHSSYAHSQSLDRLMNPLIDQYLYYLNRTQGTTSGTTNQSRLLFSQAGPQSMSLQARNWLPGPCYRQQRLSKTANDNNNSNFPWTAASKYHLNGRDSLVNPGPAMASHKDDEEKFFPMHGNLIFGKEGTTASNAELDNVMITDEEEIRTTNPVATEQYGTVANNLQSSNTAPTTRTVNDQGALPGMVWQDRDVYLQGPIWAKIPHTDGHFHPSPLMGGFGLKHPPPQIMIKNTPVPANPPTTFSPAKFASFITQYSTGQVSVEIEWELQKENSKRWNPEIQYTSNYNKSVNVDFTVDTNGVYSEPRPIGTRYLTRNL

SEQ ID NO: 51 - protein, 624 aa, Adeno-associated virus 3B
MPGFYEIVLKVPSDLDEHLPGISNSFVNWVAEKEWELPPDSDMDPNLIEQAPLTVAEKLQREFLVEWRRVSKAPEALFFVQFEKGETYFHLHVLIETIGVKSMVVGRYVSQIKEKLVTRIYRGVEPQLPNWFAVTKTRNGAGGGNKVVDDCYIPNYLLPKTQPELQWAWTNMDQYLSACLNLAERKRLVAQHLTHVSQTQEQNKENQNPNSDAPVIRSKTSARYMELVGWLVDRGITSEKQWIQEDQASYISFNAASNSRSQIKAALDNASKIMSLTKTAPDYLVGSNPPEDITKNRIYQILELNGYDPQYAASVFLGWAQKKFGKRNTIWLFGPATTGKTNIAEAIAHAVPFYGCVNWTNENFPFNDCVDKMVIWWEEGKMTAKVVESAKAILGGSKVRVDQKCKSSAQIEPTPVIVTSNTNMCAVIDGNSTTFEHQQPLQDRMFKFELTRRLDHDFGKVTKQEVKDFFRWASDHVTDVAHEFYVRKGGAKKRPASNDADVSEPKRQCTSLAQPTTSDAEAPADYADRYQNKCSRHVGMNLMLFPCKTCERMNQISNVCFTHGQRDCGECFPGMSESQPVSVVKKKTYQKLCPIHHILGRAPEIACSACDLANVDLDDCVSEQ

SEQ ID NO: 52 - DNA, 4722 bp, Adeno-associated virus 3B
tggccactccctctatgcgcactcgctcgctcggtggggcctggcgaccaaaggtcgccagacggacgtgctttgcacgtccggccccaccgagcgagcgagtgcgcatagagggagtggccaactccatcactagaggtatggcagtgacgtaacgcgaagcgcgcgaagcgagaccacgcctaccagctgcgtcagcagtcaggtgacccttttgcgacagtttgcgacaccacgtggccgctgagggtatatattctcgagtgagcgaaccaggagctccattttgaccgcgaaatttgaacgagcagcagccatgccggggttctacgagattgtcctgaaggtcccgagtgacctggacgagcacctgccgggcatttctaactcgtttgttaactgggtggccgagaaggaatgggagctgccgccggattctgacatggatccgaatctgattgagcaggcacccctgaccgtggccgaaaagcttcagcgcgagttcctggtggagtggcgccgcgtgagtaaggccccggaggccctcttttttgtccagttcgaaaagggggagacctacttccacctgcacgtgctgattgagaccatcggggtcaaatccatggtggtcggccgctacgtgagccagattaaagagaagctggtgacccgcatctaccgcggggtcgagccgcagcttccgaactggttcgcggtgaccaaaacgcgaaatggcgccgggggcgggaacaaggtggtggacgactgctacatccccaactacctgctccccaagacccagcccgagctccagtgggcgtggactaacatggaccagtatttaagcgcctgtttgaatctcgcggagcgtaaacggctggtggcgcagcatctgacgcacgtgtcgcagacgcaggagcagaacaaagagaatcagaaccccaattctgacgcgccggtcatcaggtcaaaaacctcagccaggtacatggagctggtcgggtggctggtggaccgcgggatcacgtcagaaaagcaatggattcaggaggaccaggcctcgtacatctccttcaacgccgcctccaactcgcggtcccagatcaaggccgcgctggacaatgcctccaagatcatgagcctgacaaagacggctccggactacctggtgggcagcaacccgccggaggacattaccaaaaatcggatctaccaaatcctggagctgaacgggtacgatccgcagtacgcggcctccgtcttcctgggctgggcgcaaaagaagttcgggaagaggaacaccatctggctctttgggccggccacgacgggtaaaaccaacatcgcggaagccatcgcccacgccgtgcccttctacggctgcgtaaactggaccaatgagaactttcccttcaacgattgcgtcgacaagatggtgatctggtgggaggagggcaagatgacggccaaggtcgtggagagcgccaaggccattctgggcggaagcaaggtgcgcgtggaccaaaagtgcaagtcatcggcccagatcgaacccactcccgtgatcgtcacctccaacaccaacatgtgcgccgtgattgacgggaacagcaccaccttcgagcatcagcagccgctgcaggaccggatgtttaaatttgaacttacccgccgtttggaccatgactttgggaaggtcaccaaacaggaagtaaaggactttttccggtgggcttccgatcacgtgactgacgtggctcatgagttctacgtcagaaagggtggagctaagaaacgccccgcctccaatgacgcggatgtaagcgagccaaaacggcagtgcacgtcacttgcgcagccgacaacgtcagacgcggaagcaccggcggactacgcggacaggtaccaaaacaaatgttctcgtcacgtgggcatgaatctgatgctttttccctgtaaaacatgcgagagaatgaatcaaatttccaatgtctgttttacgcatggtcaaagagactgtggggaatgcttccctggaatgtcagaatctcaacccgtttctgtcgtcaaaaagaagacttatcagaaactgtgtccaattcatcatatcctgggaagggcacccgagattgcctgttcggcctgcgatttggccaatgtggacttggatgactgtgtttctgagcaataaatgacttaaaccaggtatggctgctgacggttatcttccagattggctcgaggacaacctttctgaaggcattcgtgagtggtgggctctgaaacctggagtccctcaacccaaagcgaaccaacaacaccaggacaaccgtcggggtcttgtgcttccgggttacaaatacctcggacccggtaacggactcgacaaaggagagccggtcaacgaggcggacgcggcagccctcgaacacgacaaagcttacgaccagcagctcaaggccggtgacaacccgtacctcaagtacaaccacgccgacgccgagtttcaggagcgtcttcaagaagatacgtcttttgggggcaaccttggcagagcagtcttccaggccaaaaagaggatccttgagcctcttggtctggttgaggaagcagctaaaacggctcctggaaagaagaggcctgtagatcagtctcctcaggaaccggactcatcatctggtgttggcaaatcgggcaaacagcctgccagaaaaagactaaatttcggtcagactggcgactcagagtcagtcccagaccctcaacctctcggagaaccaccagcagcccccacaagtttgggatctaatacaatggcttcaggcggtggcgcaccaatggcagacaataacgagggtgccgatggagtgggtaattcctcaggaaattggcattgcgattcccaatggctgggcgacagagtcatcaccaccagcaccagaacctgggccctgcccacttacaacaaccatctctacaagcaaatctccagccaatcaggagcttcaaacgacaaccactactttggctacagcaccccttgggggtattttgactttaacagattccactgccacttctcaccacgtgactggcagcgactcattaacaacaactggggattccggcccaagaaactcagcttcaagctcttcaacatccaagttaaagaggtcacgcagaacgatggcacgacgactattgccaataaccttaccagcacggttcaagtgtttacggactcggagtatcagctcccgtacgtgctcgggtcggcgcaccaaggctgtctcccgccgtttccagcggacgtcttcatggtccctcagtatggatacctcaccctgaacaacggaagtcaagcggtgggacgctcatccttttactgcctggagtacttcccttcgcagatgctaaggactggaaataacttccaattcagctataccttcgaggatgtaccttttcacagcagctacgctcacagccagagtttggatcgcttgatgaatcctcttattgatcagtatctgtactacctgaacagaacgcaaggaacaacctctggaacaaccaaccaatcacggctgctttttagccaggctgggcctcagtctatgtctttgcaggccagaaattggctacctgggccctgctaccggcaacagagactttcaaagactgctaacgacaacaacaacagtaactttccttggacagcggccagcaaatatcatctcaatggccgcgactcgctggtgaatccaggaccagctatggccagtcacaaggacgatgaagaaaaatttttccctatgcacggcaatctaatatttggcaaagaagggacaacggcaagtaacgcagaattagataatgtaatgattacggatgaagaagagattcgtaccaccaatcctgtggcaacagagcagtatggaactgtggcaaataacttgcagagctcaaatacagctcccacgactagaactgtcaatgatcagggggccttacctggcatggtgtggcaagatcgtgacgtgtaccttcaaggacctatctgggcaaagattcctcacacggatggacactttcatccttctcctctgatgggaggctttggactgaaacatccgcctcctcaaatcatgatcaaaaatactccggtaccggcaaatcctccgacgactttcagcccggccaagtttgcttcatttatcactcagtactccactggacaggtcagcgtggaaattgagtgggagctacagaaagaaaacagcaaacgttggaatccagagattcagtacacttccaactacaacaagtctgttaatgtggactttactgtagacactaatggtgtttatagtgaacctcgccctattggaacccggtatctcacacgaaacttgtaatcctggttaatcaataaaccgtttaattcgtttcagttgaactttggctcttgtgcacttcttatcttatcttgtttccatggctactgcgtagataagcagcggcctgcggcgcttgcgcttcgcggtttacaactgctggttaatatttaactctcgccatacctctagtgatggagttggccactccctctatgcgcactcgctcgctcggtggggccggacgtgcaaagcacgtccgtctggcgacctttggtcgccaggccccaccgagcgagcgagtgcgcatagagggagtggccaa

SEQ ID NO: 53 - DNA, 1800 bp, Adeno-associated virus 4
  modified_base (342)..(342): Unknown
acggctcctggaaagaagagaccgttgattgaatccccccagcagcccgactcctccacgggtatcggcaaaaaaggcaagcagccggctaaaaagaagctcgttttcgaagacgaaactggagcaggcgacggaccccctgagggatcaacttccggagccatgtctgatgacagtgagatgcgtgcagcagctggcggagctgcagtcgagggsggacaaggtgccgatggagtgggtaatgcctcgggtgattggcattgcgattccacctggtctgagggccacgtcacgaccaccagcaccagaacctgggtcttgcccacctacaacaaccacctntacaagcgactcggagagagcctgcagtccaacacctacaacggattctccaccccctggggatactttgacttcaaccgcttccactgccacttctcaccacgtgactggcagcgactcatcaacaacaactggggcatgcgacccaaagccatgcgggtcaaaatcttcaacatccaggtcaaggaggtcacgacgtcgaacggcgagacaacggtggctaataaccttaccagcacggttcagatctttgcggactcgtcgtacgaactgccgtacgtgatggatgcgggtcaagagggcagcctgcctccttttcccaacgacgtctttatggtgccccagtacggctactgtggactggtgaccggcaacacttcgcagcaacagactgacagaaatgccttctactgcctggagtactttccttcgcagatgctgcggactggcaacaactttgaaattacgtacagttttgagaaggtgcctttccactcgatgtacgcgcacagccagagcctggaccggctgatgaaccctctcatcgaccagtacctgtggggactgcaatcgaccaccaccggaaccaccctgaatgccgggactgccaccaccaactttaccaagctgcggcctaccaacttttccaactttaaaaagaactggctgcccgggccttcaatcaagcagcagggcttctcaaagactgccaatcaaaactacaagatccctgccaccgggtcagacagtctcatcaaatacgagacgcacagcactctggacggaagatggagtgccctgacccccggacctccaatggccacggctggacctgcggacagcaagttcagcaacagccagctcatctttgcggggcctaaacagaacggcaacacggccaccgtacccgggactctgatcttcacctctgaggaggagctggcagccaccaacgccaccgatacggacatgtggggcaacctacctggcggtgaccagagcaacagcaacctgccgaccgtggacagactgacagccttgggagccgtgcctggaatggtctggcaaaacagagacatttactaccagggtcccatttgggccaagattcctcataccgatggacactttcacccctcaccgctgattggtgggtttgggctgaaacacccgcctcctcaaatttttatcaagaacaccccggtacctgcgaatcctgcaacgaccttcagctctactccggtaaactccttcattactcagtacagcactggccaggtgtcggtgcagattgactgggagatccagaaggagcggtccaaacgctggaaccccgaggtccagtttacctccaactacggacagcaaaactctctgttgtgggctcccgatgcggctgggaaatacactgagcctagggctatcggtacccgctacctcacccaccacctgtaataa

SEQ ID NO: 54 - DNA, 2208 bp, Adeno-associated virus 4
  modified_base (750)..(750): Unknown
atgactgacggttaccttccagattggctagaggacaacctctctgaaggcgttcgagagtggtgggcgctgcaacctggagcccctaaacccaaggcaaatcaacaacatcaggacaacgctcggggtcttgtgcttccgggttacaaatacctcggacccggcaacggactcgacaagggggaacccgtcaacgcagcggacgcggcagccctcgagcacgacaaggcctacgaccagcagctcaaggccggtgacaacccctacctcaagtacaaccacgccgacgcggagttccagcagcggcttcagggcgacacatcgtttgggggcaacctcggcagagcagtcttccaggccaaaaagagggttcttgaacctcttggtctggttgagcaagcgggtgagacggctcctggaaagaagagaccgttgattgaatccccccagcagcccgactcctccacgggtatcggcaaaaaaggcaagcagccggctaaaaagaagctcgttttcgaagacgaaactggagcaggcgacggaccccctgagggatcaacttccggagccatgtctgatgacagtgagatgcgtgcagcagctggcggagctgcagtcgagggsggacaaggtgccgatggagtgggtaatgcctcgggtgattggcattgcgattccacctggtctgagggccacgtcacgaccaccagcaccagaacctgggtcttgcccacctacaacaaccacctntacaagcgactcggagagagcctgcagtccaacacctacaacggattctccaccccctggggatactttgacttcaaccgcttccactgccacttctcaccacgtgactggcagcgactcatcaacaacaactggggcatgcgacccaaagccatgcgggtcaaaatcttcaacatccaggtcaaggaggtcacgacgtcgaacggcgagacaacggtggctaataaccttaccagcacggttcagatctttgcggactcgtcgtacgaactgccgtacgtgatggatgcgggtcaagagggcagcctgcctccttttcccaacgacgtctttatggtgccccagtacggctactgtggactggtgaccggcaacacttcgcagcaacagactgacagaaatgccttctactgcctggagtactttccttcgcagatgctgcggactggcaacaactttgaaattacgtacagttttgagaaggtgcctttccactcgatgtacgcgcacagccagagcctggaccggctgatgaaccctctcatcgaccagtacctgtggggactgcaatcgaccaccaccggaaccaccctgaatgccgggactgccaccaccaactttaccaagctgcggcctaccaacttttccaactttaaaaagaactggctgcccgggccttcaatcaagcagcagggcttctcaaagactgccaatcaaaactacaagatccctgccaccgggtcagacagtctcatcaaatacgagacgcacagcactctggacggaagatggagtgccctgacccccggacctccaatggccacggctggacctgcggacagcaagttcagcaacagccagctcatctttgcggggcctaaacagaacggcaacacggccaccgtacccgggactctgatcttcacctctgaggaggagctggcagccaccaacgccaccgatacggacatgtggggcaacctacctggcggtgaccagagcaacagcaacctgccgaccgtggacagactgacagccttgggagccgtgcctggaatggtctggcaaaacagagacatttactaccagggtcccatttgggccaagattcctcataccgatggacactttcacccctcaccgctgattggtgggtttgggctgaaacacccgcctcctcaaatttttatcaagaacaccccggtacctgcgaatcctgcaacgaccttcagctctactccggtaaactccttcattactcagtacagcactggccaggtgtcggtgcagattgactgggagatccagaaggagcggtccaaacgctggaaccccgaggtccagtttacctccaactacggacagcaaaactctctgttgtgggctcccgatgcggctgggaaatacactgagcctagggctatcggtacccgctacctcacccaccacctgtaataa

SEQ ID NO: 55 - DNA, 1872 bp, Adeno-associated virus 4
atgccggggttctacgagatcgtgctgaaggtgcccagcgacctggacgagcacctgcccggcatttctgactcttttgtgagctgggtggccgagaaggaatgggagctgccgccggattctgacatggacttgaatctgattgagcaggcacccctgaccgtggccgaaaagctgcaacgcgagttcctggtcgagtggcgccgcgtgagtaaggccccggaggccctcttctttgtccagttcgagaagggggacagctacttccacctgcacatcctggtggagaccgtgggcgtcaaatccatggtggtgggccgctacgtgagccagattaaagagaagctggtgacccgcatctaccgcggggtcgagccgcagcttccgaactggttcgcggtgaccaagacgcgtaatggcgccggaggcgggaacaaggtggtggacgactgctacatccccaactacctgctccccaagacccagcccgagctccagtgggcgtggactaacatggaccagtatataagcgcctgtttgaatctcgcggagcgtaaacggctggtggcgcagcatctgacgcacgtgtcgcagacgcaggagcagaacaaggaaaaccagaaccccaattctgacgcgccggtcatcaggtcaaaaacctccgccaggtacatggagctggtcgggtggctggtggaccgcgggatcacgtcagaaaagcaatggatccaggaggaccaggcgtcctacatctccttcaacgccgcctccaactcgcggtcacaaatcaaggccgcgctggacaatgcctccaaaatcatgagcctgacaaagacggctccggactacctggtgggccagaacccgccggaggacatttccagcaaccgcatctaccgaatcctcgagatgaacgggtacgatccgcagtacgcggcctccgtcttcctgggctgggcgcaaaagaagttcgggaagaggaacaccatctggctctttgggccggccacgacgggtaaaaccaacatcgcggaagccatcgcccacgccgtgcccttctacggctgcgtgaactggaccaatgagaactttccgttcaacgattgcgtcgacaagatggtgatctggtgggaggagggcaagatgacggccaaggtcgtagagagcgccaaggccatcctgggcggaagcaaggtgcgcgtggaccaaaagtgcaagtcatcggcccagatcgacccaactcccgtgatcgtcacctccaacaccaacatgtgcgcggtcatcgacggaaactcgaccaccttcgagcaccaacaaccactccaggaccggatgttcaagttcgagctcaccaagcgcctggagcacgactttggcaaggtcaccaagcaggaagtcaaagactttttccggtgggcgtcagatcacgtgaccgaggtgactcacgagttttacgtcagaaagggtggagctagaaagaggcccgcccccaatgacgcagatataagtgagcccaagcgggcctgtccgtcagttgcgcagccatcgacgtcagacgcggaagctccggtggactacgcggacaggtaccaaaacaaatgttctcgtcacgtgggtatgaatctgatgctttttccctgccggcaatgcgagagaatgaatcagaatgtggacatttgcttcacgcacggggtcatggactgtgccgagtgcttccccgtgtcagaatctcaacccgtgtctgtcgtcagaaagcggacgtatcagaaactgtgtccgattcatcacatcatggggagggcgcccgaggtggcctgctcggcctgcgaactggccaatgtggacttggatgactgtgacatggaacaataa

SEQ ID NO: 56 - DNA, 1611 bp, Adeno-associated virus 4
atgccggggttctacgagatcgtgctgaaggtgcccagcgacctggacgagcacctgcccggcatttctgactcttttgtgagctgggtggccgagaaggaatgggagctgccgccggattctgacatggacttgaatctgattgagcaggcacccctgaccgtggccgaaaagctgcaacgcgagttcctggtcgagtggcgccgcgtgagtaaggccccggaggccctcttctttgtccagttcgagaagggggacagctacttccacctgcacatcctggtggagaccgtgggcgtcaaatccatggtggtgggccgctacgtgagccagattaaagagaagctggtgacccgcatctaccgcggggtcgagccgcagcttccgaactggttcgcggtgaccaagacgcgtaatggcgccggaggcgggaacaaggtggtggacgactgctacatccccaactacctgctccccaagacccagcccgagctccagtgggcgtggactaacatggaccagtatataagcgcctgtttgaatctcgcggagcgtaaacggctggtggcgcagcatctgacgcacgtgtcgcagacgcaggagcagaacaaggaaaaccagaaccccaattctgacgcgccggtcatcaggtcaaaaacctccgccaggtacatggagctggtcgggtggctggtggaccgcgggatcacgtcagaaaagcaatggatccaggaggaccaggcgtcctacatctccttcaacgccgcctccaactcgcggtcacaaatcaaggccgcgctggacaatgcctccaaaatcatgagcctgacaaagacggctccggactacctggtgggccagaacccgccggaggacatttccagcaaccgcatctaccgaatcctcgagatgaacgggtacgatccgcagtacgcggcctccgtcttcctgggctgggcgcaaaagaagttcgggaagaggaacaccatctggctctttgggccggccacgacgggtaaaaccaacatcgcggaagccatcgcccacgccgtgcccttctacggctgcgtgaactggaccaatgagaactttccgttcaacgattgcgtcgacaagatggtgatctggtgggaggagggcaagatgacggccaaggtcgtagagagcgccaaggccatcctgggcggaagcaaggtgcgcgtggaccaaaagtgcaagtcatcggcccagatcgacccaactcccgtgatcgtcacctccaacaccaacatgtgcgcggtcatcgacggaaactcgaccaccttcgagcaccaacaaccactccaggaccggatgttcaagttcgagctcaccaagcgcctggagcacgactttggcaaggtcaccaagcaggaagtcaaagactttttccggtgggcgtcagatcacgtgaccgaggtgactcacgagttttacgtcagaaagggtggagctagaaagaggcccgcccccaatgacgcagatataagtgagcccaagcgggcctgtccgtcagttgcgcagccatcgacgtcagacgcggaagctccggtggactacgcggacagattggctagaggacaacctctctga

SEQ ID NO: 57 - DNA, 1872 bp, Adeno-associated virus 4; identical to SEQ ID NO: 55

SEQ ID NO: 58 - DNA, 1617 bp, Adeno-associated virus 4
  modified_base (162)..(162): Unknown
atgcgtgcagcagctggcggagctgcagtcgagggsggacaaggtgccgatggagtgggtaatgcctcgggtgattggcattgcgattccacctggtctgagggccacgtcacgaccaccagcaccagaacctgggtcttgcccacctacaacaaccacctntacaagcgactcggagagagcctgcagtccaacacctacaacggattctccaccccctggggatactttgacttcaaccgcttccactgccacttctcaccacgtgactggcagcgactcatcaacaacaactggggcatgcgacccaaagccatgcgggtcaaaatcttcaacatccaggtcaaggaggtcacgacgtcgaacggcgagacaacggtggctaataaccttaccagcacggttcagatctttgcggactcgtcgtacgaactgccgtacgtgatggatgcgggtcaagagggcagcctgcctccttttcccaacgacgtctttatggtgccccagtacggctactgtggactggtgaccggcaacacttcgcagcaacagactgacagaaatgccttctactgcctggagtactttccttcgcagatgctgcggactggcaacaactttgaaattacgtacagttttgagaaggtgcctttccactcgatgtacgcgcacagccagagcctggaccggctgatgaaccctctcatcgaccagtacctgtggggactgcaatcgaccaccaccggaaccaccctgaatgccgggactgccaccaccaactttaccaagctgcggcctaccaacttttccaactttaaaaagaactggctgcccgggccttcaatcaagcagcagggcttctcaaagactgccaatcaaaactacaagatccctgccaccgggtcagacagtctcatcaaatacgagacgcacagcactctggacggaagatggagtgccctgacccccggacctccaatggccacggctggacctgcggacagcaagttcagcaacagccagctcatctttgcggggcctaaacagaacggcaacacggccaccgtacccgggactctgatcttcacctctgaggaggagctggcagccaccaacgccaccgatacggacatgtggggcaacctacctggcggtgaccagagcaacagcaacctgccgaccgtggacagactgacagccttgggagccgtgcctggaatggtctggcaaaacagagacatttactaccagggtcccatttgggccaagattcctcataccgatggacactttcacccctcaccgctgattggtgggtttgggctgaaacacccgcctcctcaaatttttatcaagaacaccccggtacctgcgaatcctgcaacgaccttcagctctactccggtaaactccttcattactcagtacagcactggccaggtgtcggtgcagattgactgggagatccagaaggagcggtccaaacgctggaaccccgaggtccagtttacctccaactacggacagcaaaactctctgttgtgggctcccgatgcggctgggaaatacactgagcctagggctatcggtacccgctacctcacccaccacctgtaa

SEQ ID NO: 59 - DNA, 939 bp, Adeno-associated virus 4
atggagctggtcgggtggctggtggaccgcgggatcacgtcagaaaagcaatggatccaggaggaccaggcgtcctacatctccttcaacgccgcctccaactcgcggtcacaaatcaaggccgcgctggacaatgcctccaaaatcatgagcctgacaaagacggctccggactacctggtgggccagaacccgccggaggacatttccagcaaccgcatctaccgaatcctcgagatgaacgggtacgatccgcagtacgcggcctccgtcttcctgggctgggcgcaaaagaagttcgggaagaggaacaccatctggctctttgggccggccacgacgggtaaaaccaacatcgcggaagccatcgcccacgccgtgcccttctacggctgcgtgaactggaccaatgagaactttccgttcaacgattgcgtcgacaagatggtgatctggtgggaggagggcaagatgacggccaaggtcgtagagagcgccaaggccatcctgggcggaagcaaggtgcgcgtggaccaaaagtgcaagtcatcggcccagatcgacccaactcccgtgatcgtcacctccaacaccaacatgtgcgcggtcatcgacggaaactcgaccaccttcgagcaccaacaaccactccaggaccggatgttcaagttcgagctcaccaagcgcctggagcacgactttggcaaggtcaccaagcaggaagtcaaagactttttccggtgggcgtcagatcacgtgaccgaggtgactcacgagttttacgtcagaaagggtggagctagaaagaggcccgcccccaatgacgcagatataagtgagcccaagcgggcctgtccgtcagttgcgcagccatcgacgtcagacgcggaagctccggtggactacgcggacagattggctagaggacaacctctctga

SEQ ID NO: 60 - DNA, 1197 bp, Adeno-associated virus 4
atggagctggtcgggtggctggtggaccgcgggatcacgtcagaaaagcaatggatccaggaggaccaggcgtcctacatctccttcaacgccgcctccaactcgcggtcacaaatcaaggccgcgctggacaatgcctccaaaatcatgagcctgacaaagacggctccggactacctggtgggccagaacccgccggaggacatttccagcaaccgcatctaccgaatcctcgagatgaacgggtacgatccgcagtacgcggcctccgtcttcctgggctgggcgcaaaagaagttcgggaagaggaacaccatctggctctttgggccggccacgacgggtaaaaccaacatcgcggaagccatcgcccacgccgtgcccttctacggctgcgtgaactggaccaatgagaactttccgttcaacgattgcgtcgacaagatggtgatctggtgggaggagggcaagatgacggccaaggtcgtagagagcgccaaggccatcctgggcggaagcaaggtgcgcgtggaccaaaagtgcaagtcatcggcccagatcgacccaactcccgtgatcgtcacctccaacaccaacatgtgcgcggtcatcgacggaaactcgaccaccttcgagcaccaacaaccactccaggaccggatgttcaagttcgagctcaccaagcgcctggagcacgactttggcaaggtcaccaagcaggaagtcaaagactttttccggtgggcgtcagatcacgtgaccgaggtgactcacgagttttacgtcagaaagggtggagctagaaagaggcccgcccccaatgacgcagatataagtgagcccaagcgggcctgtccgtcagttgcgcagccatcgacgtcagacgcggaagctccggtggactacgcggacaggtaccaaaacaaatgttctcgtcacgtgggtatgaatctgatgctttttccctgccggcaatgcgagagaatgaatcagaatgtggacatttgcttcacgcacggggtcatggactgtgccgagtgcttccccgtgtcagaatctcaacccgtgtctgtcgtcagaaagcggacgtatcagaaactgtgtccgattcatcacatcatggggagggcgcccgaggtggcctgctcggcctgcgaactggccaatgtggacttggatgactgtgacatggaacaa

SEQ ID NO: 61 - DNA, 245 bp, Adeno-associated virus 4
ctccatcatctaggtttgcccactgacgtcaatgtgacgtcctagggttagggaggtccctgtattagcagtcacgtgagtgtcgtatttcgcggagcgtagcggagcgcataccaagctgccacgtcacagccacgtggtccgtttgcgacagtttgcgacaccatgtggtcaggagggtatataaccgcgagtgagccagcgaggagctccattttgcccgcgaattttgaacgagcagcagc

SEQ ID NO: 62 - protein, 313 aa, Adeno-associated virus 4
  MOD_RES (313)..(313): Unknown
MELVGWLVDRGITSEKQWIQEDQASYISFNAASNSRSQIKAALDNASKIMSLTKTAPDYLVGQNPPEDISSNRIYRILEMNGYDPQYAASVFLGWAQKKFGKRNTIWLFGPATTGKTNIAEAIAHAVPFYGCVNWTNENFPFNDCVDKMVIWWEEGKMTAKVVESAKAILGGSKVRVDQKCKSSAQIDPTPVIVTSNTNMCAVIDGNSTTFEHQQPLQDRMFKFELTKRLEHDFGKVTKQEVKDFFRWASDHVTEVTHEFYVRKGGARKRPAPNDADISEPKRACPSVAQPSTSDAEAPVDYADRLARGQPLX

SEQ ID NO: 63 - protein, 399 aa, Adeno-associated virus 4
MELVGWLVDRGITSEKQWIQEDQASYISFNAASNSRSQIKAALDNASKIMSLTKTAPDYLVGQNPPEDISSNRIYRILEMNGYDPQYAASVFLGWAQKKFGKRNTIWLFGPATTGKTNIAEAIAHAVPFYGCVNWTNENFPFNDCVDKMVIWWEEGKMTAKVVESAKAILGGSKVRVDQKCKSSAQIDPTPVIVTSNTNMCAVIDGNSTTFEHQQPLQDRMFKFELTKRLEHDFGKVTKQEVKDFFRWASDHVTEVTHEFYVRKGGARKRPAPNDADISEPKRACPSVAQPSTSDAEAPVDYADRYQNKCSRHVGMNLMLFPCRQCERMNQNVDICFTHGVMDCAECFPVSESQPVSVVRKRTYQKLCPIHHIMGRAPEVACSACELANVDLDDCDMEQ

SEQ ID NO: 64 - protein, 623 aa, Adeno-associated virus 4
MPGFYEIVLKVPSDLDEHLPGISDSFVSWVAEKEWELPPDSDMDLNLIEQAPLTVAEKLQREFLVEWRRVSKAPEALFFVQFEKGDSYFHLHILVETVGVKSMVVGRYVSQIKEKLVTRIYRGVEPQLPNWFAVTKTRNGAGGGNKVVDDCYIPNYLLPKTQPELQWAWTNMDQYISACLNLAERKRLVAQHLTHVSQTQEQNKENQNPNSDAPVIRSKTSARYMELVGWLVDRGITSEKQWIQEDQASYISFNAASNSRSQIKAALDNASKIMSLTKTAPDYLVGQNPPEDISSNRIYRILEMNGYDPQYAASVFLGWAQKKFGKRNTIWLFGPATTGKTNIAEAIAHAVPFYGCVNWTNENFPFNDCVDKMVIWWEEGKMTAKVVESAKAILGGSKVRVDQKCKSSAQIDPTPVIVTSNTNMCAVIDGNSTTFEHQQPLQDRMFKFELTKRLEHDFGKVTKQEVKDFFRWASDHVTEVTHEFYVRKGGARKRPAPNDADISEPKRACPSVAQPSTSDAEAPVDYADRYQNKCSRHVGMNLMLFPCRQCERMNQNVDICFTHGVMDCAECFPVSESQPVSVVRKRTYQKLCPIHHIMGRAPEVACSACELANVDLDDCDMEQ

SEQ ID NO: 65 - protein, 537 aa, Adeno-associated virus 4
  MOD_RES (537)..(537): Unknown
MPGFYEIVLKVPSDLDEHLPGISDSFVSWVAEKEWELPPDSDMDLNLIEQAPLTVAEKLQREFLVEWRRVSKAPEALFFVQFEKGDSYFHLHILVETVGVKSMVVGRYVSQIKEKLVTRIYRGVEPQLPNWFAVTKTRNGAGGGNKVVDDCYIPNYLLPKTQPELQWAWTNMDQYISACLNLAERKRLVAQHLTHVSQTQEQNKENQNPNSDAPVIRSKTSARYMELVGWLVDRGITSEKQWIQEDQASYISFNAASNSRSQIKAALDNASKIMSLTKTAPDYLVGQNPPEDISSNRIYRILEMNGYDPQYAASVFLGWAQKKFGKRNTIWLFGPATTGKTNIAEAIAHAVPFYGCVNWTNENFPFNDCVDKMVIWWEEGKMTAKVVESAKAILGGSKVRVDQKCKSSAQIDPTPVIVTSNTNMCAVIDGNSTTFEHQQPLQDRMFKFELTKRLEHDFGKVTKQEVKDFFRWASDHVTEVTHEFYVRKGGARKRPAPNDADISEPKRACPSVAQPSTSDAEAPVDYADRLARGQPLX

SEQ ID NO: 66 - protein, 623 aa, Adeno-associated virus 4; identical to SEQ ID NO: 64

SEQ ID NO: 67 - protein, 544 aa, Adeno-associated virus 4
MSDDSEMRAAAGGAAVEGGQGADGVGNASGDWHCDSTWSEGHVTTTSTRTWVLPTYNNHLYKRLGESLQSNTYNGFSTPWGYFDFNRFHCHFSPRDWQRLINNNWGMRPKAMRVKIFNIQVKEVTTSNGETTVANNLTSTVQIFADSSYELPYVMDAGQEGSLPPFPNDVFMVPQYGYCGLVTGNTSQQQTDRNAFYCLEYFPSQMLRTGNNFEITYSFEKVPFHSMYAHSQSLDRLMNPLIDQYLWGLQSTTTGTTLNAGTATTNFTKLRPTNFSNFKKNWLPGPSIKQQGFSKTANQNYKIPATGSDSLIKYETHSTLDGRWSALTPGPPMATAGPADSKFSNSQLIFAGPKQNGNTATVPGTLIFTSEEELAATNATDTDMWGNLPGGDQSNSNLPTVDRLTALGAVPGMVWQNRDIYYQGPIWAKIPHTDGHFHPSPLIGGFGLKHPPPQIFIKNTPVPANPATTFSSTPVNSFITQYSTGQVSVQIDWEIQKERSKRWNPEVQFTSNYGQQNSLLWAPDAAGKYTEPRAIGTRYLTHHL

SEQ ID NO: 68 - protein, 734 aa, Adeno-associated virus 4
MTDGYLPDWLEDNLSEGVREWWALQPGAPKPKANQQHQDNARGLVLPGYKYLGPGNGLDKGEPVNAADAAALEHDKAYDQQLKAGDNPYLKYNHADAEFQQRLQGDTSFGGNLGRAVFQAKKRVLEPLGLVEQAGETAPGKKRPLIESPQQPDSSTGIGKKGKQPAKKKLVFEDETGAGDGPPEGSTSGAMSDDSEMRAAAGGAAVEGGQGADGVGNASGDWHCDSTWSEGHVTTTSTRTWVLPTYNNHLYKRLGESLQSNTYNGFSTPWGYFDFNRFHCHFSPRDWQRLINNNWGMRPKAMRVKIFNIQVKEVTTSNGETTVANNLTSTVQIFADSSYELPYVMDAGQEGSLPPFPNDVFMVPQYGYCGLVTGNTSQQQTDRNAFYCLEYFPSQMLRTGNNFEITYSFEKVPFHSMYAHSQSLDRLMNPLIDQYLWGLQSTTTGTTLNAGTATTNFTKLRPTNFSNFKKNWLPGPSIKQQGFSKTANQNYKIPATGSDSLIKYETHSTLDGRWSALTPGPPMATAGPADSKFSNSQLIFAGPKQNGNTATVPGTLIFTSEEELAATNATDTDMWGNLPGGDQSNSNLPTVDRLTALGAVPGMVWQNRDIYYQGPIWAKIPHTDGHFHPSPLIGGFGLKHPPPQIFIKNTPVPANPATTFSSTPVNSFITQYSTGQVSVQIDWEIQKERSKRWNPEVQFTSNYGQQNSLLWAPDAAGKYTEPRAIGTRYLTHHL

SEQ ID NO: 69 - protein, 598 aa, Adeno-associated virus 4
TAPGKKRPLIESPQQPDSSTGIGKKGKQPAKKKLVFEDETGAGDGPPEGSTSGAMSDDSEMRAAAGGAAVEGGQGADGVGNASGDWHCDSTWSEGHVTTTSTRTWVLPTYNNHLYKRLGESLQSNTYNGFSTPWGYFDFNRFHCHFSPRDWQRLINNNWGMRPKAMRVKIFNIQVKEVTTSNGETTVANNLTSTVQIFADSSYELPYVMDAGQEGSLPPFPNDVFMVPQYGYCGLVTGNTSQQQTDRNAFYCLEYFPSQMLRTGNNFEITYSFEKVPFHSMYAHSQSLDRLMNPLIDQYLWGLQSTTTGTTLNAGTATTNFTKLRPTNFSNFKKNWLPGPSIKQQGFSKTANQNYKIPATGSDSLIKYETHSTLDGRWSALTPGPPMATAGPADSKFSNSQLIFAGPKQNGNTATVPGTLIFTSEEELAATNATDTDMWGNLPGGDQSNSNLPTVDRLTALGAVPGMVWQNRDIYYQGPIWAKIPHTDGHFHPSPLIGGFGLKHPPPQIFIKNTPVPANPATTFSSTPVNSFITQYSTGQVSVQIDWEIQKERSKRWNPEVQFTSNYGQQNSLLWAPDAAGKYTEPRAIGTRYLTHHL

SEQ ID NO: 70 - DNA, 129 bp, Adeno-associated virus 4
ttggccactccctctatgcgcgctcgctcactcactcggccctgcggccagaggccggcagtctggagacctttggtgtccagggcagggccgagtgagtgagcgagcgcgcatagagggagtggccaa

SEQ ID NO: 71 - DNA, 125 bp, Adeno-associated virus 4
ttggccactccctctatgcgcgctcgctcactcactcggccctggagaccaaaggtctccagactgccggcctctggccggcagggccgagtgagtgagcgagcgcgcatagagggagtggccaa

SEQ ID NO: 72 - DNA, 4768 bp, Adeno-associated virus 4
  modified_base (3009)..(3009): Unknown
ttggccactccctctatgcgcgctcgctcactcactcggccctggagaccaaaggtctccagactgccggcctctggccggcagggccgagtgagtgagcgagcgcgcatagagggagtggccaactccatcatctaggtttgcccactgacgtcaatgtgacgtcctagggttagggaggtccctgtattagcagtcacgtgagtgtcgtatttcgcggagcgtagcggagcgcataccaagctgccacgtcacagccacgtggtccgtttgcgacagtttgcgacaccatgtggtcaggagggtatataaccgcgagtgagccagcgaggagctccattttgcccgcgaattttgaacgagcagcagccatgccggggttctacgagatcgtgctgaaggtgcccagcgacctggacgagcacctgcccggcatttctgactcttttgtgagctgggtggccgagaaggaatgggagctgccgccggattctgacatggacttgaatctgattgagcaggcacccctgaccgtggccgaaaagctgcaacgcgagttcctggtcgagtggcgccgcgtgagtaaggccccggaggccctcttctttgtccagttcgagaagggggacagctacttccacctgcacatcctggtggagaccgtgggcgtcaaatccatggtggtgggccgctacgtgagccagattaaagagaagctggtgacccgcatctaccgcggggtcgagccgcagcttccgaactggttcgcggtgaccaagacgcgtaatggcgccggaggcgggaacaaggtggtggacgactgctacatccccaactacctgctccccaagacccagcccgagctccagtgggcgtggactaacatggaccagtatataagcgcctgtttgaatctcgcggagcgtaaacggctggtggcgcagcatctgacgcacgtgtcgcagacgcaggagcagaacaaggaaaaccagaaccccaattctgacgcgccggtcatcaggtcaaaaacctccgccaggtacatggagctggtcgggtggctggtggaccgcgggatcacgtcagaaaagcaatggatccaggaggaccaggcgtcctacatctccttcaacgccgcctccaactcgcggtcacaaatcaaggccgcgctggacaatgcctccaaaatcatgagcctgacaaagacggctccggactacctggtgggccagaacccgccggaggacatttccagcaaccgcatctaccgaatcctcgagatgaacgggtacgatccgcagtacgcggcctccgtcttcctgggctgggcgcaaaagaagttcgggaagaggaacaccatctggctctttgggccggccacgacgggtaaaaccaacatcgcggaagccatcgcccacgccgtgcccttctacggctgcgtgaactggaccaatgagaactttccgttcaacgattgcgtcgacaagatggtgatctggtgggaggagggcaagatgacggccaaggtcgtagagagcgccaaggccatcctgggcggaagcaaggtgcgcgtggaccaaaagtgcaagtcatcggcccagatcgacccaactcccgtgatcgtcacctccaacaccaacatgtgcgcggtcatcgacggaaactcgaccaccttcgagcaccaacaaccactccaggaccggatgttcaagttcgagctcaccaagcgcctggagcacgactttggcaaggtcaccaagcaggaagtcaaagactttttccggtgggcgtcagatcacgtgaccgaggtgactcacgagttttacgtcagaaagggtggagctagaaagaggcccgcccccaatgacgcagatataagtgagcccaagcgggcctgtccgtcagttgcgcagccatcgacgtcagacgcggaagctccggtggactacgcggacaggtaccaaaacaaatgttctcgtcacgtgggtatgaatctgatgctttttccctgccggcaatgcgagagaatgaatcagaatgtggacatttgcttcacgcacggggtcatggactgtgccgagtgcttccccgtgtcagaatctcaacccgtgtctgtcgtcagaaagcggacgtatcagaaactgtgtccgattcatcacatcatggggagggcgcccgaggtggcctgctcggcctgcgaactggccaatgtggacttggatgactgtgacatggaacaataaatgactcaaaccagatatgactgacggttaccttccagattggctagaggacaacctctctgaaggcgttcgagagtggtgggcgctgcaacctggagcccctaaacccaaggcaaatcaacaacatcaggacaacgctcggggtcttgtgcttccgggttacaaatacctcggacccggcaacggactcgacaagggggaacccgtcaacgcagcggacgcggcagccctcgagcacgacaaggcctacgaccagcagctcaaggccggtgacaacccctacctcaagtacaaccacgccgacgcggagttccagcagcggcttcagggcgacacaccgtttgggggcaacctcggcagagcagtcttccaggccaaaaagagggttcttgaacctcttggtctggttgagcaagcgggtgagacggctcctggaaagaagagaccgttgattgaatccccccagcagcccgactcctccacgggtatcggcaaaaaaggcaagcagccggctaaaaagaagctcgttttcgaagacgaaactggagcaggcgacggaccccctgagggatcaacttccggagccatgtctgatgacagtgagatgcgtgcagcagctggcggagctgcagtcgagggsggacaaggtgccgatggagtgggtaatgcctcgggtgattggcattgcgattccacctggtctgagggccacgtcacgaccaccagcaccagaacctgggtcttgcccacctacaacaaccacctntacaagcgactcggagagagcctgcagtccaacacctacaacggattctccaccccctggggatactttgacttcaaccgcttccactgccacttctcaccacgtgactggcagcgactcatcaacaacaactggggcatgcgacccaaagccatgcgggtcaaaatcttcaacatccaggtcaaggaggtcacgacgtcgaacggcgagacaacggtggctaataaccttaccagcacggttcagatctttgcggactcgtcgtacgaactgccgtacgtgatggatgcgggtcaagagggcagcctgcctccttttcccaacgacgtctttatggtgccccagtacggctactgtggactggtgaccggcaacacttcgcagcaacagactgacagaaatgccttctactgcctggagtactttccttcgcagatgctgcggactggcaacaactttgaaattacgtacagttttgagaaggtgcctttccactcgatgtacgcgcacagccagagcctggaccggctgatgaaccctctcatcgaccagtacctgtggggactgcaatcgaccaccaccggaaccaccctgaatgccgggactgccaccaccaactttaccaagctgcggcctaccaacttttccaactttaaaaagaactggctgcccgggccttcaatcaagcagcagggcttctcaaagactgccaatcaaaactacaagatccctgccaccgggtcagacagtctcatcaaatacgagacgcacagcactctggacggaagatggagtgccctgacccccggacctccaatggccacggctggacctgcggacagcaagttcagcaacagccagctcatctttgcggggcctaaacagaacggcaacacggccaccgtacccgggactctgatcttcacctctgaggaggagctggcagccaccaacgccaccgatacggacatgtggggcaacctacctggcggtgaccagagcaacagcaacctgccgaccgtggacagactgacagccttgggagccgtgcctggaatggtctggcaaaacagagacatttactaccagggtcccatttgggccaagattcctcataccgatggacactttcacccctcaccgctgattggtgggtttgggctgaaacacccgcctcctcaaatttttatcaagaacaccccggtacctgcgaatcctgcaacgaccttcagctctactccggtaaactccttcattactcagtacagcactggccaggtgtcggtgcagattgactgggagatccagaaggagcggtccaaacgctggaaccccgaggtccagtttacctccaactacggacagcaaaactctctgttgtgggctcccgatgcggctgggaaatacactgagcctagggctatcggtacccgctacctcacccaccacctgtaataacctgttaatcaataaaccggtttattcgtttcagttgaactttggtctccgtgtccttcttatcttatctcgtttccatggctactgcgtacataagcagcggcctgcggcgcttgcgcttcgcggtttacaactgccggttaatcagtaacttctggcaaaccatgatgatggagttggccactccctctatgcgcgctcgctcactcactcggccctggagaccaaaggtctccagactgccggcctctggccggcagggccgagtgagtgagcgagcgcgcatagagggagtggccaa

SEQ ID NO: 73 - DNA, 3098 bp, Artificial Sequence
  source: /note="Description of Artificial Sequence: Synthetic polynucleotide"
gaattcgccctttctacggctgcgtcaactggaccaatgagaactttcccttcaacgattgcgtcgacaagatggtgatctggtgggaggagggcaagatgacggccaaggtcgtggagtccgccaaggccattctcggcggcagcaaggtgcgcgtggaccaaaagtgcaagtcttccgcccagatcgatcccacccccgtgatcgtcacttccaacaccaacatgtgcgctgtgattgacgggaacagcaccaccttcgagcaccagcagccgttacaagaccggatgttcaaatttgaactcacccgccgtctggagcacgactttggcaaggtgacaaagcaggaagtcaaagagttcttccgctgggcgcaggatcacgtgaccgaggtggcgcatgagttctacgtcagaaagggtggagccaacaagagacccgcccccgatgacgcggataaaagcgagcccaagcgggcctgcccctcagtcgcggatccatcgacgtcagacgcggaaggagctccggtggactttgccgacaggtaccaaaacaaatgttctcgtcacgcgggcatgcttcagatgctgtttccctgcaagacatgcgagagaatgaatcagaatttcaacatttgcttcacgcacgggaccagagactgttcagaatgtttccccggcgtgtcagaatctcaaccggtcgtcagaaagaggacgtatcggaaactctgtgccattcatcatctgctggggcgggctcccgagattgcttgctcggcctgcgatctggtcaacgtggacctggatgaccgtgtttctgagcaataaatgacttaaaccaggtatggctgccgatggttatcttccagattggctcgaggacaacctctctgagggcattcgcgagtggtgggacttgaaacctggagccccgaaacccaaagccaaccagcaaaagcaggacgacggccggggtctggtgcttcctggctacaagtacctcggacccttcaacggactcgacaagggagagccggtcaacgaggcagacgccgcggccctcgagcacgacaaggcctacgacaagcagctcgagcagggggacaacccgtacctcaagtacaaccacgccgacgccgagtttcaggagcgtcttcaagaagatacgtcttttgggggcaacctcgggcgagcagtcttccaggccaagaagcgggttctcgaacctctcggtctggttgaggaaggcgctaagacggctcctggaaagaagagacccatagaatcccccgactcctccacgggcatcggcaagaaaggccagcagcccgctaaaaagaagctcaactttgggcagactggcgactcagagtcagtgcccgacccccaacctctcggagaacctcccgccgcgccctcaggtctgggatctggtacaatggctgcaggcggtggcgcaccaatggcagacaataacgaaggcgccgacggagtgggtaatgcctccggaaattggcattgcgattccacatggctgggcgacagagtcatcaccaccagcacccgcacctgggccctgcccacctacaacaaccacctctacaagcagatatcaagtcagagcggggctaccaacgacaaccacttcttcggctacagcaccccctggggctattttgacttcaacagattccactgccacttctcaccacgtgactggcagcgactcatcaacaacaactggggattccggcccagaaagctgcggttcaagttgttcaacatccaggtcaaggaggtcacgacgaacgacggcgttacgaccatcgctaataaccttaccagcacgattcaggtcttctcggactcggagtaccaactgccgtacgtcctcggctctgcgcaccagggctgcctccctccgttccctgcggacgtgttcatgattcctcagtacggatatctgactctaaacaacggcagtcagtctgtgggacgttcctccttctactgcctggagtactttccttctcagatgctgagaacgggcaataactttgaattcagctacacctttgaggaagtgcctttccacagcagctatgcgcacagccagagcctggaccggctgatgaatcccctcatcgaccagtacctgtactacctggcccggacccagagcactacggggtccacaagggagctgcagttccatcaggctgggcccaacaccatggccgagcaatcaaagaactggctgcccggaccctgttatcggcagcagagactgtcaaaaaacatagacagcaacaacaacagtaactttgcctggaccggggccactaaataccatctgaatggtagaaattcattaaccaacccgggcgtagccatggccaccaacaaggacgacgaggaccagttctttcccatcaacggagtgctggtttttggcgaaacgggggctgccaacaagacaacgctggaaaacgtgctaatgaccagcgaggaggagatcaaaaccaccaatcccgtggctacagaagaatacggtgtggtctccagcaacctgcaatcgtctacggccggaccccagacacagactgtcaacagccagggggctctgcccggcatggtctggcagaaccgggacgtgtacctgcagggtcccatctgggccaaaattcctcacacggacggcaactttcacccgtctcccctgatgggcggatttggactcaaacacccgcctcctcaaattctcatcaaaaacaccccggtacctgctaatcctccagaggtgtttactcctgccaagtttgcctcatttatcacgcagtacagcaccggccaggtcagcgtggagatcgagtgggaactgcagaaagaaaacagcaaacgctggaatccagagattcagtacacctcaaattatgccaagtctaataatgtggaatttgctgtcaacaacgaaggggtttatactgagcctcgccccattggcacccgttacctcacccgtaacctgtaattgcctgttaatcaataaaccggttaattcgtttcagttgaactttggtctctgcgaagggcgaattc

SEQ ID NO: 74 - protein, 728 aa, Artificial Sequence
  source: /note="Description of Artificial Sequence: Synthetic polypeptide"
MAADGYLPDWLEDNLSEGIREWWDLKPGAPKPKANQQKQDDGRGLVLPGYKYLGPFNGLDKGEPVNEADAAALEHDKAYDKQLEQGDNPYLKYNHADAEFQERLQEDTSFGGNLGRAVFQAKKRVLEPLGLVEEGAKTAPGKKRPIESPDSSTGIGKKGQQPAKKKLNFGQTGDSESVPDPQPLGEPPAAPSGLGSGTMAAGGGAPMADNNEGADGVGNASGNWHCDSTWLGDRVITTSTRTWALPTYNNHLYKQISSQSGATNDNHFFGYSTPWGYFDFNRFHCHFSPRDWQRLINNNWGFRPRKLRFKLFNIQVKEVTTNDGVTTIANNLTSTIQVFSDSEYQLPYVLGSAHQGCLPPFPADVFMIPQYGYLTLNNGSQSVGRSSFYCLEYFPSQMLRTGNNFEFSYTFEEVPFHSSYAHSQSLDRLMNPLIDQYLYYLARTQSTTGSTRELQFHQAGPNTMAEQSKNWLPGPCYRQQRLSKNIDSNNNSNFAWTGATKYHLNGRNSLTNPGVAMATNKDDEDQFFPINGVLVFGETGAANKTTLENVLMTSEEEIKTTNPVATEEYGVVSSNLQSSTAGPQTQTVNSQGALPGMVWQNRDVYLQGPIWAKIPHTDGNFHPSPLMGGFGLKHPPPQILIKNTPVPANPPEVFTPAKFASFITQYSTGQVSVEIEWELQKENSKRWNPEIQYTSNYAKSNNVEFAVNNEGVYTEPRPIGTRYLTRNL

SEQ ID NO: 75 - DNA, 2495 bp, Artificial Sequence
  source: /note="Description of Artificial Sequence: Synthetic polynucleotide"
gaattcgccctttctacggctgcgtcaactagaccaatgagaactttcccttcaacgattgcgtcgacaagatggtgatctggtgggaggagggcaagatgacggccaaggtcgtggagtccgccaaggccattcatcatctgctggggcgggctcccgagattgcttgctcggcctgcgatctggtcaacgtggacctggatgactgtgtttctgagcaataaatgacttaaaccaggtatggctgccgatggttatcttccagattggctcgaggacaacctctctgagggcattcgcgagtggtgggacttgaaacctggagccccgaaacccaaagccaaccagcaaaagcaggacgacggccggggtctggtgcttcctggctacaagtacctcggacccttcaacggactcgacaagggagagccggtcaacgaggcagacgccgcggccctcgagcacgacaaggcctacgacaagcagctcgagcagggggacaacccgtacctcaagtacaaccacgccgacgccgagtttcaggagcgtcttcaagaagatacgtcttttgggggcaacctcgggcgagcagtcttccaggccaagaagcgggttctcgaacctctcggtctggttgaggaaggcgctaagacggctcctggaaagaagagacccatagaatcccccgactcctccacgggcatcggcaagaaaggccagcagcccgctaaaaagaagctcaactttgggcagactggcgactcagagtcagtgcccgaccctcaaccaatcggagaaccccccgcaggcccctctggtctgggatctggtacaatggctgcaggcggtggcgctccaatggcagacaataacgaaggcgccgacggagtgggtaatgcctccggaaattggcattgcgattccacatggctgggcgacagagtcatcaccaccagcacccgcacctgggccctgcccacctacaacaaccacctctacaagcagatatcaagtcagagcggggctaccaacgacaaccacttcttcggctacagcaccccctggggctattttgacttcaacagattccactgccacttctcaccacgtgactggcagcgactcatcaacaacaactggggattccggcccagaaagctgcggttcaagttgttcaacatccaggtcaaggaggtcacgacgaacgacggcgttacgaccatcgctaataaccttaccagcacgattcaggtcttctcggactcggagtaccaactgccgtacgtcctcggctctgcgcaccagggctgcctccctccgttccctgcggacgtgttcatgattcctcagtacggatatctgactctaaacaacggcagtcagtctgtgggacgttcctccttctactgcctggagtactttccttctcagatgctgagaacgggcaataactttgaattcagctacacctttgaggaagtgcctttccacagcagctatgcgcacagccagagcctggaccggctgatgaatcccctcatcgaccagtacctgtactacctggcccggacccagagcactacggggtccacaagggagctgcagttccatcaggctgggcccaacaccatggccgagcaatcaaagaactggctgcccggaccctgttatcggcagcagagactgtcaaaaaacatagacagcaacaacaccagtaactttgcctggaccggggccactaaataccatctgaatggtagaaattcattaaccaacccgggcgtagccatggccaccaacaaggacgacgaggaccagttctttcccatcaacggagtgctggtttttggcaaaacgggggctgccaacaagacaacgctggaaaacgtgctaatgaccagcgaggaggagatcaaaaccaccaatcccgtggctacagaacagtacggtgtggtctccagcaacctgcaatcgtctacggccggaccccagacacagactgtcaacagccagggggctctgcccggcatggtctggcagaaccgggacgtgtacctgcagggtcccatctgggccaaaattcctcacacggacggcaactttcacccgtctcccctgatgggcggatttggactcaaacacccgcctcctcaaattctcatcaaaaacaccccggtacctgctaatcctccagaggtgtttactcctgccaagtttgcctcatttatcacgcagtacagcaccggccaggtcagcgtggagatcgagtgggaactgcagaaagaaaacagcaaacgctggaatccagagattcagtacacctcaaattatgccaagtctaataatgtggaatttgctgtcaacaacgaaggggtttatactgagcctcgccccattggcacccgttacctcacccgtaacctgtaattgcctgttaatcaataaaccggttaattcgtttcagttgaactttggtctctgcgaagggcgaattc

SEQ ID NO: 76 - protein, 728 aa, Artificial Sequence
  source: /note="Description of Artificial Sequence: Synthetic polypeptide"
MAADGYLPDWLEDNLSEGIREWWDLKPGAPKPKANQQKQDDGRGLVLPGYKYLGPFNGLDKGEPVNEADAAALEHDKAYDKQLEQGDNPYLKYNHADAEFQERLQEDTSFGGNLGRAVFQAKKRVLEPLGLVEEGAKTAPGKKRPIESPDSSTGIGKKGQQPAKKKLNFGQTGDSESVPDPQPIGEPPAGPSGLGSGTMAAGGGAPMADNNEGADGVGNASGNWHCDSTWLGDRVITTSTRTWALPTYNNHLYKQISSQSGATNDNHFFGYSTPWGYFDFNRFHCHFSPRDWQRLINNNWGFRPRKLRFKLFNIQVKEVTTNDGVTTIANNLTSTIQVFSDSEYQLPYVLGSAHQGCLPPFPADVFMIPQYGYLTLNNGSQSVGRSSFYCLEYFPSQMLRTGNNFEFSYTFEEVPFHSSYAHSQSLDRLMNPLIDQYLYYLARTQSTTGSTRELQFHQAGPNTMAEQSKNWLPGPCYRQQRLSKNIDSNNTSNFAWTGATKYHLNGRNSLTNPGVAMATNKDDEDQFFPINGVLVFGKTGAANKTTLENVLMTSEEEIKTTNPVATEQYGVVSSNLQSSTAGPQTQTVNSQGALPGMVWQNRDVYLQGPIWAKIPHTDGNFHPSPLMGGFGLKHPPPQILIKNTPVPANPPEVFTPAKFASFITQYSTGQVSVEIEWELQKENSKRWNPEIQYTSNYAKSNNVEFAVNNEGVYTEPRPIGTRYLTRNL

SEQ ID NO: 77 - DNA, 2504 bp, Artificial Sequence
  source: /note="Description of Artificial Sequence: Synthetic polynucleotide"
gaattcgccctttctacggctgcgtcaactggaccaatgagaactttcccttcaacgattgcgtcgacaagatggtgatctggtgggaggagggcaagatgacggccaaggtcgtggagtccgccaaggccattcatcatctgctggggcgggctcccgagattgcttgctcggcctgcgatctggtcaacgtggacctggatgactgtgtttctgagcaataaatgacttaaaccaggtatggctgccgatggttatcttccagattggctcgaggacaacctctctgagggcattcgcgagtggtgggacttgaaacctggagccccgaaacccaaagccaaccagcaaaagcaggacgacggccggggtctggtgcttcctggctacaagtacctcggacccttcaacggactcgacaagggagagccggtcaacgaggcagacgccgcggccctcgagcacgacaaggcctacgacaagcagctcgagcagggggacaacccgtacctcaagtacaaccacgccgacgccgagtttcaggagcgtcttcaagaagatacgtcttttgggggcaacctcgggcgagcagtcttccaggccaagaagcgggttctcgaacctctcggtctggttgaggaaggcgctaagacggctcctggaaagaagagacccatagaatcccccgactcctccacgggcatcggcaagaaaggccagcagcccgctaaaaagaagctcaactttgggcagactggcgactcagagtcagtgcccgaccctcaaccaatcggagaaccccccgcaggcccctctggtctgggatctggtacaatggctgcaggcggtggcgctccaatggcagacaataacgaaggcgccgacggagtgggtaatgcctccggaaattggcattgcgattccacatggctgggcgacagagtcatcaccaccagcacccgcacctgggccctgcccacctacaacaaccacctctacaagcagatatcaagtcagagcggggctaccaacgacaaccacttcttcggctacagcaccccctggggctattttgacttcaacagattccactgccacttctcatcacgtgactggcagcgactcatcaacaacaactggggattccggcccaagagactcaacttcaagctcttcaacatccaggtcaaggaggtcacgcagaatgaaggcaccaagaccatcgccaataaccttaccagcacgattcaggtctttacggactcggaataccggctcccgtacgtcctcggctctgcgcaccagggctgcctgcctccgttcccggcggacgtcttcatgattcctcagtacgggtacctgactctgaacaacggcagtcaggccgtgggccgttcctccttctactgcctggagtactttccttctcaaatgctgagaacgggcaacaactttgagttcagctaccagtttgaggacgtgccttttcacagcagctacgcgcacagccaaagcctggaccggctgatgaaccccctcatcgaccagtacctgtactacctgtctcggactcagtccacgggaggtaccgcaggaactcagcagttgctattttctcaggccgggcctaataacatgtcggctcaggccaaaaactggctacccgggccctgctaccggcagcaacgcgtctccacgacactgtcgcaaaataacaacagcaactttgcttggaccggtgccaccaagtatcatctgaatggcagagactctctggtaaatcccggtgtcgctatggcaacgcacaaggacgacgaagagcgattttttccatccagcggagtcttgatgtttgggaaacagggagctggaaaagacaacgtggactatagcagcgttatgctaaccagtgaggaagaaatcaaaaccaccaacccagtggccacagaacagtacggcgtggtggccgataacctgcaacagcaaaacgccgctcctattgtaggggccgtcaacagtcaaggagccttacctggcatggtctggcagaaccgggacgtgtacctgcagggtcctatctgggccaagattcctcacacggacggcaactttcatccttcgccgctgatgggaggctttggactgaaacacccgcctcctcagatcctgattaagaatacacctgttcccgcggatcctccaactaccttcagtcaagccaagccggcgtcgttcatcacgcagtacagcaccggacaggtcagcgtggaaattgaatgggagctgcagaaagagaacagcaagcgctggaacccagagattcagtatacttccaactactacaaatctacaaatgtggactttgctgtcaatactgagggtacttattcagagcctcgccccattggcacccgttacctcacccgtaacctgtaattgcctgttaatcaataaaccggttaattcgtttcagttgaactttggtctctgcgaagggcgaattc

SEQ ID NO: 78 - protein, 731 aa, Artificial Sequence
  source: /note="Description of Artificial Sequence: Synthetic polypeptide"
MAADGYLPDWLEDNLSEGIREWWDLKPGAPKPKANQQKQDDGRGLVLPGYKYLGPFNGLDKGEPVNEADAAALEHDKAYDKQLEQGDNPYLKYNHADAEFQERLQEDTSFGGNLGRAVFQAKKRVLEPLGLVEEGAKTAPGKKRPIESPDSSTGIGKKGQQPAKKKLNFGQTGDSESVPDPQPIGEPPAGPSGLGSGTMAAGGGAPMADNNEGADGVGNASGNWHCDSTWLGDRVITTSTRTWALPTYNNHLYKQISSQSGATNDNHFFGYSTPWGYFDFNRFHCHFSSRDWQRLINNNWGFRPKRLNFKLFNIQVKEVTQNEGTKTIANNLTSTIQVFTDSEYRLPYVLGSAHQGCLPPFPADVFMIPQYGYLTLNNGSQAVGRSSFYCLEYFPSQMLRTGNNFEFSYQFEDVPFHSSYAHSQSLDRLMNPLIDQYLYYLSRTQSTGGTAGTQQLLFSQAGPNNMSAQAKNWLPGPCYRQQRVSTTLSQNNNSNFAWTGATKYHLNGRDSLVNPGVAMATHKDDEERFFPSSGVLMFGKQGAGKDNVDYSSVMLTSEEEIKTTNPVATEQYGVVADNLQQQNAAPIVGAVNSQGALPGMVWQNRDVYLQGPIWAKIPHTDGNFHPSPLMGGFGLKHPPPQILIKNTPVPADPPTTFSQAKPASFITQYSTGQVSVEIEWELQKENSKRWNPEIQYTSNYYKSTNVDFAVNTEGTYSEPRPIGTRYLTRNL

SEQ ID NO: 79 - DNA, 3128 bp, Artificial Sequence
  source: /note="Description of Artificial Sequence: Synthetic polynucleotide"
gaattcgccctttctacggctgcgtcaactggaccaatgagaactttcccttcaacgattgcgtcgacaagatggtgatctggtgggaggagggcaagatgacggccaaggtcgtggagtccgccaaggccattctcggcggcagcaaggtgcgcgtggaccaaaagtgcaagtcttccgcccagatcgatcccacccccgtgatcgtcacttccaacaccaacatgtgcgccgtgattgacgggaacagcaccaccttcgagcaccagcagccgttacaagaccggatgttcaaatttgaactcacccgccgtctggagcacgactttggcaaggtgacaaagcaggaagtcaaagagttcttccgctgggcgcaggatcacgtgaccgaggtggcgcatgagttctacgtcagaaagggtggagccaacaagagacccgcccccgatgacgcggataaaagcgagcccaagcgggcctgcccctcagtcgcggatccatcgacgtcagacgcggaaggagctccggtggactttgccgacaggtaccaaaacaaatgttctcgtcacgcgggcatgcttcagatgctgtttccctgcaagacatgcgagagaatgaatcagaatttcaacatttgcttcacgcacgggaccagagactgttcagaatgtttccccggcgtgtcagaatctcaaccggtcgtcagaaagaggacgtatcggaaactctgtgccattcatcatctgctagggcgggctcccgagattgcttgctcggcctgcgatctggtcaacgtggacctggatgactgtgtttctgagcaataaatgacttaaaccaggtatggctgccgatggttatcttccagattggctcgaggacaacctctctgagggcattcgcgagtggtgggacttgaaacctggagccccgaaacccaaagccaaccagcaaaagcaggacgacggccggggtctggtgcttcctggctacaagtacctcggacccttcaacggactcgacaagggggagcccgtcaacgcggcggacgcagcggccctcgagcacgacaaggcctacgaccagcagctcaaagcgggtgacaatccgtacctgcggtataaccacgccgacgccgagtttcaggagcgtctgcaagaagatacgtcttttgggggcaacctcgggcgagcagtcttccaggccaagaagcgggttctcgaacctctcggtctggttgaggaaggcgctaagacggctcctggaaagaagagaccggtagagccatcaccccagcgttctccagactcctctacgggcatcggcaagacaggccagcagcccgcgaaaaagagactcaactttgggcagactggcgactcagagtcagtgcccgaccctcaaccaatcggagaaccccccgcaggcccctctggtctgggatctggtacaatggctgcaggcggtggcgctccaatggcagacaataacgaaggcgccgacggagtgggtagttcctcaggaaattggcattgcgattccacatggctgggcgacagagtcatcaccaccagcacccgaacctgggccctccccacctacaacaaccacctctacaagcaaatctccaacgggacatcgggaggaagcaccaacgacaacacctacttcggctacagcaccccctgggggtattttgactttaacagattccactgccacttctcaccacgtgactggcagcgactcatcaacaacaactggggattccggcccaagagactcaacttcaagctcttcaacatccaggtcaaggaggtcacgcagaatgaaggcaccaagaccatcgccaataaccttaccagcacgattcaggtctttacggactcggaataccagctcccgtacgtcctcggctctgcgcaccagggctgcctgcctccgttcccggcggacgtcttcatgattcctcagtacgggtacctgactctgaacaacggcagtcaggccgtgggccgttcctccttctactgcctggagtactttccttctcaaatgctgagaacgggcaacaactttgagttcagctaccagtttgaggacgtgccttttcacagcagctacgcgcacagccaaagcctggaccggctgatgaaccccctcatcgaccagtacctgtactacctgtctcggactcagtccacgggaggtaccgcaggaactcagcagttgctattttctcaggccgggcctaataacatgtcggctcaggccaaaaactggctacccgggccctgctaccggcagcaacgcgtctccacgacactgtcgcaaaataacaacagcaactttgcttggaccggtgccaccaagtatcatctgaatggcagagactctctggtaaatcccggtgtcgctatggcaacgcacaaggacgacgaagagcgattttttccatccagcggagtcttgatgtttgggaaacagggagctggaaaagacaacgtggactatagcagcgttatgctaaccagtgaggaagaaatcaaaaccaccaacccagtggccacagaacagtacggcgtggtggccgataacctgcaacagcaaaacgccgctcctattgtaggggccgtcaacagtcaaggagccttacctggcatggtctggcagaaccgggacgtgtacctgcagggtcctatctgggccaagattcctcacacggacggcaactttcatccttcgccgctgatgggaggctttggactgaaacacccgcctcctcagatcctgattaagaatacacctgttcccgcggatcctccaactaccttcagtcaagccaagctggcgtcgttcatcacgcagtacagcaccggacaggtcagcgtggaaattgaatgggagctgcagaaagagaacagcaagcgctggaacccagagattcagtatacttccaactactacaaatctacaaatgtggactttgctgtcaatactgagggtacttattcagagcctcgccccattggcacccgttacctcacccgtaacctgtaattgcctgttaatcaataaaccggctaattcgtttcagttgaactttggtctctgcgaagggcgaattc

SEQ ID NO: 80 - protein, 738 aa, Artificial Sequence
  source: /note="Description of Artificial Sequence: Synthetic polypeptide"
MAADGYLPDWLEDNLSEGIREWWDLKPGAPKPKANQQKQDDGRGLVLPGYKYLGPFNGLDKGEPVNAADAAALEHDKAYDQQLKAGDNPYLRYNHADAEFQERLQEDTSFGGNLGRAVFQAKKRVLEPLGLVEEGAKTAPGKKRPVEPSPQRSPDSSTGIGKTGQQPAKKRLNFGQTGDSESVPDPQPIGEPPAGPSGLGSGTMAAGGGAPMADNNEGADGVGSSSGNWHCDSTWLGDRVITTSTRTWALPTYNNHLYKQISNGTSGGSTNDNTYFGYSTPWGYFDFNRFHCHFSPRDWQRLINNNWGFRPKRLNFKLFNIQVKEVTQNEGTKTIANNLTSTIQVFTDSEYQLPYVLGSAHQGCLPPFPADVFMIPQYGYLTLNNGSQAVGRSSFYCLEYFPSQMLRTGNNFEFSYQFEDVPFHSSYAHSQSLDRLMNPLIDQYLYYLSRTQSTGGTAGTQQLLFSQAGPNNMSAQAKNWLPGPCYRQQRVSTTLSQNNNSNFAWTGATKYHLNGRDSLVNPGVAMATHKDDEERFFPSSGVLMFGKQGAGKDNVDYSSVMLTSEEEIKTTNPVATEQYGVVADNLQQQNAAPIVGAVNSQGALPGMVWQNRDVYLQGPIWAKIPHTDGNFHPSPLMGGFGLKHPPPQILIKNTPVPADPPTTFSQAKLASFITQYSTGQVSVEIEWELQKENSKRWNPEIQYTSNYYKSTNVDFAVNTEGTYSEPRPIGTRYLTRNL

SEQ ID NO: 81 - DNA, 3084 bp, Artificial Sequence
  source: /note="Description of Artificial Sequence: Synthetic polynucleotide"
gaattcgccctttctacggctgcatcaactggaccaatgagaactttcccttcaacgattgcgtcgacaagatggtgatctggtgggaggagggcaagatgacggccaaggtcgtggagtccgccaaggccattctcggcggcagcaaggtgcgcgtggaccaaaagtgcaagtcgtccgcccagatcgaccccacccccgtgatcgtcacctccaacaccaacatgtgcgccgtgattgacgggaacagcaccaccttcgagcaccagcagccgttgcaggaccggatgttcaagttcgaactcacccgccgtctggagcacgactttggcaaggtgaccaagcaggaagtcaaagagttcttccgctgggcgcaggatcacgtgaccgaggtggcgcatgagttctacgtcagaaagggcggagccagcaaaagacccgcccccgatgacgcggatataagcgagcccaagcgggcctgcccctcagtcgcggatccatcgacgtcagacgcggaaggagctccggtggactttgccgacaggtaccaaaacaaatgttctcgtcacgcgggcatgcttcagatgctgtttccctgcaaaacgtgcgagaaaatgaatcagaatttcaacatttgcttcacgcacggggtcagagactgctcagaatgtttccccggtgcatcagaatctcaaccggtcgtcagaaaaaaaacgtatcagaaactgtgtgccattcatcatctgctggggcgggcacccgagattgcttgctcggcctgcgatctggtcaacgtggacctggacgactgtgtttctgagcaataaatgacttaaaccaggtatggctgccgatggttatcttccagattggcttgaggacaacctctctgagggcattcgcgagtggtgggacctgaaacctggagccccgaaacccaaagccaaccagcaaaagcaggacgacggccggggtctggtgcttcctggctacaagtacctcggacccttcaacggactcgacaagggggagcccgtcaacgcggcggacgcagcggccctcgagcacgacaaggcctacgaccagcagctcaaagcgggtgacaatccgtacctgcggtataaccacgccgacgccgagtttcaggagcgtctgcaagaagatacgtcttttgggggcaacctcgggcgagcagtcttccaggccaagaagcgggttctcgaacctctcggtctggttgaggaaggcgctaagacggctcctggaaagaagagaccggtagagccatcacctcagcgttcccccgactcctccacgggcatcggcaagaaaggccaccagcccgcgagaaagagactgaactttgggcagactggcgactcggagtcagtccccgaccctcaaccaatcggagaaccaccagcaggcccctctggtctgggatctggtacaatggctgcaggcggtggcgctccaatggcagacaataacgaaggcgccgacggagtgggtagttcctcaggaaattggcattgcgattccacatggctgggcgacagagtcatcaccaccagcacccgaacctgggccctgcccacctacaacaaccatctctacaagcaaatctccaacgggacatcgggaggaagcactaacgacaacacctactttggctacagcaccccctgggggtattttgacttcaacagattccactgccacttctcaccacgtgactggcagcgactcatcaacaataactggggattccggcccaagagactcaacttcaagctcttcaacatccaggtcaaggaggtcacgcagaatgaaggcaccaagaccatcgccaataaccttaccagcacgattcaggtgtttacggactcggaataccagctcccgtacgtccccggctctgcgcaccagggctgcctccctccgttcccggcggacgtcttcatgattcctcagtacgggtatctgaccctaaacaatggcagtcaggctgtgggccgttcctccttctactgcctggaatacttcccttctcaaatgctgaggacgggcaacaactttgaattcagctacaccttcgaggacgtgcctttccacagcagctacgcgcacagccagagcctggaccggctgatgaaccctctcatcgaccagtacctgtattacttatccagaactcagtccacaggaggaactcaaggtactcagcaattgttattttctcaagccgggcccgcaaacatgtcggctcaggccaagaactggctacctggaccgtgttaccgtcagcaacgagtttccacgacactgtcgcaaaacaacaacagcaattttgcttggaccggtgccaccaagtatcacctgaatggcagagactccctggttaatcccggcgttgccatggctacccacaaggacgacgaggagcgcttcttcccgtcaagcggagttctaatgtttggcaagcagggggctggaaaagacaatgtggactacagcagcgtgatgctcaccagcgaagaagaaattaaaactactaacccagtggctacagagcagtatggtgtggtggcagacaacctgcagcagaccaacggagctcccattgtgggaactgtcaacagccagggggccttacctggtatggtctggcaaaaccgggacgtgtacctgcagggccccatctgggccaaaattcctcacacggacggcaactttcatccttcgccgctgatgggaggctttggactgaaacacccgcctcctcagatcctggtgaaaaacactcctgttcctgcggatcctccgaccaccttcagccaggccaagctggcttcttttatcacgcagtacagcaccggacaggtcagcgtggaaatcgaatgggagctgcagaaagaaaacagcaagcgctggaacccagagattcagtatacttccaactactacaaatctacaaatgtggactttgctgtcaatactgagggtacttattcagagcctcgccccattggcactcgttatctcacccgtaatctgtaattgcttgttaatcaataaaccggt

SEQ ID NO: 82 - protein, 738 aa, Artificial Sequence
  source: /note="Description of Artificial Sequence: Synthetic polypeptide"
MAADGYLPDWLEDNLSEGIREWWDLKPGAPKPKANQQKQDDGRGLVLPGYKYLGPFNGLDKGEPVNAADAAALEHDKAYDQQLKAGDNPYLRYNHADAEFQERLQEDTSFGGNLGRAVFQAKKRVLEPLGLVEEGAKTAPGKKRPVEPSPQRSPDSSTGIGKKGHQPARKRLNFGQTGDSESVPDPQPIGEPPAGPSGLGSGTMAAGGGAPMADNNEGADGVGSSSGNWHCDSTWLGDRVITTSTRTWALPTYNNHLYKQISNGTSGGSTNDNTYFGYSTPWGYFDFNRFHCHFSPRDWQRLINNNWGFRPKRLNFKLFNIQVKEVTQNEGTKTIANNLTSTIQVFTDSEYQLPYVPGSAHQGCLPPFPADVFMIPQYGYLTLNNGSQAVGRSSFYCLEYFPSQMLRTGNNFEFSYTFEDVPFHSSYAHSQSLDRLMNPLIDQYLYYLSRTQSTGGTQGTQQLLFSQAGPANMSAQAKNWLPGPCYRQQRVSTTLSQNNNSNFAWTGATKYHLNGRDSLVNPGVAMATHKDDEERFFPSSGVLMFGKQGAGKDNVDYSSVMLTSEEEIKTTNPVATEQYGVVADNLQQTNGAPIVGTVNSQGALPGMVWQNRDVYLQGPIWAKIPHTDGNFHPSPLMGGFGLKHPPPQILVKNTPVPADPPTTFSQAKLASFITQYSTGQVSVEIEWELQKENSKRWNPEIQYTSNYYKSTNVDFAVNTEGTYSEPRPIGTRYLTRNL

SEQ ID NO: 83 - DNA, 3123 bp, Artificial Sequence
  source: /note="Description of Artificial Sequence: Synthetic polynucleotide"
gaattcgcccttggctgcgtcaactggaccaatgagaactttcccttcaacgattgcgtcgacaagatggtgatctggtgggaggagggcaagatgacggccaaggtcgtggagtccgccaaggccattctcggcggcagcaaggtgcgcgtggaccaaaagtgcaagtcgtccgcccagatcgaccccacccccgtgatcgtcacctccaacaccaacatgtgcgccgtgattgacgggaacagcaccaccttcgagcaccagcagccgttgcaggaccggatgttcaagttcgaactcacccgccgtctggagcacgactttggcaaggtgaccaagcaggaagtcaaagagttcttccgctgggcgcaggatcacgtgaccgaggtggcgcatgagttctacgtcagaaagggcggagccagcaaaagacccgcccccgatgacgcggatataagcgagcccaagcgggcctgcccctcagtcgcggatccatcgacgtcagacgcggaaggagctccggtggactttgccgacaggtaccaaaacaaatgttctcgtcacgcgggcatgctccagatgctgtttccctgcaaaacgtgcgagagaatgaatcagaatttcaacatttgcttcacgcacggggtcagagactgctcagaatgtttccccggtgcatcagaatctcaaccggtcgtcagaaaaaaaacgtatcagaaactgtgtgccattcatcatctgctggggcgggcacccgagattgcttgctcggcctgcgatctggtcaacgtggacctggacgactgtgtttctgagcaataaatgacttaaaccaggtatggctgccgatggttatcttccagattggcttgaggacaacctctctgagggcattcgcgagtggtgggacctgaaacctggagccccgaaacccaaagccaaccagcaaaagcaggacgacggccggggtctggtgcttcctggctacaagtacctcggacccttcaacggactcgacaagggggagcccgtcaacgcggcggacgcagcggccctcgagcacgacaaggcctacgaccagcagctcaaagcgggtgacaatccgtacctgcggtataaccacgccgacgccgagtttcaggagcgtctgcaagaagatacgtcttttgggggcaacctcgggcgagcagtcttccaggccaagaagcgggttctcgaacctctcggtctggttgaggaaggcgctaagacggctcctggaaagaagagaccggtagagccatcacctcagcgttcccccgactcctccacgggcatcggcaagaaaggccaccagcccgcgagaaagagactgaactttgggcagactggcgactcggagtcagtccccgaccctcaaccaatcggagaaccaccagcaggcccctctggtctgggatctggtacaatggctgcaggcggtggcgctccaatggcagacaataacgaaggcgccgacggagtgggtagttcctcaggaaattggcattgcgattccacatggctgggcgacagagtcatcaccaccagcacccgaacctgggccctgcccacctacaacaaccatctctacaagcaaatctccaacgggacatcgggaggaagcactaacgacaacacctactttggctacagcaccccctgggggtattttgacttcaacagattccactgccacttctcaccacgtgactggcagcgactcatcaacaataactggggattccggcccaagagactcaacttcaagctcttcaacatccaggtcaaggaggtcacgcagaatgaaggcaccaagaccatcgccaataaccttaccagcacgattcaggtgtttacggactcggaataccagctcccgtacgtcctcggctctgcgcaccagggctgcctccctccgttcccggcggacgtcttcatgattcctcagtacgggtatctgaccctaaacaatggcagtcaggctgtgggccgttcctccttctactgcctggaatacttcccttctcaaatgctgaggacgggcaacaactttgaattcagctacaccttcgaggacgtgcctttccacagcagctacgcgcacagccagagcctggaccggctgatgaaccctctcatcgaccagtacctgtattacttatccagaactcagtccacaggaggaactcaaggtactcagcaattgttattttctcaagccgggcccgcaaacatgtcggctcaggccaagaactggctacctggaccgtgttaccgtcagcaacgagtttccacgacactgtcgcaaaacaacaacagcaattttgcttggaccggtgccaccaagtatcacctgaatggcagagactccctggttaatcccggcgttgccatggctacccacaaggacgacgaggagcgcttcttcccgtcaagcggagttctaatgtttggcaagcagggggctggaaaagacaatgtggactacagcagcgtgatgctcaccagcgaagaagaaattaaaactactaacccagtggctacagagcagtatggtgtggtggcagacaacctgcagcagaccaacggagctcccattgtgggaactgtcaacagccagggggccttacctggtatggtctggcaaaaccgggacgtgtacctgcagggccccatctgggccaaaattcctcacacggacggcaactttcatccttcgccgctgatgggaggctttggactgaaacacccgcctcctcagatcctggtgaaaaacactcctgttcctgcggatcctccgaccaccttcagccaggccaagctggcttcttttatcacgcagtacagcaccggacaggtcagcgtggaaatcgaatgggagctgcagaaagaaaacagcaagcgctggaacccagagattcagtatacttccaactactacaaatctacaaatgtggactttgctgtcaatactgagggtacttattcagagcctcgccccattggcactcgttatctcacccgtaatctgtaattgcttgttaatcaataaaccggttaattcgtttcagttgaactttggtctctgcgaagggcgaattc

SEQ ID NO: 84 - protein, 738 aa, Artificial Sequence
  source: /note="Description of Artificial Sequence: Synthetic polypeptide"
MAADGYLPDWLEDNLSEGIREWWDLKPGAPKPKANQQKQDDGRGLVLPGYKYLGPFNGLDKGEPVNAADAAALEHDKAYDQQLKAGDNPYLRYNHADAEFQERLQEDTSFGGNLGRAVFQAKKRVLEPLGLVEEGAKTAPGKKRPVEPSPQRSPDSSTGIGKKGHQPARKRLNFGQTGDSESVPDPQPIGEPPAGPSGLGSGTMAAGGGAPMADNNEGADGVGSSSGNWHCDSTWLGDRVITTSTRTWALPTYNNHLYKQISNGTSGGSTNDNTYFGYSTPWGYFDFNRFHCHFSPRDWQRLINNNWGFRPKRLNFKLFNIQVKEVTQNEGTKTIANNLTSTIQVFTDSEYQLPYVLGSAHQGCLPPFPADVFMIPQYGYLTLNNGSQAVGRSSFYCLEYFPSQMLRTGNNFEFSYTFEDVPFHSSYAHSQSLDRLMNPLIDQYLYYLSRTQSTGGTQGTQQLLFSQAGPANMSAQAKNWLPGPCYRQQRVSTTLSQNNNSNFAWTGATKYHLNGRDSLVNPGVAMATHKDDEERFFPSSGVLMFGKQGAGKDNVDYSSVMLTSEEEIKTTNPVATEQYGVVADNLQQTNGAPIVGTVNSQGALPGMVWQNRDVYLQGPIWAKIPHTDGNFHPSPLMGGFGLKHPPPQILVKNTPVPADPPTTFSQAKLASFITQYSTGQVSVEIEWELQKENSKRWNPEIQYTSNYYKSTNVDFAVNTEGTYSEPRPIGTRYLTRNL

SEQ ID NO: 85 - DNA, 3122 bp, Artificial Sequence
  source: /note="Description of Artificial Sequence: Synthetic polynucleotide"
gaattcgccctttctacggctgcgtcaactggaccaatgagaactttcccttcaacgattgcgtcgacaagatggtgatctggtgggaggagggcaagatgacggccaaggtcgtggagtccgccaaggccattctcggcggcagcaaggtgcgtgtggaccaaaagtgcaagtcttccgcccagatcgatcccacccccgtgatcgtcacctccaacaccaacatgtgcgccgtgattgacgggaacagcgccaccttcgagcaccagcagccgttgcaggaccggatgttcaaatttgaactcacccgccgtctggagcatgactttggcaaggtgacgaagcaggaagtcaaagagttcttccgctgggcgcaggatcacgtgaccgaggtggcgcatgagttccacgtcagaaagggtggagccaacaagagacccgcccccgatgacgcggatataagcgagcccaagcgggcctgcccctcagtcgcggatccatcgacgtcagacgcggaaggagctccggtggactttgccgacaggtaccaaaacaaatgttctcgtcacgcgggcatgcttcagatgctgtttccctgcaagacatgcgagagaatgaatcagaatttcaacatttgcttcacgcacgggaccagagactgttcagaatgtttccccggcgtgtcagaatctcaaccggtcgtcagaaagaggacgtatcggaaactctgtgcgattcatcatctgctggggcgggctcccgagattgcttgctcggcctgcgatctggtcaacgtggacctggatgactgtgtttctgagcaataaatgacttaaaccaggtatggctgccgatggttatcttccagattggctcgaggacaacctctctgagggcattcgcgagtggtgggacttgaaacctggagccccgaaacccaaagccaaccagcaaaagcaggacgacggccggggtctggtgcttcctggctacaagtacctcggacccttcaacggactcgacaagggggagcccgtcaacgcggcggacgcagcggccctcgagcacgacaaagcctacgaccagcagctcaaagcgggtgacaatccgtacctgcggtataatcacgccgacgccgagtttcaggagcgtctgcaagaagatacgtcttttgggggcaacctcgggcgagcagtcttccaggccaagaagcgggttctcgaacctctcggtctggttgaggaaggcgctaagacggctcctggaaagaagagactggtagagcagtcgccacaagagccagactcctcctcgggcatcggcaagacaggccagcagcccgctaaaaagagactcaattttggtcagactggcgactcagagtcagtccccgacccacaacctctcggagaacctccagcagccccctcaggtctgggacctaatacaatggcttcaggcggtggcgctccaatggcagacaataacgaaggcgccgacggagtgggtaattcctcgggaaattggcattgcgattccacatggctgggggacagagtcatcaccaccagcacccgaacctgggccctgcccacctacaacaaccacctctacaagcaaatctccaacggcacctcgggaggaagcaccaacgacaacacctattttggctacagcaccccctgggggtattttgacttcaacagattccactgtcacttttcaccacgtgactggcaacgactcatcaacaacaattggggattccggcccaaaagactcaacttcaagctgttcaacatccaggtcaaggaagtcacgacgaacgaaggcaccaagaccatcgccaataatctcaccagcaccgtgcaggtctttacggactcggagtaccagttaccgtacgtgctaggatccgctcaccagggatgtctgcctccgttcccggcggacgtcttcacggttcctcagtacggctatttaactttaaacaatggaagccaagccctgggacgttcctccttctactgtctggagtatttcccatcgcagatgctgagaaccggcaacaactttcagttcagctacaccttcgaggacgtgcctttccacagcagctacgcgcacagccagagcctggacaggctgatgaatcccctcatcgaccagtacctgtactacctggtcagaacgcaaacgactggaactggagggacgcagactctggcattcagccaagcgggtcctagctcaatggccaaccaggctagaaattgggtgcccggaccttgctaccggcagcagcgcgtctccacgacaaccaaccagaacaacaacagcaactttgcctggacgggagctgccaagtttaagctgaacggccgagactctctaatgaatccgggcgtggcaatggcttcccacaaggatgacgacgaccgcttcttcccttcgagcggggtcctgatttttggcaagcaaggagccgggaacgatggagtggattacagccaagtgctgattacagatgaggaagaaatcaaggctaccaaccccgtggccacagaagaatatggagcagtggccatcaacaaccaggccgccaatacgcaggcgcagaccggactcgtgcacaaccagggggtgattcccggcatggtgtggcagaatagagacgtgtacctgcagggtcccatctgggccaaaattcctcacacggacggcaactttcacccgtctcccctgatgggcggctttggactgaagcacccgcctcctcaaattctcatcaagaacacaccggttccagcggacccgccgcttaccttcaaccaggccaagctgaactctttcatcacgcagtacagcaccggacaggtcagcgtggaaatcgagtgggagctgcagaaagaaaacagcaaacgctggaatccagagattcaatacacttccaactactacaaatctacaaatgtggactttgctgtcaacacggaaggagtttatagcgagcctcgccccattggcacccgttacctcacccgcaacctgtaattacatgttaatcaataaaccggttaattcgtttcagttgaactttggtctctgcgaagggcgaattc

SEQ ID NO: 86 - protein, 736 aa, Artificial Sequence
  source: /note="Description of Artificial Sequence: Synthetic polypeptide"
MAADGYLPDWLEDNLSEGIREWWDLKPGAPKPKANQQKQDDGRGLVLPGYKYLGPFNGLDKGEPVNAADAAALEHDKAYDQQLKAGDNPYLRYNHADAEFQERLQEDTSFGGNLGRAVFQAKKRVLEPLGLVEEGAKTAPGKKRLVEQSPQEPDSSSGIGKTGQQPAKKRLNFGQTGDSESVPDPQPLGEPPAAPSGLGPNTMASGGGAPMADNNEGADGVGNSSGNWHCDSTWLGDRVITTSTRTWALPTYNNHLYKQISNGTSGGSTNDNTYFGYSTPWGYFDFNRFHCHFSPRDWQRLINNNWGFRPKRLNFKLFNIQVKEVTTNEGTKTIANNLTSTVQVFTDSEYQLPYVLGSAHQGCLPPFPADVFTVPQYGYLTLNNGSQALGRSSFYCLEYFPSQMLRTGNNFQFSYTFEDVPFHSSYAHSQSLDRLMNPLIDQYLYYLVRTQTTGTGGTQTLAFSQAGPSSMANQARNWVPGPCYRQQRVSTTTNQNNNSNFAWTGAAKFKLNGRDSLMNPGVAMASHKDDDDRFFPSSGVLIFGKQGAGNDGVDYSQVLITDEEEIKATNPVATEEYGAVAINNQAANTQAQTGLVHNQGVIPGMVWQNRDVYLQGPIWAKIPHTDGNFHPSPLMGGFGLKHPPPQILIKNTPVPADPPLTFNQAKLNSFITQYSTGQVSVEIEWELQKENSKRWNPEIQYTSNYYKSTNVDFAVNTEGVYSEPRPIGTRYLTRNL

SEQ ID NO: 87 - DNA, 3117 bp, Artificial Sequence
  source: /note="Description of Artificial Sequence: Synthetic polynucleotide"
gaattcgcccttggctgcgtcaactggaccaatgagaactttcccttcaacgattgcgtcgacaagatggtgatctggtgggaggagggcaagatgacggccaaggtcgtggagtccgccaaggccattctcggcggcagcaaggtgcgtgtggaccaaaagtgcaagtcttccgcccagatcgatcccacccccgtgatcgtcacctccaacaccaacatgtgcgccgtgattgacgggaacagcaccaccttcgagcaccagcagccgttgcaggaccggatgttcaaatttgaactcacccgccgtctggagcatgactttggcaaggtgacgaagcaggaagtcaaagagttcttccgctgggcgcaggatcacgtgaccgaggtggcgcatgagttccacgtcagaaagggtggagccaacaagagacccgcccccgatgacgcggatataagcgagcccaagcgggcctgcccctcagtcgcggatccatcgacgtcagacgcggaaggagctccggtggactttgccgacaggtaccaaaacaaatgttctcgtcacgcgggcatgcttcagatgctgtttccctgcaagacatgcgagagaatgaatcagaatttcaacatttgcttcacgcacgggaccagagactgttcagaatgtttccccggcgtgtcagaatctcaaccggtcgtcagaaagaggacgtatcggaaactctgtgcgattcatcatctgctggggcgggctcccgagattgcttgctcggcctgcgatctggtcaacgtggacctggatgactgtgtttctgagcaataaatgacttaaaccaggtatggctgccgatggttatcttccagattggctcgaggacaacctctctgagggcattcgcgagtggtgggacttgaaacctggagccccgaaacccaaagccaaccagcaaaagcaggacgacggccggggtctggtgcttcctggctacaagtacctcggacccttcaacggactcgacaagggggagcccgtcaacgcggcggacgcagcggccctcgagcacgacaaagcctacgaccagcagctcaaagcgggtgacaatccgtacctgcggtataatcacgccgacgccgagtttcaggagcgtctgcaagaagatacgtcttttgggggcaacctcgggcgagcagtcttccaggccaagaagcgggttctcgaacctctcggtctggttgaggaaggcgctaagacggctcctggaaagaagagaccggtagagcagtcgccacaagagccagactcctcctcgggcatcggcaagacaggccagcagcccgctaaaaagagactcaattttggtcagactggcgactcagagtcagtccccgacccacaacctctcggagaacctccagcagccccctcaggtctgggacctaatacaatggcttcaggcggtggcgctccaatggcagacaataacgaaggcgccgacggagtgggtaattcctcgggaaattggcattgcgattccacatggctgggggacagagtcatcaccaccagcacccgaacctgggccctgcccacctacaacaaccacctctacaagcaaatctccaacggcacctcgggaggaagcaccaacgacaacacctattttggctacagcaccccctgggggtattttgacttcaacagattccactgtcacttttcaccacgtgactggcaacgactcatcaacaacaattggggattccggcccaaaagactcaacttcaagctgttcaacatccaggtcaaggaagtcacgacgaacgaaggcaccaagaccatcgccaataatctcaccagcaccgtgcgggtctttacggactcggagtaccagttaccgtacgtgctaggatccgctcaccagggatgtctgcctccgttcccggcggacgtcttcatggttcctcagtacggctatttaactttaaacaatggaagccaagccctgggacgttcctccttctactgtctggagtatttcccatcgcagatgctgagaaccggcaacaactttcagttcagctacaccttcgaggacgtgcctttccacagcagctacgcgcacagccagagcctggacaggctgatgaatcccctcatcgaccagtacctgtactacctggtcagaacgcaaacgactggaactggagggacgcagactctggcattcagccaagcgggtcctagctcaatggccaaccaggctagaaattgggtgcccggaccttgctaccggcagcagcgcgtctccacgacaaccaaccagagcaacaacagcaactttgcctggacgggagctgccaagtttaagctgaacggccgagactctctaatgaatccgggcgtggcaatggcttcccacaaggatgacgacgaccgcttcttcccttcgagcggggtcctgatttttggcaagcaaggagccgggaacgatggagtggattacagccaagtgctgattacagatgaggaagaaatcaaggctaccaaccccgtggccacagaagaatatggagcagtggccatcaacaaccaggccgccaatacgcaggcgcagaccggactcgtgcacaaccagggggtgattcccggcatggtgtggcagaatagagacgtgtacctgcagggtcccatctgggccaaaattcctcacacggacggcaactttcacccgtctcccctgatgggcggctttggactgaagcacccgcctcctcaaattctcatcaagaacacaccggttccagcggacccgccgcttaccttcaaccaggccaagctgaactctttcatcacgcagtacagcaccggacaggtcagcgtggaaatcgagtgggagctgcagaaagaaaacagcaaacgctggaatccagagattcaatacacttccaactactacaaatctacaaatgtggactttgctgtcaacacggaaggagtttatagcgagcctcgccccattggcacccgttacctcacccgcaacctgtaattacatgttaatcaataaaccggttaattcgtttcagttgaactttggtctctgcgaagggcgaattc

SEQ ID NO: 88 - protein, 736 aa, Artificial Sequence
  source: /note="Description of Artificial Sequence: Synthetic polypeptide"
MAADGYLPDWLEDNLSEGIREWWDLKPGAPKPKANQQKQDDGRGLVLPGYKYLGPFNGLDKGEPVNAADAAALEHDKAYDQQLKAGDNPYLRYNHADAEFQERLQEDTSFGGNLGRAVFQAKKRVLEPLGLVEEGAKTAPGKKRPVEQSPQEPDSSSGIGKTGQQPAKKRLNFGQTGDSESVPDPQPLGEPPAAPSGLGPNTMASGGGAPMADNNEGADGVGNSSGNWHCDSTWLGDRVITTSTRTWALPTYNNHLYKQISNGTSGGSTNDNTYFGYSTPWGYFDFNRFHCHFSPRDWQRLINNNWGFRPKRLNFKLFNIQVKEVTTNEGTKTIANNLTSTVRVFTDSEYQLPYVLGSAHQGCLPPFPADVFMVPQYGYLTLNNGSQALGRSSFYCLEYFPSQMLRTGNNFQFSYTFEDVPFHSSYAHSQSLDRLMNPLIDQYLYYLVRTQTTGTGGTQTLAFSQAGPSSMANQARNWVPGPCYRQQRVSTTTNQSNNSNFAWTGAAKFKLNGRDSLMNPGVAMASHKDDDDRFFPSSGVLIFGKQGAGNDGVDYSQVLITDEEEIKATNPVATEEYGAVAINNQAANTQAQTGLVHNQGVIPGMVWQNRDVYLQGPIWAKIPHTDGNFHPSPLMGGFGLKHPPPQILIKNTPVPADPPLTFNQAKLNSFITQYSTGQVSVEIEWELQKENSKRWNPEIQYTSNYYKSTNVDFAVNTEGVYSEPRPIGTRYLTRNL

SEQ ID NO: 89 - DNA, 3121 bp, Artificial Sequence
  source: /note="Description of Artificial Sequence: Synthetic polynucleotide"
gaattcgcccttctacggctgcgtcaactggaccaatgagaactttcccttcaacgattgcgtcgacaagatggtgatctggtgggaggagggcaagatgacggccaaggtcgtggagtccgccaaggccattctcggcggcagcaaggtgcgtgtggaccaaaagtgcaagtcttccgcccagatcgatcccacccccgtgatcgtcacctccaacaccaacatgtgcgccgtgattgacgggaacagcaccaccttcgagcaccagcagccgttgcaggaccggatgttcaaatttgaactcacccgccgtctggagcatgactttggcaaggtgacgaagcaggaagtcaaagagttcttccgctgggcgcaggatcacgtgaccgaggtggcgcatgagttccacgtcagaaagggtggcgccaacaagagacccgcccccgatgacgcggatataagcgagcccaagcgggcctgcccctcagtcgcggatccatcgacgtcagacgcggaaggagctccggtggactttgccgacaggtaccaaaacaaatgttctcgtcacgcgggcatgcttcagatgctgtttccctgcaagacatgcgagagaatgaatcagaatttcaacatttgcttcacgcacgggaccagagactgttcagaatgtttccccggcgtgtcagaatctcaaccggtcgtcagaaagaggacgtatcggaaactctgtgcgattcatcatctgctggggcgggctcccgagattgcttgctcggcctgcgatctggtcaacgtggacctggatgactgtgtttctgagcaataaatgacttaaaccaggtatggctgccgatggttatcttccagattggctcgaggacaacctctctgagggcattcgcgagtggtgggacttgaaacctggagccccgaaacccaaagccaaccagcaaaagcaggacgacggccggggtctggtgcttcctggctacaagtacctcggacccttcaacggactcgacaagggggagcccgtcaacgcggcggacgcagcggccctcgagcacgacaaagcctacgaccagcagctcaaagcgggtgacaatccgtacctgcggtataatcacgccgacgccgagtttcaggagcgtctgcaagaagatacgtcctttgggggcaacctcgggcgagcagtcttccaggccaagaagcgggttctcgaacctctcggtctggttgaggaaggcgctaagacggctcctggaaagaagagaccggtagagcagtcgccacaagagccagactcctcctcgggcatcggcaagacaggccagcagcccgctaaaaagagactcaattttggtcagactggcgactcagagtcagtccccgacccacaacctctcggagaacctccagcagccccctcaggtctgggacctaatacaatggcttcaggcggtggcgctccaatggcagacaataacgaaggcgccgacggagtgggtaattcctcgggaaattggcattgcgattccacatggctgggggacagagtcatcaccaccagcacccgaacctgggccctgcccacctacaacaaccacctctacaagcaaatctccaacggcacctcgggaggaagcaccaacgacaacacctattttggctacagcaccccctgggggtattttgacttcaacagattccactgtcacttttcaccacgtgactggcaacgactcatcaacaacaattggggattccggcccaaaagactcaacttcaagctgttcaacatccaggtcaaggaagtcacgacgaacgaaggcaccaagaccatcgccaataatctcaccagcaccgtgcaggtctttacggacttggagtaccagttaccgtacgtgctaggatccgctcaccagggatgtctgcctccgttcccggcggacgtcttcatggttcctcagtacggctatttaactttaaacaatggaagccaagccctgggacgttcctccttctactgtctggagtatttcccatcgcagatgccgagaaccggcaacaactttcagttcagctacaccttcgaggacgtgcctttccacagcagctacgcgcacagccagagcctggacaggctgatgaatcccctcatcgaccagtacctgtactacctggtcagaacgcaaacgactggaactggagggacgcagactctggcattcagccaagcgggtcctagctcaatggccaaccaggctagaaattgggtgcccggaccttgctaccggcagcagcgcgtctccacgacaaccaaccagaacaacaacagcaactttgcctggacgggagctgccaagtttaagctgaacggccgagactctctaatgaatccgggcgtggcaatggcttcccacaaggatgacgacgaccgcttcttcccttcgagcggggtcctgatttttggcaagcaaggagccgggaacgatggagtggattacagccaagtgctgattacagatgaggaagaaatcaaggctaccaaccccgtggccacagaagaatatggagcagtggccatcaacaaccaggccgccaatacgcaggcgcagaccggactcgtgcacaaccagggggtgattcccggcatggtgtggcagaatagagacgtgtacctgcagggtcccatctgggccaaaattcctcacacggacggcaactttcacccgtctcccctgatgggcggctttggactgaagcacccgcctcctcaaattctcatcaagaacacaccggttccagcggacccgccgcttaccttcaaccaggccaagctgaactctttcatcacgcagtacagcaccggacaggtcagcgtggaaatcgagtgggagctgcagaaagaaaacagcaaacgctggaatccagagattcaatacacttccaactactacaaatctacaaatgtggactttgctgtcaacacggaaggagtttatagcgagcctcgccccattggcacccgttacctcacccgcaacctgtaattacatgttaatcaataaaccggttaattcgtttcagttgaactttggtctctgcgaagggcgaattc

SEQ ID NO: 90 - protein, 736 aa, Artificial Sequence
  source: /note="Description of Artificial Sequence: Synthetic polypeptide"
MAADGYLPDWLEDNLSEGIREWWDLKPGAPKPKANQQKQDDGRGLVLPGYKYLGPFNGLDKGEPVNAADAAALEHDKAYDQQLKAGDNPYLRYNHADAEFQERLQEDTSFGGNLGRAVFQAKKRVLEPLGLVEEGAKTAPGKKRPVEQSPQEPDSSSGIGKTGQQPAKKRLNFGQTGDSESVPDPQPLGEPPAAPSGLGPNTMASGGGAPMADNNEGADGVGNSSGNWHCDSTWLGDRVITTSTRTWALPTYNNHLYKQISNGTSGGSTNDNTYFGYSTPWGYFDFNRFHCHFSPRDWQRLINNNWGFRPKRLNFKLFNIQVKEVTTNEGTKTIANNLTSTVQVFTDLEYQLPYVLGSAHQGCLPPFPADVFMVPQYGYLTLNNGSQALGRSSFYCLEYFPSQMPRTGNNFQFSYTFEDVPFHSSYAHSQSLDRLMNPLIDQYLYYLVRTQTTGTGGTQTLAFSQAGPSSMANQARNWVPGPCYRQQRVSTTTNQNNNSNFAWTGAAKFKLNGRDSLMNPGVAMASHKDDDDRFFPSSGVLIFGKQGAGNDGVDYSQVLITDEEEIKATNPVATEEYGAVAINNQAANTQAQTGLVHNQGVIPGMVWQNRDVYLQGPIWAKIPHTDGNFHPSPLMGGFGLKHPPPQILIKNTPVPADPPLTFNQAKLNSFITQYSTGQVSVEIEWELQKENSKRWNPEIQYTSNYYKSTNVDFAVNTEGVYSEPRPIGTRYLTRNL

SEQ ID NO: 91 - DNA, 3122 bp, Artificial Sequence
  source: /note="Description of Artificial Sequence: Synthetic polynucleotide"
gaattcgccctttctacggctgcgtcaactggaccaatgagaactttcccttcaacgattgcgtcgacaagatggtgatctggtgggaggagggcaagatgacggccaaggtcgtggagtccgccaaggccattctcggcggcagcaaggtgcgtgtggaccaaaagtgcaagtcttccgcccagatcgatcccacccccgtgatcgtcacctccaacaccaacatgtgcgccgtgattgacgggaacagcaccaccttcgagcaccagcagccgttgcaggaccggatgttcaaatttgaactcacccgccgtctggagcatgactttggcaaggtgacgaagcaggaagtcaaagggttcttccgctgggcgcaggatcacgtgaccgaggtggcgcatgagttccacgtgcgagcccaagcgggcctgcccctcagtcgcggatccatcgacgtcagaccagaaagggtggagccaacaagagacccgcccccgatgacgcggatataagcggaaggagctccggtggactttgccgacaggtaccaaaacaaatgttctcgtcacgcgggcatgcttcagatgctgtttccctgcaagacatgcgagagaatgaatcagaatttcaacatttgcttcacgcacgggaccagagactgttcagaatgtttccccggcgtgtcagaatctcaaccggtcgtcagaaagaggacgtatcggaaactctgtgcgattcatcatctgctggggcgggctcccgagattgcttgctcggcctgcgatctggtcaacgtggacctggatgactgtgtttctgagcaataaatgacttaaaccaggtatggctgccgatggttatcttccagattggctcgaggacaacctctctgagggcattcgcgagtggtgggacttgaaacctggagccccgaaacccaaagccaaccagcaaaagcaggacgacggccggggtctggtgcttcctggctacaagtacctcggacccttcaacggactcgacaagggggagcccgtcaacgcggcggacgcagcggccctcgagcacgacaaagcctacgaccagcagctcaaagcgggtgacaatccgtacctgcggtataatcacgccgacgccgagtttcaggagcgtctgcaagaagatacgtcttttgggggcaacctcgggcgagcagtcttccaggccaagaagcgggttctcgaacctctcggtctggttgaggaaggcgctaagacggctcctggaaagaagagaccggtagagcagtcgccacaagagccagactcctcctcgggcatcggcaagacaggccagcagcccgctaaaaagagactcaattttggtcagactggcgactcagagtcagtccccgacccacaacctctcggagaacctccagcagccccctcaggtctgggacctaatacaatggcttcaggcggtggcgctccaatggcagacaataacgaaggcgccgacggagtgggtaattcctcgggaaattggcattgcgattccacatggctgggggacagagtcatcaccaccagcacccgaacctgggccctgcccacctacaacaaccacctctacaagcaaatctccaacggcacctcgggaggaagcaccaacgacaacacctattttggctacagcaccccctgggggtattttgacttcaacagattccactgtcacttttcaccacgtgactggcaacgactcatcaacaacaattggggattccggcccaaaagactcaacttcaagctgttcaacatccaggtcaaggaagtcacgacgaacgaaggcaccaagaccatcgccaataatctcaccagcaccgtgcaggtctttacggactcggagtaccagttaccgtacgtgctaggatccgctcaccagggatgtctgcctccgttcccggcggacgtcttcatggttcctcagtacggctatttaactttaaacaatggaagccaagccctgggacgttcctccttctactgtctggagtatttcccatcgcagatgctgagaaccggcaacaactttcagttcagctacaccttcgaggacgtgcctttccacagcagctacgcgcacagccagagcctggacaggctgatgaatcccctcatcgaccagtacctgtactacctggtcagaacgcaaacgactggaactggagggacgcagactctggcattcagccaagcgggtcctagctcaatggccaaccaggctagaaattgggtgcccggaccttgctaccggcagcagcgcgtctccacgacaaccaaccagaacaacaacagcaactttgcctggacgggagctgccaagtttaagctgaacggccgagactctctaatgaatccgggcgtggcaatggcttcccacaaggatgacgacgaccgcttcttcccttcgagcggggtcctgatttttggcaagcaaggagccgggaacgatggagtggattacagccaagtgctgattacagatgaggaagaaatcaaggctaccaaccccgtggccacagaagaatatggagcagtggccatcaacaaccaggccgccaatacgcaggcgcagaccggactcgtgcacaaccagggggtgattcccggcatggtgtggcagaatagagacgtgtacctgcagggtcccatctgggccaaaattcctcacacggacggcaactttcacccgtctcccctgatgggcggctttggactgaagcacccgcctcctcaaattctcatcaagaacacaccggttccagcggacccgccgcttaccttcaaccaggccaagctgaactctttcatcacgcagtacagcaccggacaggtcagcgtggaaatcgagtgggagctgcagaaagaaaacagcaaacgctggaatccagagattcaatacacttccaactactacaaatctacaaatgtggactttgctgtcaacacggagggggtttatagcgagcctcgccccattggcacccgttacctcacccgcaacctgtaattacatgttaatcaataaaccggttaattcgtttcagttgaactttggtctctgcgaagggcgaattc

SEQ ID NO: 92 - protein, 736 aa, Artificial Sequence
  source: /note="Description of Artificial Sequence: Synthetic polypeptide"
MAADGYLPDWLEDNLSEGIREWWDLKPGAPKPKANQQKQDDGRGLVLPGYKYLGPFNGLDKGEPVNAADAAALEHDKAYDQQLKAGDNPYLRYNHADAEFQERLQEDTSFGGNLGRAVFQAKKRVLEPLGLVEEGAKTAPGKKRPVEQSPQEPDSSSGIGKTGQQPAKKRLNFGQTGDSESVPDPQPLGEPPAAPSGLGPNTMASGGGAPMADNNEGADGVGNSSGNWHCDSTWLGDRVITTSTRTWALPTYNNHLYKQISNGTSGGSTNDNTYFGYSTPWGYFDFNRFHCHFSPRDWQRLINNNWGFRPKRLNFKLFNIQVKEVTTNEGTKTIANNLTSTVQVFTDSEYQLPYVLGSAHQGCLPPFPADVFMVPQYGYLTLNNGSQALGRSSFYCLEYFPSQMLRTGNNFQFSYTFEDVPFHSSYAHSQSLDRLMNPLIDQYLYYLVRTQTTGTGGTQTLAFSQAGPSSMANQARNWVPGPCYRQQRVSTTTNQNNNSNFAWTGAAKFKLNGRDSLMNPGVAMASHKDDDDRFFPSSGVLIFGKQGAGNDGVDYSQVLITDEEEIKATNPVATEEYGAVAINNQAANTQAQTGLVHNQGVIPGMVWQNRDVYLQGPIWAKIPHTDGNFHPSPLMGGFGLKHPPPQILIKNTPVPADPPLTFNQAKLNSFITQYSTGQVSVEIEWELQKENSKRWNPEIQYTSNYYKSTNVDFAVNTEGVYSEPRPIGTRYLTRNL

SEQ ID NO: 93 - DNA, 2370 bp, Artificial Sequence
  source: /note="Description of Artificial Sequence: Synthetic polynucleotide"
gaattcgccctttctacggctgcgtcaactggaccaatgagaactttcccttcaacgattgcgtcgacaagatggtgatctggtgggaggagggcaagatgacggccaaggtcgtggagtccgccaaggccattctcggcggcagcaaggtgcgcgtggaccaaaagtgcaagtcgtccgcccagatcgaccccacccccgtgatcgtcacctccaacaccaacatgtgcgccgtgattgacgggaacagcaccaccttcgagcaccagcagccgttgcaggaccggatgttcaagttcgaactcacccgccgtctggagcacgactttggcaaggtgaccaagcaggaagtcaaagagttcttccgctgggcgcaggatcacgtgaccgaggtggcgcatgagttctacgtcagaaagggcggagccagcaaaagacccgcccccgatgacgcggatataagcgagcccaagcgggcctgcccctcagtcgcggatccatcgacgtcagacgcggaaggagctccggtggactttgccgacaggtaccaaaacaaatgttctcgtcacgcgggcatgcttcagacgctgtttccctgcaaaacgtgcgagagaatgaatcagaatttcaacatttgcttcacgcacggggtcagagactgctcagaatgtttccccggtgcatcagaatctcaaccggtcgtcagaaaaaaaacgtatcagaaactgtgtgccattcatcatctgctggggcgggcacccgagattgcttgctcggcctgcgatctggtcaacgtggacctggacgactgtgtttctgagcaataaatgacttaaaccaggtatggctgccgatggttatcttccagattggcttgaggacaacctctctgagggcattcgcgagtggtgggacctgaaacctggagccccgaaacccaaagccaaccagcaaaagcaggacgacggccggggtctggtgcttcctggctacaagtacctcggacccttcaacggactcgacaagggggagcccgtcaacgcggcggacgcagcggccctcgagcacgacaaggcctacgaccagcagctcaaagcgggtgacaatccgtacctgcggtataaccacgccgacgccgagtttcaggagcgtctgcaagaagatacgtcttttgggggcaacctcgggcgagcagtcttccaggccaagaagcgggttctcgaacctctcggtctggttgaggaaggcgctaagacggctcctggaaagaagagaccggtagagccatcacctcagcgttcccccgactcctccacgggcatcggcaagaaaggccaccagcccgcgagaaagagactgaactttgggcagactggcgactcggagtcagtccccgaccctcaaccaatcggagaaccaccagcaggcccctctggtctgggatctggtacaatggctgcaggcggtggcgctccaatggcagacaataacgaaggcgccgacggagtgggtagttcctcaggaaattggcattgcgattccacatggctgggcgacagagtcatcaccaccagcacccgaacctgggccctgcccacctacaacaaccatctctacaagcaaatctccaacgggacatcgggaggaagcactaacgacaacacctactttggctacagcaccccctgggggtattttgacttcaacagattccactgccacttctcaccacgtgactggcagcgactcatcaacaataactggggattccggcccaagagactcaacttcaagctcttcaacatccaggtcaaggaggtcacgcagaatgaaggcaccaagaccatcgccaataaccttaccagcacgattcaggtgtttacggactcggaataccagctcccgtacgtcctcggctctgcgcaccagggctgcctccctccgttcccggcggacgtcttcatgattcctcagtacgggtatctgaccctaaacaatggcagtcaggctgtgggccgttcctccttctactgcctggaatacttcccttctcaaatgctgaggacgggcaacaactttgaattcagctacaccttcgaggacgtgcctttccacagcagctacgcgcacagccagagcctggaccggctgatgaaccctctcatcgaccagtacctgtattacttatccagaactcagtccacaggaggaactcaaggtactcagcaattgttattttctcaagccgggcccgcaaacatgtyggctcaggccaagaactggctacctggaccgtgttaccgtcagcaacgagtttccacgacactgtcgcaaaacaacaacagcaattttgctggaccggtgccacca

SEQ ID NO: 94 - protein, 738 aa, Artificial Sequence; identical to SEQ ID NO: 84
  source: /note="Description of Artificial Sequence: Synthetic polypeptide"

SEQ ID NO: 95 - DNA, 2205 bp, Artificial Sequence
  source: /note="Description of Artificial Sequence: Synthetic polynucleotide"
atgactgacggttaccttccagattggctagaggacaacctctctgaaggcgttcgagagtggtgggcgctgcaacctggagcccctaaacccaaggcaaatcaacaacatcaggacaacgctcggggtcttgtgcttccgggttacaaatacctcggacccggcaacggactcgacaagggggaacccgtcaacgcagcggacgcggcagccctcgagcacgacaaggcctacgaccagcagctcaaggccggtgacaacccctacctcaagtacaaccacgccgacgcggagttccagcagcggcttcagggcgacacatcgtttgggggcaacctcggcagagcagtcttccaggccaaaaagagggttcttgaacctcttggtctggttgagcaagcgggtgagacggctcctggaaagaagagaccgttgattgaatccccccagcagcccgactcctccacgggtatcggcaaaaaaggcaagcagccggctaaaaagaagctcgttttcgaagacgaaactggagcaggcgacggaccccctgagggatcaacttccggagccatgtctgatgacagtgagatgcgtgcagcagctggcggagctgcagtcgagggcggacaaggtgccgatggagtgggtaatgcctcgggtgattggcattgcgattccacctggtctgagggccacgtcacgaccaccagcaccagaacctgggtcttgcccacctacaacaaccacctctacaagcgactcggagagagcctgcagtccaacacctacaacggattctccaccccctggggatactttgacttcaaccgcttccactgccacttctcaccacgtgactggcagcgactcatcaacaacaactggggcatgcgacccaaagccatgcgggtcaaaatcttcaacatccaggtcaaggaggtcacgacgtcgaacggcgagacaacggtggctaataaccttaccagcacggttcagatctttgcggactcgtcgtacgaactgccgtacgtgatggatgcgggtcaagagggcagcctgcctccttttcccaacgacgtctttatggtgccccagtacggctactgtggactggtgaccggcaacacttcgcagcaacagactgacagaaatgccttctactgcctggagtactttccttcgcagatgctgcggactggcaacaactttgaaattacgtacagttttgagaaggtgcctttccactcgatgtacgcgcacagccagagcctggaccggctgatgaaccctctcatcgaccagtacctgtggggactgcaatcgaccaccaccggaaccaccctgaatgccgggactgccaccaccaactttaccaagctgcggcctaccaacttttccaactttaaaaagaactggctgcccgggccttcaatcaagcagcagggcttctcaaagactgccaatcaaaactacaagatccctgccaccgggtcagacagtctcatcaaatacgagacgcacagcactctggacggaagatggagtgccctgacccccggacctccaatggccacggctggacctgcggacagcaagttcagcaacagccagctcatctttgcggggcctaaacagaacggcaacacggccaccgtacccgggactctgatcttcacctctgaggaggagctggcagccaccaacgccaccgatacggacatgtggggcaacctacctggcggtgaccagagcaacagcaacctgccgaccgtggacagactgacagccttgggagccgtgcctggaatggtctggcaaaacagagacatttactaccagggtcccatttgggccaagattcctcataccgatggacactttcacccctcaccgctgattggtgggtttgggctgaaacacccgcctcctcaaatttttatcaagaacaccccggtacctgcgaatcctgcaacgaccttcagctctactccggtaaactccttcattactcagtacagcactggccaggtgtcggtgcagattgactgggagatccagaaggagcggtccaaacgctggaaccccgaggtccagtttacctccaactacggacagcaaaactctctgttgtgggctcccgatgcggctgggaaatacactgagcctagggctatcggtacccgctacctcacccaccacctgtaa

SEQ ID NO: 96 - protein, 734 aa, Artificial Sequence; identical to SEQ ID NO: 68
  source: /note="Description of Artificial Sequence: Synthetic polypeptide"

SEQ ID NO: 97 - DNA, 3128 bp, Artificial Sequence
  source: /note="Description of Artificial Sequence: Synthetic polynucleotide"
gaattcgccctttctacggctgcgtcaactggaccaatgagaactttcccttcaacgattgcgtcgacaagatgttgatctggtgggaggagggcaagatgacggccaaggtcgtggagtccgccaaggccattctcggcggcagcaaagtgcgcgtggaccaaaagtgcaagccgtccgcccagatcgaccccacccccgtgatcgtcacctccaacaccaacatgtgcgccgtgattgacgggaacagcaccaccttcgagcaccagcagccgttgcgggaccggatgttcaagtttgaactcacccgccgtctggagcacgactttggcaaggtgacaaagcaggaagtcagagagttcttccgctgggcgcaggatcacgtgaccgaggtggcgcacgagttctacgtcagaaagggtggagccaacaagagacccgcccccgatgacgcggataaaagcgagcccaagcgggcctgcccctcagtcgcggatccatcgacgtcagacgcggaaggagctccggtggactttgccgacaggtaccaaaacaaatgttctcgtcacgcgggcatgcttcagatgctgtttccctgcaaaacatgcgagagaatgaatcagaatttcaacatttgcttcacgcacgggaccagagactgttcagaatgtttccccggcgtgtcagaatctcaaccggtcgtcagaaaaaagacgtatcggaaactctgtgcgattcatcatctgctggggcgggcacccgagattgcttgctcggcctgcgatctggtcaacgtggacctagatgactgtgtttctgagcaataaatgacttaaaccaggtatggctgccgatggttatcttccagattggctcgaggacaacctctctgagggcattcgcgagtggtgggacttgaaacctggagccccgaaacccaaagccaaccagcaaaagcaggacgacggccggggtctggtgcttcctggctacaagtacctcggacccttcaacggactcgacaagggggagcccgtcaacgcggcggacgcagcggccctcgagcacgacaaggcctacgaccagcagctcaaagcgggtgacaatccgtacctgcggtataaccacgccgacgccgagtttcaggagcgtctgcaagaagatacgtcttttgggggcaacctcgggcgagcagtcttccaggccaagaagcgggttctcgaacctctcggtctggttgaggaaggcgctaagacggctcctggaaagaagagaccggtagagccatcaccccagcgttctccagactcctctacgggcatcggcaagaaaggccagcagcccgcgaaaaagagactcaactttgggcagactggcgactcagagtcagtgcccgaccctcaaccaatcggagaaccccccgcaggcccctctggtctgggatctggtacaatggctgcaggcggtggcgctccaatggcagacaataacgaaggcgccgacggagtgggtagttcctcaggaaattggcattgcgattccacatggctgggcgacagagtcatcaccaccagcacccgaacctgggccctccccacctacaacaaccacctctacaagcaaatctccaacgggacttcgggaggaagcaccaacgacaacacctacttcggctacagcaccccctgggggtattttgactttaacagattccactgccacttctcaccacgtgactggcagcgactcatcaacaacaactggggattccggcccaagagactcaacttcaagctcttcaacatccaggtcaaggaggtcacgcagaatgaaggcaccaagaccatcgccaataaccttaccagcacgattcaggtctttacggactcggaataccagctcccgtacgtcctcggctctgcgcaccagggctgcctgcctccgttcccggcggacgtcttcatgattcctcagtacgggtacctgactctgaacaatggcagtcaggccgtgggccgttcctccttctactgcctggagtactttccttctcaaatgctgagaacgggcaacaactttgagttcagctaccagtttgaggacgtgccttttcacagcagctacgcgcacagccaaagcctggaccggctgatgaaccccctcatcgaccagtacctgtactacctgtctcggactcagtccacgggaggtaccgcaggaactcagcagttgctattttctcaggccgggcctaataacatgtcggctcaggccaaaaactggctacccgggccctgctaccggcagcaacgcgtctccacgacactgtcgcaaaataacaacagcaactgtaaatcccggtgtcgctatggcaacccacaaggacgacgaagagcgattttgcctggaccggtgccaccaagtatcatctgaatggcagagactctctgttttccgtccagcggagtcttaatgtttgggaaacagggagctggaaaagacaacgtggactatagcagcgttatgctaaccagtgaggaagaaattaaaaccaccaacccagtggccacggaacagtacggcgtggtggccgataacctgcaacagcaaaacgccgctcctattgtaggggccgtcaacagtcaaggagccttacctggcatggtctggcagaaccgggacgtgtacctgcagggtcctatctgggccaagattcctcacacggacggaaactttcatccctcgccgctgatgggaggctttggactgaaacacccgcctcctcagatcctgattaagaatacacctgttcccgcggatcctccaactaccttcagtcaagctaagctggcgtcgttcatcacgcagtacagcaccggacaggtcagcgtggaaattgaatgggagctgcagaaagaaaacagcaaacgctggaacccagagattcaatacacttccaactactacaaatctacaaatgtggacttcgctgttaacacagatggcacttattctgagcctcgccccattggcacccgttacctcacccgtaatctgtaattgctcgttaatcaataaaccggttgattcgtttcagttgaactttggtctctgcgaagggcgaattc

SEQ ID NO: 98 - protein, 738 aa, Artificial Sequence; identical to SEQ ID NO: 18
  source: /note="Description of Artificial Sequence: Synthetic polypeptide"

SEQ ID NO: 99 - DNA, 3128 bp, Artificial Sequence
  source: /note="Description of Artificial Sequence: Synthetic polynucleotide"
gaattcgccctttctacggctgcgtcaactggaccaatgagaactttcccttcaacgattgcgtcgacaagatggtgatctggtgggaggagggcaagatgacggccaaggtcgtggagtccgccaaggccattctcggcggcagcaaagtgcgcgtggaccaaaagtgcaagtcgtccgcccagatcgaccccacccccgtgatcgtcacctccaacaccaacatgtgcgccgtgattgacgggaacagcaccaccttcgagcaccagcagccgttgcaggaccggatgttcaagtttgaactcacccgccgtctggagcacgactttggcaaggtgacaaagcaggaagtcagagagttcttccgctgggcgcaggatcacgtgaccgaggtggcgcacgagttctacgtcagaaagggtggagccaacaagagacccgcccccgatgacgcggataaaagcgagcccaagcgggcctgcccctcagtcgcggatccatcgacgtcagacgcggaaggagctccggtggactttgccgacaggtaccaaaacaaatgttctcgtcacgcgggcatgcttcagatgctgtttccctgcaaaacatgcgagagaatgaatcagaatttcaacatttgcttcacgcacgggaccagagactgttcagaatgtttccccggcgtgtcagaatctcaaccggttgtcagaaaaaagacgtatcggaaactctgtgcgattcatcatctgctggggcgggcacccgagattgcttgctcggcctgcgatctggtcaacgtggacctagatgactgtgtttctgagcaataaatgacttaaaccaggtatggctgccgatggttatcttccagattggctcgaggacaacctctctgagggcattcgcgagtggtgggacttgaaacctggagccccgaaacccaaagccaaccagcaaaagcaggacgacggccggggtctggtgcttcctggctacaagtacctcggacccttcaacggactcgacaagggggagcccgtcaacgcggcggacgcagcggccctcgagcacgacaaggcctacgaccagcagctcaaagcgggtgacaatccgtacctgcggtataaccacgccgacgccgagtttcaggagcgtctgcaagaagatacgtcttttgggggcaacctcgggcgagcagtcttccaggccaagaagcgggttctcgaacctctcggtctggttgaggaaggcgctaagacggctcctggaaagaagagaccggtagagccatcaccccagcgttctccagactcctctacgggcatcggcaagaaaggccagcagcccgcgaaaaagagactcaactttgggcagactggcgactcagagtcagtgcccgaccctcaaccaatcggagaaccccccgcaggcccctctggtctgggatctggtacaatggctgcaggcggtggcgctccaatggcagacaataacgaaggcgccgacggagtgggtagttcctcaggaaattggcattgcgattccacatggctgggcgacagagtcatcaccaccagcacccgaacctgggccctccccacctacaacaaccacctctacaagcaaatctccaacgggacttcgggaggaagcaccaacgacaacacctacttcggctacagcaccccctgggggtattttgactttaacagattccactgccacttctcaccacgtgactggcagcgactcatcaacaacaactggggattccggcccaagagacccaacttcaagctcttcaacatccaggtcaaggaggtcacgcagaatgaaggcaccaagaccatcgccaataaccttaccagcacgattcaggtctttacggactcggaataccagctcccgtacgtcctcggctctgcgcaccagggctgcctgcctccgttcccggcggacgtcttcatgattcctcagtacgggtacctgactctgaacaatggcagtcaggccgtgggccgttcctccttctactgcctggagtactttccttctcaaatgctgagaacgggcaacaactttgagttcagctaccagtttgaggacgtgccttttcacagcagctacgcgcacagccaaagcctggaccggctgatgaaccccctcatcgaccagtacctgtactacctgtctcggactcagtccacgggaggtaccgcaggaactcagcagttgctattttctcaggccgggcctaataacatgtcggctcaggccaaaaactggctacccgggccctgctaccggcagcaacgcgtctccacgacactgtcgcaaaataacaacagcaactttgcctggaccggtgccaccaagtatcatctgaatggcagagactctctggtaaatcccggtgtcgctatggcaacccacaaggacgacgaagagcgattttttccgtccagcggagtcttaatgtttgggaaacagggagctggaaaagacaacgtggactatagcagcgttatgctaaccagtgaggaagaaattaaaaccaccaacccagtggccacagaacagtacggcgtggtggccgataacctgcaacagcaaaacgccgctcctattgtaggggccgtcaacagtcaaggagccttacctggcatggtctggcagaaccgggacgtgtacctgcagggtcctatctgggccaagattcctcacacggacggaaactttcatccctcgccgctgatgggaggctttggactgaaacacccgcctcctcagatcctgattaagaatacacctgttcccgcggatcctccaactaccttcagtcaagctaagctggcgtcgttcatcacgcagtacagcaccggacaggtcagcgtggaaattgaatgggagctgcagaaagaaaacagcaaacgctggaacccagagattcaatacacttccaactactacaaatctacaaatgtggactttgctgttaacacagatggcacttattctgagcctcgccccattggcacccgttacctcacccgtaatctgtaattgcttgttaatcaataaaccggttgattcgtttcagttgaactttggtctctgcgaagggcgaattc

SEQ ID NO: 100 - protein, 738 aa, Artificial Sequence
  source: /note="Description of Artificial Sequence: Synthetic polypeptide"
MAADGYLPDWLEDNLSEGIREWWDLKPGAPKPKANQQKQDDGRGLVLPGYKYLGPFNGLDKGEPVNAADAAALEHDKAYDQQLKAGDNPYLRYNHADAEFQERLQEDTSFGGNLGRAVFQAKKRVLEPLGLVEEGAKTAPGKKRPVEPSPQRSPDSSTGIGKKGQQPAKKRLNFGQTGDSESVPDPQPIGEPPAGPSGLGSGTMAAGGGAPMADNNEGADGVGSSSGNWHCDSTWLGDRVITTSTRTWALPTYNNHLYKQISNGTSGGSTNDNTYFGYSTPWGYFDFNRFHCHFSPRDWQRLINNNWGFRPKRPNFKLFNIQVKEVTQNEGTKTIANNLTSTIQVFTDSEYQLPYVLGSAHQGCLPPFPADVFMIPQYGYLTLNNGSQAVGRSSFYCLEYFPSQMLRTGNNFEFSYQFEDVPFHSSYAHSQSLDRLMNPLIDQYLYYLSRTQSTGGTAGTQQLLFSQAGPNNMSAQAKNWLPGPCYRQQRVSTTLSQNNNSNFAWTGATKYHLNGRDSLVNPGVAMATHKDDEERFFPSSGVLMFGKQGAGKDNVDYSSVMLTSEEEIKTTNPVATEQYGVVADNLQQQNAAPIVGAVNSQGALPGMVWQNRDVYLQGPIWAKIPHTDGNFHPSPLMGGFGLKHPPPQILIKNTPVPADPPTTFSQAKLASFITQYSTGQVSVEIEWELQKENSKRWNPEIQYTSNYYKSTNVDFAVNTDGTYSEPRPIGTRYLTRNL

SEQ ID NO: 101 - protein, 738 aa, Artificial Sequence
  source: /note="Description of Artificial Sequence: Synthetic polypeptide"
MAADGYLPDWLEDNLSEGIREWWDLKPGAPKPKANQQKQDDGRGLVLPGYKYLGPFNGLDKGEPVNAADAAALEHDKAYDQQLKAGDNPYLRYNHADAEFQERLQEDTSFGGNLGRAVFQAKKRVLEPLGLVEEAAKTAPGKKRPVEPSPQRSPDSSTGIGKKGQQPAKKRLNFGQTGDSESVPDPQPIGEPPAGPSGLGSGTMAAGGGAPMADNNEGADGVGSSSGNWHCDSTWLGDRVITTSTRTWALPTYNNHLYKQISNGTSGGSTNDNTYFGYSTPWGYFDFNRFHCHFSPRDWQRLINNNWGFRPKRLSFKLFNIQVKEVTQNEGTKTIANNLTSTIQVFTDSEYQLPYVLGSAHQGCLPPFPADVFMIPQYGYLTLNNGSQAVGRSSFYCLEYFPSQMLRTGNNFEFSYTFEDVPFHSSYAHSQSLDRLMNPLIDQYLYYLSRTQSTGGTQGTQQLLFSQAGPANMSAQAKNWLPGPCYRQQRVSTTLSQNNNSNFAWTGATKYHLNGRDSLVNPGVAMATHKDDEERFFPSSGVLMFGKQGAGRDNVDYSSVMLTSEEEIKTTNPVATEQYGVVADNLQQTNTGPIVGNVNSQGALPGMVWQNRDVYLQGPIWAKIPHTDGNFHPSPLMGGFGLKHPPPQILIKNTPVPADPPTTFSQAKLASFITQYSTGQVSVEIEWELQKENSKRWNPEIQYTSNYYKSTNVDFAVNTEGTYSEPRPIGTRYLTRNL

SEQ ID NO: 102 - DNA, 2172 bp, Artificial Sequence
  source: /note="Description of Artificial Sequence: Synthetic polynucleotide"
atgtcttttgttgatcaccctccagattggttggaagaagttggtgaaggtcttcgcgagtttttgggccttgaagcgggcccaccgaaaccaaaacccaatcagcagcatcaagatcaagcccgtggtcttgtgctgcctggttataactatctcggacccggaaacggtctcgatcgaggagagcctgtcaacagggcagacgaggtcgcgcgagagcacgacatctcgtacaacgagcagcttgaggcgggagacaacccctacctcaagtacaaccacgcggacgccgagtttcaggagaagctcgccgacgacacatccttcgggggaaacctcggaaaggcagtctttcaggccaagaaaagggttctcgaaccttttggcctggttgaagagggtgctaagacggcccctaccggaaagcggatagacgaccactttccaaaaagaaagaaggctcggaccgaagaggactccaagccttccacctcgtcagacgccgaagctggacccagcggatcccagcagctgcaaatcccagcccaaccagcctcaagtttgggagctgatacaatgtctgcgggaggtggcggcccattgggcgacaataaccaaggtgccgatggagtgggcaatgcctcgggagattggcattgcgattccacgtggatgggggacagagtcgtcaccaagtccacccgaacctgggtgctgcccagctacaacaaccaccagtaccgagagatcaaaagcggctccgtcgacggaagcaacgccaacgcctactttggatacagcaccccctgggggtactttgactttaaccgcttccacagccactggagcccccgagactggcaaagactcatcaacaactactggggcttcagaccccggtccctcagagtcaaaatcttcaacattcaagtcaaagaggtcacggtgcaggactccaccaccaccatcgccaacaacctcacctccaccgtccaagtgtttacggacgacgactaccagctgccctacgtcgtcggcaacgggaccgagggatgcctgccggccttccctccgcaggtctttacgctgccgcagtacggttacgcgacgctgaaccgcgacaacacagaaaatcccaccgagaggagcagcttcttctgcctagagtactttcccagcaagatgctgagaacgggcaacaactttgagtttacctacaactttgaggaggtgcccttccactccagcttcgctcccagtcagaacctgttcaagctggccaacccgctggtggaccagtacttgtaccgcttcgtgagcacaaataacactggcggagtccagttcaacaagaacctggccgggagatacgccaacacctacaaaaactggttcccggggcccatgggccgaacccagggctggaacctgggctccggggtcaaccgcgccagtgtcagcgccttcgccacgaccaataggatggagctcgagggcgcgagttaccaggtgcccccgcagccgaacggcatgaccaacaacctccagggcagcaacacctatgccctggagaacactatgatcttcaacagccagccggcgaacccgggcaccaccgccacgtacctcgagggcaacatgctcatcaccagcgagagcgagacgcagccggtgaaccgcgtggcgtacaacgtcggcgggcagatggccaccaacaaccagagctccaccactgcccccgcgaccggcacgtacaacctccaggaaatcgtgcccggcagcgtgtggatggagagggacgtgtacctccaaggacccatctgggccaagatcccagagacgggggcgcactttcacccctctccggccatgggcggattcggactcaaacacccaccgcccatgatgctcatcaagaacacgcctgtgcccggaaatatcaccagcttctcggacgtgcccgtcagcagcttcatcacccagtacagcaccgggcaggtcaccgtggagatggagtgggagctcaagaaggaaaactccaagaggtggaacccagagatccagtacacaaacaactacaacgacccccagtttgtggactttgccccggacagcaccggggaatacagaaccaccagacctatcggaacccgataccttacccgacccctt

SEQ ID NO: 103 - protein, 720 aa, Artificial Sequence
  source: /note="Description of Artificial Sequence: Synthetic polypeptide"
MSFVDHPPDWLEEVGEGLREFLGLEAGPPKPKPNQQHQDQARGLVLPGYNYLGPGNGLDRGEPVNRADEVAREHDISYNEQLEAGDNPYLKYNHADAEFQEKLADDTSFGGNLGKAVFQAKKRVLEPFGLVEEGAKTAPTGKRIDDHFPKRKKARTEEDSKPSTSSDAEAGPSGSQQLQIPAQPASSLGADTMSAGGGGPLGDNNQGADGVGNASGDWHCDSTWMGDRVVTKSTRTWVLPSYNNHQYREIKSGSVDGSNANAYFGYSTPWGYFDFNRFHSHWSPRDWQRLINNYWGFRPRSLRVKIFNIQVKEVTVQDSTTTIANNLTSTVQVFTDDDYQLPYVVGNGTEGCLPAFPPQVFTLPQYGYATLNRDNTENPTERSSFFCLEYFPSKMLRTGNNFEFTYNFEEVPFHSSFAPSQNLFKLANPLVDQYLYRFVSTNNTGGVQFNKNLAGRYANTYKNWFPGPMGRTQGWNLGSGVNRASVSAFATTNRMELEGASYQVPPQPNGMTNNLQGSNTYALENTMIFNSQPANPGTTATYLEGNMLITSESETQPVNRVAYNVGGQMATNNQSSTTAPATGTYNLQEIVPGSVWMERDVYLQGPIWAKIPETGAHFHPSPAMGGFGLKHPPPMMLIKNTPVPGNITSFSDVPVSSFITQYSTGQVTVEMEWELKKENSKRWNPEIQYTNNYNDPQFVDFAPDSTGEYRTTRPIGTRYL

SEQ ID NO: 104 - protein, 724 aa, Adeno-associated virus 5
MSFVDHPPDWLEEVGEGLREFLGLEAGPPKPKPNQQHQDQARGLVLPGYNYLGPGNGLDRGEPVNRADEVAREHDISYNEQLEAGDNPYLKYNHADAEFQEKLADDTSFGGNLGKAVFQAKKRVLEPFGLVEEGAKTAPTGKRIDDHFPKRKKARTEEDSKPSTSSDAEAGPSGSQQLQIPAQPASSLGADTMSAGGGGPLGDNNQGADGVGNASGDWHCDSTWMGDRVVTKSTRTWVLPSYNNHQYREIKSGSVDGSNANAYFGYSTPWGYFDFNRFHSHWSPRDWQRLINNYWGFRPRSLRVKIFNIQVKEVTVQDSTTTIANNLTSTVQVFTDDDYQLPYVVGNGTEGCLPAFPPQVFTLPQYGYATLNRDNTENPTERSSFFCLEYFPSKMLRTGNNFEFTYNFEEVPFHSSFAPSQNLFKLANPLVDQYLYRFVSTNNTGGVQFNKNLAGRYANTYKNWFPGPMGRTQGWNLGSGVNRASVSAFATTNRMELEGASYQVPPQPNGMTNNLQGSNTYALENTMIFNSQPANPGTTATYLEGNMLITSESETQPVNRVAYNVGGQMATNNQSSTTAPATGTYNLQEIVPGSVWMERDVYLQGPIWAKIPETGAHFHPSPAMGGFGLKHPPPMMLIKNTPVPGNITSFSDVPVSSFITQYSTGQVTVEMEWELKKENSKRWNPEIQYTNNYNDPQFVDFAPDSTGEYRTTRPIGTRYLTRPL

SEQ ID NO: 105 - DNA, 2175 bp, Artificial Sequence
  source: /note="Description of Artificial Sequence: Synthetic polynucleotide"
atgtcttttgttgatcaccctccagattggttggaagaagttggtgaaggtcttcgcgagtttttgggccttgaagcgggcccaccgaaaccaaaacccaatcagcagcatcaagatcaagcccgtggtcttgtgctgcctggttataactatctcggacccggaaacggtctcgatcgaggagagcctgtcaacagggcagacgaggtcgcgcgagagcacgacatctcgtacaacgagcagcttgaggcgggagacaacccctacctcaagtacaaccacgcggacgccgagtttcaggagaagctcgccgacgacacatccttcgggggaaacctcggaaaggcagtctttcaggccaagaaaagggttctcgaaccttttggcctggttgaagagggtgctaagacggcccctaccggaaagcggatagacgaccactttccaaaaagaaagaaggctcggaccgaagaggactccaagccttccacctcgtcagacgccgaagctggacccagcggatcccagcagctgcaaatcccagcccaaccagcctcaagtttgggagctgatacaatgtctgcgggaggtggcggcccattgggcgacaataaccaaggtgccgatggagtgggcaatgcctcgggagattggcattgcgattccacgtggatgggggacagagtcgtcaccaagtccacccgaacctgggtgctgcccagctacaacaaccaccagtaccgagagatcaaaagcggctccgtcgacggaagcaacgccaacgcctactttggatacagcaccccctgggggtactttgactttaaccgcttccacagccactggagcccccgagactggcaaagactcatcaacaactactggggcttcagaccccggtccctcagagtcaaaatcttcaacattcaagtcaaagaggtcacggtgcaggactccaccaccaccatcgccaacaacctcacctccaccgtccaagtgtttacggacgacgactaccagctgccctacgtcgtcggcaacgggaccgagggatgcctgccggccttccctccgcaggtctttacgctgccgcagtacggttacgcgacgctgaaccgcgacaacacagaaaatcccaccgagaggagcagcttcttctgcctagagtactttcccagcaagatgctgagaacgggcaacaactttgagtttacctacaactttgaggaggtgcccttccactccagcttcgctcccagtcagaacctgttcaagctggccaacccgctggtggaccagtacttgtaccgcttcgtgagcacaaataacactggcggagtccagttcaacaagaacctggccgggagatacgccaacacctacaaaaactggttcccggggcccatgggccgaacccagggctggaacctgggctccggggtcaaccgcgccagtgtcagcgccttcgccacgaccaataggatggagctcgagggcgcgagttaccaggtgcccccgcagccgaacggcatgaccaacaacctccagggcagcaacacctatgccctggagaacactatgatcttcaacagccagccggcgaacccgggcaccaccgccacgtacctcgagggcaacatgctcatcaccagcgagagcgagacgcagccggtgaaccgcgtggcgtacaacgtcggcgggcagatggccaccaacaaccagagctccaccactgcccccgcgaccggcacgtacaacctccaggaaatcgtgcccggcagcgtgtggatggagagggacgtgtacctccaaggacccatctgggccaagatcccagagacgggggcgcactttcacccctctccggccatgggcggattcggactcaaacacccaccgcccatgatgctcatcaagaacacgcctgtgcccggaaatatcaccagcttctcggacgtgcccgtcagcagcttcatcacccagtacagcaccgggcaggtcaccgtggagatggagtgggagctcaagaaggaaaactccaagaggtggaacccagagatccagtacacaaacaactacaacgacccccagtttgtggactttgccccggacagcaccggggaatacagaaccaccagacctatcggaacccgataccttacccgacccctttaa

SEQ ID NO: 106 - DNA, 2208 bp, Artificial Sequence
  source: /note="Description of Artificial Sequence: Synthetic polynucleotide"
atggctgccgatggttatcttccagattggctcgaggacaacctctctgagggcattcgcgagtggtgggacttgaaacctggagccccgaaacccaaagccaaccagcaaaagcaggacgacggccggggtctggtgcttcctggctacaagtacctcggacccttcaacggactcgacaagggggagcccgtcaacgcggcggatgcagcggccctcgagcacgacaaggcctacgaccagcagctcaaagcgggtgacaatccgtacctgcggtataaccacgccgacgccgagtttcaggagcgtctgcaagaagatacgtcttttgggggcaacctcgggcgagcagtcttccaggccaagaagagggttctcgaaccttttggtctggttgaggaaggtgctaagacggctcctggaaagaaacgtccggtagagcagtcgccacaagagccagactcctcctcgggcattggcaagacaggccagcagcccgctaaaaagagactcaattttggtcagactggcgactcagagtcagtccccgacccacaacctctcggagaacctccagcaacccccgctgctgtgggacctactacaatggcttcaggcggtggcgcaccaatggcagacaataacgaaggcgccgacggagtgggtaatgcctcaggaaattggcattgcgattccacatggctgggcgacagagtcatcaccaccagcacccgaacatgggccttgcccacctataacaaccacctctacaagcaaatctccagtgcttcaacgggggccagcaacgacaaccactacttcggctacagcaccccctgggggtattttgatttcaacagattccactgccatttctcaccacgtgactggcagcgactcatcaacaacaattggggattccggcccaagagactcaacttcaagctcttcaacatccaagtcaaggaggtcacgacgaatgatggcgtcacgaccatcgctaataaccttaccagcacggttcaagtcttctcggactcggagtaccagttgccgtacgtcctcggctctgcgcaccagggctgcctccctccgttcccggcggacgtgttcatgattccgcagtacggctacctaacgctcaacaatggcagccaggcagtgggacggtcatccttttactgcctggaatatttcccatcgcagatgctgagaacgggcaataactttaccttcagctacaccttcgaggacgtgcctttccacagcagctacgcgcacagccagagcctggaccggctgatgaatcctctcatcgaccagtacctgtattacctgaacagaactcagaatcagtccggaagtgcccaaaacaaggacttgctgtttagccgggggtctccagctggcatgtctgttcagcccaaaaactggctacctggaccctgttaccggcagcagcgcgtttctaaaacaaaaacagacaacaacaacagcaactttacctggactggtgcttcaaaatataaccttaatgggcgtgaatctataatcaaccctggcactgctatggcctcacacaaagacgacaaagacaagttctttcccatgagcggtgtcatgatttttggaaaggagagcgccggagcttcaaacactgcattggacaatgtcatgatcacagacgaagaggaaatcaaagccactaaccccgtggccaccgaaagatttgggactgtggcagtcaatctccagagcagcagcacagaccctgcgaccggagatgtgcatgttatgggagccttacctggaatggtgtggcaagacagagacgtatacctgcagggtcctatttgggccaaaattcctcacacggatggacactttcacccgtctcctctcatgggcggctttggacttaagcacccgcctcctcagatcctcatcaaaaacacgcctgttcctgcgaatcctccggcagagttttcggctacaaagtttgcttcattcatcacccagtattccacaggacaagtgagcgtggagattgaatgggagctgcagaaagaaaacagcaaacgctggaatcccgaagtgcagtatacatctaactatgcaaaatctgccaacgttgatttcactgtggacaacaatggactttatactgagcctcgccccattggcacccgttacctcacccgtcccctg

SEQ ID NO: 107 - protein, 736 aa, Adeno-associated virus 6
MAADGYLPDWLEDNLSEGIREWWDLKPGAPKPKANQQKQDDGRGLVLPGYKYLGPFNGLDKGEPVNAADAAALEHDKAYDQQLKAGDNPYLRYNHADAEFQERLQEDTSFGGNLGRAVFQAKKRVLEPFGLVEEGAKTAPGKKRPVEQSPQEPDSSSGIGKTGQQPAKKRLNFGQTGDSESVPDPQPLGEPPATPAAVGPTTMASGGGAPMADNNEGADGVGNASGNWHCDSTWLGDRVITTSTRTWALPTYNNHLYKQISSASTGASNDNHYFGYSTPWGYFDFNRFHCHFSPRDWQRLINNNWGFRPKRLNFKLFNIQVKEVTTNDGVTTIANNLTSTVQVFSDSEYQLPYVLGSAHQGCLPPFPADVFMIPQYGYLTLNNGSQAVGRSSFYCLEYFPSQMLRTGNNFTFSYTFEDVPFHSSYAHSQSLDRLMNPLIDQYLYYLNRTQNQSGSAQNKDLLFSRGSPAGMSVQPKNWLPGPCYRQQRVSKTKTDNNNSNFTWTGASKYNLNGRESIINPGTAMASHKDDKDKFFPMSGVMIFGKESAGASNTALDNVMITDEEEIKATNPVATERFGTVAVNLQSSSTDPATGDVHVMGALPGMVWQDRDVYLQGPIWAKIPHTDGHFHPSPLMGGFGLKHPPPQILIKNTPVPANPPAEFSATKFASFITQYSTGQVSVEIEWELQKENSKRWNPEVQYTSNYAKSANVDFTVDNNGLYTEPRPIGTRYLTRPL

SEQ ID NO: 108 - protein, 623 aa, Adeno-associated virus 6
MPGFYEIVIKVPSDLDEHLPGISDSFVNWVAEKEWELPPDSDMDLNLIEQAPLTVAEKLQRDFLVQWRRVSKAPEALFFVQFEKGESYFHLHILVETTGVKSMVLGRFLSQIRDKLVQTIYRGIEPTLPNWFAVTKTRNGAGGGNKVVDECYIPNYLLPKTQPELQWAWTNMEEYISACLNLAERKRLVAHDLTHVSQTQEQNKENLNPNSDAPVIRSKTSARYMELVGWLVDRGITSEKQWIQEDQASYISFNAASNSRSQIKAALDNAGKIMALTKSAPDYLVGPAPPADIKTNRIYRILELNGYDPAYAGSVFLGWAQKRFGKRNTIWLFGPATTGKTNIAEAIAHAVPFYGCVNWTNENFPFNDCVDKMVIWWEEGKMTAKVVESAKAILGGSKVRVDQKCKSSAQIDPTPVIVTSNTNMCAVIDGNSTTFEHQQPLQDRMFKFELTRRLEHDFGKVTKQEVKEFFRWAQDHVTEVAHEFYVRKGGANKRPAPDDADKSEPKRACPSVADPSTSDAEGAPVDFADRYQNKCSRHAGMLQMLFPCKTCERMNQNFNICFTHGTRDCSECFPGVSESQPVVRKRTYRKLCAIHHLLGRAPEIACSACDLVNVDLDDCVSEQ

SEQ ID NO: 109 - DNA, 4683 bp, Adeno-associated virus 6
ttggccactccctctctgcgcgctcgctcgctcactgaggccgggcgaccaaaggtcgcccgacgcccgggctttgcccgggcggcctcagtgagcgagcgagcgcgcagagagggagtggccaactccatcactaggggttcctggaggggtggagtcgtgacgtgaattacgtcatagggttagggaggtcctgtattagaggtcacgtgagtgttttgcgacattttgcgacaccatgtggtcacgctgggtatttaagcccgagtgagcacgcagggtctccattttgaagcgggaggtttgaacgcgcagcgccatgccggggttttacgagattgtgattaaggtccccagcgaccttgacgagcatctgcccggcatttctgacagctttgtgaactgggtggccgagaaggaatgggagttgccgccagattctgacatggatctgaatctgattgagcaggcacccctgaccgtggccgagaagctgcagcgcgacttcctggtccagtggcgccgcgtgagtaaggccccggaggccctcttctttgttcagttcgagaagggcgagtcctacttccacctccatattctggtggagaccacgggggtcaaatccatggtgctgggccgcttcctgagtcagattagggacaagctggtgcagaccatctaccgcgggatcgagccgaccctgcccaactggttcgcggtgaccaagacgcgtaatggcgccggaggggggaacaaggtggtggacgagtgctacatccccaactacctcctgcccaagactcagcccgagctgcagtgggcgtggactaacatggaggagtatataagcgcgtgtttaaacctggccgagcgcaaacggctcgtggcgcacgacctgacccacgtcagccagacccaggagcagaacaaggagaatctgaaccccaattctgacgcgcctgtcatccggtcaaaaacctccgcacgctacatggagctggtcgggtggctggtggaccggggcatcacctccgagaagcagtggatccaggaggaccaggcctcgtacatctccttcaacgccgcctccaactcgcggtcccagatcaaggccgctctggacaatgccggcaagatcatggcgctgaccaaatccgcgcccgactacctggtaggccccgctccgcccgccgacattaaaaccaaccgcatttaccgcatcctggagctgaacggctacgaccctgcctacgccggctccgtctttctcggctgggcccagaaaaggttcggaaaacgcaacaccatctggctgtttgggccggccaccacgggcaagaccaacatcgcggaagccatcgcccacgccgtgcccttctacggctgcgtcaactggaccaatgagaactttcccttcaacgattgcgtcgacaagatggtgatctggtgggaggagggcaagatgacggccaaggtcgtggagtccgccaaggccattctcggcggcagcaaggtgcgcgtggaccaaaagtgcaagtcgtccgcccagatcgatcccacccccgtgatcgtcacctccaacaccaacatgtgcgccgtgattgacgggaacagcaccaccttcgagcaccagcagccgttgcaggaccggatgttcaaatttgaactcacccgccgtctggagcatgactttggcaaggtgacaaagcaggaagtcaaagagttcttccgctgggcgcaggatcacgtgaccgaggtggcgcatgagttctacgtcagaaagggtggagccaacaagagacccgcccccgatgacgcggataaaagcgagcccaagcgggcctgcccctcagtcgcggatccatcgacgtcagacgcggaaggagctccggtggactttgccgacaggtaccaaaacaaatgttctcgtcacgcgggcatgcttcagatgctgtttccctgcaaaacatgcgagagaatgaatcagaatttcaacatttgcttcacgcacgggaccagagactgttcagaatgtttccccggcgtgtcagaatctcaaccggtcgtcagaaagaggacgtatcggaaactctgtgccattcatcatctgctggggcgggctcccgagattgcttgctcggcctgcgatctggtcaacgtggatctggatgactgtgtttctgagcaataaatgacttaaaccaggtatggctgccgatggttatcttccagattggctcgaggacaacctctctgagggcattcgcgagtggtgggacttgaaacctggagccccgaaacccaaagccaaccagcaaaagcaggacgacggccggggtctggtgcttcctggctacaagtacctcggacccttcaacggactcgacaagggggagcccgtcaacgcggcggatgcagcggccctcgagcacgacaaggcctacgaccagcagctcaaagcgggtgacaatccgtacctgcggtataaccacgccgacgccgagtttcaggagcgtctgcaagaagatacgtcttttgggggcaacctcgggcgagcagtcttccaggccaagaagagggttctcgaaccttttggtctggttgaggaaggtgctaagacggctcctggaaagaaacgtccggtagagcagtcgccacaagagccagactcctcctcgggcattggcaagacaggccagcagcccgctaaaaagagactcaattttggtcagactggcgactcagagtcagtccccgacccacaacctctcggagaacctccagcaacccccgctgctgtgggacctactacaatggcttcaggcggtggcgcaccaatggcagacaataacgaaggcgccgacggagtgggtaatgcctcaggaaattggcattgcgattccacatggctgggcgacagagtcatcaccaccagcacccgaacatgggccttgcccacctataacaaccacctctacaagcaaatctccagtgcttcaacgggggccagcaacgacaaccactacttcggctacagcaccccctgggggtattttgatttcaacagattccactgccatttctcaccacgtgactggcagcgactcatcaacaacaattggggattccggcccaagagactcaacttcaagctcttcaacatccaagtcaaggaggtcacgacgaatgatggcgtcacgaccatcgctaataaccttaccagcacggttcaagtcttctcggactcggagtaccagttgccgtacgtcctcggctctgcgcaccagggctgcctccctccgttcccggcggacgtgttcatgattccgcagtacggctacctaacgctcaacaatggcagccaggcagtgggacggtcatccttttactgcctggaatatttcccatcgcagatgctgagaacgggcaataactttaccttcagctacaccttcgaggacgtgcctttccacagcagctacgcgcacagccagagcctggaccggctgatgaatcctctcatcgaccagtacctgtattacctgaacagaactcagaatcagtccggaagtgcccaaaacaaggacttgctgtttagccgggggtctccagctggcatgtctgttcagcccaaaaactggctacctggaccctgttaccggcagcagcgcgtttctaaaacaaaaacagacaacaacaacagcaactttacctggactggtgcttcaaaatataaccttaatgggcgtgaatctataatcaaccctggcactgctatggcctcacacaaagacgacaaagacaagttctttcccatgagcggtgtcatgatttttggaaaggagagcgccggagcttcaaacactgcattggacaatgtcatgatcacagacgaagaggaaatcaaagccactaaccccgtggccaccgaaagatttgggactgtggcagtcaatctccagagcagcagcacagaccctgcgaccggagatgtgcatgttatgggagccttacctggaatggtgtggcaagacagagacgtatacctgcagggtcctatttgggccaaaattcctcacacggatggacactttcacccgtctcctctcatgggcggctttggacttaagcacccgcctcctcagatcctcatcaaaaacacgcctgttcctgcgaatcctccggcagagttttcggctacaaagtttgcttcattcatcacccagtattccacaggacaagtgagcgtggagattgaatgggagctgcagaaagaaaacagcaaacgctggaatcccgaagtgcagtatacatctaactatgcaaaatctgccaacgttgatttcactgtggacaacaatggactttatactgagcctcgccccattggcacccgttacctcacccgtcccctgtaattgtgtgttaatcaataaaccggttaattcgtgtcagttgaactttggtctcatgtcgttattatcttatctggtcaccatagcaaccggttacacattaactgcttagttgcgcttcgcgaatacccctagtgatggagttgcccactccctctatgcgcgctcgctcgctcggtggggccggcagagcagagctctgccgtctgcggacctttggtccgcaggccccaccgagcgagcgagcgcgcatagagggagtgggcaa

SEQ ID NO: 110 - DNA, 2211 bp, Artificial Sequence
  source: /note="Description of Artificial Sequence: Synthetic polynucleotide"
atggctgccgatggttatcttccagattggctcgaggacaacctctctgagggcattcgcgagtggtgggacttgaaacctggagccccgaaacccaaagccaaccagcaaaagcaggacgacggccggggtctggtgcttcctggctacaagtacctcggacccttcaacggactcgacaagggggagcccgtcaacgcggcggatgcagcggccctcgagcacgacaaggcctacgaccagcagctcaaagcgggtgacaatccgtacctgcggtataaccacgccgacgccgagtttcaggagcgtctgcaagaagatacgtcttttgggggcaacctcgggcgagcagtcttccaggccaagaagagggttctcgaaccttttggtctggttgaggaaggtgctaagacggctcctggaaagaaacgtccggtagagcagtcgccacaagagccagactcctcctcgggcattggcaagacaggccagcagcccgctaaaaagagactcaattttggtcagactggcgactcagagtcagtccccgacccacaacctctcggagaacctccagcaacccccgctgctgtgggacctactacaatggcttcaggcggtggcgcaccaatggcagacaataacgaaggcgccgacggagtgggtaatgcctcaggaaattggcattgcgattccacatggctgggcgacagagtcatcaccaccagcacccgaacatgggccttgcccacctataacaaccacctctacaagcaaatctccagtgcttcaacgggggccagcaacgacaaccactacttcggctacagcaccccctgggggtattttgatttcaacagattccactgccatttctcaccacgtgactggcagcgactcatcaacaacaattggggattccggcccaagagactcaacttcaagctcttcaacatccaagtcaaggaggtcacgacgaatgatggcgtcacgaccatcgctaataaccttaccagcacggttcaagtcttctcggactcggagtaccagttgccgtacgtcctcggctctgcgcaccagggctgcctccctccgttcccggcggacgtgttcatgattccgcagtacggctacctaacgctcaacaatggcagccaggcagtgggacggtcatccttttactgcctggaatatttcccatcgcagatgctgagaacgggcaataactttaccttcagctacaccttcgaggacgtgcctttccacagcagctacgcgcacagccagagcctggaccggctgatgaatcctctcatcgaccagtacctgtattacctgaacagaactcagaatcagtccggaagtgcccaaaacaaggacttgctgtttagccgggggtctccagctggcatgtctgttcagcccaaaaactggctacctggaccctgttaccggcagcagcgcgtttctaaaacaaaaacagacaacaacaacagcaactttacctggactggtgcttcaaaatataaccttaatgggcgtgaatctataatcaaccctggcactgctatggcctcacacaaagacgacaaagacaagttctttcccatgagcggtgtcatgatttttggaaaggagagcgccggagcttcaaacactgcattggacaatgtcatgatcacagacgaagaggaaatcaaagccactaaccccgtggccaccgaaagatttgggactgtggcagtcaatctccagagcagcagcacagaccctgcgaccggagatgtgcatgttatgggagccttacctggaatggtgtggcaagacagagacgtatacctgcagggtcctatttgggccaaaattcctcacacggatggacactttcacccgtctcctctcatgggcggctttggacttaagcacccgcctcctcagatcctcatcaaaaacacgcctgttcctgcgaatcctccggcagagttttcggctacaaagtttgcttcattcatcacccagtattccacaggacaagtgagcgtggagattgaatgggagctgcagaaagaaaacagcaaacgctggaatcccgaagtgcagtatacatctaactatgcaaaatctgccaacgttgatttcactgtggacaacaatggactttatactgagcctcgccccattggcacccgttacctcacccgtcccctgtaa

SEQ ID NO: 111 - protein, 736 aa, Artificial Sequence; identical to SEQ ID NO: 107
  source: /note="Description of Artificial Sequence: Synthetic polypeptide"

SEQ ID NO: 112 - protein, 736 aa, Artificial Sequence
  source: /note="Description of Artificial Sequence: Synthetic polypeptide"
MAADGYLPDWLEDNLSEGIREWWDLKPGAPKPKANQQKQDDGRGLVLPGYKYLGPFNGLDKGEPVNAADAAALEHDKAYDQQLKAGDNPYLRYNHADAEFQERLQEDTSFGGNLGRAVFQAKKRVLEPFGLVEEGAKTAPGKKRPVEQSPQEPDSSSGIGKTGQQPAKKRLNFGQTGDSESVPDPQPLGEPPATPAAVGPTTMASGGGAPMADNNEGADGVGNASGNWHCDSTWLGDRVITTSTRTWALPTYNNHLYKQISSASTGASNDNHYFGYSTPWGYFDFNRFHCHFSPRDWQRLINNNWGFRPKRLNFKLFNIQVKEVTTNDGVTTIANNLTSTVQVFSDSEYQLPYVLGSAHQGCLPPFPADVFMIPQYGYLTLNNGSQAVGRSSFYCLEYFPSQMLRTGNNFTFSYTFEDVPFHSSYAHSQSLDRLMNPLIDQYLYYLNRTQNQSGSAQNKDLLFSRGSPAGMSVQPKNWLPGPCYRQQRVSKTKTDNNNSNFTWTGASKYNLNGRESIINPGTAMASHKDDEDKFFPMSGVMIFGKESAGASNTALDNVMITDEEEIKATNPVATERFGTVAVNLQSSSTDPATGDVHVMGALPGMVWQDRDVYLQGPIWAKIPHTDGHFHPSPLMGGFGLKHPPPQILIKNTPVPANPPAEFSATKFASFITQYSTGQVSVEIEWELQKENSKRWNPEVQYTSNYAKSANVDFTVDNNGLYTEPRPIGTRYLTRPL

SEQ ID NO: 113 - protein, 736 aa, Artificial Sequence
  source: /note="Description of Artificial Sequence: Synthetic polypeptide"
MAADGYLPDWLEDNLSEGIREWWDLKPGAPKPKANQQKQDDGRGLVLPGYKYLGPFNGLDKGEPVNAADAAALEHDKAYDQQLKAGDNPYLRYNHADAEFQERLQEDTSFGGNLGRAVFQAKKRVLEPLGLVEEGAKTAPGKKRPVEQSPQEPDSSSGIGKTGQQPAKKRLNFGQTGDSESVPDPQPLGEPPATPAAVGPTTMASGGGAPMADNNEGADGVGNASGNWHCDSTWLGDRVITTSTRTWALPTYNNHLYKQISSASTGASNDNHYFGYSTPWGYFDFNRFHCHFSPRDWQRLINNNWGFRPKRLNFKLFNIQVKEVTTNDGVTTIANNLTSTVQVFSDSEYQLPYVLGSAHQGCLPPFPADVFMIPQYGYLTLNNGSQAVGRSSFYCLEYFPSQMLRTGNNFTFSYTFEDVPFHSSYAHSQSLDRLMNPLIDQYLYYLNRTQNQSGSAQNKDLLFSRGSPAGMSVQPKNWLPGPCYRQQRVSKTKTDNNNSNFTWTGASKYNLNGRESIINPGTAMASHKDDEDKFFPMSGVMIFGKESAGASNTALDNVMITDEEEIKATNPVATERFGTVAVNLQSSSTDPATGDVHVMGALPGMVWQDRDVYLQGPIWAKIPHTDGHFHPSPLMGGFGLKHPPPQILIKNTPVPANPPAEFSATKFASFITQYSTGQVSVEIEWELQKENSKRWNPEVQYTSNYAKSANVDFTVDNNGLYTEPRPIGTRYLTRPL

SEQ ID NO: 114 - protein, 736 aa, Artificial Sequence
  source: /note="Description of Artificial Sequence: Synthetic polypeptide"
MAADGYLPDWLEDNLSEGIREWWDLKPGAPKPKANQQKQDDGRGLVLPGYKYLGPFNGLDKGEPVNAADAAALEHDKAYDQQLKAGDNPYLRYNHADAEFQERLQEDTSFGGNLGRAVFQAKKRVLEPLGLVEEGAKTAPGKKRPVEQSPQEPDSSSGIGKTGQQPAKKRLNFGQTGDSESVPDPQPLGEPPATPAAVGPTTMASGGGAPMADNNEGADGVGNASGNWHCDSTWLGDRVITTSTRTWALPTYNNHLYKQISSASTGASNDNHYFGYSTPWGYFDFNRFHCHFSPRDWQRLINNNWGFRPKRLNFKLFNIQVKEVTTNDGVTTIANNLTSTVQVFSDSEYQLPYVLGSAHQGCLPPFPADVFMIPQYGYLTLNNGSQAVGRSSFYCLEYFPSQMLRTGNNFTFSYTFEDVPFHSSYAHSQSLDRLMNPLIDQYLYYLNRTQNQSGSAQNKDLLFSRGSPAGMSVQPKNWLPGPCYRQQRVSKTKTDNNNSNFTWTGASKYNLNGRESIINPGTAMASHKDDKDKFFPMSGVMIFGKESAGASNTALDNVMITDEEEIKATNPVATERFGTVAVNLQSSSTDPATGDVHVMGALPGMVWQDRDVYLQGPIWAKIPHTDGHFHPSPLMGGFGLKHPPPQILIKNTPVPANPPAEFSATKFASFITQYSTGQVSVEIEWELQKENSKRWNPEVQYTSNYAKSANVDFTVDNNGLYTEPRPIGTRYLTRPL

SEQ ID NO: 115 - DNA, 2214 bp, Artificial Sequence
  source: /note="Description of Artificial Sequence: Synthetic polynucleotide"
atggctgccgatggttatcttccagattggctcgaggacaacctctctgagggcattcgcgagtggtgggacctgaaacctggagccccgaaacccaaagccaaccagcaaaagcaggacaacggccggggtctggtgcttcctggctacaagtacctcggacccttcaacggactcgacaagggggagcccgtcaacgcggcggacgcagcggccctcgagcacgacaaggcctacgaccagcagctcaaagcgggtgacaatccgtacctgcggtataaccacgccgacgccgagtttcaggagcgtctgcaagaagatacgtcatttgggggcaacctcgggcgagcagtcttccaggccaagaagcgggttctcgaacctctcggtctggttgaggaaggcgctaagacggctcctgcaaagaagagaccggtagagccgtcacctcagcgttcccccgactcctccacgggcatcggcaagaaaggccagcagcccgccagaaagagactcaatttcggtcagactggcgactcagagtcagtccccgaccctcaacctctcggagaacctccagcagcgccctctagtgtgggatctggtacagtggctgcaggcggtggcgcaccaatggcagacaataacgaaggtgccgacggagtgggtaatgcctcaggaaattggcattgcgattccacatggctgggcgacagagtcattaccaccagcacccgaacctgggccctgcccacctacaacaaccacctctacaagcaaatctccagtgaaactgcaggtagtaccaacgacaacacctacttcggctacagcaccccctgggggtattttgactttaacagattccactgccacttctcaccacgtgactggcagcgactcatcaacaacaactggggattccggcccaagaagctgcggttcaagctcttcaacatccaggtcaaggaggtcacgacgaatgacggcgttacgaccatcgctaataaccttaccagcacgattcaggtattctcggactcggaataccagctgccgtacgtcctcggctctgcgcaccagggctgcctgcctccgttcccggcggacgtcttcatgattcctcagtacggctacctgactctcaacaatggcagtcagtctgtgggacgttcctccttctactgcctggagtacttcccctctcagatgctgagaacgggcaacaactttgagttcagctacagcttcgaggacgtgcctttccacagcagctacgcacacagccagagcctggaccggctgatgaatcccctcatcgaccagtacttgtactacctggccagaacacagagtaacccaggaggcacagctggcaatcgggaactgcagttttaccagggcgggccttcaactatggccgaacaagccaagaattggttacctggaccttgcttccggcaacaaagagtctccaaaacgctggatcaaaacaacaacagcaactttgcttggactggtgccaccaaatatcacctgaacggcagaaactcgttggttaatcccggcgtcgccatggcaactcacaaggacgacgaggaccgctttttcccatccagcggagtcctgatttttggaaaaactggagcaactaacaaaactacattggaaaatgtgttaatgacaaatgaagaagaaattcgtcctactaatcctgtagccacggaagaatacgggatagtcagcagcaacttacaagcggctaatactgcagcccagacacaagttgtcaacaaccagggagccttacctggcatggtctggcagaaccgggacgtgtacctgcagggtcccatctgggccaagattcctcacacggatggcaactttcacccgtctcctttgatgggcggctttggacttaaacatccgcctcctcagatcctgatcaagaacactcccgttcccgctaatcctccggaggtgtttactcctgccaagtttgcttcgttcatcacacagtacagcaccggacaagtcagcgtggaaatcgagtgggagctgcagaaggaaaacagcaagcgctggaacccggagattcagtacacctccaactttgaaaagcagactggtgtggactttgccgttgacagccagggtgtttactctgagcctcgccctattggcactcgttacctcacccgtaatctgtaa

SEQ ID NO: 116 - protein, 738 aa, Artificial Sequence
  source: /note="Description of Artificial Sequence: Synthetic polypeptide"
MAADGYLPDWLEDNLSEGIREWWALKPGAPKPKANQQKQDDGRGLVLPGYKYLGPFNGLDKGEPVNAADAAALEHDKAYDQQLQAGDNPYLRYNHADAEFQERLQEDTSFGGNLGRAVFQAKKRVLEPLGLVEEGAKTAPGKKRPVEPSPQRSPDSSTGIGKKGQQPARKRLNFGQTGDSESVPDPQPLGEPPAAPSGVGPNTMAAGGGAPMADNNEGADGVGSSSGNWHCDSTWLGDRVITTSTRTWALPTYNNHLYKQISNGTSGGATNDNTYFGYSTPWGYFDFNRFHCHFSPRDWQRLINNNWGFRPKRLSFKLFNIQVKEVTQNEGTKTIANNLTSTIQVFTDSEYQLPYVLGSAHQGCLPPFPADVFMIPQYGYLTLNNGSQAVGRSSFYCLEYFPSQMLRTGNNFQFTYTFEDVPFHSSYAHSQSLDRLMNPLIDQYLYYLSRTQTTGGTANTQTLGFSQGGPNTMANQAKNWLPGPCYRQQRVSTTTGQNNNSNFAWTAGTKYHLNGRNSLANPGIAMATHKDDEERFFPSNGILIFGKQNAARDNADYSDVMLTSEEEIKTTNPVATEEYGIVADNLQQQNTAPQIGTVNSQGALPGMVWQNRDVYLQGPIWAKIPHTDGNFHPSPLMGGFGLKHPPPQILIKNTPVPADPPTTFNQSKLNSFITQYSTGQVSVEIEWELQKENSKRWNPEIQYTSNYYKSTSVDFAVNTEGVYSEPRPIGTRYLTRNL

SEQ ID NO: 117 - protein, 737 aa, Adeno-associated virus 7
MAADGYLPDWLEDNLSEGIREWWDLKPGAPKPKANQQKQDNGRGLVLPGYKYLGPFNGLDKGEPVNAADAAALEHDKAYDQQLKAGDNPYLRYNHADAEFQERLQEDTSFGGNLGRAVFQAKKRVLEPLGLVEEGAKTAPAKKRPVEPSPQRSPDSSTGIGKKGQQPARKRLNFGQTGDSESVPDPQPLGEPPAAPSSVGSGTVAAGGGAPMADNNEGADGVGNASGNWHCDSTWLGDRVITTSTRTWALPTYNNHLYKQISSETAGSTNDNTYFGYSTPWGYFDFNRFHCHFSPRDWQRLINNNWGFRPKKLRFKLFNIQVKEVTTNDGVTTIANNLTSTIQVFSDSEYQLPYVLGSAHQGCLPPFPADVFMIPQYGYLTLNNGSQSVGRSSFYCLEYFPSQMLRTGNNFEFSYSFEDVPFHSSYAHSQSLDRLMNPLIDQYLYYLARTQSNPGGTAGNRELQFYQGGPSTMAEQAKNWLPGPCFRQQRVSKTLDQNNNSNFAWTGATKYHLNGRNSLVNPGVAMATHKDDEDRFFPSSGVLIFGKTGATNKTTLENVLMTNEEEIRPTNPVATEEYGIVSSNLQAANTAAQTQVVNNQGALPGMVWQNRDVYLQGPIWAKIPHTDGNFHPSPLMGGFGLKHPPPQILIKNTPVPANPPEVFTPAKFASFITQYSTGQVSVEIEWELQKENSKRWNPEIQYTSNFEKQTGVDFAVDSQGVYSEPRPIGTRYLTRNL

SEQ ID NO: 118 - protein, 623 aa, Adeno-associated virus 7
MPGFYEIVIKVPSDLDEHLPGISDSFVNWVAEKEWELPPDSDMDLNLIEQAPLTVAEKLQRDFLVQWRRVSKAPEALFFVQFEKGESYFHLHVLVETTGVKSMVLGRFLSQIREKLVQTIYRGVEPTLPNWFAVTKTRNGAGGGNKVVDECYIPNYLLPKTQPELQWAWTNMEEYISACLNLAERKRLVAQHLTHVSQTQEQNKENLNPNSDAPVIRSKTSARYMELVGWLVDRGITSEKQWIQEDQASYISFNAASNSRSQIKAALDNAGKIMALTKSAPDYLVGPSLPADIKTNRIYRILELNGYDPAYAGSVFLGWAQKKFGKRNTIWLFGPATTGKTNIAEAIAHAVPFYGCVNWTNENFPFNDCVDKMVIWWEEGKMTAKVVESAKAILGGSKVRVDQKCKSSAQIDPTPVIVTSNTNMCAVIDGNSTTFEHQQPLQDRMFKFELTRRLEHDFGKVTKQEVKEFFRWASDHVTEVAHEFYVRKGGASKRPAPDDADISEPKRACPSVADPSTSDAEGAPVDFADRYQNKCSRHAGMIQMLFPCKTCERMNQNFNICFTHGVRDCLECFPGVSESQPVVRKKTYRKLCAIHHLLGRAPEIACSACDLVNVDLDDCVSEQ

SEQ ID NO: 119 - DNA, 4721 bp, Adeno-associated virus 7
ttggccactccctctatgcgcgctcgctcgctcggtggggcctgcggaccaaaggtccgcagacggcagagctctgctctgccggccccaccgagcgagcgagcgcgcatagagggagtggccaactccatcactaggggtaccgcgaagcgcctcccacgctgccgcgtcagcgctgacgtaaatcacgtcataggggagtggtcctgtattagctgtcacgtgagtgcttttgcgacattttgcgacaccacgtggccatttgaggtatatatggccgagtgagcgagcaggatctccattttgaccgcgaaatttgaacgagcagcagccatgccgggtttctacgagatcgtgatcaaggtgccgagcgacctggacgagcacctgccgggcatttctgactcgtttgtgaactgggtggccgagaaggaatgggagctgcccccggattctgacatggatctgaatctgatcgagcaggcacccctgaccgtggccgagaagctgcagcgcgacttcctggtccaatggcgccgcgtgagtaaggccccggaggccctgttctttgttcagttcgagaagggcgagagctacttccaccttcacgttctggtggagaccacgggggtcaagtccatggtgctaggccgcttcctgagtcagattcgggagaagctggtccagaccatctaccgcggggtcgagcccacgctgcccaactggttcgcggtgaccaagacgcgtaatggcgccggcggggggaacaaggtggtggacgagtgctacatccccaactacctcctgcccaagacccagcccgagctgcagtgggcgtggactaacatggaggagtatataagcgcgtgtttgaacctggccgaacgcaaacggctcgtggcgcagcacctgacccacgtcagccagacgcaggagcagaacaaggagaatctgaaccccaattctgacgcgcccgtgatcaggtcaaaaacctccgcgcgctacatggagctggtcgggtggctggtggaccggggcatcacctccgagaagcagtggatccaggaggaccaggcctcgtacatctccttcaacgccgcctccaactcgcggtcccagatcaaggccgcgctggacaatgccggcaagatcatggcgctgaccaaatccgcgcccgactacctggtggggccctcgctgcccgcggacattaaaaccaaccgcatctaccgcatcctggagctgaacgggtacgatcctgcctacgccggctccgtctttctcggctgggcccagaaaaagttcgggaagcgcaacaccatctggctgtttgggcccgccaccaccggcaagaccaacattgcggaagccatcgcccacgccgtgcccttctacggctgcgtcaactggaccaatgagaactttcccttcaacgattgcgtcgacaagatggtgatctggtgggaggagggcaagatgacggccaaggtcgtggagtccgccaaggccattctcggcggcagcaaggtgcgcgtggaccaaaagtgcaagtcgtccgcccagatcgaccccacccccgtgatcgtcacctccaacaccaacatgtgcgccgtgattgacgggaacagcaccaccttcgagcaccagcagccgttgcaggaccggatgttcaaatttgaactcacccgccgtctggagcacgactttggcaaggtgacgaagcaggaagtcaaagagttcttccgctgggccagtgatcacgtgaccgaggtggcgcatgagttctacgtcagaaagggcggagccagcaaaagacccgcccccgatgacgcggatataagcgagcccaagcgggcctgcccctcagtcgcggatccatcgacgtcagacgcggaaggagctccggtggactttgccgacaggtaccaaaacaaatgttctcgtcacgcgggcatgattcagatgctgtttccctgcaaaacgtgcgagagaatgaatcagaatttcaacatttgcttcacacacggggtcagagactgtttagagtgtttccccggcgtgtcagaatctcaaccggtcgtcagaaaaaagacgtatcggaaactctgcgcgattcatcatctgctggggcgggcgcccgagattgcttgctcggcctgcgacctggtcaacgtggacctggacgactgcgtttctgagcaataaatgacttaaaccaggtatggctgccgatggttatcttccagattggctcgaggacaacctctctgagggcattcgcgagtggtgggacctgaaacctggagccccgaaacccaaagccaaccagcaaaagcaggacaacggccggggtctggtgcttcctggctacaagtacctcggacccttcaacggactcgacaagggggagcccgtcaacgcggcggacgcagcggccctcgagcacgacaaggcctacgaccagcagctcaaagcgggtgacaatccgtacctgcggtataaccacgccgacgccgagtttcaggagcgtctgcaagaagatacgtcatttgggggcaacctcgggcgagcagtcttccaggccaagaagcgggttctcgaacctctcggtctggttgaggaaggcgctaagacggctcctgcaaagaagagaccggtagagccgtcacctcagcgttcccccgactcctccacgggcatcggcaagaaaggccagcagcccgccagaaagagactcaatttcggtcagactggcgactcagagtcagtccccgaccctcaacctctcggagaacctccagcagcgccctctagtgtgggatctggtacagtggctgcaggcggtggcgcaccaatggcagacaataacgaaggtgccgacggagtgggtaatgcctcaggaaattggcattgcgattccacatggctgggcgacagagtcattaccaccagcacccgaacctgggccctgcccacctacaacaaccacctctacaagcaaatctccagtgaaactgcaggtagtaccaacgacaacacctacttcggctacagcaccccctgggggtattttgactttaacagattccactgccacttctcaccacgtgactggcagcgactcatcaacaacaactggggattccggcccaagaagctgcggttcaagctcttcaacatccaggtcaaggaggtcacgacgaatgacggcgttacgaccatcgctaataaccttaccagcacgattcaggtattctcggactcggaataccagctgccgtacgtcctcggctctgcgcaccagggctgcctgcctccgttcccggcggacgtcttcatgattcctcagtacggctacctgactctcaacaatggcagtcagtctgtgggacgttcctccttctactgcctggagtacttcccctctcagatgctgagaacgggcaacaactttgagttcagctacagcttcgaggacgtgcctttccacagcagctacgcacacagccagagcctggaccggctgatgaatcccctcatcgaccagtacttgtactacctggccagaacacagagtaacccaggaggcacagctggcaatcgggaactgcagttttaccagggcgggccttcaactatggccgaacaagccaagaattggttacctggaccttgcttccggcaacaaagagtctccaaaacgctggatcaaaacaacaacagcaactttgcttggactggtgccaccaaatatcacctgaacggcagaaactcgttggttaatcccggcgtcgccatggcaactcacaaggacgacgaggaccgctttttcccatccagcggagtcctgatttttggaaaaactggagcaactaacaaaactacattggaaaatgtgttaatgacaaatgaagaagaaattcgtcctactaatcctgtagccacggaagaatacgggatagtcagcagcaacttacaagcggctaatactgcagcccagacacaagttgtcaacaaccagggagccttacctggcatggtctggcagaaccgggacgtgtacctgcagggtcccatctgggccaagattcctcacacggatggcaactttcacccgtctcctttgatgggcggctttggacttaaacatccgcctcctcagatcctgatcaagaacactcccgttcccgctaatcctccggaggtgtttactcctgccaagtttgcttcgttcatcacacagtacagcaccggacaagtcagcgtggaaatcgagtgggagctgcagaaggaaaacagcaagcgctggaacccggagattcagtacacctccaactttgaaaagcagactggtgtggactttgccgttgacagccagggtgtttactctgagcctcgccctattggcactcgttacctcacccgtaatctgtaattgcatgttaatcaataaaccggttgattcgtttcagttgaactttggtctcctgtgcttcttatcttatcggtttccatagcaactggttacacattaactgcttgggtgcgcttcacgataagaacactgacgtcaccgcggtacccctagtgatggagttggccactccctctatgcgcgctcgctcgctcggtggggcctgcggaccaaaggtccgcagacggcagagctctgctctgccggccccaccgagcgagcgagcgcgcatagagggagtggccaa

SEQ ID NO: 120 - DNA, 2214 bp, Artificial Sequence; identical to SEQ ID NO: 115
  source: /note="Description of Artificial Sequence: Synthetic polynucleotide"

SEQ ID NO: 121 - protein, 737 aa, Artificial Sequence; identical to SEQ ID NO: 117
  source: /note="Description of Artificial Sequence: Synthetic polypeptide"

SEQ ID NO: 122 - DNA, 2217 bp, Artificial Sequence
  source: /note="Description of Artificial Sequence: Synthetic polynucleotide"
atggctgccgatggttatcttccagattggctcgaggacaacctctctgagggcattcgcgagtggtgggcgctgaaacctggagccccgaagcccaaagccaaccagcaaaagcaggacgacggccggggtctggtgcttcctggctacaagtacctcggacccttcaacggactcgacaagggggagcccgtcaacgcggcggacgcagcggccctcgagcacgacaaggcctacgaccagcagctgcaggcgggtgacaatccgtacctgcggtataaccacgccgacgccgagtttcaggagcgtctgcaagaagatacgtcttttgggggcaacctcgggcgagcagtcttccaggccaagaagcgggttctcgaacctctcggtctggttgaggaaggcgctaagacggctcctggaaagaagagaccggtagagccatcaccccagcgttctccagactcctctacgggcatcggcaagaaaggccaacagcccgccagaaaaagactcaattttggtcagactggcgactcagagtcagttccagaccctcaacctctcggagaacctccagcagcgccctctggtgtgggacctaatacaatggctgcaggcggtggcgcaccaatggcagacaataacgaaggcgccgacggagtgggtagttcctcgggaaattggcattgcgattccacatggctgggcgacagagtcatcaccaccagcacccgaacctgggccctgcccacctacaacaaccacctctacaagcaaatctccaacgggacatcgggaggagccaccaacgacaacacctacttcggctacagcaccccctgggggtattttgactttaacagattccactgccacttttcaccacgtgactggcagcgactcatcaacaacaactggggattccggcccaagagactcagcttcaagctcttcaacatccaggtcaaggaggtcacgcagaatgaaggcaccaagaccatcgccaataacctcaccagcaccatccaggtgtttacggactcggagtaccagctgccgtacgttctcggctctgcccaccagggctgcctgcctccgttcccggcggacgtgttcatgattccccagtacggctacctaacactcaacaacggtagtcaggccgtgggacgctcctccttctactgcctggaatactttccttcgcagatgctgagaaccggcaacaacttccagtttacttacaccttcgaggacgtgcctttccacagcagctacgcccacagccagagcttggaccggctgatgaatcctctgattgaccagtacctgtactacttgtctcggactcaaacaacaggaggcacggcaaatacgcagactctgggcttcagccaaggtgggcctaatacaatggccaatcaggcaaagaactggctgccaggaccctgttaccgccaacaacgcgtctcaacgacaaccgggcaaaacaacaatagcaactttgcctggactgctgggaccaaataccatctgaatggaagaaattcattggctaatcctggcatcgctatggcaacacacaaagacgacgaggagcgtttttttcccagtaacgggatcctgatttttggcaaacaaaatgctgccagagacaatgcggattacagcgatgtcatgctcaccagcgaggaagaaatcaaaaccactaaccctgtggctacagaggaatacggtatcgtggcagataacttgcagcagcaaaacacggctcctcaaattggaactgtcaacagccagggggccttacccggtatggtctggcagaaccgggacgtgtacctgcagggtcccatctgggccaagattcctcacacggacggcaacttccacccgtctccgctgatgggcggctttggcctgaaacatcctccgcctcagatcctgatcaagaacacgcctgtacctgcggatcctccgaccaccttcaaccagtcaaagctgaactctttcatcacgcaatacagcaccggacaggtcagcgtggaaattgaatgggagctgcagaaggaaaacagcaagcgctggaaccccgagatccagtacacctccaactactacaaatctacaagtgtggactttgctgttaatacagaaggcgtgtactctgaaccccgccccattggcacccgttacctcacccgtaatctgtaa

SEQ ID NO: 123 - DNA, 2213 bp, Adeno-associated virus 8
atggctgccgatggttatcttccagattggctcgaggacaacctctctgagggcattcgcgagtggtgggcgctgaaacctggagccccgaagcccaaagccaaccagcaaaagcaggacgacggccggggtctggtgcttcctggctacaagtacctcggacccttcaacggactcgacaagggggagcccgtcaacgcggcggacgcagcggccctcgagcacgacaaggcctacgaccagcagctgcaggcgggtgacaatccgtacctgcggtataaccacgccgacgccgagtttcaggagcgtctgcaagaagatacgtcttttgggggcaacctcgggcgagcagtcttccaggccaagaagcgggttctcgaacctctcggtctggttgaggaaggcgctaagacggctcctggaaagaagagaccggtagagccatcaccccagcgttctccagactcctctacgggcatcggcaagaaaggccaacagcccgccagaaaaagactcaattttggtcagactggcgactcagagtcagttccagaccctcaacctctcggagaacctccagcagcgccctctggtgtgggacctaatacaatggctgcaggcggtggcgcaccaatggcagacaataacgaaggcgccgacggagtgggtagttcctcgggaaattggcattgcgattccacatggctgggcgacagagtcatcaccaccagcacccgaacctgggccctgcccacctacaacaaccacctctacaagcaaatctccaacgggacatcgggaggagccaccaacgacaacacctacttcggctacagcaccccctgggggtattttgactttaacagattccactgccacttttcaccacgtgactggcagcgactcatcaacaacaactggggattccggcccaagagactcagcttcaagctcttcaacatccaggtcaaggaggtcacgcagaatgaaggcaccaagaccatcgccaataacctcaccagcaccatccaggtgtttacggactcggagtaccagctgccgtacgttctcggctctgcccaccagggctgcctgcctccgttcccggcggacgtgttcatgattccccagtacggctacctaacactcaacaacggtagtcaggccgtgggacgctcctccttctactgcctggaatactttccttcgcagatgctgagaaccggcaacaacttccagtttacttacaccttcgaggacgtgcctttccacagcagctacgcccacagccagagcttggaccggctgatgaatcctctgattgaccagtacctgtactacttgtctcggactcaaacaacaggaggcacggcaaatacgcagactctgggcttcagccaaggtgggcctaatacaatggccaatcaggcaaagaactggctgccaggaccctgttaccgccaacaacgcgtctcaacgacaaccgggcaaaacaacaatagcaactttgcctggactgctgggaccaaataccatctgaatggaagaaattcattggctaatcctggcatcgctatggcaacacacaaagacgacgaggagcgtttttttcccagtaacgggatcctgatttttggcaaacaaaatgctgccagagacaatgcggattacagcgatgtcatgctcaccagcgaggaagaaatcaaaaccactaaccctgtggctacagaggaatacggtatcgtggcagataacttgcagcagcaaaacacggctcctcaaattggaactgtcaacagccagggggccttacccggtatggtctggcagaaccgggacgtgtacctgcagggtcccatctgggccaagattcctcacacggacggcaacttccacccgtctccgctgatgggcggctttggcctgaaacatcctccgcctcagatcctgatcaagaacacgcctgtacctgcggatcctccgaccaccttcaaccagtcaaagctgaactctttcatcacgcaatacagcaccggacaggtcagcgtggaaattgaatgggagctgcagaaggaaaacagcaagcgctggaaccccgagatccagtacacctccaactactacaaatctacaagtgtggactttgctgtaatacagaaggcgtgtactctgaaccccgccccattggcacccgttacctcacccgtaatctg

SEQ ID NO: 124 - DNA, 4393 bp, Adeno-associated virus 8
cagagagggagtggccaactccatcactaggggtagcgcgaagcgcctcccacgctgccgcgtcagcgctgacgtaaattacgtcataggggagtggtcctgtattagctgtcacgtgagtgcttttgcggcattttgcgacaccacgtggccatttgaggtatatatggccgagtgagcgagcaggatctccattttgaccgcgaaatttgaacgagcagcagccatgccgggcttctacgagatcgtgatcaaggtgccgagcgacctggacgagcacctgccgggcatttctgactcgtttgtgaactgggtggccgagaaggaatgggagctgcccccggattctgacatggatcggaatctgatcgagcaggcacccctgaccgtggccgagaagctgcagcgcgacttcctggtccaatggcgccgcgtgagtaaggccccggaggccctcttctttgttcagttcgagaagggcgagagctactttcacctgcacgttctggtcgagaccacgggggtcaagtccatggtgctaggccgcttcctgagtcagattcgggaaaagcttggtccagaccatctacccgcggggtcgagccccaccttgcccaactggttcgcggtgaccaaagacgcggtaatggcgccggcgggggggaacaaggtggtggacgagtgctacatccccaactacctcctgcccaagactcagcccgagctgcagtgggcgtggactaacatggaggagtatataagcgcgtgcttgaacctggccgagcgcaaacggctcgtggcgcagcacctgacccacgtcagccagacgcaggagcagaacaaggagaatctgaaccccaattctgacgcgcccgtgatcaggtcaaaaacctccgcgcgctatatggagctggtcgggtggctggtggaccggggcatcacctccgagaagcagtggatccaggaggaccaggcctcgtacatctccttcaacgccgcctccaactcgcggtcccagatcaaggccgcgctggacaatgccggcaagatcatggcgctgaccaaatccgcgcccgactacctggtggggccctcgctgcccgcggacattacccagaaccgcatctaccgcatcctcgctctcaacggctacgaccctgcctacgccggctccgtctttctcggctgggctcagaaaaagttcgggaaacgcaacaccatctggctgtttggacccgccaccaccggcaagaccaacattgcggaagccatcgcccacgccgtgcccttctacggctgcgtcaactggaccaatgagaactttcccttcaatgattgcgtcgacaagatggtgatctggtgggaggagggcaagatgacggccaaggtcgtggagtccgccaaggccattctcggcggcagcaaggtgcgcgtggaccaaaagtgcaagtcgtccgcccagatcgaccccacccccgtgatcgtcacctccaacaccaacatgtgcgccgtgattgacgggaacagcaccaccttcgagcaccagcagcctctccaggaccggatgtttaagttcgaactcacccgccgtctggagcacgactttggcaaggtgacaaagcaggaagtcaaagagttcttccgctgggccagtgatcacgtgaccgaggtggcgcatgagttttacgtcagaaagggcggagccagcaaaagacccgcccccgatgacgcggataaaagcgagcccaagcgggcctgcccctcagtcgcggatccatcgacgtcagacgcggaaggagctccggtggactttgccgacaggtaccaaaacaaatgttctcgtcacgcgggcatgcttcagatgctgtttccctgcaaaacgtgcgagagaatgaatcagaatttcaacatttgcttcacacacggggtcagagactgctcagagtgtttccccggcgtgtcagaatctcaaccggtcgtcagaaagaggacgtatcggaaactctgtgcgattcatcatctgctggggcgggctcccgagattgcttgctcggcctgcgatctggtcaacgtggacctggatgactgtgtttctgagcaataaatgacttaaaccaggtatggctgccgatggttatcttccagattggctcgaggacaacctctctgagggcattcgcgagtggtgggcgctgaaacctggagccccgaagcccaaagccaaccagcaaaagcaggacgacggccggggtctggtgcttcctggctacaagtacctcggacccttcaacggactcgacaagggggagcccgtcaacgcggcggacgcagcggccctcgagcacgacaaggcctacgaccagcagctgcaggcgggtgacaatccgtacctgcggtataaccacgccgacgccgagtttcaggagcgtctgcaagaagatacgtcttttgggggcaacctcgggcgagcagtcttccaggccaagaagcgggttctcgaacctctcggtctggttgaggaaggcgctaagacggctcctggaaagaagagaccggtagagccatcaccccagcgttctccagactcctctacgggcatcggcaagaaaggccaacagcccgccagaaaaagactcaattttggtcagactggcgactcagagtcagttccagaccctcaacctctcggagaacctccagcagcgccctctggtgtgggacctaatacaatggctgcaggcggtggcgcaccaatggcagacaataacgaaggcgccgacggagtgggtagttcctcgggaaattggcattgcgattccacatggctgggcgacagagtcatcaccaccagcacccgaacctgggccctgcccacctacaacaaccacctctacaagcaaatctccaacgggacatcgggaggagccaccaacgacaacacctacttcggctacagcaccccctgggggtattttgactttaacagattccactgccacttttcaccacgtgactggcagcgactcatcaacaacaactggggattccggcccaagagactcagcttcaagctcttcaacatccaggtcaaggaggtcacgcagaatgaaggcaccaagaccatcgccaataacctcaccagcaccatccaggtgtttacggactcggagtaccagctgccgtacgttctcggctctgcccaccagggctgcctgcctccgttcccggcggacgtgttcatgattccccagtacggctacctaacactcaacaacggtagtcaggccgtgggacgctcctccttctactgcctggaatactttccttcgcagatgctgagaaccggcaacaacttccagtttacttacaccttcgaggacgtgcctttccacagcagctacgcccacagccagagcttggaccggctgatgaatcctctgattgaccagtacctgtactacttgtctcggactcaaacaacaggaggcacggcaaatacgcagactctgggcttcagccaaggtgggcctaatacaatggccaatcaggcaaagaactggctgccaggaccctgttaccgccaacaacgcgtctcaacgacaaccgggcaaaacaacaatagcaactttgcctggactgctgggaccaaataccatctgaatggaagaaattcattggctaatcctggcatcgctatggcaacacacaaagacgacgaggagcgtttttttcccagtaacgggatcctgatttttggcaaacaaaatgctgccagagacaatgcggattacagcgatgtcatgctcaccagcgaggaagaaatcaaaaccactaaccctgtggctacagaggaatacggtatcgtggcagataacttgcagcagcaaaacacggctcctcaaattggaactgtcaacagccagggggccttacccggtatggtctggcagaaccgggacgtgtacctgcagggtcccatctgggccaagattcctcacacggacggcaacttccacccgtctccgctgatgggcggctttggcctgaaacatcctccgcctcagatcctgatcaagaacacgcctgtacctgcggatcctccgaccaccttcaaccagtcaaagctgaactctttcatcacgcaatacagcaccggacaggtcagcgtggaaattgaatgggagctgcagaaggaaaacagcaagcgctggaaccccgagatccagtacacctccaactactacaaatctacaagtgtggactttgctgttaatacagaaggcgtgtactctgaaccccgccccattggcacccgttacctcacccgtaatctgtaattgcctgttaatcaataaaccggttgattcgtttcagttgaactttggtctctgcg

SEQ ID NO: 125 - protein, 738 aa, Adeno-associated virus 8; identical to SEQ ID NO: 116

SEQ ID NO: 126 - protein, 737 aa, Adeno-associated virus 8
MAADGYLPDWLEDNLSEGIREWWALKPGAPKPKANQQKQDDGRGLVLPGYKYLGPFNGLDKGEPVNAADAAALEHDKAYDQQLQAGDNPYLRYNHADAEFQERLQEDTSFGGNLGRAVFQAKKRVLEPLGLVEEGAKTAPGKKRPVEPSPQRSPDSSTGIGKKGQQPARKRLNFGQTGDSESVPDPQPLGEPPAAPSGVGPNTMAAGGGAPMADNNEGADGVGSSSGNWHCDSTWLGDRVITTSTRTWALPTYNNHLYKQISNGTSGGATNDNTYFGYSTPWGYFDFNRFHCHFSPRDWQRLINNNWGFRPKRLSFKLFNIQVKEVTQNEGTKTIANNLTSTIQVFTDSEYQLPYVLGSAHQGCLPPFPADVFMIPQYGYLTLNNGSQAVGRSSFYCLEYFPSQMLRTGNNFQFTYTFEDVPFHSSYAHSQSLDRLMNPLIDQYLYYLSRTQTTGGTANTQTLGFSQGGPNTMANQAKNWLPGPCYRQQRVSTTTGQNNNSNFAWTAGTKYHLNGRNSLANPGIAMATHKDDEERFFPSNGILIFGKQNAARDNADYSDVMLTSEEEIKTTNPVATEEYGIVADNLQQQNTAPQIGTVNSQGALPGMVWQNRDVYLQGPIWAKIPHTDGNFHPSPLMGGFGLKHPPPQILIKNTPVPADPPTTFNQSKLNSFITQYSTGQVSVEIEWELQKENSKRWNPEIQYTSNYYKSTSVDFAVIQKACTLNPAPLAPVTSPVI

SEQ ID NO: 127 - DNA, 2217 bp, Artificial Sequence; identical to SEQ ID NO: 122
  source: /note="Description of Artificial Sequence: Synthetic polynucleotide"

SEQ ID NO: 128 - DNA, 2214 bp, Artificial Sequence
  source: /note="Description of Artificial Sequence: Synthetic polynucleotide"
atggctgccgatggttatcttccagattggctcgaggacaacctctctgagggcattcgcgagtggtgggcgctgaaacctggagccccgaagcccaaagccaaccagcaaaagcaggacgacggccggggtctggtgcttcctggctacaagtacctcggacccttcaacggactcgacaagggggagcccgtcaacgcggcggacgcagcggccctcgagcacgacaaggcctacgaccagcagctgcaggcgggtgacaatccgtacctgcggtataaccacgccgacgccgagtttcaggagcgtctgcaagaagatacgtcttttgggggcaacctcgggcgagcagtcttccaggccaagaagcgggttctcgaacctctcggtctggttgaggaaggcgctaagacggctcctggaaagaagagaccggtagagccatcaccccagcgttctccagactcctctacgggcatcggcaagaaaggccaacagcccgccagaaaaagactcaattttggtcagactggcgactcagagtcagttccagaccctcaacctctcggagaacctccagcagcgccctctggtgtgggacctaatacaatggctgcaggcggtggcgcaccaatggcagacaataacgaaggcgccgacggagtgggtagttcctcgggaaattggcattgcgattccacatggctgggcgacagagtcatcaccaccagcacccgaacctgggccctgcccacctacaacaaccacctctacaagcaaatctccaacgggacatcgggaggagccaccaacgacaacacctacttcggctacagcaccccctgggggtattttgactttaacagattccactgccacttttcaccacgtgactggcagcgactcatcaacaacaactggggattccggcccaagagactcagcttcaagctcttcaacatccaggtcaaggaggtcacgcagaatgaaggcaccaagaccatcgccaataacctcaccagcaccatccaggtgtttacggactcggagtaccagctgccgtacgttctcggctctgcccaccagggctgcctgcctccgttcccggcggacgtgttcatgattccccagtacggctacctaacactcaacaacggtagtcaggccgtgggacgctcctccttctactgcctggaatactttccttcgcagatgctgagaaccggcaacaacttccagtttacttacaccttcgaggacgtgcctttccacagcagctacgcccacagccagagcttggaccggctgatgaatcctctgattgaccagtacctgtactacttgtctcggactcaaacaacaggaggcacggcaaatacgcagactctgggcttcagccaaggtgggcctaatacaatggccaatcaggcaaagaactggctgccaggaccctgttaccgccaacaacgcgtctcaacgacaaccgggcaaaacaacaatagcaactttgcctggactgctgggaccaaataccatctgaatggaagaaattcattggctaatcctggcatcgctatggcaacacacaaagacgacgaggagcgtttttttcccagtaacgggatcctgatttttggcaaacaaaatgctgccagagacaatgcggattacagcgatgtcatgctcaccagcgaggaagaaatcaaaaccactaaccctgtggctacagaggaatacggtatcgtggcagataacttgcctgagcggacggcgatgagtcttccgggaactgtcaacagccagggggccttacccggtatggtctggcagaaccgggacgtgtacctgcagggtcccatctgggccaagattcctcacacggacggcaacttccacccgtctccgctgatgggcggctttggcctgaaacatcctccgcctcagatcctgatcaagaacacgcctgtacctgcggatcctccgaccaccttcaaccagtcaaagctgaactctttcatcacgcaatacagcaccggacaggtcagcgtggaaattgaatgggagctgcagaaggaaaacagcaagcgctggaaccccgagatccagtacacctccaactactacaaatctacaagtgtggactttgctgttaatacagaaggcgtgtactctgaaccccgccccattggcacccgttacctcacccgtaatctg

SEQ ID NO: 129 - protein, 738 aa, Artificial Sequence
  source: /note="Description of Artificial Sequence: Synthetic polypeptide"
MAADGYLPDWLEDNLSEGIREWWALKPGAPKPKANQQKQDDGRGLVLPGYKYLGPFNGLDKGEPVNAADAAALEHDKAYDQQLQAGDNPYLRYNHADAEFQERLQEDTSFGGNLGRAVFQAKKRVLEPLGLVEEGAKTAPGKKRPVEPSPQRSPDSSTGIGKKGQQPARKRLNFGQTGDSESVPDPQPLGEPPAAPSGVGPNTMAAGGGAPMADNNEGADGVGSSSGNWHCDSTWLGDRVITTSTRTWALPTYNNHLYKQISNGTSGGATNDNTYFGYSTPWGYFDFNRFHCHFSPRDWQRLINNNWGFRPKRLSFKLFNIQVKEVTQNEGTKTIANNLTSTIQVFTDSEYQLPYVLGSAHQGCLPPFPADVFMIPQYGYLTLNNGSQAVGRSSFYCLEYFPSQMLRTGNNFQFTYTFEDVPFHSSYAHSQSLDRLMNPLIDQYLYYLSRTQTTGGTANTQTLGFSQGGPNTMANQAKNWLPGPCYRQQRVSTTTGQNNNSNFAWTAGTKYHLNGRNSLANPGIAMATHKDDEERFFPSNGILIFGKQNAARDNADYSDVMLTSEEEIKTTNPVATEEYGIVADNLPERTAMSLPGTVNSQGALPGMVWQNRDVYLQGPIWAKIPHTDGNFHPSPLMGGFGLKHPPPQILIKNTPVPADPPTTFNQSKLNSFITQYSTGQVSVEIEWELQKENSKRWNPEIQYTSNYYKSTSVDFAVNTEGVYSEPRPIGTRYLTRNL

SEQ ID NO: 130 - DNA, 2214 bp, Artificial Sequence
  source: /note="Description of Artificial Sequence: Synthetic polynucleotide"
atggctgccgatggttatcttccagattggctcgaggacaacctctctgagggcattcgcgagtggtgggcgctgaaacctggagccccgaagcccaaagccaaccagcaaaagcaggacgacggccggggtctggtgcttcctggctacaagtacctcggacccttcaacggactcgacaagggggagcccgtcaacgcggcggacgcagcggccctcgagcacgacaaggcctacgaccagcagctgcaggcgggtgacaatccgtacctgcggtataaccacgccgacgccgagtttcaggagcgtctgcaagaagatacgtcttttgggggcaacctcgggcgagcagtcttccaggccaagaagcgggttctcgaacctctcggtctggttgaggaaggcgctaagacggctcctggaaagaagagaccggtagagccatcaccccagcgttctccagactcctctacgggcatcggcaagaaaggccaacagcccgccagaaaaagactcaattttggtcagactggcgactcagagtcagttccagaccctcaacctctcggagaacctccagcagcgccctctggtgtgggacctaatacaatggctgcaggcggtggcgcaccaatggcagacaataacgaaggcgccgacggagtgggtagttcctcgggaaattggcattgcgattccacatggctgggcgacagagtcatcaccaccagcacccgaacctgggccctgcccacctacaacaaccacctctacaagcaaatctccaacgggacatcgggaggagccaccaacgacaacacctacttcggctacagcaccccctgggggtattttgactttaacagattccactgccacttttcaccacgtgactggcagcgactcatcaacaacaactggggattccggcccaagagactcagcttcaagctcttcaacatccaggtcaaggaggtcacgcagaatgaaggcaccaagaccatcgccaataacctcaccagcaccatccaggtgtttacggactcggagtaccagctgccgtacgttctcggctctgcccaccagggctgcctgcctccgttcccggcggacgtgttcatgattccccagtacggctacctaacactcaacaacggtagtcaggccgtgggacgctcctccttctactgcctggaatactttccttcgcagatgctgagaaccggcaacaacttccagtttacttacaccttcgaggacgtgcctttccacagcagctacgcccacagccagagcttggaccggctgatgaatcctctgattgaccagtacctgtactacttgtctcggactcaaacaacaggaggcacggcaaatacgcagactctgggcttcagccaaggtgggcctaatacaatggccaatcaggcaaagaactggctgccaggaccctgttaccgccaacaacgcgtctcaacgacaaccgggcaaaacaacaatagcaactttgcctggactgctgggaccaaataccatctgaatggaagaaattcattggctaatcctggcatcgctatggcaacacacaaagacgacgaggagcgtttttttcccagtaacgggatcctgatttttggcaaacaaaatgctgccagagacaatgcggattacagcgatgtcatgctcaccagcgaggaagaaatcaaaaccactaaccctgtggctacagaggaatacggtatcgtggcagataacttgagttttagtcgtgcggttctttgtgatggaactgtcaacagccagggggccttacccggtatggtctggcagaaccgggacgtgtacctgcagggtcccatctgggccaagattcctcacacggacggcaacttccacccgtctccgctgatgggcggctttggcctgaaacatcctccgcctcagatcctgatcaagaacacgcctgtacctgcggatcctccgaccaccttcaaccagtcaaagctgaactctttcatcacgcaatacagcaccggacaggtcagcgtggaaattgaatgggagctgcagaaggaaaacagcaagcgctggaaccccgagatccagtacacctccaactactacaaatctacaagtgtggactttgctgttaatacagaaggcgtgtactctgaaccccgccccattggcacccgttacctcacccgtaatctg

SEQ ID NO: 131 - protein, 738 aa, Artificial Sequence
  source: /note="Description of Artificial Sequence: Synthetic polypeptide"
MAADGYLPDWLEDNLSEGIREWWALKPGAPKPKANQQKQDDGRGLVLPGYKYLGPFNGLDKGEPVNAADAAALEHDKAYDQQLQAGDNPYLRYNHADAEFQERLQEDTSFGGNLGRAVFQAKKRVLEPLGLVEEGAKTAPGKKRPVEPSPQRSPDSSTGIGKKGQQPARKRLNFGQTGDSESVPDPQPLGEPPAAPSGVGPNTMAAGGGAPMADNNEGADGVGSSSGNWHCDSTWLGDRVITTSTRTWALPTYNNHLYKQISNGTSGGATNDNTYFGYSTPWGYFDFNRFHCHFSPRDWQRLINNNWGFRPKRLSFKLFNIQVKEVTQNEGTKTIANNLTSTIQVFTDSEYQLPYVLGSAHQGCLPPFPADVFMIPQYGYLTLNNGSQAVGRSSFYCLEYFPSQMLRTGNNFQFTYTFEDVPFHSSYAHSQSLDRLMNPLIDQYLYYLSRTQTTGGTANTQTLGFSQGGPNTMANQAKNWLPGPCYRQQRVSTTTGQNNNSNFAWTAGTKYHLNGRNSLANPGIAMATHKDDEERFFPSNGILIFGKQNAARDNADYSDVMLTSEEEIKTTNPVATEEYGIVADNLSFSRAVLCDGTVNSQGALPGMVWQNRDVYLQGPIWAKIPHTDGNFHPSPLMGGFGLKHPPPQILIKNTPVPADPPTTFNQSKLNSFITQYSTGQVSVEIEWELQKENSKRWNPEIQYTSNYYKSTSVDFAVNTEGVYSEPRPIGTRYLTRNL

SEQ ID NO: 132 - DNA, 4385 bp, Adeno-associated virus 9
cagagagggagtggccaactccatcactaggggtaatcgcgaagcgcctcccacgctgccgcgtcagcgctgacgtagattacgtcataggggagtggtcctgtattagctgtcacgtgagtgcttttgcgacattttgcgacaccacatggccatttgaggtatatatggccgagtgagcgagcaggatctccattttgaccgcgaaatttgaacgagcagcagccatgccgggcttctacgagattgtgatcaaggtgccgagcgacctggacgagcacctgccgggcatttctgactcttttgtgaactgggtggccgagaaggaatgggagctgcccccggattctgacatggatcggaatctgatcgagcaggcacccctgaccgtggccgagaagctgcagcgcgacttcctggtccaatggcgccgcgtgagtaaggccccggaggccctcttctttgttcagttcgagaagggcgagagctactttcacctgcacgttctggtcgagaccacgggggtcaagtccatggtgctaggccgcttcctgagtcagattcgggagaagctggtccagaccatctaccgcgggatcgagccgaccctgcccaactggttcgcggtgaccaagacgcgtaatggcgccggcggggggaacaaggtggtggacgagtgctacatccccaactacctcctgcccaagactcagcccgagctgcagtgggcgtggactaacatggaggagtatataagcgcgtgcttgaacctggccgagcgcaaacggctcgtggcgcagcacctgacccacgtcagccagacgcaggagcagaacaaggagaatctgaaccccaattctgacgcgcccgtgatcaggtcaaaaacctccgcgcgctacatggagctggtcgggtggctggtggaccggggcatcacctccgagaagcagtggatccaggaggaccaggcctcgtacatctccttcaacgccgcctccaactcgcggtcccagatcaaggccgcgctggacaatgccggcaagatcatggcgctgaccaaatccgcgcccgactacctggtaggcccttcacttccggtggacattacgcagaaccgcatctaccgcatcctgcagctcaacggctacgaccctgcctacgccggctccgtctttctcggctgggcacaaaagaagttcgggaaacgcaacaccatctggctgtttgggccggccaccacgggaaagaccaacatcgcagaagccattgcccacgccgtgcccttctacggctgcgtcaactggaccaatgagaactttcccttcaacgattgcgtcgacaagatggtgatctggtgggaggagggcaagatgacggccaaggtcgtggagtccgccaaggccattctcggcggcagcaaggtgcgcgtggaccaaaagtgcaagtcgtccgcccagatcgaccccactcccgtgatcgtcacctccaacaccaacatgtgcgccgtgattgacgggaacagcaccaccttcgagcaccagcagcctctccaggaccggatgtttaagttcgaactcacccgccgtctggagcacgactttggcaaggtgacaaagcaggaagtcaaagagttcttccgctgggccagtgatcacgtgaccgaggtggcgcatgagttttacgtcagaaagggcggagccagcaaaagacccgcccccgatgacgcggataaaagcgagcccaagcgggcctgcccctcagtcgcggatccatcgacgtcagacgcggaaggagctccggtggactttgccgacaggtaccaaaacaaatgttctcgtcacgcgggcatgcttcagatgctgcttccctgcaaaacgtgcgagagaatgaatcagaatttcaacatttgcttcacacacggggtcagagactgctcagagtgtttccccggcgtgtcagaatctcaaccggtcgtcagaaagaggacgtatcggaaactctgtgcgattcatcatctgctggggcgggctcccgagattgcttgctcggcctgcgatctggtcaacgtggacctggatgactgtgtttctgagcaataaatgacttaaaccaggtatggctgccgatggttatcttccagattggctcgaggacaacctctctgagggcattcgcgagtggtgggcgctgaaacctggagccccgaagcccaaagccaaccagcaaaagcaggacgacggccggggtctggtgcttcctggctacaagtacctcggacccttcaacggactcgacaagggggagcccgtcaacgcggcggacgcagcggccctcgagcacggcaaggcctacgaccagcagctgcaggcgggtgacaatccgtacctgcggtataaccacgccgacgccgagtttcaggagcgtctgcaagaagatacgtcttttgggggcaacctcgggcgagcagtcttccaggccaagaagcgggttctcgaacctctcggtctggttgaggaaggcgctaagacggctcctggaaagaagagaccggtagagccatcaccccagcgttctccagactcctctacgggcatcggcaagaaaggccaacagcccgccagaaaaagactcaattttggtcagactggcgactcagagtcagttccagaccctcaacctctcggagaacctccagcagcgccctctggtgtgggacctaatacaatggctgcaggcggtggcgcaccaatggcagacaataacgaaggcgccgacggagtgggtaattcctcgggaaattggcattgcgattccacatggctgggggacagagtcatcaccaccagcacccgaacctgggcattgcccacctacaacaaccacctctacaagcaaatctccaatggaacatcgggaggaagcaccaacgacaacacctactttggctacagcaccccctgggggtattttgacttcaacagattccactgccacttctcaccacgtgactggcagcgactcatcaacaacaactggggattccggccaaagagactcaacttcaagctgttcaacatccaggtcaaggaggttacgacgaacgaaggcaccaagaccatcgccaataaccttaccagcaccgtccaggtctttacggactcggagtaccagctaccgtacgtcctaggctctgcccaccaaggatgcctgccaccgtttcctgcagacgtcttcatggttcctcagtacggctacctgacgctcaacaatggaagtcaagcgttaggacgttcttctttctactgtctggaatacttcccttctcagatgctgagaaccggcaacaactttcagttcagctacactttcgaggacgtgcctttccacagcagctacgcacacagccagagtctagatcgactgatgaaccccctcatcgaccagtacctatactacctggtcagaacacagacaactggaactgggggaactcaaactttggcattcagccaagcaggccctagctcaatggccaatcaggctagaaactgggtacccgggccttgctaccgtcagcagcgcgtctccacaaccaccaaccaaaataacaacagcaactttgcgtggacgggagctgctaaattcaagctgaacgggagagactcgctaatgaatcctggcgtggctatggcatcgcacaaagacgacgaggaccgcttctttccatcaagtggcgttctcatatttggcaagcaaggagccgggaacgatggagtcgactacagccaggtgctgattacagatgaggaagaaattaaagccaccaaccctgtagccacagaggaatacggagcagtggccatcaacaaccaggccgctaacacgcaggcgcaaactggacttgtgcataaccagggagttattcctggtatggtctggcagaaccgggacgtgtacctgcagggccctatttgggctaaaatacctcacacagatggcaactttcacccgtctcctctgatgggtggatttggactgaaacacccacctccacagattctaattaaaaatacaccagtgccggcagatcctcctcttaccttcaatcaagccaagctgaactctttcatcacgcagtacagcacgggacaagtcagcgtggaaatcgagtgggagctgcagaaagaaaacagcaagcgctggaatccagagatccagtatacttcaaactactacaaatctacaaatgtggactttgctgtcaataccaaaggtgtttactctgagcctcgccccattggtactcgttacctcacccgtaatttgtaattgcctgttaatcaataaaccggttaattcgtttcagttgaactttggtctctgcg

SEQ ID NO: 133 - DNA, 4382 bp, Adeno-associated virus 9
cagagagggagtggccaactccatcactaggggtaatcgcgaagcgcctcccacgctgccgcgtcagcgctgacgtagattacgtcataggggagtggtcctgtattagctgtcacgtgagtgcttttgcgacattttgcgacaccacatggccatttgaggtatatatggccgagtgagcgagcaggatctccattttgaccgcgaaatttgaacgagcagcagccatgccgggcttctacgagattgtgatcaaggtgccgagcgacctggacgagcacctgccgggcatttctgactcttttgtgaactgggtggccgagaaggaatgggagctgcccccggattctgacatggatcggaatctgatcgagcaggcacccctgaccgtggccgagaagctgtagcgcgacttcctggtccaatggcgccgcgtgagtaaggccccggaggccctcttctttgttcagttcgagaagggcgagagctactttcacctgcacgttctggtcgagaccacgggggtcaagtccatggtgctaggccgcttcctgagtcagattcgggagaagctggtccagaccatctaccgcgggatcgagccgaccctgcccaactggttcgcggtgaccaagacgcgtaatggcgccggcggggggaacaaggtggtggacgagtgctacatccccaactacctcctgcccaagactcagcccgagctgcagtgggcgtggactaacatggaggagtatataagcgcgtgcttgaacctggccgagcgcaaacggctcgtggcgcagcacctgacccacgtcagccagacgcaggagcagaacaaggagaatctgaaccccaattctgacgcgcccgtgatcaggtcaaaaacctccgcgcgctacatggagctggtcgggtggctggtggaccggggcatcacctccgagaagcagtggatccaggaggaccaggcctcgtacatctccttcaacgccgcctccaactcgcggtcccagatcaaggccgcgctggacaatgccggcaagatcatggcgctgaccaaatccgcgcccgactacctggtaggcccttcacttccggtggacattacgcagaaccgcatctaccgcatcctgcagctcaacggctacgaccctgcctacgccggctccgtctttctcggctgggcacaaaagaagttcgggaaacgcaacaccatctggctgtttgggccggccaccacgggaaagaccaacatcgcagaagccattgcccacgccgtgcccttctacggctgcgtcaactggaccaatgagaactttcccttcaacgattgcgtcgacaagatggtgatctggtgggaggagggcaagatgacggccaaggtcgtggagtccgccaaggccattctcggcggcagcaaggtgcgcgtggaccaaaagtgcaagtcgtccgcccagatcgaccccactcccgtgatcgtcacctccaacaccaacatgtgcgccgtgattgacgggaacagcaccaccttcgagcaccagcagcctctccaggaccggatgtttaagttcgaactcacccgccgtctggagcacgactttggcaaggtgacaaagcaggaagtcaaagagttcttccgctgggccagtgatcacgtgaccgaggtggcgcatgagttttacgtcagaaagggcggagccagcaaaagacccgcccccgatgacgcggataaaagcgagcccaagcgggcctgcccctcagtcgcggatccatcgacgtcagacgcggaaggagctccggtggactttgccgacaggtaccaaaacaaatgttctcgtcacgcgggcatgcttcagatgctgcttccctgcaaaacgtgcgagagaatgaatcagaatttcaacatttgcttcacacacggggtcagagactgctcagagtgtttccccggcgtgtcagaatctcaaccggtcgtcagaaagaggacgtatcggaaactctgtgcgattcatcatctgctggggcgggctcccgagattgcttgctcggcctgcgatctggtcaacgtggacctggatgactgtgtttctgagcaataaatgacttaaaccaggtatggctgccgatggttatcttccagattggctcgaggacaacctctctgagggcattcgcgagtggtgggacctgaaacctggagccccgaaacccaaagccaaccagcaaaagcaggacgacggccggggtctggtgcttcctggctacaagtacctcggacccttcaacggactcgacaagggggagcccgtcaacgcggcggacgcagcggccctcgagcacgacaaggcctacgaccagcagctcaaagcgggtgacaatccgtacctgcggtataaccacgccgacgccgagtttcaggagcgtctgcaagaagatacgtcttttgggggcaacctcgggcgagcagtcttccaggccaagaagcgggttctcgaacctctcggtctggttgaggaaggcgctaagacggctcctggaaagaagagaccggtagagcagtcaccccaagaaccagactcatcctcgggcatcggcaaatcaggccagcagcccgctaaaaagagactcaattttggtcagactggcgactcagagtcagtccccgacccacaacctctcggagaacctccagaagccccctcaggtctgggacctaatacaatggcttcaggcggtggcgctccaatggcagacaataacgaaggcgccgacggagtgggtaattcctcgggaaattggcattgcgattccacatggctgggggacagagtcatcaccaccagcacccgaacctgggcattgcccacctacaacaaccacctctacaagcaaatctccaatggaacatcgggaggaagcaccaacgacaacacctactttggctacagcaccccctgggggtattttgacttcaacagattccactgccacttctcaccacgtgactggcagcgactcatcaacaacaactggggattccggccaaagagactcaacttcaagctgttcaacatccaggtcaaggaggttacgacgaacgaaggcaccaagaccatcgccaataaccttaccagcaccgtccaggtctttacggactcggagtaccagctaccgtacgtcctaggctctgcccaccaaggatgcctgccaccgtttcctgcagacgtcttcatggttcctcagtacggctacctgacgctcaacaatggaagtcaagcgttaggacgttcttctttctactgtctggaatacttcccttctcagatgctgagaaccggcaacaactttcagttcagctacactttcgaggacgtgcctttccacagcagctacgcacacagccagagtctagatcgactgatgaaccccctcatcgaccagtacctatactacctggtcagaacacagacaactggaactgggggaactcaaactttggcattcagccaagcaggccctagctcaatggccaatcaggctagaaactgggtacccgggccttgctaccgtcagcagcgcgtctccacaaccaccaaccaaaataacaacagcaactttgcgtggacgggagctgctaaattcaagctgaacgggagagactcgctaatgaatcctggcgtggctatggcatcgcacaaagacgacgaggaccgcttctttccatcaagtggcgttctcatatttggcaagcaaggagccgggaacgatggagtcgactacagccaggtgctgattacagatgaggaagaaattaaagccaccaaccctgtagccacagaggaatacggagcagtggccatcaacaaccaggccgctaacacgcaggcgcaaactggacttgtgcataaccagggagttattcctggtatggtctggcagaaccgggacgtgtacctgcagggccctatttgggctaaaatacctcacacagatggcaactttcacccgtctcctctgatgggtggatttggactgaaacacccacctccacagattctaattaaaaatacaccagtgccggcagatcctcctcttaccttcaatcaagccaagctgaactctttcatcacgcagtacagcacgggacaagtcagcgtggaaatcgagtgggagctgcagaaagaaaacagcaagcgctggaatccagagatccagtatacttcaaactactacaaatctacaaatgtggactttgctgtcaataccgaaggtgtttactctgagcctcgccccattggtactcgttacctcacccgtaatttgtaattgcctgttaatcaataaaccggttaattcgtttcagttgaactttggtctctgcg

SEQ ID NO: 134 - protein, 736 aa, Adeno-associated virus 9
MAADGYLPDWLEDNLSEGIREWWALKPGAPQPKANQQHQDNARGLVLPGYKYLGPGNGLDKGEPVNAADAAALEHDKAYDQQLKAGDNPYLKYNHADAEFQERLKEDTSFGGNLGRAVFQAKKRLLEPLGLVEEAAKTAPGKKRPVEQSPQEPDSSAGIGKSGAQPAKKRLNFGQTGDTESVPDPQPIGEPPAAPSGVGSLTMASGGGAPVADNNEGADGVGSSSGNWHCDSQWLGDRVITTSTRTWALPTYNNHLYKQISNSTSGGSSNDNAYFGYSTPWGYFDFNRFHCHFSPRDWQRLINNNWGFRPKRLNFKLFNIQVKEVTDNNGVKTIANNLTSTVQVFTDSDYQLPYVLGSAHEGCLPPFPADVFMIPQYGYLTLNDGSQAVGRSSFYCLEYFPSQMLRTGNNFQFSYEFENVPFHSSYAHSQSLDRLMNPLIDQYLYYLSKTINGSGQNQQTLKFSVAGPSNMAVQGRNYIPGPSYRQQRVSTTVTQNNNSEFAWPGASSWALNGRNSLMNPGPAMASHKEGEDRFFPLSGSLIFGKQGTGRDNVDADKVMITNEEEIKTTNPVATESYGQVATNHQSAQAQAQTGWVQNQGILPGMVWQDRDVYLQGPIWAKIPHTDGNFHPSPLMGGFGMKHPPPQILIKNTPVPADPPTAFNKDKLNSFITQYSTGQVSVEIEWELQKENSKRWNPEIQYTSNYYKSNNVEFAVNTEGVYSEPRPIGTRYLTRNL

SEQ ID NO: 135 - protein, 736 aa, Adeno-associated virus 9
MAADGYLPDWLEDNLSEGIREWWDLKPGAPKPKANQQKQDDGRGLVLPGYKYLGPFNGLDKGEPVNAADAAALEHDKAYDQQLKAGDNPYLRYNHADAEFQERLQEDTSFGGNLGRAVFQAKKRVLEPLGLVEEGAKTAPGKKRPVEQSPQEPDSSSGIGKSGQQPAKKRLNFGQTGDSESVPDPQPLGEPPEAPSGLGPNTMASGGGAPMADNNEGADGVGNSSGNWHCDSTWLGDRVITTSTRTWALPTYNNHLYKQISNGTSGGSTNDNTYFGYSTPWGYFDFNRFHCHFSPRDWQRLINNNWGFRPKRLNFKLFNIQVKEVTTNEGTKTIANNLTSTVQVFTDSEYQLPYVLGSAHQGCLPPFPADVFMVPQYGYLTLNNGSQALGRSSFYCLEYFPSQMLRTGNNFQFSYTFEDVPFHSSYAHSQSLDRLMNPLIDQYLYYLVRTQTTGTGGTQTLAFSQAGPSSMANQARNWVPGPCYRQQRVSTTTNQNNNSNFAWTGAAKFKLNGRDSLMNPGVAMASHKDDEDRFFPSSGVLIFGKQGAGNDGVDYSQVLITDEEEIKATNPVATEEYGAVAINNQAANTQAQTGLVHNQGVIPGMVWQNRDVYLQGPIWAKIPHTDGNFHPSPLMGGFGLKHPPPQILIKNTPVPADPPLTFNQAKLNSFITQYSTGQVSVEIEWELQKENSKRWNPEIQYTSNYYKSTNVDFAVNTEGVYSEPRPIGTRYLTRNL

SEQ ID NO: 136 - protein, 623 aa, Adeno-associated virus 9
MPGFYEIVIKVPSDLDEHLPGISDSFVNWVAEKEWELPPDSDMDRNLIEQAPLTVAEKLQRDFLVQWRRVSKAPEALFFVQFEKGESYFHLHVLVETTGVKSMVLGRFLSQIREKLVQTIYRGIEPTLPNWFAVTKTRNGAGGGNKVVDECYIPNYLLPKTQPELQWAWTNMEEYISACLNLAERKRLVAQHLTHVSQTQEQNKENLNPNSDAPVIRSKTSARYMELVGWLVDRGITSEKQWIQEDQASYISFNAASNSRSQIKAALDNAGKIMALTKSAPDYLVGPSLPVDITQNRIYRILQLNGYDPAYAGSVFLGWAQKKFGKRNTIWLFGPATTGKTNIAEAIAHAVPFYGCVNWTNENFPFNDCVDKMVIWWEEGKMTAKVVESAKAILGGSKVRVDQKCKSSAQIDPTPVIVTSNTNMCAVIDGNSTTFEHQQPLQDRMFKFELTRRLEHDFGKVTKQEVKEFFRWASDHVTEVAHEFYVRKGGASKRPAPDDADKSEPKRACPSVADPSTSDAEGAPVDFADRYQNKCSRHAGMLQMLLPCKTCERMNQNFNICFTHGVRDCSECFPGVSESQPVVRKRTYRKLCAIHHLLGRAPEIACSACDLVNVDLDDCVSEQ

SEQ ID NO: 137 - DNA, 2211 bp, Artificial Sequence
  source: /note="Description of Artificial Sequence: Synthetic polynucleotide"
atggctgccgatggttatcttccagattggctcgaggacaaccttagtgaaggaattcgcgagtggtgggctttgaaacctggagcccctcaacccaaggcaaatcaacaacatcaagacaacgctcgaggtcttgtgcttccgggttacaaataccttggacccggcaacggactcgacaagggggagccggtcaacgcagcagacgcggcggccctcgagcacgacaaggcctacgaccagcagctcaaggccggagacaacccgtacctcaagtacaaccacgccgacgccgagttccaggagcggctcaaagaagatacgtcttttgggggcaacctcgggcgagcagtcttccaggccaaaaagaggcttcttgaacctcttggtctggttgaggaagcggctaagacggctcctggaaagaagaggcctgtagagcagtctcctcaggaaccggactcctccgcgggtattggcaaatcgggtgcacagcccgctaaaaagagactcaatttcggtcagactggcgacacagagtcagtcccagaccctcaaccaatcggagaacctcccgcagccccctcaggtgtgggatctcttacaatggcttcaggtggtggcgcaccagtggcagacaataacgaaggtgccgatggagtgggtagttcctcgggaaattggcattgcgattcccaatggctgggggacagagtcatcaccaccagcacccgaacctgggccctgcccacctacaacaatcacctctacaagcaaatctccaacagcacatctggaggatcttcaaatgacaacgcctacttcggctacagcaccccctgggggtattttgacttcaacagattccactgccacttctcaccacgtgactggcagcgactcatcaacaacaactggggattccggcctaagcgactcaacttcaagctcttcaacattcaggtcaaagaggttacggacaacaatggagtcaagaccatcgccaataaccttaccagcacggtccaggtcttcacggactcagactatcagctcccgtacgtgctcgggtcggctcacgagggctgcctcccgccgttcccagcggacgttttcatgattcctcagtacgggtatctgacgcttaatgatggaagccaggccgtgggtcgttcgtccttttactgcctggaatatttcccgtcgcaaatgctaagaacgggtaacaacttccagttcagctacgagtttgagaacgtacctttccatagcagctacgctcacagccaaagcctggaccgactaatgaatccactcatcgaccaatacttgtactatctctcaaagactattaacggttctggacagaatcaacaaacgctaaaattcagtgtggccggacccagcaacatggctgtccagggaagaaactacatacctggacccagctaccgacaacaacgtgtctcaaccactgtgactcaaaacaacaacagcgaatttgcttggcctggagcttcttcttgggctctcaatggacgtaatagcttgatgaatcctggacctgctatggccagccacaaagaaggagaggaccgtttctttcctttgtctggatctttaatttttggcaaacaaggaactggaagagacaacgtggatgcggacaaagtcatgataaccaacgaagaagaaattaaaactactaacccggtagcaacggagtcctatggacaagtggccacaaaccaccagagtgcccaagcacaggcgcagaccggctgggttcaaaaccaaggaatacttccgggtatggtttggcaggacagagatgtgtacctgcaaggacccatttgggccaaaattcctcacacggacggcaactttcacccttctccgctgatgggagggtttggaatgaagcacccgcctcctcagatcctcatcaaaaacacacctgtacctgcggatcctccaacggccttcaacaaggacaagctgaactctttcatcacccagtattctactggccaagtcagcgtggagatcgagtgggagctgcagaaggaaaacagcaagcgctggaacccggagatccagtacacttccaactattacaagtctaataatgttgaatttgctgttaatactgaaggtgtatatagtgaaccccgccccattggcaccagatacctgactcgtaatctgtaa

SEQ ID NO: 138 - protein, 736 aa, Artificial Sequence; identical to SEQ ID NO: 134
  source: /note="Description of Artificial Sequence: Synthetic polypeptide"

SEQ ID NO: 139 - DNA, 2460 bp, Artificial Sequence
  source: /note="Description of Artificial Sequence: Synthetic polynucleotide"
ggtaattcctccggaaattggcattgcgattccacatggctgggcgaccgagtcattaccaccagcacccggacttgggccctgcccacctacaacaaccacctctacaagcaaatctccagccaatcgggtgccaccaacgacaaccactacttcggctacagcaccccttgggggtattttgatttcaacagattccactgccatttctcaccacgtgactggcagcgactcatcaacaacaactggggattcatggctgccgatggttatcttccagattggctcgaggacactctctctgaaggaatcagacagtggtggaagctcaaacctggcccaccaccgccgaaacctaaccaacaacaccgggacgacagtaggggtcttgtgcttcctgggtacaagtacctcggacccttcaacggactcgacaaaggagagccggtcaacgaggcagacgccgcggccctcgagcacgacaaagcctacgaccaccagctcaagcaaggggacaacccgtacctcaaatacaaccacgcggacgctgaatttcaggagcgtcttcaagaagatacgtctttcgggggcaacctcgggcgagcagtcttccaggccaaaaagagggtactcgagcctcttggtctggttgaggaagctgttaagacggctcctggaaaaaagagacctatagagcagtctcctgcagaaccggactcttcctcgggcatcggcaaatcaggccagcagcccgctaagaaaagactcaattttggtcagactggcgacacagagtcagtcccagaccctcaaccaatcggagaaccccccgcagccccctctggtgtgggatctaatacaatggcttcaggcggtggggcaccaatggcagacaataacgaaggcgccgacggagtgggtaattcctcgggaaattggcattgcgattccacatggatgggcgacagagttatcaccaccagcacaagaacctgggccctccccacctacaataatcacctctacaagcaaatctccagcgaatcgggagccaccaacgacaaccactacttcggctacagcaccccctgggggtattttgactttaacagattccactgtcacttctcaccacgtgactggcagcgactcatcaacaacaactggggatttagacccaagaaactcaatttcaagctcttcaacatccaagtcaaggaggtcacgcagaatgatggaaccacgaccatcgccaataaccttaccagcacggtgcaggtcttcacagactctgagtaccagctgccctacgtcctcggttcggctcaccagggctgccttccgccgttcccagcagacgtcttcatgattcctcagtacggctacttgactctgaacaatggcagccaagcggtaggacgttcttcattctactgtctagagtattttccctctcagatgctgaggacgggaaacaacttcaccttcagctacacttttgaagacgtgcctttccacagcagctacgcgcacagccagagtctggatcggctgatgaatcctctcattgaccagtacctgtattacctgagcaaaactcagggtacaagtggaacaacgcagcaatcgagactgcagttcagccaagctgggcctagctccatggctcagcaggccaaaaactggctaccgggacccagctaccgacagcagcgaatgtctaagacggctaatgacaacaacaacagtgaatttgcttggactgcagccaccaaatattacctgaatggaagaaattctctggtcaatcccgggcccccaatggccagtcacaaggacgatgaggaaaagtatttccccatgcacggaaatctcatctttggaaaacaaggcacaggaactaccaatgtggacattgaatcagtgcttattacagacgaagaagaaatcagaacaactaatcctgtggctacagaacaatacggacaggttgccaccaaccatcagagtcagaacaccacagcttcctatggaagtgtggacagccagggaatcttacctggaatggtgtggcaggaccgcgatgtctatcttcaaggtcccatttgggccaaaactcctcacacggacggacactttcatccttctccgctcatgggaggctttggactgaaacaccctcctccccagatcctgatcaaaaacacacctgtgccagcgaatcccgcgaccactttcactcctggaaagtttgcttcgttcattacccagtattccaccggacaggtcagcgtggaaatagagtgggagctgcagaaagaaaacagcaaacgctggaacccagaaattcagtacacctccaactacaacaagtcggtgaatgtggagtttaccgtggacgcaaacggtgtttattctgaaccccgccctattggcactcgttaccttacccggaacttg

SEQ ID NO: 140 - DNA, 3123 bp, Artificial Sequence
  source: /note="Description of Artificial Sequence: Synthetic polynucleotide"
gaattcgccctttctacggctgcgtcaactggaccaatgaaaactttcccttcaacgattgcgtcgacaagatggtgatctggtgggaggagggaaagatgaccgccaaggtcgtggaatctgccaaagccattctgggtggaggcaaggttcgtgtggaccagaaatgcaagtcttcggcccagatcgacccgactccggtgattgtcacctctaacaccaacatgtgcgccgtgattgacggaaactcgaccaccttcgagcaccagcagccgttgcaagaccggatgttcaaatttgaacttacccgccgtttggatcatgactttgggaaggtcaccaagcaggaagtcaaagactttttccggtgggctcaagatcacgtgactgaggtggagcatgagttctacgtcaaaaagggtggagccaagaaaaggcccgcccccgatgatgtatatataaatgagcccaagcgggcgcgcgagtcagttgcgcagccatcgacgtcagacgcggaagcttcgataaactacgcggacaggtaccaaaacaaatgttctcgtcacgtgggcatgaatctgatgctgtttccctgtcgacaatgcgaaagaatgaatcagaattcaaatatctgcttcacacacgggcaaaaagactgtttggaatgctttcccgtgtcagaatctcaacccgtttctgtcgtcagaaaaacgtatcagaaactttgttacattcatcatatcatgggaaaagtaccagacgcctgcactgcctgcgacctggtaaatgtggacttggatgactgtatttctgagcaataaatgacttaaatcaggtatggctgctgacggttatcttccagattggctcgaggacactctctctgaaggaatcagacagtggtggaagctcaaacctggcccaccaccgccgaaacctaaccaacaacaccgggacgacagtaggggtcttgtgcttcctgggtacaagtacctcggacccttcaacggactcgacaaaggagagccggtcaacgaggcagacgccgcggccctcgagcacgacaaagcctacgaccaccagctcaagcaaggggacaacccgtacctcaaatacaaccacgcggacgctgaatttcaggagcgtcttcaagaagatacgtctttcgggggcaacctcgggcgagcagtcttccaggccaaaaagagggtactcgagcctcttggtctggttgaggaagctgttaagacggctcctggaaaaaagagacctatagagcagtctcctgcagaaccggactcttcctcgggcatcggcaaatcaggccagcagcccgctaagaaaagactcaattttggtcagactggcgacacagagtcagtcccaggccctcaaccaatcggagaaccccccgcagccccctctggtgtgggatctaatacaatggcttcaggcggtggggcaccaatggcagacaataacgaaggcgccgacggagtgggtaattcctcgggaaattggcattgcgattccacatggatgggcgacagagttatcaccaccagcacaagaacctgggccctccccacctacaataatcacctctacaagcaaatctccagcgaatcgggagccaccaacgacaaccactacttcggctacagcaccccctgggggtattttgactttaacagattccactgtcacttctcaccacgtgactggcagcgactcatcaacaacaactggggatttagacccaagaaactcaatttcaagctcttcaacatccaagtcaaggaggtcacgcagaatgatggaaccacgaccatcgccaataaccttaccagcgcggtgcaggtcttcacagactctgagtaccagctgccctacgtcctcggttcggctcaccagggctgccttccgccgttcccagcagacgtcttcatgattcctcagtacggctacttgactctgaacaatggcagccaagcggtaggacgttcttcattctactgtctagagtattttccctctcagatgctgaggacgggaaacaacttcaccttcagctacacttttgaagacgtgcctttccacagcagctacgcgcacagccagagtctggatcggctgatgaatcctctcattgaccagtacctgtattacctgagcaaaactcagggtacaagtggaacaacgcagcaatcgagactgcagttcagccaagctgggcctagctccatggctcagcaggccaaaaactggctaccgggacccagctaccgacagcagcgaatgtctaagacggctaatgacaacaacaacagtgaatttgcttggactgcagccaccaaatattacctgaatggaagaaattctctggtcaatcccgggcccccagtggccagtcacaaggacgatgaggaaaagtatttccccatgcacggaaatctcatctttggaaaacaaggcacaggaactaccaatgtggacattgaatcagtgcttattacagacgaagaagaaatcagaacaactaatcctgtggctacagaacaatacggacaggttgccaccaaccatcagagtcagaacaccacagcttcctatggaagtgtggacagccagggaatcttacctggaatggtgtggcaggaccgcgatgtctatcttcaaggtcccatttgggccaaaactcctcacacggacggacactttcatccttctccgctcatgggaggctttggactgaaacaccctcctccccagatcctgatcaaaaacacacctgtgccagcgaatcccgcgaccactttcactcctggaaagtttgcttcgttcattacccagtattccacctgacaggtcagcgtggaaatagagtgggagctgcagaaagaaaacagcaaacgctggaacccagaaattcagtacacctccaactacaacaagtcggtgaatgtggagtttaccgtggacgcaaacggtgtttattctgaaccccgccctattggcactcgttaccttacccggaacttgtaatttcctgttaatgaataagccgatttatgcgtttcagttgaactttggtctctgcgaagggcgaattcgtttaaacct

SEQ ID NO: 141 - protein, 735 aa, Artificial Sequence
  source: /note="Description of Artificial Sequence: Synthetic polypeptide"
MAADGYLPDWLEDTLSEGIRQWWKLKPGPPPPKPNQQHRDDSRGLVLPGYKYLGPFNGLDKGEPVNEADAAALEHDKAYDHQLKQGDNPYLKYNHADAEFQERLQEDTSFGGNLGRAVFQAKKRVLEPLGLVEEAVKTAPGKKRPIEQSPAEPDSSSGIGKSGQQPAKKRLNFGQTGDTESVPGPQPIGEPPAAPSGVGSNTMASGGGAPMADNNEGADGVGNSSGNWHCDSTWMGDRVITTSTRTWALPTYNNHLYKQISSESGATNDNHYFGYSTPWGYFDFNRFHCHFSPRDWQRLINNNWGFRPKKLNFKLFNIQVKEVTQNDGTTTIANNLTSAVQVFTDSEYQLPYVLGSAHQGCLPPFPADVFMIPQYGYLTLNNGSQAVGRSSFYCLEYFPSQMLRTGNNFTFSYTFEDVPFHSSYAHSQSLDRLMNPLIDQYLYYLSKTQGTSGTTQQSRLQFSQAGPSSMAQQAKNWLPGPSYRQQRMSKTANDNNNSEFAWTAATKYYLNGRNSLVNPGPPVASHKDDEEKYFPMHGNLIFGKQGTGTTNVDIESVLITDEEEIRTTNPVATEQYGQVATNHQSQNTTASYGSVDSQGILPGMVWQDRDVYLQGPIWAKTPHTDGHFHPSPLMGGFGLKHPPPQILIKNTPVPANPATTFTPGKFASFITQYSTGQVSVEIEWELQKENSKRWNPEIQYTSNYNKSVNVEFTVDANGVYSEPRPIGTRYLTRNL

SEQ ID NO: 142 - DNA, 3123 bp, Artificial Sequence
  source: /note="Description of Artificial Sequence: Synthetic polynucleotide"
gaattcgccctttctacggctgcgtcaactggaccaatgaaaactttcccttcaacgattgcgtcgacaagatggtgatctggtgggaggagggaaagatgaccgccaaggtcgtggaatctgccaaagccattctgggtggaagcaaggttcgtgtggaccagaaatgcaagtcttcggcccagatcgacccgactccggtgattgtcacctctaacaccaacatgtgcgccgtgattgacggaaactcgaccaccttcgagcaccagcagccgttgcaagaccggatgttcaaatttgaacttacccgccgtttggatcatgactttgggaaggtcaccaagcaggaagtcaaagactttttccggtgggctcaagatcacgtgactgaggtggagcatgagttctacgtcaaaaagggtggagccaagaaaaggcccgcccccgatgatgtatatataaatgagcccaagcgggcgcgcgagtcagttgcgcagccatcgacgtcagacgcggaagcttcgataaactacgcgggcaggtaccaaaacaaatgttctcgtcacgtgggcatgaatctgatgctgtttccctgtcgacaatgcgaaagaatgaatcagaattcaaatatctgcttcacacacgggcaaaaagactgtttggaatgctttcccgtgtcagaatctcaacccgtttctgtcgtcagaaaaacgtatcagaaactttgttacattcatcatatcatgggaaaagaaccagacgcctgcactgcctgcgacctggtaaatgtggacttggatgactgtatttctgagcaataaatgacttaaatcaggtatggctgctgacggttatcttccagattggctcgaggacactctctctgaaggaatcagacagtggtggaagctcaaacctggcccaccaccgccgaaacctaaccaacaacaccgggacgacagtaggggtcttgtgcttcctgggtacaagtacctcggacccttcaacggactcgacaaaggagagccggtcaacgaggcagacgccgcggccctcgagcacgacaaagcctacgaccaccagctcaagcaaggggacaacccgtacctcaaatacaaccacgcggacgctgaatttcaggagcgtcttcaagaagatacgtctttcgggggcaacctcgggcgagcagtcttccaggccaaaaagagggtactcgagcctcttggtctggttgaggaagctgttaagacggctcctggaaaaaagagacctatagagcagtctcctgcagaaccggactcttcctcgggcatcggcgaatcaggccagcagcccgctaagaaaagactcaattttggtcagactggcgacacagagtcagtcccagaccctcaaccaatcggagaaccccccgcagccccctctggtgtgggatctaatacaatggcttcaggcggtggggcaccaatggcagacgataacgaaggcgccgacggagtgggtaattcctcgggaaattggcattgcgattccacatggatgggcgacagagttatcaccaccagcacaagaacctgggccctccccacctacaataatcacctctacaagcaaatctccagcgaatcgggagccaccaacgacaaccactacttcggctacagcaccccctgggggtattttgactttaacagattccactgtcacttctcaccacgtgactggcagcgactcatcaacaacaactggggatttagacccaagaaactcaatttcaagctcttcaacatccaagtcaaggaggtcacgcagaatgatggaaccacgaccatcgccaataaccttaccagcacggtgcaggtcttcacagactctgagtaccagctgccctacgtcctcggttcggctcaccagggctgccttccgccgttcccagcagacgtcttcatgattcctcagtacggctacttgactctgaacaatggcagccaagcggtaggacgttcttcattctactgtctagagtattttccctctcagatgctgaggacgggaaacaacttcaccttcagctacacttttgaagacgtgcctttccacagcagctacgcgcacagccagagtctggatcggctgatgaatcctctcattgaccagtacctgtattacctgagcaaaactcagggtacaagtggaacaacgcagcaatcgagactgcagttcagccaagctgggcctagctccatggctcagcaggccaaaaactggctaccgggacccagctaccgacagcagcgaatgtctaagacggctaatgacaacaacaacagtgaatttgcttggactgcagccaccaaatattacctgaatggaagaaattctctggtcaatcccgggcccccaatggccagtcacaaggacgatgaggaaaagtatttccccatgcacggaaatctcatctttggaaaacaaggcacaggaactaccaatgtggacattgaatcagtgcttattacagacgaagaagaaatcagaacaactaatcctgtggctacagaacaatacggacaggttgccaccaaccatcagagtcaggacaccacagcttcctatggaagtgtggacagccagggaatcttacctggaatggtgtggcaggaccgcgatgtctatcttcaaggtcccatttgggccaaaactcctcacacggacggacactttcatccttctccgctcatgggaggctttggactgaaacaccctcctccccagatcctgatcaaaaacacacctgtgccagcgaatcccgcgaccactttcactcctggaaagtttgcttcgttcattacccagtattccaccggacaggtcagcgtggaaatagagtgggagctgcagaaagaaaacagcaaacgctggaacccagaaattcagtacacctccaactacaacaagtcggtgaatgtggagtttaccgtggacgcaaacggtgtttattctgaaccccgccctattggcactcgttaccttacccggaacttgtaatttcctgttaatgaataaaccgatttatgcgtttcagttgaactttggtctctgcgaagggcgaattcgcggccgcta

SEQ ID NO: 143 - protein, 735 aa, Artificial Sequence
  source: /note="Description of Artificial Sequence: Synthetic polypeptide"
MAADGYLPDWLEDTLSEGIRQWWKLKPGPPPPKPNQQHRDDSRGLVLPGYKYLGPFNGLDKGEPVNEADAAALEHDKAYDHQLKQGDNPYLKYNHADAEFQERLQEDTSFGGNLGRAVFQAKKRVLEPLGLVEEAVKTAPGKKRPIEQSPAEPDSSSGIGESGQQPAKKRLNFGQTGDTESVPDPQPIGEPPAAPSGVGSNTMASGGGAPMADDNEGADGVGNSSGNWHCDSTWMGDRVITTSTRTWALPTYNNHLYKQISSESGATNDNHYFGYSTPWGYFDFNRFHCHFSPRDWQRLINNNWGFRPKKLNFKLFNIQVKEVTQNDGTTTIANNLTSTVQVFTDSEYQLPYVLGSAHQGCLPPFPADVFMIPQYGYLTLNNGSQAVGRSSFYCLEYFPSQMLRTGNNFTFSYTFEDVPFHSSYAHSQSLDRLMNPLIDQYLYYLSKTQGTSGTTQQSRLQFSQAGPSSMAQQAKNWLPGPSYRQQRMSKTANDNNNSEFAWTAATKYYLNGRNSLVNPGPPMASHKDDEEKYFPMHGNLIFGKQGTGTTNVDIESVLITDEEEIRTTNPVATEQYGQVATNHQSQDTTASYGSVDSQGILPGMVWQDRDVYLQGPIWAKTPHTDGHFHPSPLMGGFGLKHPPPQILIKNTPVPANPATTFTPGKFASFITQYSTGQVSVEIEWELQKENSKRWNPEIQYTSNYNKSVNVEFTVDANGVYSEPRPIGTRYLTRNL

SEQ ID NO: 144 - DNA, 3113 bp, Artificial Sequence
  source: /note="Description of Artificial Sequence: Synthetic polynucleotide"
gaattcgccctttctacggctgcgtcaactggaccaatgaaaactttcccttcaacgattgcgtcgacaagatggtgatctggtgggaggagggaaagatgaccgccaaggtcgtggaatctgccaaagccattctgggtggaagcaaggttcgtgtggaccagaaatgcaagtcttcggcccagatcgacccgactccggtgattgtcacctctaacaccaacatgtgcgccgtgattgacggaaactcgaccaccttcgagcaccagcagccgttgcaagaccggatgttcaaatttgaacttacccgccgtttggatcatgactttgggaaggtcaccaagcaggaagtcaaagactttttccggtgggctcaagatcacgtgactgaggtggagcatgagttctacgtcaaaaagggtggagccaagaaaaggcccgcccccgatgatgtatatataaatgagcccaagcgggcgcgcgagtcagttgcgcagccatcgacgtcagacgcggaagcttcgataaactacgcggacaggtaccaaaacaaatgttctcgtcacgtgggcatgaatctgatgctgtttccctgtcgacaatgcgaaagaatgaatcagaattcaaatatctgcttcacacacgggcaaaaagactgtttggaatgctttcccgtgtcagaatctcaacccgttcctgtcgtcagaaaaacgtatcagaaactttgttacattcatcatatcatgggaaaagtaccagacgcctgcactgcctgcgacctggtaaatgtggacttggatgactgtatttctgagcaataaatgacttaaatcaggtatggctgctgacggttatcttccagattggctcgaggacactctctctgaaggaatcagacagtggtggaagctcaaacctggcccaccaccgccgaaacctaaccaacaacaccgggacgacagtaggggtcttgtgcttcctgggtacaagtacctcggacccttcaacggactcgacaaaggagagccggtcaacgaggcagacgccgcggccctcgagcacgacaaagcctacgaccaccagctcaagcaaggggacaacccgtacctcaaatacaaccacgcggacgctgaatttcaggagcgtcttcaagaagatacgtctttcgggggcaacctcgggcgagcagtcttccaggccaaaaagagggtactcgagcctcttggtctggttgaggaagctgttaagacggctcctggaaaaaagagacctatagagcagtctcctgcagaaccggactcttcctcgggcatcggcaaatcaggccagcagcccgctaagaaaagactcaattttggtcagactggcgacacagagtcagtcccagaccctcaaccaatcggagaaccccccgcagccccctctggtgtgggatctaatacaatggcttcaggcggtggggcaccaatggcagacaataacgaaggcgccgacggagtgggtaattcctcgggaaattggcattgcgattccacatggatgggcgacagagttatcaccaccagcacaagaacctgggccctccccacctacaataatcacctctacaagcaaatctccagcgaatcgggagccaccaacgacaaccactacttcggctacagcaccccctgggggtattttgactttaacagattccactgtcacttctcaccacgtgactggcagcgactcatcaataacaactggggatttagacccaagaaactcaatttcaagctcttcaacatccaagtcaaggaggtcacgcagaatgatggaaccacgaccatcgccaataaccttaccagcacggtgcaggtcttcacagactctgagtaccagctgccctacgtcctcggttcggctcaccagggctgccttccgccgttcccagcagacgtcttcatgattcctcagtacggctacttgactctgaacaatggcagccaagcggtaggacgttcttcattctactgtctagagtattttccctctcagatgctgaggacgggaaacaacttcaccttcagctacacttttgaagacgtgcctttccacagcagctacgcgcacagccagagtctggatcggctgatgaatcctctcattgaccagtacctgtattacctgagcaaaactcagggtacaagtggaacaacgcagcaatcgagactgcagttcaaccaagctgggcctagctccatggctcagcaggccaaaaactggctaccgggacccagctaccgacagcagcgaatgtctaagacggctaatgacaacaacaacagtgaatttgcttggactgcagccaccaaatattacccgaatggaagaaattctctggtcaatcccgggcccccaatggccagtcacaaggacgatgaggaaaagtatttccccatgcacggaaatctcatctttggaaaacaaggcacaggaactaccaatgtggacattgaatcagtgcttattacagacgaagaagaaatcagaacgactaatcctgtggctacagaacaatacggacaggttgccaccaaccgtcagagtcagaacaccacagcttcctatggaagtgtggacagccagggaatcttacctggaatggtgtggcaggaccgcgatgtctatcttcaaggtcccatttgggccaaaactcctcacacggacggacactttcatccttctccgctcatgggaggctttggactgaaacaccctcctccccagatcctgatcaaaaacacacctgtgccagcgaatcccgcgaccactttcactcctggaaagtttgcttcgttcattacccagtattccaccggacaggtcagcgtggaaatagagtgggagctgcagaaagaaaacagcaaacgctggaacccggaaattcagtacacctccaactacaacaagtcggtgaatgtggagtttaccgtggacgcaaacggtgtttattctgaaccccgccctattggcactcgttaccttacccggaacttgtaatttcctgttaatgaataaaccgatttatgcgtttcagttgaactttggtctctgcgaagggcgaattc

SEQ ID NO: 145 - protein, 735 aa, Artificial Sequence
  source: /note="Description of Artificial Sequence: Synthetic polypeptide"
MAADGYLPDWLEDTLSEGIRQWWKLKPGPPPPKPNQQHRDDSRGLVLPGYKYLGPFNGLDKGEPVNEADAAALEHDKAYDHQLKQGDNPYLKYNHADAEFQERLQEDTSFGGNLGRAVFQAKKRVLEPLGLVEEAVKTAPGKKRPIEQSPAEPDSSSGIGKSGQQPAKKRLNFGQTGDTESVPDPQPIGEPPAAPSGVGSNTMASGGGAPMADNNEGADGVGNSSGNWHCDSTWMGDRVITTSTRTWALPTYNNHLYKQISSESGATNDNHYFGYSTPWGYFDFNRFHCHFSPRDWQRLINNNWGFRPKKLNFKLFNIQVKEVTQNDGTTTIANNLTSTVQVFTDSEYQLPYVLGSAHQGCLPPFPADVFMIPQYGYLTLNNGSQAVGRSSFYCLEYFPSQMLRTGNNFTFSYTFEDVPFHSSYAHSQSLDRLMNPLIDQYLYYLSKTQGTSGTTQQSRLQFNQAGPSSMAQQAKNWLPGPSYRQQRMSKTANDNNNSEFAWTAATKYYPNGRNSLVNPGPPMASHKDDEEKYFPMHGNLIFGKQGTGTTNVDIESVLITDEEEIRTTNPVATEQYGQVATNRQSQNTTASYGSVDSQGILPGMVWQDRDVYLQGPIWAKTPHTDGHFHPSPLMGGFGLKHPPPQILIKNTPVPANPATTFTPGKFASFITQYSTGQVSVEIEWELQKENSKRWNPEIQYTSNYNKSVNVEFTVDANGVYSEPRPIGTRYLTRNL

SEQ ID NO: 146 - DNA, 3122 bp, Artificial Sequence
  source: /note="Description of Artificial Sequence: Synthetic polynucleotide"
agcggccgcgaattcgccctttctacggctgcgtcaactggaccaatgaaaactttcccttcaacgattgcgtcgacaagatggtgatctggtgggaggagggaaagatgaccgccaaggtcgtggaatctgccaaagccattctgggtggaagcaaggttcgtgtggaccagaaatgcaggtcttcggcccagatcgacccgactccggtgattgtcacctctaacaccaacatgtgcgccgtgattgacggaaactcgaccaccttcgagcaccagcagccgttgcaagaccggatgttcaaatttgaacttacccgccgtttggatcatgactttgggaaggtcaccaagcaggaagtcaaagactttttccggtgggctcaagatcacgtgactgaggtggagcatgagttctacgtcaaaaagggtggagccaagaaaaggcccgcccccgatgatgtatatataaatgagcccaagcgggcgcgcgagtcagttgcgcagccatcgacgtcagacgcggaagcttcgataaactacgcggacaggtaccaaaacaaatgttctcgtcacgtgggcatgaatctgatgctgtttccctgtcgacaatgcgaaagaatgaatcagaattcaaatatctgcttcacacacgggcaaaaagactgtttggaatgctttcccgtgtcagaatctcaacccgtttctgtcgtcagaaaaacgtatcagaaactttgttacattcatcatatcatgggaaaagtaccagacgcctgcactgcctgcgacctggtaaatgtggacttggatgactgtatttctgagcaataaatgacttaaatcaggtatggctgctgacggttatcttccagattggctcgaggacactctctctgaaggaatcagacagtggtggaagctcaaacctggcccaccaccgccgaaacctaaccaacaacaccgggacgacagtaggggtcttgtgcttcctgggtacaagtacctcggacccttcaacggactcgacaaaggagagccggtcaacgaggcagacgccgcggccctcgagcacgacaaagcctacgaccaccagctcaagcaaggggacaacccgtacctcaaatacaaccacgcggacgctgaatttcaggagcgtcttcaagaagatacgtctttcgggggcaacctcgggcgagcagtcttccaggccaaaaagagggtactcgagcctcttggtctggttgaggaagctgttaagacggctcctggaaaaaagagacctatagagcagtctcctgcagaaccggactcttcctcgggcatcggcaaatcaggccagcagcccgctaagaaaagactcaattttggtcagactggcgacacagagtcagtcccagaccctcaaccaatcggagaaccccccgcagccccctctggtgtgggatctaatacaatggcttcaggcggtggggcaccaatggcagacaataacgaaggcgccgacggagtgggtaattcctcgggaaattggcattgcgattccacatggatgggcgacagagttatcaccaccagcacaagaacctgggccctccccacctacaataatcgcctctacaagcaaatctccagcgaatcgggagccaccaacgacaaccactacttcggctacagcaccccctgggggtattttgactttaacagattccactgtcacttctcaccacgtgactggcagcgactcatcaacaacaactggggatttagacccaagaaactcaatttcaagctcttcaacatccaagtcaaggaggtcacgcagaatgatggaaccacgaccatcgccaataaccttaccagcacggtgcaggtcttcacagactctgagtaccagctgccctacgtcctcggttcggctcaccagggctgccttccgccgttcccagcagacgtcttcatgattcctcagtacggctacttgactctgaacaatggcagccaagcggtaggacgttcttcattctactgtctagagtattttccctctcagatgctgaggacgggaaacaacttcaccttcagctacacttttgaagacgtgcctttccacagcagctacgcgcacagccagagtctggatcggctgatgaatcctctcattgaccagtacctgtattacctgagcaaaactcagggtacaagtggaacaacgcagcaatcgagactgcagttcagccaagctgggcctagctccatggctcagcaggccaaaaactggctaccgggacccagctaccgacagcagcgaatgtctaagacggctaatgacaacaacaacagtgaatttgcttggactgcagccaccaaatattacctgaatggaagaaattctctggtcaatcccgggcccccaatggccagtcacaaggacgatgaggaaaagtatttccccatgcacggaaatctcatctttggaaaacaaggcacaggaactaccaatgtggacattgaatcagtgcttattacagacgaagaagaaatcagaacaactaatcctgtggctacagaacaatacggacaggttgccaccaaccatcagagtcagaacaccacagcttcctatggaagtgtggacagccagggaatcttacctggaatggtgtggcaggaccgcgatgtctatcttcaaggtcccatttgggccaaaactcctcacacggacggacactttcatccttctccgctcatgggaggctttggactgaaacaccctcctccccagatcctgatcaaaaacacacctgtgccagcgaatcccgcgaccactttcactcctggaaagtttgcttcgttcattacccagtattccaccggacaggtcagcgtggaaatagagtgggagctgcagaaagaaaacagcaaacgctggaacccagaaattcagtacacctccaactacaacaagtcggtgaatgtggagtttaccgtggacgcaaacggtgtttattctgaaccccgccctattggcactcgttaccttacccggaacttgtaatttcctgttaatgaataaaccgatttatgcgtttcagttgaactttggtctctgcgaagggcgaattc

SEQ ID NO: 147 - protein, 735 aa, Artificial Sequence
  source: /note="Description of Artificial Sequence: Synthetic polypeptide"
MAADGYLPDWLEDTLSEGIRQWWKLKPGPPPPKPNQQHRDDSRGLVLPGYKYLGPFNGLDKGEPVNEADAAALEHDKAYDHQLKQGDNPYLKYNHADAEFQERLQEDTSFGGNLGRAVFQAKKRVLEPLGLVEEAVKTAPGKKRPIEQSPAEPDSSSGIGKSGQQPAKKRLNFGQTGDTESVPDPQPIGEPPAAPSGVGSNTMASGGGAPMADNNEGADGVGNSSGNWHCDSTWMGDRVITTSTRTWALPTYNNRLYKQISSESGATNDNHYFGYSTPWGYFDFNRFHCHFSPRDWQRLINNNWGFRPKKLNFKLFNIQVKEVTQNDGTTTIANNLTSTVQVFTDSEYQLPYVLGSAHQGCLPPFPADVFMIPQYGYLTLNNGSQAVGRSSFYCLEYFPSQMLRTGNNFTFSYTFEDVPFHSSYAHSQSLDRLMNPLIDQYLYYLSKTQGTSGTTQQSRLQFSQAGPSSMAQQAKNWLPGPSYRQQRMSKTANDNNNSEFAWTAATKYYLNGRNSLVNPGPPMASHKDDEEKYFPMHGNLIFGKQGTGTTNVDIESVLITDEEEIRTTNPVATEQYGQVATNHQSQNTTASYGSVDSQGILPGMVWQDRDVYLQGPIWAKTPHTDGHFHPSPLMGGFGLKHPPPQILIKNTPVPANPATTFTPGKFASFITQYSTGQVSVEIEWELQKENSKRWNPEIQYTSNYNKSVNVEFTVDANGVYSEPRPIGTRYLTRNL

SEQ ID NO: 148 - DNA, 3121 bp, Artificial Sequence
  source: /note="Description of Artificial Sequence: Synthetic polynucleotide"
gaattcgcccttcgcagagaccaaagttcaactgaaacgaatcaaccggtttattgattaacaagcaattacagattacgggtgaggtaacgggtgccgatggggcgaggctcagaataagtgccatctgtgttaacagcaaagtccacatttgtagatttgtagtagttggaagtgtattgaatctctgggttccagcgtttgctgttttctttctgcagctcccattcaatttccacgctgacctgtccggtgctgtactgcgtgatgaacgacgccagcttagcttgactgaaggtagttggaggatccgcgggaacaggtgtattcttaatcaggatctgaggaggcgggtgtttcagtccaaagccccccatcagcggcgagggatgaaagtttccgtccgtgtgaggaatcttggcccagataggaccctgcaggtacacgtcccggttctgccagaccatgccaggtaaggctccttgactgttgacggcccctacaataggagcggcgttttgctgttgcaggttatcggccaccacgccgtactgttctgtggccactgggttggtggttttaatttcttcctcactggttagcataacgctgctatagtccacgttgccttttccagctccctgtttcccaaacattaagactccgctggacggaaaaaatcgctcttcgtcgtccttgtgggttgccatagcgacaccgggatttaccagagagtctctgccattcagatgatacttggtggcaccggtccaggcaaagttgctgttgttattttgcgacagtgtcgtggagacgcgttgctgccggtagcagggcccgggtagccagtttttggcctgagccgacatgttattaggcccggcctgagaaaatagcaactgctgagttcctgcggtacctcccgtggactgagtccgagacaggtagtacaggtactggtcgatgagggggttcatcagccggtccaggctttggctgtgcgcgtagctgctgtgaaaaggcacgtcctcaaactggtagctgaactcaaagttgttgcccgttctcagcatttgagaaggaaagtactccaggcagtagaaggaggaacggcccacggcctgactgccattgttcagagtcaggtacccgtactgaggaatcatgaagacgtccgccgggaacggaggcaggcagccctggcgcgcagagccgaggacgtacgggagctggtattccgagtccgtaaagacctgaatcgtgctggtaaggttattggcgatggtcttggtgccttcattctgcgtgacctccttgacctggatgttgaagagcttgaagttgagtctcttgggccggaatccccagttgttgttgatgagtcgctgccagtcacgtggtgagaagtggcagtggaatctgttaaagtcaaaatacccccagggggtgctgtagccgaagtaggtgttgtcgttggtgcttcctcccgaagtcccgttggagatttgcttgtagaggtggttgttgtaggtggggagggcccaggttcgggtgctggtggtgatgactctgtcgcccagccatgtggaatcgcaatgccaatttcctgaggaactacccactccgtcggcgccttcgttattgtctgccattggagcgccaccgcctgcagccattgtaccagatcccagaccagaggggcctgcggggggttctccgattggttgagggtcgggcactgactctgagtcgccagtctgcccaaagttgagtctctttttcgcgggctgctggcctttcttgccgatgcccgtagtggagtctggagaacgctggggtgatggctctaccggtctcttctttccaggagccgtcttagcgccttcctcaaccagaccgagaggttcgagaacccgcttcttggcctggaagactgctcgtccgaggttgcccccaaaagacgtatcttcttgcagacgctcctgaaactcggcgtcggcgtggttataccgcaggtacggattgtcacccgctttgagctgctggtcgtaggccttgtcgtgctcgagggccgctgcgtccgccgcgttgacgggctcccccttgtcgagtccgttgaagggtccgaggtacttgtagccaggaagcaccagaccccggccgtcgtcctgcttttgctggttggctttgggcttcggggctccaggtttcagcgcccaccactcgcgaatgccctcagagaggttgtcctcgagccaatctggaagataaccatcggcagccatacctgatctaaatcatttattgttcaaagatgcagtcatccaaatccacattgaccagatcgcaggcagtgcaagcgtctggcacctttcccatgatatgatgaatgtagcacagtttctgatacgcctttttgacgacagaaacgggttgagattctgacacgggaaagcactctaaacagtctttctgtccgtgagtgaagcagatatttgaattctgattcattctctcgcattgtctgcagggaaacagcatcagattcatgcccacgtgacgagaacatttgttttggtacctgtccgcgtagttgatcgaagcttccgcgtctgacgtcgatggctgcgcaactgactcgcgcacccgtttgggctcacttatatctgcgtcactgggggcgggtcttttcttggctccaccctttttgacgtagaattcatgctccacctcaaccacgtgatcctttgcccaccggaaaaagtctttgacttcctgcttggtgaccttcccaaagtcatgatccagacggcgggtgagttcaaatttgaacatccggtcttgcaacggctgctggtgttcgaaggtcgttgagttcccgtcaatcacggcgcacatgttggtgttggaggtgacgatcacgggagtcgggtctatctgggccgaggacttgcatttctggtccacgcgcaccttgcttcctccgagaatggctttggccgactccacgaccttggcggtcatcttcccctcctcccaccagatcaccatcttgtcgacacagtcgttgaagggaaagttctcattggtccagttgacgcagccgtagaagggcgaattc

SEQ ID NO: 149 - protein, 733 aa, Artificial Sequence
  source: /note="Description of Artificial Sequence: Synthetic polypeptide"
MAADGYLPDWLEDNLSEGIREWWDLKPGAPKLKANQQKQDDGRGLVLPGYKYLGPFHGLDKGEPVNAADAAALEHDKAYDQQLKAGDNPYLRYNHADAEFQERLQEDTSFGGNLGRAVFQAKKRVLEPLGLVEEGAKTAPGKKRPLESPQEPDSSSGIGKKGKQPAKKRLNFEEDTGAGDGPPEGSDTSAMSSDIEMRAAPGGNAVDAGQGSDGVGNASGDWHCDSTWSEGKVTTTSTRTWVLPTYNNHLYLRLGTTSNSNTYNGFSTPWGYFDFNRFHCHFSPRDWQRLINNNWGLRPKAMRVKIFNIQVKEVTTSNGETTVANNLTSTVQIFADSSYELPYVMDAGQEGSLPPFPNDVFMVPQYGYCGIVTGENQNQTDRNAFYCLEYFPSQMLRTGNNFEMAYNFEKVPFHSMYAHSQSLDRLMNPLLDQYLWHLQSTTSGETLNQGNAATTFGKIRSGDFAFYRKNWLPGPCVKQQRFSKTASQNYKIPASGGNALLKYDTHYTLNNRWSNIAPGPPMATAGPSDGDFSNAQLIFPGPSVTGNTTTSANNLLFTSEGEIAATNPRDTDMFGQIADNNQNATTAPITGNVTAMGVLPGMVWQNRDIYYQGPIWAKIPHADGHFHPSPLIGGFGLKHPPPQIFIKNTPVPANPATTFTAARVDSFITQYSTGQVAVQIEWEIEKERSKRRNPEVQFTSNYGNQSSMLWAPDTTGKYTEPRVIGSRYLTNHL

SEQ ID NO: 150 - protein, 735 aa, Artificial Sequence
  source: /note="Description of Artificial Sequence: Synthetic polypeptide"
MAADGYLPDWLEDTLSEGIRQWWKLKPGPPPPKPNQQHRDDSRGLVLPGYKYLGPFNGLDKGEPVNEADAAALEHDKAYDHQLKQGDNPYLKYNHADAEFQERLQEDTSFGGNLGRAVFQAKKRVLEPLGLVEEAVKTAPGKKRPIEQSPAEPDSSSGIGKSGQQPAKKRLNFGQTGDTESVPDPQPIGEPPAAPSGVGSNTMASGGGAPMADNNEGADGVGNSSGNWHCDSTWMGDRVITTSTRTWALPTYNNHLYKQISSESGATNDNHYFGYSTPWGYFDFNRFHCHFSPRDWQRLINNNWGFRPKKLNFKLFNIQVKEVTQNDGTTTIANNLTSTVQVFTDSEYQLPYVLGSAHQGCLPPFPADVFMIPQYGYLTLNNGSQAVGRSSFYCLEYFPSQMLRTGNNFTFSYTFEDVPFHSSYAHSQSLDRLMNPLIDQYLYYLSKTQGTSGTTQQSRLQFSQAGPSSMAQQAKNWLPGPSYRQQRMSKTANDNNNSEFAWTAATKYYLNGRNSLVNPGPPMASHKDDEEKYFPMHGNLIFGKQGTGTTNVDIESVLITDEEEIRTTNPVATEQYGQVATNHQSQNTTASYGSVDSQGILPGMVWQDRDVYLQGPIWAKIPHTDGHFHPSPLMGGFGLKHPPPQILIKNTPVPANPATTFTPGKFASFITQYSTGQVSVEIEWELQKENSKRWNPEIQYTSNYNKSVNVEFTVDANGVYSEPRPIGTRYLTRNL

SEQ ID NO: 151 - DNA, 3127 bp, Artificial Sequence
  source: /note="Description of Artificial Sequence: Synthetic polynucleotide"
gcggccgcgaattcgcccttcgcagagaccaaagttcaactgaaacgaatcaaccggtttattgattaacatgcaattacagattacgggtgaggtaacgagtgccaatagggcgaggctcagagtaaacaccctggctgtcaacggcaaagtccacaccagtctgcttttcaaagttggaggtgtactgaatctccgggtcccagcgcttgctgttttccttctgcagctcccactcgatttccacgctgacttgtccggtgctgtactgtgtgatgaacgaagcaaacttggcaggagtaaacacctccggaggattagcgggaacgggagtgttcttgatcaggatctgaggaggcggatgtttaagtccaaagccgcccatcaaaggagacgggtgaaagttgccatccgtgtgaggaatcttggcccagatgggaccctgcaggtacacgtcccggttctgccagaccatgccaggtaaggctccctggttgttgacaacttgtgtctgggctgcagtattagccgcttgtaagttgctgctgactatcccgtattcttccgtggctacaggattagtaggacgaatttcttcttcatttgtcattaacacattttccaatgtagttttgttagttgctccagtttttccaaaaatcaggactccgctggatgggaaaaagcggtcctcgtcgtccttgtgagttgccatggcgacgccgggattaaccaacgagtttctgccgttcaggtgatatttggtggcaccagtccaagcaaagttgctgttgttgttttgatccagcgttttggagaccctttgttgccggaagcagggtccaggtaaccaattcttggcttgttcggccatagttgaaggcccgccctggtaaaactgcagttcccgattgccagctgtgcctcctgggtcactctgtgttctggccaggtagtacaagtactggtcgatgaggggattcatcagccggtccaggctctggctgtgtgcgtagctgctgtggaaaggcacgtcctcgaagctgtagctgaactcaaagttgttgcccgttctcagcatctgagaggggaagtactccaggcagtagaaggaggaacgtcccacagactgactgccattgttgagagtcaggtagccgtactgaggaatcatgaagacgtccgccgggaacggaggcaggcagccctggtgcgcagagccgaggacgtacggcagctggtattccgagtccgagaatacctgaatcgtgctggtaaggttattagcgatggtcgtaacgccgtcattcgtcgtgacctccttgacctggatgttgaagagcttgaaccgcagcttcttgggccggaatccccagttgttgttgatgagtcgctgccagtcacgtggtgagaagtggcagtggaatctgttaaagtcaaaatacccccagggggtgctgtagccgaagtaggtgttgtcgttggtactacctgcagtttcactggagatttgctcgtagaggtggttgttgtaggtgggcagggcccaggttcgggtgctggtggtaatgactctgtcgcccagccatgtggaatcgcaatgccaatttcctgaggcattacccactccgtcggcaccttcgttattgtctgccattggtgcgccaccgcctgcagccactgtaccagatcccacactagagggcgctgctggaggttctccgagaggttgagggtcggggactgactctgagtcgccagtctgaccgaaattgagtctctttctggcgggctgctggcccttcttgccgatgcccgtggaggagtcgggggaacgctgaggtgacggctctaccggtctcttctttgcaggagccgtcttagcgccttcctcaaccagaccgagaggttcgagaacccgcttcttggcctggaagactgctcgcccgaggttgcccccaaatgacgtatcttcttgcagacgctcctgaaactcggcgtcggcgtggttataccgcaggtacgggttgtcacccgcattgagctgctggtcgtaggccttgtcgtgctcgagggccgctgcgtccgccgcgttgacgggctcccccttgtcgagtccgttgaagggtccgaggtacttgtagccaggaagcaccagaccccggccgttgtcctgcttttgctggttggctttgggtttcggggctccaggtttcaggtcccaccactcgcgaatgccctcagagaggttgtcctcgagccaatctggaagataaccatcggcagccatacctgatttaaatcatttattgttcaaagatgcagtcatccaaatccacattgaccagatcgcaggcagtgcaagcgtctggcacctttcccatgatatgatgaatgtagcacagtttctgatacgcctttttgacgacagaaacgggtttagattctgacacgggaaagcactctaaacagtctttctgtccgtgagtgaagcagatatttgaattctgattcattctctcgcattgtctgcagggaaacagcatcagattcatgcccacgtgacgagaacatttgttttggtacctgtctgcgtagttgatcgaagcttccgcgtctgacgtcgatggctgcgcaactgactcgcgcacccgtttgggctcacttatatctgcgtcactgggggcgggtcttttcttggctccaccctttttgacgtagaattcatgctccacctcaaccacgtaatcctttgcccaccggaaaaagtctttgacttcctgcttggtgaccttcccaaagtcatgatccagacggcgggtgagttcaaatttgaacatccggtcttgcaacggctgctggtgttcgaaggtcgttgagttcccgtcgatcacggcgcacatgttggtgttggagatgacgatcgcgggagtcgggtctatctgggccgaggacttgcatttctggtccacgcgcaccttgcttcctccgagaatggctttggccgactccacgaccttggcggtcatcttcccctcctcccaccagatcaccatcttgtcgacacagtcgttgaagggaaagttctcattggtccagttgacgcagccgtagaaagggcgaattc

SEQ ID NO: 152 - protein, 728 aa, Artificial Sequence
  source: /note="Description of Artificial Sequence: Synthetic polypeptide"
MAADGYLPDWLEDNLSEGIREWWDLKPGAPKPKANQQKQDDGRGLVLPGYKYLRPFNGLDKGEPVNEADAAALEHDKAYDKQLEQGDNPYLKYNHADAEFQERLQEDTSFGGNLGRAVFQAKKRVLEPLGLVEEVAKTAPGKKRPIESPDSSTGIGKKGQQPAKKKLNFGQTGDSESVPDPQPLGEPPAAPSGLGSGTMAAGGGAPMADNNEGADGVGNASGNWHCDSTWLGDRVITTSTRTWALPTYNNHLYKQISSQSGATNDNHFFSYSTPWGYFDFNRFHCHFSPRDWQRLINNNWGFRPRKLRFKLFNIQVKEVTTNDGVTTIANNLTSTIQVFSDSEYQLPYVLGSAHQGCLPPFPADVFMIPQYGYLTLNNGSQSVGRSSFYCLEYFPSQMLRTGNNFEFSYTFEEVPFHSSYVHSQSLDRLMNPLIDQYLYYLARTQSTTGSTRELQFHQAGPNTMAEQSKNWLPGPCYRQQRLSKNIDSNNNSNFAWTGATKYHLNGRNSLTNPGVAMATNKDDEDQFFPINGVLVFGKTGAANKTTLENVLMTSEEEIKTTNPVATEEYGVVSSNLQSSTAGPQTQTVNSQGALPGMVWQNRDVCLQGPIWAKIPHTDGNFHPSPLMGGFGLKHPPPQILIKNTPVPANPPEVFTPAKFASFITQYSTGQVSVEIEWELQKENSKRWNPEIQYTSNYAKSNNVEFAVNNEGVYTEPRPIGTRYLTRNL

SEQ ID NO: 153 - DNA, 3106 bp, Artificial Sequence
  source: /note="Description of Artificial Sequence: Synthetic polynucleotide"
gcggccgcgaattcgcccttcgcagagaccaaagttcaactgaaacgaatcaaccggtttattgattaacaagtaattacaggttacgggtgaggtaacgggtgccaatggggcgaggctcagtataaaccccttcgttgttgacagcaaattccacattattagacttggcataatttgaggtgtactgaatctctggattccagcgtttgctgttttctttctgcagttcccactcgatctccacgctgacctggccggtgctgtactgcgtgataaatgaggcaaacttggcaggagtaaacacctctggaggattagcaggtaccggggtgtttttgatgagaatttgaggaggcgggtgtttgagtccaaatccgcccatcaggggagacgggtgaaagttgccgtccgtgtgaggaattttggcccagatgggaccctgcaggcacacgtcccggttctgccagaccatgccgggcagagccccctggctgttgacagtctgtgtctggggtccggccgtagacgattgcaggttgctggagaccacaccgtattcttctgtagccacgggattggtggttttgatctcctcctcgctggtcattagcacgttttccagcgttgtcttgttggcagcccccgttttgccaaaaaccagcactccgttgatgggaaagaactggtcctcgtcgtccttgttggtggccatggctacgcccgggttggttaatgaatttctaccattcagatggtatttagtggccccggtccaggcaaagttactgttgttgttgctgtctatgttttttgacagtctctgctgccgataacagggtccgggcagccagttctttgattgctcggccatggtgttgggcccagcctgatggaactgcagctcccttgtggaccccgtagtgctctgggtccgggccaggtagtacaggtactggtcgatgaggggattcatcagccggtctaggctctggctgtgcacatagctgctgtggaaaggcacttcctcaaaggtgtagctgaattcaaagttattgcccgttctcagcatctgagaaggaaagtactccaggcagtagaaggaggaacgtcccacagactgactgccgttgtttagagtcagatatccgtactgaggaatcatgaacacgtccgcagggaacggagggaggcagccctggtgcgcagagccgaggacgtacggcagttggtactccgagtccgagaagacctgaatcgtgctggtaaggttattagcgatggtcgtaacgccgtcgttcgtcgtgacctccttgacctggatgttgaacaacttgaaccgcagctttctgggccggaatccccagttgttgttgatgagtcgctgccagtcacgtggtgagaagtggcagtggaatctgttgaagtcaaaatagccccagggggtgctgtagctgaagaagtggttgtcgttggtagccccgctctgacttgatatctgcttgtagaggtggttgttgtaggtgggcagggcccaggtgcgggtgctggtggtgatgactctgtcgcccagccatgtggaatcgcaatgccaatttccggaggcattacccactccgtcggcgccttcgttattgtctgccattggtgcgccaccgcctgcagccattgtaccagatcccagacctgagggcgcggcgggaggttctccgagaggttgggggtcgggcactgactctgagtcgccagtctgcccaaagttgagcttctttttagcgggctgctggcctttcttgccgatgcccgtggaggagtcgggggattctatgggtctcttctttccaggagccgtcttagcgacttcctcaaccagaccgagaggttcgagaacccgcttcttggcctggaagactgctcgcccgaggttgcccccaaaagacgtatcttcttgaagacgctcctgaaactcggcgtcggcgtggttgtacttgaggtacgggttgtccccctgctcgagctgcttgtcgtaggccttgtcgtgctcgagggccgcggcgtctgcctcgttgaccggctctcccttgtcgagtccgttgaagggtctgaggtacttgtagccaggaagcaccagaccccggccgtcgtcctgcttttgctggttggctttgggtttcggggctccaggtttcaagtcccaccactcgcgaatgccctcagagaggttgtcctcgagccaatctggaagataaccatcggcagccatacctggtttaagtcatttattgctcagaaacacagtcatccaggtccacgttgaccagatcgcaggccgagcaagcaatctcgggagcccgccccagcagatgatgaatggcacagagtttccgatacgtcctctttctgacgaccggttgagattctgacacgccggggaaacattctgaacagtctctggtcccgtgcgtgaagcaaatgttgaaattctgattcactctctcgcatgtcttgcagggaaacagcatctgaagcatgcccgcgtgacgagaacatttgttttggtacctgtcggcaaagtccaccggagctccttccgcgtctgacgtcgatggattcgcgactgaggggcaggcccgcttgggctcgcttttatccgcgtcatcgggggcgggtctcttgttggccccaccctttctgacgtagaacccatgcgccacctcggtcacgtgatcctgcgcccagcggaagaaccttttgacttcctgctttgtcaccttgccaaagttatgctccagacggcgggtgggttcaaatttgaacatccggtcctgcaacggctgctggtgctcgaaggtggcgctgttcccgtcaatcacggcgcacatgttggtgttggaggtgacggtcacgggggtggggtcgatctgggcggacgacttgcacttttggtccacgcgcaccttgctgccgccgagaatggccttggcggactccacgaccttggccgtcatcttgccctcctcccaccagatcaccatcttgtcggcgcaatcgttgaagggaaagttctcattggtccagttgacgcagccgtagaaagggcgaattc

SEQ ID NO: 154 - protein, 728 aa, Artificial Sequence
  source: /note="Description of Artificial Sequence: Synthetic polypeptide"
MAADGYLPDWLEDNLSEGIREWWDLKPGAPKPKANQQKQDDGRGLVLPGYKYLGPFNGLDKGEPVNEADAAALEHDKAYDKQLEQGDNPYLKYNHADAEFQERLQEDTSFGGNLGRAVFQAKKRVLEPLGLVEEGAKTASGKKRPIESPDSSTGIGKKGQQPAKKKLNFGQTGDSESVPDPQPLGEPPAAPSGLGSGTMAAGGGAPMADNNEGADGVGNASGNWHCDSTWLGDRVITTSTRTWALPTYNNHLYKQISSQSGATNDNHFFGYSTPWGYFDFNRFHCHFSPRDWQRLINNNWGFRPRKLRFKLFNIQVKEVTTNDGVTTIANNLTSTIQVFSDSEYQLPYVLGSAHQGCLPPFPADVFMIPQYGYLTLNNGSQSVGRSSFCCLEYFPSQMLRTGNNFEFSYTFEEVPFHSSYAHSQSLDRLMNPLIDQYLYYLARTQSTTGSTRELQFHQAGPNTVAEQSKNWLPGPCYRQQRLSKNIDSNNNSNFAWTGATKYHLNGRNSLTNPGVAMATNKDDEDQFLPINGVLVFGKTGAANKTTLENVLMTSEEEIKTTNPVATEEYGVVSSNLQSSTAGPRTQTVNSQGALPGMVWQNRDVYLQGPIWAEIPHTDGNFHPSPLMGGFGLKHPPPQILIKNTPVPANPPEVFTPAKFASFITQYSTGQVSVEIEWELQKENSKRWNPEIQYTSNYAKSNNVEFAVNNEGVYTEPRPIGTRYLTRNL

SEQ ID NO: 155 - DNA, 3102 bp, Artificial Sequence
  source: /note="Description of Artificial Sequence: Synthetic polynucleotide"
gcggccgcgaattcgcccttcgcagagaccaaagttcaactgaaacgaatcaaccggtttattgattaacaagtaattacaggttacgggtgaggtaacgggtgccaatggggcgaggctcagtataaaccccttcgttgttgacagcaaattccacattattagacttggcataatttgaggtgtactgaatctctggattccagcgtttgctgttttctttctgcagttcccactcgatctccacgctgacctggccggtgctgtactgcgtgataaatgaggcaaacttggcaggagtaaacacctctggaggattagcaggtaccggggtgtttttgatgagaatttgaggaggcgggtgtttgagtccaaatccgcccatcaggggagacgggtgaaagttgccgtccgtgtgaggaatttcggcccagatgggaccctgcaggtacacgtcccggttctgccagaccatgccgggcagagccccctggctgttgacagtctgtgtccggggtccggccgtagacgattgcaggttgctggagaccacaccgtattcttctgtagccacgggattggtggttttgatctcctcctcgctggtcattagcacgttttccagcgttgtcttgttggcagcccccgttttgccaaaaaccagcactccgttgatgggaaggaactggtcctcgtcgtccttgttggtggccatggctacgcccgggttggttaatgaatttctaccattcagatggtatttagtggccccggtccaggcaaagttactgttgttgttgctgtctatgttttttgacagtctctgctgccgataacagggtccgggcagccagttctttgattgctcggccacggtgttgggcccagcctgatggaactgcagctcccttgtggaccccgtagtgctctgggtccgggccaggtagtacaggtactggtcgatgaggggattcatcagccggtccaggctctggctgtgcgcatagctgctgtggaaaggcacttcctcaaaggtgtagctgaattcaaagttattgcccgttctcagcatctgagaaggaaagtactccaggcagcagaaggaggaacgtcccacagactgactgccgttgtttagagtcagatatccgtactgaggaatcatgaacacgtccgcagggaacggagggaggcagccctggtgcgcagagccgaggacgtacggcagttggtactccgagtccgagaagacctgaatcgtgctggtaaggttattagcgatggtcgtaacgccgtcgttcgtcgtgacctccttgacctggatgttgaacaacttgaaccgcagctttctgggccggaatccccagttgttgttgatgagtcgctgccagtcacgtggtgagaagtggcagtggaatctgttgaagtcaaaatagccccagggggtgctgtagccgaagaagtggttgtcgttggtagccccgctctgacttgatatctgcttgtagaggtggttgttgtaggtgggcagggcccaggtgcgggtgctggtggtgatgactctgtcgcccagccatgtggaatcgcaatgccaatttccggaggcattacccactccgtcggcgccttcgttattgtctgccattggtgcgccaccgcctgcagccattgtaccagatcccagacctgagggcgcggcgggaggttctccgagaggttgggggtcgggcactgactctgagtcgccagtctgcccaaagttgagcttctttttagcgggctgctggcctttcttgccgatgcccgtggaggagtcgggggattctatgggtctcttctttccggaagccgtcttagcgccttcctcaaccagaccgagaggttcgagaacccgcttcttggcctggaagactgctcgcccgaggttgcccccaaaagacgtatcttcttgaagacgctcctgaaactcggcgtcggcgtggttgtacttgaggtacgggttgtccccctgctcgagctgcttgtcgtaggccttgtcgtgctcgagggccgcggcgtctgcctcgttgaccggctctcccttgtcgagtccgttgaagggtccgaggtacttgtagccaggaagcaccagaccccggccgtcgtcctgcttttgctggttggctttgggtttcggggctccaggtttcaagtcccaccactcgcgaatgccctcagagaggttgtcctcgagccaatctggaagataaccatcggcagccatacctggtttaagtcatttattgctcagaaacacagtcatccaggtccacgttgaccagatcgcaggccgagcaagcaatctcgggagcccgccccagcagatgatgaatggcacagagtttccgatacgtcctctttctgacgaccggttgagattctgacacgccggggaaacattctgaacagtctctggtcccgtgcgtgaagcaaatgttgaaattctgattcattctctcgcatgtcttgcagggaaacagcatctgaagcatgcccgcgtgacgagaacatttgttttggtacctgtcggcaaagtccaccggagctccttccgcgtctgacgtcgatggatccgcgactgaggggcaagcccgcttgggctcgcttttatccgcgtcatcgggggcgggtctcttgttggctccaccctttctgacgtagaactcatgcgccacctcggtcacgtgatcctgcgcccagcggaagaactctttgacttcctgctttgtcaccttgccaaagtcatgctccagacggcgggtgagttcaaatttgaacatccggtcttgtaacggctgctggtgctcgaaggtggtgctgttcccgtcaatcacggcgcacatgttggtgttggaagtgacgatcacgggggtgggatcgatctgggcggacgacttgcacttttggtccacgcgcaccttgctgccgccgagaatggccttggcggactccacgaccttggccgtcatcttgccctcctcccaccagatcaccatcttgtcgacgcaatcgttgaagggaaagttctcattggtccagttgacgcagccgaagggcgaattc

SEQ ID NO: 156 - protein, 728 aa, Artificial Sequence
  source: /note="Description of Artificial Sequence: Synthetic polypeptide"
MAADGYLPDWLEDNLSEGIREWWDLKPGAPKPKANQQKQDDGRGLVLPGYRYLGPFNGLDKGEPVNEADAAALEHDKAYDKQLEQGDNPYLKYNHADAEFQERLQEDTSFGGNLGRAVFQAKKRVLEPLGLVEEGAKTAPGKKRPIESPDSSTGIGKNGQPPAKKKLNFGQTGDSESVPDPQPLGEPPAAPSGLGSGTMAAGGGAPMADNNEGADGVGNASGNWHCDSTWLGDRVITTSTRTWALPTYNNHLYKQISSQSGATNDNHFFGYSTPWGYFDFNRFHCHFSPRDWQRLINNNWGFRPRKLRFKLFNIQVKEVTTNDGVTTIANNLTSTIQVFSDSEYQLPYVLGSAHQGCLPPFPADVFMIPQYGYLTLNNGSQSVGRSSFYCLEYFPSQMLRTGNNFEFSYTFEEVPFHSSYAHSQSLDRLMNPLIDQYLYYLARTQSTTGSTRELQFHQAGPNTMAEQSKNWLPGPCYRQQRLSKNIDSNNNSNFAWTGATKYHLNGRNSLTNPGVAMATNKDDEDQFFPINGVLVFGKTGAANKTTLENVLMTSEEEIKTTNPVATEEYGVVSSNLQSSTAGPQTQTVNSQGALPGMVWQNRDVYLQGPIWAKIPHTDGNFHPSPLMGGFGLKHPPPQILIKNTPVPANPPEVFTPAKFASFITQYSTGQVSVEIEWELQKENSKRWNPEIQYTSNYAKSNNVEFAVNNEGVYTEPRPIGTRYLTRNL

SEQ ID NO: 157 - protein, 728 aa, Artificial Sequence
  source: /note="Description of Artificial Sequence: Synthetic polypeptide"
MAADGYLPDWLEGNLSEGIREWWDLKPGAPKPKANQQKQDDGRGLVLPGYRYLGPFNGLDKGEPVNEADAAALEHDKAYDKQLEQGDNPYLKYNHADAEFQERLQEDTSFGGNLGRAVFQAKKRVLEPLGLVEEGAKTAPGKKRPIESPDSSTGIGKNGQPPAKKKLNFGQTGDSESVPDPQPLGEPPAAPSGLGSGTMAAGGGAPMADNNEGADGVGNASGNWHCDSTWLGDRVITTSTRTWALPTYNNHLYKQISSQSGATNDNHFFGYSTPWGYFDFNRFHCHFSPRDWQRLINNNWGFRPRKLRFKLFNIQVKEVTTNDGVTTIANNLTSTIQVFSDSEYQLPYVLGSAHQGCLPPFPADVFMIPQYGYLTLNNGSQSVGRSSFYCLEYFPSQMLRTGDNFEFSYTFEEVPFHSSYAHSQSLDRLMNPLIDQYLYYLARTQSTTGSTRELQFHQAGPNTMAEQSKNWLPGPCYRQQRLSKNIDSNNNSNFAWTGATKYHLNGRNSLTNPGVAMATNKDDEDQFFPINGVLVFGKTGAANKTTLENVLMTSEEEIKTTNPVATEEYGVVSSNLQSSTAGPQTQTVNSQGALPGMVWQNRDVYLQGPIWAKIPHTDGNFHPSPLMGGFGLKHPPPQILIKNTPVPANPPEVFTPAKFASFITQYSTGQVSVEIEWELQKENSKRWNPEIQYTSNYAKSNNVEFAVNNEGVYTEPRPIGTRYLTRNL

SEQ ID NO: 158 - DNA, 3106 bp, Artificial Sequence
  source: /note="Description of Artificial Sequence: Synthetic polynucleotide"
gcggccgcgaattcgcccttcgcagagaccaaagttcaactgaaacgaatcagccggtttattgattaacaagtaattacaggttacgggtgaggtaacgggtgccaatggggcgaggctcagtataaaccccttcgttgttgacagcaaattccacattattagacttggcataatttgaggtgtactgaatctctggattccagcgtttgctgttttctttctgcagttcccactcgatctccacgctgacctggccggtgctgtactgcgtgataaatgaggcaaacttggcaggagtaaacacctctggaggattagcaggtaccggggtgtttttgatgagaatttgaggaggcgggtgtttgagtccaaatccgcccatcaggggagacgggtgaaagttgccgtccgtgtgaggaattttggcccagatgggaccctgcaggtacacgtcccggttctgccagaccatgccgggcagagccccctggctgttgacagtctgtgtctggggtccggccgtagacgattgcaggttgctggagaccacaccgtattcttctgtagccacgggattggtggttttgatctcctcctcgctggtcattagcacgttttccagcgttgtcttgttggcagcccccgttttgccaaaaaccagcactccgttgatgggaaagaactggtcctcgtcgtccttgttggtggccatggctacgcccgggttggttaatgaatttctaccattcagatggtatttagtggccccggtccaggcaaagttactgttgttgttgctgtctatgttttttgacagtctctgctgccgataacagggtccgggcagccagttctttgattgctcggccatggtgttgggcccagcctgatggaactgcagctcccttgtggaccccgtagtgctctgggtccgggccaggtagtacaggtactggtcgatgaggggattcatcagccggtccaggctctggctgtgcgcatagctgctgtggaaaggcacttcctcaaaggtgtagctgaattcaaagttatcgcccgttctcagcatctgagaaggaaagtactccaggcagtagaaggaggaacgtcccacagactgactgccgttgtttagagtcagatatccgtactgaggaatcatgaacacgtccgcagggaacggagggaggcagccctggtgcgcagagccgaggacgtacggcagttggtactccgagtccgagaagacctgaatcgtgctggtaaggttattagcgatggtcgtaacgccgtcgttcgtcgtgacctccttgacctggatgttgaacaacttgaaccgcagctttctgggccggaatccccagttgttgttgatgagtcgctgccagtcacgtggtgagaagtggcagtggaatctgttgaagtcaaaatagccccagggggtgctgtagccgaagaagtggttgtcgttggtagccccgctctgacttgatatctgcttgtagaggtggttgttgtaggtgggcagggcccaggtgcgggtgctggtggtgatgactctgtcgcccagccatgtggaatcgcaatgccaatttccggaggcattacccactccgtcggcgccttcgttattgtctgccattggtgcgccaccgcctgcagccattgtaccagatcccagacctgagggcgcggcgggaggttctccgagaggttgggggtcgggcactgactctgagtcgccagtctgcccaaagttgagcttctttttagcgggcggctggccgttcttgccgatgcccgtggaggagtcgggggattctatgggtctcttctttccaggagccgtcttagcgccttcctcaaccagaccgagaggttcgagaacccgcttcttggcctggaagactgctcgcccgaggttgcccccaaaagacgtatcttcttgaagacgctcctgaaactcggcgtcggcgtggttgtacttgaggtacgggttgtccccctgctcgagctgcttgtcgtaggccttgtcgtgctcgagggccgcggcgtctgcctcgttgaccggctctcccttgtcgagtccgttgaagggtccgaggtacctgtagccaggaagcaccagaccccggccgtcgtcctgcttttgctggttggctttgggtttcggggctccaggtttcaagtcccaccactcgcgaatgccctcagagaggttgccctcgagccaatctggaagataaccatcggcagccatacctggtttaagtcatttattgctcagaaacacagtcatccaggtccacgttggccagatcgcaggccgagcaagcaatctcgggagcccgccccagcagatgatgaatggcacagagtttccgatacgtcctctttctgacgaccggttgagattctgacacgccggggaaacattctgaacagtctctggtcccgtgcgtgaagcaaatgttgaaattctgattcattctctcgcatgtcttgcaggggaacagcatctgaagcatgcccgcgtgacgagaacatttgttttggtacctgtcggcaaagtccaccggagctccttccgcgtctgacgtcgatggatccgcgactgaggggcaggcccgcttgggctcgcttttatccgcgtcatcgggggcgggtctcttgttggctccaccctttctgacgtagaactcatacgccacctcggtcacgtgatcctgcgcccagcggaagaactctttgacttcctgctttgtcaccttgccaaagtcatgctccagacggcgggtgagttcaaatttgaacatccggtcttgtaacggctgctggtgctcgaaggtggtgctgttcccgtcaatcacggcgcacatgttggtgttggaagtgacgatcacgggggtgggatcgatctgggcggacgacttgcacttttggtccacgcgcaccttgctgccgccgagaatggccttggcggactccacgaccttggccgtcatcctgccctcctcccaccagatcaccatcttgtcgacgcaatcgttgaagggaaagttctcattggtccagttgacgcagccgtagaaagggcgaattc

SEQ ID NO: 159 - protein, 728 aa, Artificial Sequence
  source: /note="Description of Artificial Sequence: Synthetic polypeptide"
MAADGYLPDWLEDNLSEGIREWWDLKPGAPKPKANQQKQDDGRGLVLPGYKYLGPFNGLDKGEPVNEADAAALEHDKAYDKQLEQGDNPYLKYNHADAEFQERLQEDTSFGGNLGRAVFQAKKRVLEPLGLVEEGAKTAPGKKRPIESPDSSTGIGKKGQQPAKKKLNFGQTGDSESVPDPQPLGEPPAAPSGLGSGTMAAGGGAPMADNNEGADGVGNASGNWHCDSTWLGDRVITTSTRTWALPTYNNHLYKQISSQSGATNDNHFFGYSTPWGYFDFNRFHCHFSPRDWQRLINNNWGFRPRKLRFKLFNIQVKEVTTNDGVTTIANNLTSTIQVFSDSEYQLPYVLGSAHQGCLPPFPADVFMIPQYGYLTLNNGSQSMGRSSFYCLEYFPSQMLRTGNNFEFSYTFEEVPFHSSYAHSQSLDRLMNPLIDQYLYYLARTQSTTGSTRELQFHQAGPNTMAEQSKNWLPGPCYRQQRLSKNIDSNNNSNFAWTGATKYHLNGRNSLTNPGVAMATNKDDEGQFFPINGVLVFGKTGAANKTTLENVLMTSEEEIKTTNPVATEEYGVVSSNLQSSTAGPQTQTVNSQGALPGMVWQNRDVYLQGPIWAKIPHTDGNFHPSPLMGGFGLKHPPPQILIKNTPVPANPPGVFTPALFASFITQYSTGQVSVEIEWELQKENSKRWNPEIQYTSNYAKSNNVEFAVNNEGVYTEPRPIGTRYLTRNL

SEQ ID NO: 160 - DNA, 3098 bp, Artificial Sequence
  source: /note="Description of Artificial Sequence: Synthetic polynucleotide"
gaattcgcccttcgcagagaccaaagttcaactgaaacgaatcaaccggtttattgattaacaagtaattacaggttacgggtgaggtaacgggtgccaatggggcgaggctcagtataaaccccttcgttgttgacagcaaattccacattattagacttggcataatttgaggtgtactgaatctctggattccagcgtttgctgttttctttctgcagttcccactcgatctccacgctgacctggccggtgctgtactgcgtgataaatgaggcaaactaggcaggagtaaacacccctggaggattagcaggtaccggggtgtttttgatgagaatttgaggaggcgggtgtttgagtccaaatccgcccatcaggggagacgggtgaaagttgccgtccgtgtgaggaattttggcccagatgggaccctgcaggtacacgtcccggttctgccagaccatgccgggcagagccccctggctgttgacagtctgtgtctggggtccggccgtagacgattgcaggttgctggagaccacaccgtattcttctgtagccacgggattggtggttttgatctcctcctcgctggtcattagcacgttttccagcgttgtcttgttggcagcccccgttttgccaaaaaccagcactccgttgatgggaaagaactggccctcgtcgtccttgttggtggccatggctacgcccgggttggttaatgaatttctaccattcagatggtatttagtggccccggtccaggcaaagttactgttgttgttgctgtctatgttttttgacagtctctgctgccgataacagggtccgggcagccagttctttgattgctcggccatggtgttgggcccagcctgatggaactgcagctcccttgtggaccccgtagtgctctgggtccgggccaggtagtacaggtactggtcgatgaggggattcatcagccggtccaggctctggctgtgcgcatagctgctgtggaaaggcacttcctcaaaggtgtagctgaattcaaagttattgcccgttctcagcatctgagaaggaaagtactccaggcagtagaaggaggaacgtcccatagactgactgccgttgtttagagtcagatatccgtactgaggaatcatgaacacgtccgcagggaacggagggaggcagccctggtgcgcagagccgaggacgtacggcagttggtactccgagtccgagaagacctgaatcgtgctggtaaggttattagcgatggtcgtaacgccgtcgttcgtcgtgacctccttgacctggatgttgaacaacttgaaccgcagctttctgggccggaatccccagttgttgttgatgagtcgctgccagtcacgtggtgagaagtggcagtggaatctgttgaagtcaaaatagccccagggggtgctgtagccgaagaagtggttgtcgttggtagccccgctctgacttgatatctgcttgtagaggtggttgttgtaggtgggcagggcccaggtgcgggtgctggtggtgatgactctgtcgcccagccatgtggaatcgcaatgccaatttccggaggcattacccactccgtcggcgccttcgttattgtctgccattggtgcgccaccgcctgcagccattgtaccagatcccagacctgagggcgcggcgggaggttctccgagaggttgggggtcgggcactgactctgagtcgccagtctgcccaaagttgagcttctttttagcgggctgctggcctttcttgccgatgcccgtggaggagtcgggggattctatgggtctcttctttccaggagccgtcttagcgccttcctcaaccagaccgagaggttcgagaacccgcttcttggcctggaagactgctcgcccgaggttgcccccaaaagacgtatcttcttgaagacgctcctgaaactcagcgtcggcgtggttgtacttgaggtacgggttgtccccctgctcgagctgcttgtcgtaggccttgtcgtgctcgagggccgcggcgtctgcctcgttgaccggctctcccttgtcgagtccgttgaagggtccgaggtacttgtagccaggaagcaccagaccccggccgtcgtcctgcttttgctggttggctttgggtttcggggctccaggtttcaagtcccaccactcgcgaatgccctcagagaggttgtcctcgagccaatctggaagataaccatcggcagccatacctggtttaagtcatttattgctcagaaacacagtcatccaggtccacgttgaccagatcgcaggccgagcaagcaatctcgggagcccgccccagcagatgatgaatggcacagagtttccgatacgtcctctttctgacgaccggttgagattctgacacgccggggaaacattctgaacagtctctggtcccgtgcgtgaagcaaatgttgaaattctgattcattctctcgcatgtcttgcagggaaacagcatctgaagcatgcccgcgtgacgagaacatttgttttggtacctgtcggcaaagtccaccggagctccttccgcgtctgacgtcgatggatccgcgactgaggggcaggcccgcttgggctcgcttttatccgcgtcatcgggggcgggcctcttgttggctccaccctttctgacgtagaactcatgcgccacctcggtcacgtgatcctgcgcccagcggaagaactctttgacttcctgctttgtcaccttgccaaagtcctgctccagacggcgggtgagttcaaatttgaacatccggtcttgtaacggctgctggtgctcgaaggtggtgctgttcccgtcaatcacggcgcacatgttggtgttggaagtgacgatcacgggggtgggatcgatctgggcggacgacttgcacttttggtccacgcgcaccttgctgccgccgagaatggccttggcggactccacgaccttggccgtcatcttgccctcctcccaccagatcaccatcttgtcgacgcaatcgttgaagggaaagttctcattggtccagttgacgcagccgtagaaagggcgaattc

SEQ ID NO: 161 - DNA, 2187 bp, Artificial Sequence
  source: /note="Description of Artificial Sequence: Synthetic polynucleotide"
atggctgccgatggttatcttccagattggctcgagggcaacctctctgagggcattcgcgagtggtgggacttgaaacctggagccccgaaacccaaagccaaccagcaaaagcaggacgacggccggggtctggtgcttcctggctacaggtacctcggacccttcaacggactcgacaagggagagccggtcaacgaggcagacgccgcggccctcgagcacgacaaggcctacgacaagcagctcgagcagggggacaacccgtacctcaagtacaaccacgccgacgccgagtttcaggagcgtcttcaagaagatacgtcttttgggggcaacctcgggcgagcagtcttccaggccaagaagcgggttctcgaacctctcggtctggttgaggaaggcgctaagacggctcctggaaagaagagacccatagaatcccccgactcctccacgggcatcggcaagaacggccagccgcccgctaaaaagaagctcaactttgggcagactggcgactcagagtcagtgcccgacccccaacctctcggagaacctcccgccgcgccctcaggtctgggatctggtacaatggctgcaggcggtggcgcaccaatggcagacaataacgaaggcgccgacggagtgggtaatgcctccggaaattggcattgcgattccacatggctgggcgacagagtcatcaccaccagcacccgcacctgggccctgcccacctacaacaaccacctctacaagcagatatcaagtcagagcggggctaccaacgacaaccacttcttcggctacagcaccccctggggctattttgacttcaacagattccactgccacttctcaccacgtgactggcagcgactcatcaacaacaactggggattccggcccagaaagctgcggttcaagttgttcaacatccaggtcaaggaggtcacgacgaacgacggcgttacgaccatcgctaataaccttaccagcacgattcaggtcttctcggactcggagtaccaactgccgtacgtcctcggctctgcgcaccagggctgcctccctccgttccctgcggacgtgttcatgattcctcagtacggatatctgactctaaacaacggcagtcagtctgtgggacgttcctccttctactgcctggagtactttccttctcagatgctgagaacgggcgataactttgaattcagctacacctttgaggaagtgcctttccacagcagctatgcgcacagccagagcctggaccggctgatgaatcccctcatcgaccagtacctgtactacctggcccggacccagagcactacggggtccacaagggagctgcagttccatcaggctgggcccaacaccatggccgagcaatcaaagaactggctgcccggaccctgttatcggcagcagagactgtcaaaaaacatagacagcaacaacaacagtaactttgcctggaccggggccactaaataccatctgaatggtagaaattcattaaccaacccgggcgtagccatggccaccaacaaggacgacgaggaccagttctttcccatcaacggagtgctggtttttggcaaaacgggggctgccaacaagacaacgctggaaaacgtgctaatgaccagcgaggaggagatcaaaaccaccaatcccgtggctacagaagaatacggtgtggtctccagcaacctgcaatcgtctacggccggaccccagacacagactgtcaacagccagggggctctgcccggcatggtctggcagaaccgggacgtgtacctgcagggtcccatctgggccaaaattcctcacacggacggcaactttcacccgtctcccctgatgggcggatttggactcaaacacccgcctcctcaaattctcatcaaaaacaccccggtacctgctaatcctccagaggtgtttactcctgccaagtttgcctcatttatcacgcagtacagcaccggccaggtcagcgtggagatcgagtgggaactgcagaaagaaaacagcaaacgctggaatccagagattcagtacacctcaaattatgccaagtctaataatgtggaatttgctgtcaacaacgaaggggtttatactgagcctcgccccattggcacccgttacctcacccgtaacctgtaa

SEQ ID NO: 162 - protein, 728 aa, Artificial Sequence; identical to SEQ ID NO: 157
  source: /note="Description of Artificial Sequence: Synthetic polypeptide"

SEQ ID NO: 163 - protein, 728 aa, Artificial Sequence
  source: /note="Description of Artificial Sequence: Synthetic polypeptide"
MAADGYLPDWLEDNLSEGIREWWDLKPGAPKPKANQQKQDDGRGLVLPGYRYLGPFNGLDKGEPVNEADAAALEHDKAYDKQLEQGDNPYLKYNHADAEFQERLQEDTSFGGNLGRAVFQAKKRVLEPLGLVEEGAKTAPGKKRPIESPDSSTGIGKNGQPPAKKKLNFGQTGDSESVPDPQPLGEPPAAPSGLGSGTMAAGGGAPMADNNEGADGVGNASGNWHCDSTWLGDRVITTSTRTWALPTYNNHLYKQISSQSGATNDNHFFGYSTPWGYFDFNRFHCHFSPRDWQRLINNNWGFRPRKLRFKLFNIQVKEVTTNDGVTTIANNLTSTIQVFSDSEYQLPYVLGSAHQGCLPPFPADVFMIPQYGYLTLNNGSQSVGRSSFYCLEYFPSQMLRTGDNFEFSYTFEEVPFHSSYAHSQSLDRLMNPLIDQYLYYLARTQSTTGSTRELQFHQAGPNTMAEQSKNWLPGPCYRQQRLSKNIDSNNNSNFAWTGATKYHLNGRNSLTNPGVAMATNKDDEDQFFPINGVLVFGKTGAANKTTLENVLMTSEEEIKTTNPVATEEYGVVSSNLQSSTAGPQTQTVNSQGALPGMVWQNRDVYLQGPIWAKIPHTDGNFHPSPLMGGFGLKHPPPQILIKNTPVPANPPEVFTPAKFASFITQYSTGQVSVEIEWELQKENSKRWNPEIQYTSNYAKSNNVEFAVNNEGVYTEPRPIGTRYLTRNL

SEQ ID NO: 164 - protein, 728 aa, Artificial Sequence; identical to SEQ ID NO: 156
  source: /note="Description of Artificial Sequence: Synthetic polypeptide"

SEQ ID NO: 165 - protein, 728 aa, Artificial Sequence
  source: /note="Description of Artificial Sequence: Synthetic polypeptide"
MAADGYLPDWLEDNLSEGIREWWDLKPGAPKPKANQQKQDDGRGLVLPGYKYLGPFNGLDKGEPVNEADAAALEHDKAYDKQLEQGDNPYLKYNHADAEFQERLQEDTSFGGNLGRAVFQAKKRVLEPLGLVEEGAKTAPGKKRPIESPDSSTGIGKNGQPPAKKKLNFGQTGDSESVPDPQPLGEPPAAPSGLGSGTMAAGGGAPMADNNEGADGVGNASGNWHCDSTWLGDRVITTSTRTWALPTYNNHLYKQISSQSGATNDNHFFGYSTPWGYFDFNRFHCHFSPRDWQRLINNNWGFRPRKLRFKLFNIQVKEVTTNDGVTTIANNLTSTIQVFSDSEYQLPYVLGSAHQGCLPPFPADVFMIPQYGYLTLNNGSQSVGRSSFYCLEYFPSQMLRTGNNFEFSYTFEEVPFHSSYAHSQSLDRLMNPLIDQYLYYLARTQSTTGSTRELQFHQAGPNTMAEQSKNWLPGPCYRQQRLSKNIDSNNNSNFAWTGATKYHLNGRNSLTNPGVAMATNKDDEDQFFPINGVLVFGKTGAANKTTLENVLMTSEEEIKTTNPVATEEYGVVSSNLQSSTAGPQTQTVNSQGALPGMVWQNRDVYLQGPIWAKIPHTDGNFHPSPLMGGFGLKHPPPQILIKNTPVPANPPEVFTPAKFASFITQYSTGQVSVEIEWELQKENSKRWNPEIQYTSNYAKSNNVEFAVNNEGVYTEPRPIGTRYLTRNL

SEQ ID NO: 166 - protein, 728 aa, Artificial Sequence
  source: /note="Description of Artificial Sequence: Synthetic polypeptide"
MAADGYLPDWLEDNLSEGIREWWDLKPGAPKPKANQQKQDDGRGLVLPGYKYLGPFNGLDKGEPVNEADAAALEHDKAYDKQLEQGDNPYLKYNHADAEFQERLQEDTSFGGNLGRAVFQAKKRVLEPLGLVEEGAKTAPGKKRPIESPDSSTGIGKKGQQPAKKKLNFGQTGDSESVPDPQPLGEPPAAPSGLGSGTMAAGGGAPMADNNEGADGVGNASGNWHCDSTWLGDRVITTSTRTWALPTYNNHLYKQISSQSGATNDNHFFGYSTPWGYFDFNRFHCHFSPRDWQRLINNNWGFRPRKLRFKLFNIQVKEVTTNDGVTTIANNLTSTIQVFSDSEYQLPYVLGSAHQGCLPPFPADVFMIPQYGYLTLNNGSQSVGRSSFYCLEYFPSQMLRTGNNFEFSYTFEEVPFHSSYAHSQSLDRLMNPLIDQYLYYLARTQSTTGSTRELQFHQAGPNTMAEQSKNWLPGPCYRQQRLSKNIDSNNNSNFAWTGATKYHLNGRNSLTNPGVAMATNKDDEDQFFPINGVLVFGKTGAANKTTLENVLMTSEEEIKTTNPVATEEYGVVSSNLQSSTAGPQTQTVNSQGALPGMVWQNRDVYLQGPIWAKIPHTDGNFHPSPLMGGFGLKHPPPQILIKNTPVPANPPEVFTPAKFASFITQYSTGQVSVEIEWELQKENSKRWNPEIQYTSNYAKSNNVEFAVNNEGVYTEPRPIGTRYLTRNL

SEQ ID NO: 167 - DNA, 2215 bp, Artificial Sequence
  source: /note="Description of Artificial Sequence: Synthetic polynucleotide"
atggctgccgatggttatcttccagattggctcgaggacactctctctgaaggaataagacagtggtggaagctcaaacctggcccaccaccaccaaagcccgcagagcggcataaggacgacagcaggggtcttgtgcttcctgggtacaagtacctcggacccttcaacggactcgacaagggagagccggtcaacgaggcagacgccgcggccctcgagcacgacaaagcctacgaccggcagctcgacagcggagacaacccgtacctcaagtacaaccacgccgacgccgagttccaggagcggctcaaagaagatacgtcttttgggggcaacctcgggcgagcagtcttccaggccaaaaagaggcttcttgaacctcttggtctggttgaggaagcggctaagacggctcctggaaagaagaggcctgtagagcactctcctgtggagccagactcctcctcgggaaccggaaaggcgggccagcagcctgcaagaaaaagattgaattttggtcagactggagacgcagactcagtcccagaccctcaaccaatcggagaacctcccgcagccccctcaggtgtgggatctcttacaatggctgcaggcggtggcgcaccaatggcagacaataacgagggcgccgacggagtgggtaattcctcgggaaattggcattgcgattccacatggatgggcgacagagtcatcaccaccagcacccgaacctgggccctgcccacctacaacaaccacctctacaagcaaatctccaacagcacatctggaggatcttcaaatgacaacgcctacttcggctacagcaccccctgggggtattttgactttaacagattccactgccacttttcaccacgtgactggcagcgactcatcaacaacaactggggattccggcccaagagactcagcttcaagctcttcaacatccaggtcaaggaggtcacgcagaatgaaggcaccaagaccatcgccaataacctcaccagcaccatccaggtgtttacggactcggagtaccagctgccgtacgttctcggctctgcccaccagggctgcctgcctccgttcccggcggacgtgttcatgattccccagtacggctacctaacactcaacaacggtagtcaggccgtgggacgctcctccttctactgcctggaatactttccttcgcagatgctgagaaccggcaacaacttccagtttacttacaccttcgaggacgtgcctttccacagcagctacgcccacagccagagcttggaccggctgatgaatcctctgattgaccagtacctgtactacttgtctcggactcaaacaacaggaggcacgacaaatacgcagactctgggcttcagccaaggtgggcctaatacaatggccaatcaggcaaagaactggctgccaggaccctgttaccgccagcagcgagtatcaaagacatctgcggataacaacaacagtgaatactcgtggactggagctaccaagtaccacctcaatggcagagactctctggtgaatccgggcccggccatggcaagccacaaggacgatgaagaaaagtttttttcctcagagcggggttctcatctttgggaagcaaggctcagagaaaacaaatgtggacattgaaaaggtcatgattacagacgaagaggaaatcaggacaaccaatcccgtggctacggagcagtatggttctgtatctaccaacctccagagaggcaacagacaagcagctaccgcagatgtcaacacacaaggcgttcttccaggcatggtctggcaggacagagatgtgtaccttcaggggcccatctgggcaaagattccacacacggacggacattttcacccctctcccctcatgggtggattcggacttaaacaccctccgcctcagatcctgatcaagaacacgcctgtacctgcggatcctccgaccaccttcaaccagtcaaagctgaactctttcatcacccagtattctactggccaagtcagcgtggagatcgagtgggagctgcagaaggaaaacagcaagcgctggaaccccgagatccagtacacctccaactactacaaatctacaagtgtggactttgctgttaatacagaaggcgtgtactctgaaccccgccccattggcacccgttacctcacccgtaatctgtaa

SEQ ID NO: 168 - protein, 737 aa, Artificial Sequence
  source: /note="Description of Artificial Sequence: Synthetic polypeptide"
MAADGYLPDWLEDTLSEGIRQWWKLKPGPPPPKPAERHKDDSRGLVLPGYKYLGPFNGLDKGEPVNEADAAALEHDKAYDRQLDSGDNPYLKYNHADAEFQERLKEDTSFGGNLGRAVFQAKKRLLEPLGLVEEAAKTAPGKKRPVEHSPVEPDSSSGTGKAGQQPARKRLNFGQTGDADSVPDPQPIGEPPAAPSGVGSLTMAAGGGAPMADNNEGADGVGNSSGNWHCDSTWMGDRVITTSTRTWALPTYNNHLYKQISNSTSGGSSNDNAYFGYSTPWGYFDFNRFHCHFSPRDWQRLINNNWGFRPKRLSFKLFNIQVKEVTQNEGTKTIANNLTSTIQVFTDSEYQLPYVLGSAHQGCLPPFPADVFMIPQYGYLTLNNGSQAVGRSSFYCLEYFPSQMLKTGNNFQFTYTFEDVPFHSSYAHSQSLDRLMNPLIDQYLYYLSRTQTTGGTTNTQTLGFSQGGPNTMANQAKNWLPGPCYRQQRVSKTSADNNNSEYSWTGATKYHLNGRDSLVNPGPAMASHKDDEEKFFPQSGVLIFGKQGSEKTNVDIEKVMITDEEEIRTTNPVATEQYGSVSTNLQRGNRQAATADVNTQGVLPGMVWQDRDVYLQGPIWAKIPHTDGHFHPSPLMGGFGLKHPPPQILIKNTPVPADPPTTFNQSKLNSFITQYSTGQVSVEIEWELQKENSKRWNPEIQYTSNYYKSTSVDFAVNTEGVYSEPRPIGTRYLTRNL

SEQ ID NO: 169 - protein, 737 aa, Artificial Sequence
  source: /note="Description of Artificial Sequence: Synthetic polypeptide"
MAADGYLPDWLEDTLSEGIRQWWKLKPGPPPPKPAERHKDDSRGLVLPGYKYLGPFNGLDKGEPVNEADAAALEHDKAYDRQLDSGDNPYLKYNHADAEFQERLKEDTSFGGNLGRAVFQAKKRLLEPLGLVEEAAKTAPGKKRPVEHSPVEPDSSSGTGKAGQQPARKRLNFGQTGDADSVPDPQPIGEPPAAPSGVGSLTMAAGGGAPMADNNEGADGVGNSSGNWHCDSTWMGDRVITTSTRTWALPTYNNHLYKQISNSTSGGSSNDNAYFGYSTPWGYFDFNRFHCHFSPRDWQRLINNNWGFRPKRLSFKLFNIQVKEVTQNEGTKTIANNLTSTIQVFTDSEYQLPYVLGSAHQGCLPPFPADVFMIPQYGYLTLNNGSQAVGRSSFYCLEYFPSQMLKTGNNFQFTYTFEDVPFHSSYAHSQSLDRLMNPLIDQYLYYLSRTQTTGGTTNTQTLGFSQGGPNTMANQAKNWLPGPCYRQQRVSKTSADNNNSEYSWTGATKYHLNGRDSLVNPGPAMASHKDDEEKFFPQSGVLIFGKQGSEKTNVDIEKVMITDEEEIRTTNPVATEQYGSVSTNLQQGNTQAATADVNTQGVLPGMVWQDRDVYLQGPIWAKIPHTDGHFHPSPLMGGFGLKHPPPQILIKNTPVPADPPTTFNQSKLNSFITQYSTGQVSVEIEWELQKENSKRWNPEIQYTSNYYKSTSVDFAVNTEGVYSEPRPIGTRYLTRNL

SEQ ID NO: 170 - protein, 737 aa, Artificial Sequence
  source: /note="Description of Artificial Sequence: Synthetic polypeptide"
MAADGYLPDWLEDTLSEGIRQWWKLKPGPPPPKPAERHKDDSRGLVLPGYKYLGPFNGLDKGEPVNEADAAALEHDKAYDRQLDSGDNPYLKYNHADAEFQERLKEDTSFGGNLGRAVFQAKKRLLEPLGLVEEAAKTAPGKKRPVEHSPVEPDSSSGTGKAGQQPARKRLNFGQTGDADSVPDPQPIGEPPAAPSGVGSLTMAAGGGAPMADNNEGADGVGNSSGNWHCDSTWMGDRVITTSTRTWALPTYNNHLYKQISNSTSGGSSNDNAYFGYSTPWGYFDFNRFHCHFSPRDWQRLINNNWGFRPKRLSFKLFNIQVKEVTQNEGTKTIANNLTSTIQVFTDSEYQLPYVLGSAHQGCLPPFPADVFMIPQYGYLTLNNGSQAVGRSSFYCLEYFPSQMLRTGNNFQFTYTFEDVPFHSSYAHSQSLDRLMNPLIDQYLYYLSRTQTTGGTTNTQTLGFSQGGPNTMANQAKNWLPGPCYRQQRVSKTSADNNNSEYSWTGATKYHLNGRDSLVNPGPAMASHKDDEEKFFPQSGVLIFGKQGSEKTNVDIEKVMITDEEEIRTTNPVATEQYGSVSTNLQQGNTQAATADVNTQGVLPGMVWQDRDVYLQGPIWAKIPHTDGHFHPSPLMGGFGLKHPPPQILIKNTPVPADPPTTFNQSKLNSFITQYSTGQVSVEIEWELQKENSKRWNPEIQYTSNYYKSTSVDFAVNTEGVYSEPRPIGTRYLTRNL

SEQ ID NO: 171 - protein, 729 aa, Artificial Sequence
  source: /note="Description of Artificial Sequence: Synthetic polypeptide"
MAADGYLPDWLEDNLSEGIREWWDLKPGAPKPKANQQKQDDGRGLVLPGYKYLGPFNGLDKGEPVNAADAAALEHDKAYDQQLKAGDNPYLRYNHADAEFQERLQEDTSFGGNLGRAVFQAKKRVLEPLGLVEEGAKTAPGKKRPIDSPDSSTGIGKKGQQPAKKKLNFGQTGDSESVPDPQPLGEPPAAPSSVGSGTMAAGGGAPTADNNEGADGVGNASGNWHCDSTWLGDRVITTSTRTWALPTYNNHLYKQISSSSSGATNDNHYFGYSTPWGYFDFNRFHCHFSPRDWQRLINNNWGFRPKKLRFKLFNIQVKEVTTNDGVTTIANNLTSTVQVFSDSEYQLPYVLGSAHQGCLPPFPADVFMIPQYGYLTLNNGSQSVGRSSFYCLEYFPSQMLRTGNNFEFSYSFEDVPFHSSYAHSQSLDRLMNPLIDQYLYYLARTQSTTGSTRELQFHQAGPNTMAEQSKNWLPGPCYRQQRLSKNLDFNNNSNFAWTAATKYHLNGRNSLTNPGIPMATNKDDEDQFFPINGVLVFGKTGAANKTTLENVLMTSEEEIKTTNPVATEEYGVVSSNLQSSTAGPQSQTINSQGALPGMVWQNRDVYLQGPIWAKIPHTDGNFHPSPLMGGFGLEHPPPQILIKNTPVPANPPEVFTPAKFASFITQYSTGQVSVEIEWELQKENSKRWNPEIQYTSNYAKSNNVEFAVNPDGVYTEPRPIGTRYLTRNL

SEQ ID NO: 172 - DNA, 3075 bp, Artificial Sequence
  source: /note="Description of Artificial Sequence: Synthetic polynucleotide"
tgagaactttcctttcaacgattgcgtcggacaagatggtgatctggtgggaggaggggaagatgaccgccaaggtcgtggagtcggccaaagccattcttggaggaagcaaggtgcgtgtggaccagaaatgcaagtcctcggcccagatagacccgactcccgtgatcgtcacctccaacaccaacatgtgcgccgtgattgacgggaactcaacgaccttcgagcaccagcagccgttgcaagaccggatgttcaaatttgaacttacccgccgtctggatcatgactttggaaaggtcaccaagcaggaagtgaaagactttttccggtgggcaaaggatcacgtggttgaggtggagcatgaattctacgtcaaaaagggtggagctaagaaaagacccgcccccagtgacgcagatataagtgagcccaaacgggcgcgcgagtcagttgcgcagccatcaacgtcagacgcggaagcttcgatcaactacgcggacaggtaccaaaaacaaatgttctcgtcacgtgggcatgaatctgatgctgtttccctgcagacaatgcgagagaatgaatcagaattcaaatatctgcttcactcacggacagaaagactgtttagagtgctttcccgtgtcagaatctcaacccgtttctgtcgtcaaaaaggcgtatcagaaactgtgctacattcatcatatcatgggaaaggtgccagacgcttgcactgcctgcgatctggtcaatgtggatttggatgactgcatctctgaacaataaatgatttaaatcaggtatggctgccgatggttatcctccagattggctcgaggacactctctctgaagggataagacagtggtggaagctcaaacctggcccaccaccaccaaagcccgcagagcggcataaggacgacagcaggggtcttgtgcttcctgggtacaagtacctcggacccttcaacggactcgacaagggggagccggtcaacgaggcagacgccgcggccctcgagcacgacaaggcctacgaccggcagctcgacagcggagacaacccgtacctcaagtacaaccacgccgacgcagagtttcaggagcgccttaaagaagatacgtcttttgggggcaacctcggacgagcagtcttccaggcgaaaaagagggttcttgaacctctgggcctggttgaggaacctgttaagacggctccgggaaaaaagaggccggtagagcactctcctgtggagccagactcctcctcgggaaccggaaaagcgggccagcggcctgcaagaaaaagattaaattttggtcagactggagacgcagactccgtacctgacccccagcctctcggacagccaccagcagccccctctggtctgggatctactacaatggctacaggcagtggcgcaccaatggcagacaataacgagggtgccgatggagtgggtaattcctcaggaaattggcattgcgattcccaatggctgggcgacagagtcatcaccaccagcacccgaacctgggccctgcccacatacaacaaccacctctacaagcaaatctccagccaatcaggagccagcaacgacaaccactactttggctacagcaccccctgggggtattttgacttcaacagattccactgccacttttcaccacgtgactggcaaagactcatcaacaacaactggggattccggcccaaaagactcaacttcaagctctttaatattcaagtcaaagaggtcacgcagaatgacggtacgacgacgattgccaataaccttaccagcacggttcaggtgtttactgactcggagtaccagctcccgtacgtcctgggctcggcgcatcaaggatgcctcccgccgtttccagcggacgtcttcatggtcccacagtatggatacctcaccctgaacaacgggagtcaggcggtaggacgctcttccttttactgcctggagtactttccttctcagatgctgcgtactggaaacaactttcagttcagctacacttttgaagacgtgcctttccacagcagctacgctcacagccagagtctggatcggctgatgaatcctctgatcgaccagtacctgtattatctgaacaagacacaaacaaatagtggaactcttcagcagtctcggctactgtttagccaagctggaccaaccaacatgtctcttcaagctaaaaactggctgcctggaccttgctacagacagcagcgtctgtcaaaacaggcaaacgacaacaacaacagcaactttccctggactgcagctacaaagtatcatctaaatggccgggactcgttggttaatccaggaccagctatggccagtcacaaggatgacgaagaaaagtttttccccatgcatggaaccctgatatttggtaaacaaggaacaaatgccaacgacgcggatttggaaaatgtcatgattacagatgaagaagaaatcagggccaccaatcccgtggctacggagcagtacgggactgtgtcaaataatttgcaaaactcaaacactggtccaactactggaactgtcaatcgccaaggagcgttacctggtatggtgtggcaggatcgagacgtgtacctgcagggacccatttgggccaagattcctcacaccgatggacactttcatccttctccactgatgggaggttttggactcaaacacccgcctcctcagatcatgatcaaaaacactcccgttccagccaatcctcccacaaacttcagttctgccaagtttgcttctttcatcacacagtattccacgggacaggtcagcgtggagatcgagtgggagctgcagaaggagaacagcaaacgctggaatcccgaaattcagtacacttccaactacaacaagtctgttaatgtggactttactgtggacactaatggtgtgtattcagagcctcgccccattggcaccagatacctgactcgtaatctgtaattgcttgttaatcaataaaccgtttaattcgtttcagttgaactttggtctctgcgaagggcgaa

SEQ ID NO: 173 - DNA, 3142 bp, Artificial Sequence
  source: /note="Description of Artificial Sequence: Synthetic polynucleotide"
aaaacgacgggccagtgattgtaatacgactcactatagggcgaaattgaaattagcggccgcgaattcgcctttcgcagagaccaaagttcaactgaaacgaattaaacggtttattgattaacaagcaattacagattacgagtcaggtatctggtgccaatggggcgaggctctgaatacacaccattagtgtccacagtaaagtccacattaacagacttgttgtagttggaagtgtactgaatttcgggattccagcgtttgctgttctccttctgcagctcccactcgatctccacgctgacctgtcccgtggaatactgtgtgatgaaagaagcaaacttggcagaactgaagtttgtgggaggattggctggaacgggagtgtttttgatcatgatctgaggaggcgggtgtttgagtccaaaacctcccatcagtggagaaggatgaaagtgtccatcggtgtgaggaatcttggcccaaatgggtccctgcaggtacacgtctcgatcctgccacaccataccaggtaacgctccttggtgattgacagttccagtagttggaccagtgtttgagttttgcaaattatttgacacagtcccgtactgctccgtagccacgggattggtggccctgatttcttcttcatctgtaatcatgacattttccaaatccgcgtcgttggcatttgttccttgtttaccaaatatcagggttccatgcatggggaaaaacttttcttcgtcatccttgtgactggccatagctggtcctggattaaccaacgagtcccggccatttagatgatactttgtagctgcagtccagggaaagttgctgttgttgttgtcgtttgcctgttttgacagacgctgctgtctgtagcaaggtccaggcagccagtttttagcttgaagagacatgttggttggtccagcttggctaaacagtagccgagactgctgaagagttccactatttgtttgtgtcttgttcagataatacaggtactggtcgatcagaggattcatcagccgatccagactctggctgtgagcgtagctgctgtggaaaggcacgtcttcaaaagtgtagctgaactgaaagttgtttccagtacgcagcatctgagaaggaaagtactccaggcagtaaaaggaagagcgtcctaccgcctgactcccgttgttcagggtgaggtatccatactgtgggaccatgaagacgtccgctggaaacggcgggaggcatccttgatgcgccgagcccaggacgtacgggagctggtactccgagtcagtaaacacctgaaccgtgctggtaaggttattggcaatcgtcgtcgtaccgtcattctgcgtgacctctttgacttgaatattaaagagcttgaagttgagtcttttgggccggaatccccggttgttgttgacgagtctttgccagtcacgtggtgaaaagtggcagtggaatctgttgaagtcaaaatacccccagggggtgctgtagccaaagtagtggttgtcgttgctggctcctgattggctggagatttgcttgtagaggtggttgttgtatgtgggcagggcccaggttcgggtgctggtggtgatgactctgtcgcccagccattgggaatcgcaatgccaatttcctgaggaattacccactccatcggcaccctcgttattgtctgccattggtgcgccactgcctgtagccattgtagtagatcccagaccagagggggctgctggtggctgtccgagaggctgggggtcaggtacggagtctgcgtctccagtctgaccaaaatttaatctttttcttgcaggctgctggcccgcttttccggttcccgaggaggagtctggctccacaggagagtgctctaccggcctcttttttcccggagccgtcttaacaggctcctcaaccaggcccagaggttcaagaaccctctttttcgcctggaagactgctcgtccgaggttgcccccaaaagacgtatcttctttaaggcgctcctgaaactctgcgtcggcgtggttgtacttgaggtacgggttgtctccgctgtcgagctgccggtcgtaggccttgtcgtgctcgagggccgcggcgtctgcctcgttgaccggctcccccttgtcgagtccgttgaagggtccgaggtacttgtacccaggaagcacaagacccctgctgtcgtccttatgccgctctgcgggctttggtggtggtgggccaggtttgagcttccaccactgtcttattccttcagagagagtgtcctcgagccaatctggaagataaccatcggcagccatacctgatttaaatcatttattgttcagagatgcagtcatccaaatccacattgaccagatcgcaggcagtgcaagcgtctggcacctttcccatgatatgatgaatgtagcacagtttctgatacgcctttttgacgacagaaacgggttgagattctgacacgggaaagcactctaaacagtctttctgtccgtgagtgaagcagatatttgaattctgattcattctctcgcattgtctgcagggaaacagcatcagattcatgcccacgtgacgagaacatttgttttggtacctgtccgcgtagttgatcgaagcttccgcgtctgacgtcgatggctgcgcaactgactcgcgcgcccgtttgggctcacttatatctgcgtcactgggggcgggtcttttcttagctccaccctttttgacgtagaattcatgctccacctcaaccacgtgatcctttgcccaccggaaaaagtctttcacttcctgcttggtgacctttccaaagtcatgatccagacggcgggtaagttcaaatttgaacatccggtcttgcaacggctgctggtgctcgaaggtcgttgagttcccgtcaatcacggcgcacatgttggtgttggaggtgacgatcacgggagtcgggtctatctgggccgaggacttgcatttctggtccacacgcaccttgcttcctccaagaatggctttggccgactccacgaccttggcggtcatcttcccctcctcccaccagatcaccatcttgtcgacgcaatggtaaaaggaaagttctcattgg

SEQ ID NO: 174 - protein, 735 aa, Adeno-associated virus-2
MAADGYLPDWLEDTLSEGIRQWWKLKPGPPPPKPAERHKDDSRGLVLPGYKYLGPFNGLDKGEPVNEADAAALEHDKAYDRQLDSGDNPYLKYNHADAEFQERLKEDTSFGGNLGRAVFQAKKRVLEPLGLVEEPVKTAPGKKRPVEHSPVEPDSSSGTGKAGQQPARKRLNFGQTGDADSVPDPQPLGEPPATPAAVGPTTMASGGGAPMADNNEGADGVGNASGNWHCDSTWLGDRVITTSTRTWALPTYNNHLYKQISSASTGASNDNHYFGYSTPWGYFDFNRFHCHFSPRDWQRLINNNWGFRPKRLNFKLFNIQVKEVTQNDGTTTIANNLTSTVQVFTDSEYQLPYVLGSAHQGCLPPFPADVFMIPQYGYLTLNNGSQAVGRSSFYCLEYFPSQMLRTGNNFTFSYTFEDVPFHSSYAHSQSLDRLMNPLIDQYLYYLNRTQNQSGSAQDKALLFSRGSPAGMSVQPKNWLPGPCYRQQRVSKTKTDNNNSNFTWTGASKYNLNGRESIINPGTAMASHKDDKDKFFPMSGVMIFGKESAGASNTALDNVMITDEEEIKATNPVATERFGTVAVNFQSSSTDPATGDVHVMGALPGMVWQDRDVYLQGPIWAKIPHTDGHFHPSPLMGGFGLKHPPPQILIKNTPVPANPPAEFSATKFASFITQYSTGQVSVEIEWELQKENSKRWNPEVQYTSNYAKSANVDFTVDNNGLYTEPRPIGTRYLTRP

SEQ ID NO: 175 - protein, 740 aa, Adeno-associated virus-2
MAADGYLPDWLEDTLSEGIRQWWKLKPGPPPPKPAERHKDDSRGLVLPGYKYLGPFNGLDKGEPVNAADAAALEHDKAYDRQLDSGDNPYLKYNHADAEFQERLKEDTSFGGNLGRAVFQAKKRVLEPLGLVEEPVKTAPGKKRPVEHSPVEPDSSSGTGKAGQQPARKRLNFGQTGDADSVPDPQPLGQPPAAPSGLGTNTMATGSGAPMADNNEGADGVGNSSGNWHCDSTWMGDRVITTSTRTWALPTYNNHLYKQISSQSGASNDNHYFGYSTPWGYFDFNRFHCHFSPRDWQRLINNNWGFRPKRLNFKLFNIQVKEVTQNDGTTTIANNLTSTVQVFTDSEYQLPYVLGSAHQGCLPPFPADVFMVPQYGYLTLNNGSQAVGRSSFYCLEYFPSQMLRTGNNFTFSYTFEDVPFHSSYAHSQSLDRLMNPLIDQYLYYLSRTNTPSGTTTQSGLQFSQAGASDIRDQSRNWLPGPCYRQQRVSKTSADNNNSEYSWTGATKYHLNGRDSLVNPGPAMASHKDDEEKFFPQSGVLIFGKQGSEKTNVDIEKVMITDEEEIRTTNPVATEQYGSVSTNLQRGNRQAATADVNTQGVLPGMVWQDRDVYLQGPIWAKIPHTDGHFHPSPLMGGFGLKHPPPQILIKNTPVPANPSTTFSAAKFASFITQYSTGQVSVEIEWELQKENSKRWNPEIQYTSNYNKSVNVDFTVDTNGVYSEPRPIGTRYLTRNLLLAAA

SEQ ID NO: 176 - protein, 734 aa, Adeno-associated virus-2
MAADGYLPDWLEDTLSEGIRQWWKLKPGPPPPKPAERHKDDSRGLVLPGYKYLGPFNGLDKGEPVNEADAAALEHDKAYDRQLDSGDNPYLKYNHADAEFQERLKEDTSFGGNLGRAVFQAKKRVLEPLGLVEEPVKTAPGKKRPVEHSPVEPDSSSGTGKAGQQPARKRLNFGQTGDADSVPDPQPLGQPPAAPSGLGTNTMATGSGAPMADNNEGADGVGNSSGNWHCDSTWMGDRVITTSTRTWALPTYNNHLYKQISSQSGASNDNHYFGYSTPWGYFDFNRFHCHFSPRDWQRLINNNWGFRPKRLNFKLFNIQVKEVTQNDGTTTIANNLTSTVQVFTDSEYQLPYVLGSAHQGCLPPFPADVFMVPQYGYLTLNNGSQAVGRSSFYCLEYFPSQMLRTGNNFTFSYTFEDVPFHSSYAHSQSLDRLMNPLIDQYLYYLSRTNTPSGTTTQSGLQFSQAGASDIRDQSRNWLPGPCYRQQRVSKTSADNNNSEYSWTGATMYHLNGRDSLVNPGPAMASHKDDEEKFFPQSGVLIFGKQGSEKTNVDIEKVMITDEEEIRTTNPVATEQYGSVSTNLQRGNRQAATADVNTQGVLPGMVWQDRDVYLQGPIWAKIPHTDGHFHPSPLMGGFGLKHPPPQILIKNTPVPANPSTTFSAAKFASFITQYSTGQVSVEIEWELQKENSKRWNPEIQYTSNYNKSINVDFTVDTNGVYSEPRPIGTRYLTRN

SEQ ID NO: 177 - protein, 734 aa, Adeno-associated virus-2
MAADGYLPDWLEDTLSEGIRQWWKLKPGPPPPKPAERHKDDSRGLVLPGYKYLGPFNGLDKGEPVNEADAAALEHDKAYDRQLDSGDNPYLKYNHADAEFQERLKEDTSFGGNLGRAVFQAKKRVLEPLGLVEEPVKTAPGKKRPVEHSPVEPDSSSGTGKAGQQPARKRLNFGQTGDADSVPDPQPLGQPPAAPSGLGTNTMATGSGAPMADNNEGADGVGNSSGNWHCDSTWMGDRVITTSTRTWALPTYNNHLYKQISSQSGASNDNHYFGYSTPWGYFDFNRFHCHFSPRDWQRLINNNWGFRPKRLNFKLFNIQVKEVTQNDGTTTIANNLTSTVQVFTDSEYQLPYVLGSAHQGCLPPFPADVFMVPQYGYLTLNNGSQAVGRSSFYCLEYFPSQMLRTGNNFTFSYTFEDVPFHSSYAHSQSLDRLMNPLIDQYLYYLSRTNTPSGTTTQSGLQFSQAGASDIRDQSRNWLPGPCYRQQRVSKTSADNNNSEYSWTGATKYHLNGRDSLVNPGPAMASHKDDEEKFFPQSGVLIFGKQGSEKTNVDIEKVMITDEEEIRTTNPVATEQYGSVSTNLQRGNRQAATADVNTQGVLPGMVWQDRDVYLQGPIWAKIPHTDGHFHPSPLMGGFGLKHPPPQILIKNTPVPANPSTTFSEAKFASFITQYSTGQVSVEIEWELQKENSKRWNPEIQYTSNYNKSVNVDFTVDTNGVYSEPRPIGTRYLTRN

SEQ ID NO: 178 - protein, 739 aa, Adeno-associated virus-2
MAADGYLPDWLEDTLSEGIRQWWKLKPGPPPPKPAERHKDDSRGLVLPGYKYLGPFNGLDKGEPVNEADAAALEHDKAYDRQLDSGDNPYLKYNHADAEFQERLKEDTSFGGNLGRAVFQAKKRVLEPLGLVEEPVKTAPGKKRPVEHSPVEPDSSSGTGKAGQQPARKRLNFGQTGDADSVPDPQPLGQPPAAPSGLGTNTMATGSGAPMADNNEGADGVGNSSGNWHCDSTWMGDRVITTSTRTWALPTYNNHLYKQISSQSGASNDNHYFGYSTPWGYFDFNRFHCHFSPRDWQRLINNNWGFRPKRLNFKLFNIQVKEVTQNDGTTTIANNLTSTVQVFTDSEYQLPYVLGSAHQGCLPPFPADVFMVPQYGYLTLNNGSQAVGRSSFYCLEYFPSQMLRTGNNFTFSYTFEDVPFHSSYAHSQSLDRLMNPLIDQYLYYLSRTNTPSGTTTQSGLQFSQAGASDIRDQSRNWLPGPCYRQQRVSKTSADNNNSEYSWTGATKYHLNGRDSLVNPGPAMASHKDDEEKFFPQSGVLIFGKQGSEKTNVDIEKVMITDEEEIRTTNPVATEQYGSVSTNLQRGNRQAATADVNTQGVLPGMVWQDRDVYLQGPIWAKIPHTDGHFHPSPLMGGFGLKHPPPQILIKNTPVPANPSTTFSAAKFASFITQYSTGQVSVEIEWELQKENSKRWNPEIQYTSNYNKSVNVDFTVDTNGVYSEPRPIGTRYLTRNLLLAA

SEQ ID NO: 179 - protein, 725 aa, Adeno-associated virus-2
MAADGYLPDWLEDTLSEGIRQWWKLKPGPPPPKPAERHKDDSRGLVLPGYKYLGPFNGLDKGEPVNEADAAALEHDKAYDRQLDSGDNPYLKYNHADAEFQERLKEDTSFGGNLGRAVFQAKKRVLEPLGLVEEPVKTAPGKKRPVEHSPVEPDSSSGTGKAGQQPARKRLNFGQTGDADSVPDPQPLGQPPAAPSGLGTNTMATGSGAPMADNNEGADGVGNSSGNWHCDSTWMGDRVITTSTRTWALPTYNNHLYKQISSQSGASNDNHYFGYSTPWGYFDFNRFHCHFSPRDWQRLINNNWGFRPKRLNFKLFNIQVKEVTQNDGTTTIANNLTSTVQVFTDSEYQLPYVLGSAHQGCLPPFPADVFMVPQYGYLTLNNGSQAVGRSSFYCLEYFPSQMLRTGNNFTFSYTFEDVPFHSSYAHSQSLDRLMNPLIDQYLYYLSRTNTPSGTTTQSGLQFSQAGASDIRDQSRNWLPGPCYRQQRVSKTSADNNNSEYSWTGATKYHLNGRDSLVNPGPAMASHKDDEEKFFPQSGVLIFGKQGSEKTNVDIEKVMITDEEEIRTTNPVATEQYGSVSTNLQRGNRQAATADVNTQGVLPGMVWQDRDVYLQGPIWAKIPHTDGHFHPSPLMGGFGLKHPPPQILIKNTPVPANPSTTFSAAKFASFITQYSTGQVSVEIEWELQKENSKRWNPEIQYTSNYNKSVNVDFTVDTNGVYSEPRP

SEQ ID NO: 180 - protein, 707 aa, Adeno-associated virus-2
MAADGYLPDWLEDTLSEGIRQWWKLKPGPPPPKPAERHKDDSRGLVLPGYKYLGPFNGLDKGEPVNEADAAALEHDKAYDRQLDSGDNPYLKYNHADAEFQERLKEDTSFGGNLGRAVFQAKKRVLEPLGLVEEPVKTAPGKKRPVEHSPVEPDSSSGTGKAGQQPARKRLNFGQTGDADSVPDPQPLGQPPAAPSGLGTNTMATGSGAPMADNNEGADGVGNSSGNWHCDSTWMGDRVITTSTRTWALPTYNNHLYKQISSQSGASNDNHYFGYSTPWGYFDFNRFHCHFSPRDWQRLINNNWGFRPKRLNFKLFNIQVKEVTQNDGTTTIANNLTSTVQVFTDSEYQLPYVLGSAHQGCLPPFPADVFMVPQYGYLTLNNGSQAVGRSSFYCLEYFPSQMLRTGNNFTFSYTFEDVPFHSSYAHSQSLDRLMNPLIDQYLYYLSRTNTPSGTTTQSGLQFSQAGASDIRDQSRNWLPGPCYRQQRVSKTSADNNNSEYSWTGATKYHLNGRDSLVNPGPAMASHKDDEEKFFPQSGVLIFGKQGSEKTNVDIEKVMITDEEEIRTTNPVATEQYGSCIYQPPERQQTSSYRRCQHTRRSSRHGLAGQRCVPSGAHLGKDSTHGRTFSPLSPHGWIRTTPSSTDSHQEHPGTCESFDHLQCGKVCFLHHTVLHGTGQRGDRVRAAEGKQQTLESRNSVHFQLQQVC

SEQ ID NO: 181 - protein, 739 aa, Adeno-associated virus-2; identical to SEQ ID NO: 178

SEQ ID NO: 182 - protein, 737 aa, Adeno-associated virus-2
MASDGYLPDWLEDNLSEGIREWWDLKPGAPKPKANQQKQDDGRGLVLPGYKYLGPFNGLDKGEPVNAADAAALEHDKAYDQQLKAGDNPYLRYNHADAEFQERLQEDTSFGGNLGRAVFQAKKRVLEPFGLVEEGAKTAPGKKRPVEQSPQEPDSSSGIGKTGQQPAKKRLNFGQTGDSESVPDPQPLGEPPATPAAVGPTTMASGGGAPMADNNEGADGVGNASGNWHCDSTWLGDRVITTSTRTWALPTYNNHLYKQISSASTGASNDNHYFGYSTPWGYFDFNRFHCHFSPRDWQRLINNNWGFRPKRLNFKLFNIQVKEVTTNDGTTTIANNLTSTVQVFTDSEYQLPYVLGSAHQGCLPPFPADVFMVPQYGYLTLNNGSQAVGRSSFYCLEYFPSQMLRTGNNFTFSYTFEDVPFHSSYAHSQSLDRLMNPLIDQYLYYLSRTNTPSGTTTQSGLQFSQAGASDIRDQSRNWLPGPCYRQQRVSKTSADNNNSEYSWTGATKYHLNGRDSLVNPGPAMASHKDDEEKFFPQSGVLIFGKQGSEKTNVDIEKVMITDEEEIRTTNPVATEQYGSVSTNLQRGNRQAATADVNTQGVLPGMVWQDRDVYLQGPIWAKIPHTDGHFHPSPLMGGFGLKHHPPQILIKNTPVPANPSTTFSAAKFASFITQYSTGQVSVEIEWELQKENSKRWNPEIQYTSNYNKSVNVDFTVDTNGVYSEPRPIGTRYLTRNLL

SEQ ID NO: 183 - protein, 741 aa, Adeno-associated virus-2
MAADGYLPDWLEDTLSEGIREWWALKPGAPKPKANQQKQDDGRGLVLPGYKYLGPFNGLDKGEPVNEADAAALEHDKAYDQQLQAGDNPYLRYNHADAEFQERLQEDTSFGGNLGRAVFQAKKRVLEPLGLVEEPVKTAPGKKRPVEHSPVEPDSSSGTGKSGQQPARKRLNFGQTGDADSVPDPQPLGQPPAAPSGLGTNTMATGSGAPMADNNEGADGVGNSSGNWHCDSTWMGDRVITTSTRTWALPTYNNHLYKQISSQSGASNDNHYFGYSTPWGYFDFNRFHCHFSPRDWQRLINNNWGFRPKRLNFKLFNIQVKEVTQNDGTTTIANNLTSTVQVFTDSEYQLPYVLGSAHQGCLPPFPADVFMVPQYGYLTLNNGSQAVGRSSFYCLEYFPSQMLRTGNNFTFSYTFEDVPFHSSYAHSQSLDRLMNPLIDQYLYYLSRTNTPSGTTTQSGLQFSQAGASDIRDQSRNWLPGPCYRQQRVSKTSADNNNSEYSWTGATKYHLNGRDSLVNPGPAMASHKDDEEKFFPQSGVLIFGKQGSEKTNVDIEKVMITDEEEIRTTNPVATEQYGSVSTNLQRGNLANHNNTTNARQAATADVNTQGVLPGMVWQDRDVYLQGPIWAKIPHTDGHFHPSPLMGGFGLKHPPPQILIKNTPVPANPSTTFSAAKFASFITQYSTGQVSVEIEWELQKENSKRWNPEIQYTSNYNKSINVDFTVDTNGVYSEPRPIGTRYL

SEQ ID NO: 184 - protein, 730 aa, Adeno-associated virus-2
MASDGYLPDWLEDNLSEGIREWWDLKPGAPKPKANQQKQDDGRGLVLPGYKYLGPFNGLDKGEPVNAADAAALEHDKAYDQQLKAGDNPYLRYNHADAEFQERLQEDTSFGGNLGRAVFQAKKRVLEPFGLVEEGAKTAPGKKRPVEQSPQEPDSSSGIGKTGQQPAKKRLNFGQTGDSESVPDPQPLGEPPATPAAVGPTTMASGGGAPMADNNEGADGVGNASGNWHCDSTWLGDRVITTSTRTWALPTYNNHLYKQISSASTGASNDNHYFGYSTPWGYFDFNRFHCHFSPRDWQRLINNNWGFRPKRLNFKLFNIQVKEVTTNDGVTTIANNLTSTVQVFSDSEYQLPYVLGSAHQGCLPPFPADVFMIPQYGYLTLNNGSQAVGRSSFYCLEYFPSQMLRTGNNFTFSYTFEDVPFHSSYAHSQSLDRLMNPLIDQYLYYLNRTQNQSGSAQNNDLLFSRGSPAGMSVQPKNWLPGPCYRQQRVSKTKTDNNNSNFTWTGASKYNLNGRESIINPGTAMASHKDDKDKFFPMSGVMIFGKESAGASNTALDNVMITDEEEIKATNPVATERFGTVAVNLQSSSTDPATGDVHVMGALPGMVWQDRDVYLQGPIWAKIPHTDGHFHPSPLMGGFGLKNPPPQILIKNTPVPANPPAEFSATKFASFITQYSTGQVSVEIEWELQKENSKRWNPEVQYTSNYAKSANVDFTVDNNGLYTEPRPIGTR

SEQ ID NO: 185 - protein, 735 aa, Adeno-associated virus-2
  MOD_RES (239)..(239): Any amino acid
MASDGYLPDWLEDNLSEGIREWWDLKPGAPKPKANQQKQDDGRGLVLPGYKYLGPFNGLDKGEPVNAADAAALEHDKAYDQQLKAGDNPYLRYNHADAEFQERLQEDTSFGGNLGRAVFQAKKRVLEPFGLVEEGAKTAPGKKRPVEQSPQEPDSSSGIGKTGQQPAKKRLNFGQTGDSESVPDPQPLGEPPATPAAVGPTTMASGGGAPMADNNEGADGVGNASGNWHCDSTWLGDRXITTSTRTWALPTYNNHLYKQISSASTGASNDNHYFGYSTPWGYFDFNRFHCHFSPRDWQRLINNNWGFRPKRLNFKLFNIQVKEVTTNDGVTTIANNLTSTVQVFSDSEYQLPYVLGSAHQGCLPPFPADVFMIPQYGYLTLNNGSQAVGRSSFYCLEYFPSQMLRTGNNFTFSYTFEDVPFHSSYAHSQSLDRLMNPLIDQYLYYLNRTQNQSGSAQNNDLLFSRGSPAGMSVQPKNWLPGPCYRQQRVSKTKTDNNNSNFTWTGASKYNLNGRESIINPGTAMASHKDDKDKFFPMSGVMIFGKESAGASNTALDNVMITDEEEIKATNPVATERFGTVAVNLQSSSTDPATGDVHVMGALPGMVWQDRDVYLQGPIWAKIPHTDGHFHPSPLMGGFGLKNPPPQILIKNTPVPANPPAEFSATKFASFITQYSTGQVSVEIEWELQKENSKRWNPEVQYTSNYAKSANVDFTVDNNGLYTEPRPIGTRYLTRP

SEQ ID NO: 186 - protein, 733 aa, Adeno-associated virus-2
MASDGYLPDWLEDNLSEGIREWWDLKPGAPKPKANQQKQDDGRGLVLPGYKYLGPFNGLDKGEPVNAADAAALEHDKAYDQQLKAGDNPYLRYNHADAEFQERLQEDTSFGGNLGRAVFLAKKRVLEPFGLVEEGAKTAPGKKRPVEQSPQEPDSSSGIGKTGQQPAKKRLNFGQTGDSESVPDPQPLGEPPATPAAVGPTTMASGGGAPMADNNEGADGVGNASGNWHCDSTWLGDRVITTSTRTWALPTYNNHLYKQISSASTGASNDNHYFGYSTPWGYFDFNRFHCHFSPRDWQRLINNNWGFRPKRLNFKLFNIQVKEVTTNDGVTTIANNLTSTVQVFSDSEYQLPYVLGSAHQGCLPPFPADVFMIPQYGYLTLNNGSQAVGRSSFYCLEYFPSQMLRTGNNFTFSYTFEDVPFHSSYAHSQSLDRLMNPLIDQYLYYLNRTQNQSGSAQNNDLLFSRGSPAGMSVQPKNWLPGPCYRQQRVSKTKTDNNNSNFTWTGASKYNLNGRESIINPGTAMASHKDDKDKFFPMSGVMIFGKESAGASNTALDNVMITDEEEIKATNPVATERFGTVAVNLQSSSTDPATGDVHVMGALPGMVWQDRDVYLQGPIWAKIPHTDGHFHPSPLMGGFGLKNPPPQILIKNTPVPANPPAEFSATKFASFITQYSTGQVSVEIEWELQKENSKRWNPEVQYTSNYAKSANVDFTVDNNGLYTEPRPIGTRYLT

SEQ ID NO: 187 - protein, 734 aa, Adeno-associated virus-2
MAADGYLPDWLEDTLSEGIRQWWKLKPGPPPPKPAERHKDDSRGLVLPGCKYLGPFNGLDKGEPVNEADAAALEHDKAYDRQLDSGDNPYLKYNHADAEFQERLKEDTSFGGNLGRAVFQAKKRVLEPLGLVEEPVKTAPGKKRPVEHSPVEPDSSSGTGKAGQQPARKRLNFGQTGDADSVPDPQPLGQPPAAPSGLGTNTMATGSGAPMADNNEGADGVGNSSGNWHCDSTWMGDRVITTSTRTWALPTYNNHLYKQISSQSGASNDNHYFGYSTPWGYFDFNRFHCHFSPRDWQRLINNNWGFRPKRLNFKLFNIQVKEVTQNDGTTTIANNLTSTVQVFSDSEYQLPYVLGSAHQGCLPPFPADVFMIPQYGYLTLNNGSQAVGRSSFYCLEYFPSQMLRTGNNFTFNYTFEDVPFHSSYAHSQSLDRLMNPLIDQYLYYLNRTQNQSGSAQNNDLLFSRGSPAGMSVQPKNWLPGPCYRQQRVSKTKTDNNNSNFTWTGASKYNLNGRESIINPGTAMASHKDDKDKFFPMSGVMIFGKESAGASNTALDNVMITDEEEIKATNPVATERFGTVAVNLQSSSTDPATGDVHVMGALPGMVWQDRDVYLQGPIWAKIPHTDGHFHPSPLMGGFGLKNPPPQILIKNTPVPANPPAEFSATKFASFITQYSTGQVSVEIEWELQKENSKRWNPEVQYTSNYAKSANVDFTVDNNGLYTEPRPIGTRYLTRP

SEQ ID NO: 188 - protein, 734 aa, Adeno-associated virus-2
MAADGYLPDWLEDTLSEGIRQWWKLKPGPPPPKPAERHKDDSRGLVLPGYKYLGPFNGLDKGEPVNEADAAALEHDKAYDRQLDSGDNPYLKYNHADAEFQERLKEDTSFGGNLGRAVFQAKKRVLEPLGLVEEPVKTAPGKKRPVEHSPVEPDSSSGTGKAGQQPARKRLNFGQTGDADSVPDPQPLGQPPAAPSGLGTNTMATGSGAPMADNNEGADGVGNSSGNWHCDSTWMGDRVITTSTRTWALSTYNNHLYKQISSQSGASNDNHYFGYSTPWGYFDFNRFHCHFSPRDWQRLINNNWGFRPKRLNFKLFNIQVKEVTQNDGTTTIANNLTSTVQVFTDSEYQLPYVLGSAHQGCLPPFPADVFMVPQYGYLTLNNGSQAVGRSSFYCLEYFPSQMLRTGNNFTFSYTFEDVPFHSSYAHSQSLDRLMNPLIDQYLYYLSRTNTPSGTTTQSRLQFSQAGASDIRDQSRNWLPGPCYRQQRVSKTSADNNNSEYSWTGATKYHLNGRDSLVNPGPAMASHKDDEEKFFPQSGVLIFGKQGSEKTNVDIEKVMITDEEEIRTTNPVATEQYGSVSTNLQRGNRQAATADVNTQGVLPGMVWQDRDVYLQGPIWAKIPHTDGHFHPSPLMGGFGLKHPPPQILIKNTPVPANPSTTFSAAKFASFITQYSTGQVSVEIEWELQKENSKRWNPEIQYTSNYNKSINVDFTVDTNGVYSEPRPIGTRYLTRN

SEQ ID NO: 189 - protein, 738 aa, Adeno-associated virus-2
MAADGYLPDWLEDTLSEGIRQWWKLKPGPPPPKPAERHKDDSRGLVLPGYKYLGPFNGLDKGEPVNEADAAALEHDKAYDRQLDGGDNPYLKYNHADAEFQERLKEDTSFGGNLGRAVFQAKKRVLEPLGLVEEPVKTAPGKKRPVEHSPVEPDSSSGTGKAGQQPARKRLNFGQTGDADSVPDPQPLGQPPAAPSGLGTNTMATGSGAPMADNNEGADGVGNSSGNWHCDSTWMGDRVITTSTRTWALPTYNNHLYKQISSQSGASNDNHYFGYSTPWGYFDFNRFHCHFSPRDWQRLINNNWGFRPKRLNFKLFNIQVKEVTQNDGTTTIANNLTSTVQVFTDSEYQLPYVLGSAHQGCLPPFPADVFMVPQYGYLTLNNGSQAVGRSSFYCLEYFPSQMLRTGNNFTFSYTFEDVPFHSSYAHSQSLDRLMNPLIDQYLYYLSRTNTPSGTTTQSGLQFSQAGASDIRDQSRNWLPGPCYRQQRVSKTSADNNNSEYSWTGATKYHLNGRDSLVNPGPAMASHKDDEEKFFPQSGVLIFGKQGSEKTNVDIEKVMITDEEEIRTTNPVATEQYGSVSTNLQRGNRQAATADVNTQGVLPGMVWQDRDVYLQGPIWAKIPHTDGHFHPSPLMGGFGLKHPPPQILIKNTPVPANPSTTFSAAKFASFITQYSTGQVSVEIEWELQKENSKRWNPEIQYTSNYNKSVNVDFTVDTNGVYSEPRPIGTRYLTRNLLRP

SEQ ID NO: 190 - DNA, 2208 bp, Artificial Sequence
  source: /note="Description of Artificial Sequence: Synthetic polynucleotide"
atggctgccgatggttatcttccagattggctcgaggacactctctctgaaggaataagacagtggtggaagctcaaacctggcccaccaccaccaaagcccgcagagcggcataaggacgacagcaggggtcttgtgcttcctgggtacaagtacctcggacccttcaacggactcgacaagggggagccggtcaacgaggcagacgccgcggccctcgagcacgacaaggcctacgaccggcagctcgacagcggagacaacccgtacctcaagtacaaccacgccgacgcagagtttcaggagcgccttaaagaagatacgtcttttgggggcaacctcggacgagcagtcttccaggcgaaaaagagggttcttgaacctctgggcctggttgaggaacctgttaagacggctccgggaaaaaagaggccggtagagcactctcctgtggagccagactcctcctcgggaaccggaaaagcgggccagcagcctgcaagaaaaagattaaattttggtcagactggagacgcagactccgtacctgacccccagcctctcggacagccaccagcagccccctctggtctgggatctactacaatggctacaggcagtggcgcaccaatggcagacaataacgagggtgccgatggagtgggtaattcctcaggaaattggcattgcgattcccaatggctgggcgacagagtcatcaccaccagcacccgaacctgggccctgcccacatacaacaaccacctctacaagcaaatctccagccaatcaggagccagcaacgacaaccactactttggctacagcaccccctgggggtattttgacttcaacagattccactgccacttttcaccacgtgactggcaaagactcatcaacaacaactggggattccggcccaaaagactcaacttcaagctctttaatattcaagtcaaagaggtcacgcagaatggcggtacgacgacgattgccaataaccttaccagcacggttcaggtgtttactgactcggagtaccagctcccgtacgtcctgggctcggcgcatcaaggatgcctcccgccgtttccagcggacgtcttcatggtcccacagtatggatacctcaccctgaacaacgggagtcaggcggtaggacgctcttccttttactgcctggagtactttccttctcagatgctgcgtactggaaacaactttcagttcagctacacttttgaagacgtgcctttccacagcagctacgctcacagccagagtctggatcggctgatgaatcctctgatcgaccagtacctgtattatctgaacaagacacaaacaaatagtggaactcttcagcagtctcggctactgtttagccaagctggaccaaccaacatgtctcttcaagctaaaaactggctgcctggaccttgctacagacagcagcgtctgtcaaaacaggcaaacggcaacaacaacagcaactttccctggactgcagctacaaagtatcatctaaatggccgggactcgttggttaatccaggaccagctatggccagtcacaaggatgacgaagaaaagtttttccccatgcatggaaccctgatatttggtaaacaaggaacaaatgccaacgacgcggatttggaaaatgtcatgattacagatgaagaagaaatcagggccaccaatcccgtggctacggagcagtacgggactgtgtcaaataatttgcaaaactcaaacactggtccaactactggaactgtcaatcaccaaggagcgttacctggtatggtgtggcaggatcgagacgtgtacctgcagggacccatttgggccaagattcctcacaccgatggacactttcatccttctccactgacgggaggttttggactcaaacacccgcctcctcagatcatgatcaaaaacactcccgttccagccaatcctcccacaaacttcagttctgccaagtttgcttctttcatcacacagtattccacgggacaggtcagcgtggagatcgagtgggagctgcagaaggagaacagcaaacgctggaatcccgaaattcagtacacttccaactacaacaagtctgttaatgtggactttactgtggacactaatggtgtgtattcagagcctcgccccattggcaccagatacctgactcgtaatctgtaa

SEQ ID NO: 191 - protein, 735 aa, Artificial Sequence
  source: /note="Description of Artificial Sequence: Synthetic polypeptide"
MAADGYLPDWLEDTLSEGIRQWWKLKPGPPPPKPAERHKDDSRGLVLPGYKYLGPFNGLDKGEPVNEADAAALEHDKAYDRQLDSGDNPYLKYNHADAEFQERLKEDTSFGGNLGRAVFQAKKRVLEPLGLVEEPVKTAPGKKRPVEHSPVEPDSSSGTGKAGQQPARKRLNFGQTGDADSVPDPQPLGQPPAAPSGLGSTTMATGSGAPMADNNEGADGVGNSSGNWHCDSQWLGDRVITTSTRTWALPTYNNHLYKQISSQSGASNDNHYFGYSTPWGYFDFNRFHCHFSPRDWQRLINNNWGFRPKRLNFKLFNIQVKEVTQNGGTTTIANNLTSTVQVFTDSEYQLPYVLGSAHQGCLPPFPADVFMVPQYGYLTLNNGSQAVGRSSFYCLEYFPSQMLRTGNNFQFSYTFEDVPFHSSYAHSQSLDRLMNPLIDQYLYYLNKTQTNSGTLQQSRLLFSQAGPTNMSLQAKNWLPGPCYRQQRLSKQANGNNNSNFPWTAATKYHLNGRDSLVNPGPAMASHKDDEEKFFPMHGTLIFGKQGTNANDADLENVMITDEEEIRATNPVATEQYGTVSNNLQNSNTGPTTGTVNHQGALPGMVWQDRDVYLQGPIWAKIPHTDGHFHPSPLTGGFGLKHPPPQIMIKNTPVPANPPTNFSSAKFASFITQYSTGQVSVEIEWELQKENSKRWNPEIQYTSNYNKSVNVDFTVDTNGVYSEPRPIGTRYLTRNL

SEQ ID NO: 192 - DNA, 2208 bp, Artificial Sequence
  source: /note="Description of Artificial Sequence: Synthetic polynucleotide"
atggctgccgatggttatcttccagattggctcgaggacactctctctgaaggaataagacagtggtggaagctcaaacctggcccaccaccaccaaagctcgcagagcggcatcaggacgacagcaggggtcttgtgcttcctgggtacaagtacctcggacccttcaacggactcgacaaaggagagccggtcaacgaggcagacgccgcggccctcgagcacgacaaggcctacgaccggcagctcgacagcggagacaacccgtacctcaagtacaaccacgccgacgcggagtttcaggagcgtcttaaagaagatacgtcttttgggggcaacctcggacgagcagtcttccaggcgaaaaagagggttcttgaacctctgggcctggttgaggaacctgttaagacggctccgggaaaaaagaggccggtagagcactctcctgtggagccagactcctcctcgggaaccggaaaggcgggccatcagcctgcgagaaagagattgaattttggtcagactggagacgcagactccgtacctgacccccagcctctcggacagccaccagcagcccccacaagtctgggatctactacaatggctacaggcagtggcgcaccaatggcagacaataacgagggtgccgatggagtgggtaattcctcaggaaattggcattgcgattcccaatggctgggcgacagagtcatcaccaccagcacccgaacctgggccctgcccacctacaacaaccacctctacaagcaaatctccagccaatcaggagcctcgaacgacaaccactactttggctacagcaccccctgggggtattttgacttcaacagattccactgtcacttctccccacgtgattggcaaagactcatcaacaacaactggggattccgacccaagagactcaacttcaagctctttaacattcaagtcaaagaggtcacgcagaatgacggtacgacgacgattgccaataaccttaccagcacggttcaggtgtttactgactcggagtaccagctcccgtacgtcctcggctcggcgcatcaaggatgcctcccgccgtttccagcggacgtcttcacggtcccacagtatggatacctcaccctgaacaacgggagtcaggcggtaggacgctcttccttttactgcctggagtactttccttctcagatgctgcgtactggaaacaaccttaccttcagctacacctttgaggacgttcctttccacagcagctacgctcacagccagagtttggaccggctgatgaatcctctgatcgaccagtatctatattatctgaacaggacacaatcaaatagtggaactcttcagcagtctaggctactgtttagccaagctggacccaccagcatgtctcttcaagctaaaaactggctgcctggaccttgctacagacagcagcgtctttcaaagcaggcaaacgacaacaacaacagcaactttccctggactgcggctacaaagtatcatctaaatggccgggactcgttggttaatccaggaccagctatggccagccacaaagacgatgaagaaaagtttttccccatgcatggaaccctgatatttggtaaacaaggaacaaatgctaacgacgcggatttggagcatgttatgattacagatgaagaagaaatcaggaccaccaatcctgtggctacagagcagtacggaaacgtgtcaaataatttgcaaaactcaaatactggtccaactacagaaaatgtcaatcaccagggagcgttacctggtatggtgtggcaggatcgagacgtgtacctgcagggacccatttgggccaagattcctcacaccgacggacactttcacccttctccactgatgggaggttttggactcaaacacccgcctcctcaaatcatgatcaaaaacactcccgttccagccaatcctcccacaaactacagttctgccaagtttgcttctttcatcacacagtattccacgggccaggtcagcgtggagattgagtgggagctgcggaaggagaacagcaaacgctggaaccccgagatccagtatacttccaactacaacaaatctgttaatgtggactttactgtggacactaatggtgtgtattcagagcctcgccccattggcaccagatacctgactcgtaatctgtaa

SEQ ID NO: 193 - protein, 735 aa, Artificial Sequence
  source: /note="Description of Artificial Sequence: Synthetic polypeptide"
MAADGYLPDWLEDTLSEGIRQWWKLKPGPPPPKLAERHQDDSRGLVLPGYKYLGPFNGLDKGEPVNEADAAALEHDKAYDRQLDSGDNPYLKYNHADAEFQERLKEDTSFGGNLGRAVFQAKKRVLEPLGLVEEPVKTAPGKKRPVEHSPVEPDSSSGTGKAGHQPARKRLNFGQTGDADSVPDPQPLGQPPAAPTSLGSTTMATGSGAPMADNNEGADGVGNSSGNWHCDSQWLGDRVITTSTRTWALPTYNNHLYKQISSQSGASNDNHYFGYSTPWGYFDFNRFHCHFSPRDWQRLINNNWGFRPKRLNFKLFNIQVKEVTQNDGTTTIANNLTSTVQVFTDSEYQLPYVLGSAHQGCLPPFPADVFTVPQYGYLTLNNGSQAVGRSSFYCLEYFPSQMLRTGNNLTFSYTFEDVPFHSSYAHSQSLDRLMNPLIDQYLYYLNRTQSNSGTLQQSRLLFSQAGPTSMSLQAKNWLPGPCYRQQRLSKQANDNNNSNFPWTAATKYHLNGRDSLVNPGPAMASHKDDEEKFFPMHGTLIFGKQGTNANDADLEHVMITDEEEIRTTNPVATEQYGNVSNNLQNSNTGPTTENVNHQGALPGMVWQDRDVYLQGPIWAKIPHTDGHFHPSPLMGGFGLKHPPPQIMIKNTPVPANPPTNYSSAKFASFITQYSTGQVSVEIEWELRKENSKRWNPEIQYTSNYNKSVNVDFTVDTNGVYSEPRPIGTRYLTRNL

SEQ ID NO: 194 - DNA, 2208 bp, Artificial Sequence
  source: /note="Description of Artificial Sequence: Synthetic polynucleotide"
atggctgccgatggttatcttccagattggctcgaggacactctctctgaaggaataagacagtggtggaagctcaaacctggcccaccaccaccaaagcccgcagagcggcatcaggacgacagcaggggtcttgtgcttcctgggtacaagtacctcggacccttcaacggactcgacaaaggagagccggtcaacgaggcagacgccgcggccctcgagcacgacaaggcctacgaccggcagctcgacagcggagacaacccgtacctcaagtacaaccacgccgacgcggagtttcaggagcgtcttaaagaagatacgtcttttgggggcaacctcggacgagcagtcttccaggcgaaaaagagggttcttgaacctctgggcctggttgaggaacctgttaagacggctccgggaaaaaagaggccggtagagcactctcctgtggagccagactcctcctcgggaaccggaaaagcgggccatcagcctgcgagaaagagattgaattttggtcagactggagacgcagactccgtacctgacccccagcctctcggacagccaccagcagcccccacaagtttgggatctactacaatggctacaggcagtggcgcaccaatggcagacaataacgagggtgccgatggagtgggtaattcctcaggaaattggcattgcgattcccaatggctgggcgacagagtcatcaccaccagcacccgaacctgggccctgcccacctacaacaaccacctctacaagcaaatctccagccaatcaggagcctcgaacgacaaccactactttggctacagcaccccctgggggtattttgacttcaacagattccactgtcacttctccccacgtgattggcaaagactcatcaacaacaactggggattccgacccaagagactcaacttcaagctctttaacattcaagtcaaggaggtcacgcagaatgacggtacgacgacgattgccaataaccttaccagcacggttcaggtgtttactgactcggagtaccagctcccgtacgtcctcggctcggcgcatcaaggatgcctcccgccgtttccagcggacgtcttcatggtcccacagtatggatacctcaccctgaacaacgggagtcaggcggtaggacgctcttccttttactgcctggagtactttccttctcagatgctgcgtactggaaacaactttaccttcagctacacctttgaggacgttcctttccacagcagctacgctcacagccagagtttggaccggctgatgaatcctctgatcgaccagtatctatattatctgaacaggacacaatcaaatagtggaactcttcagcagtctaggctactgtttagccaagctggacccaccagcatgtctcttcaagctaaaaactggctgcctggaccttgctacagacagcagcgtctttcaaagcaggcaaacgacaacaacaacagcaactttccctggactgcggctacaaagtatcgtctaaatggccgggactcgttggttaatccaggaccagctatggccagccacaaagacgatgaagaaaagtttttccccatgcatggaaccctgatatttggtaaacaaggaacaaatgctaacgacgcggatttggagcatgttatgattacagatgaagaagaaatcaggaccaccaatcctgtggctacagagcagtacggaaacgtgtcaaataatttgcaaaactcaaatactggtccaactacagaaaatgtcaatcaccagggagcgttacctggtatggtgtggcaggatcgagacgtgtacctgcagggacccatttgggccaagattcctcacaccgacggacactttcacccttctccactgatgggaggttttggactcaaacacccgcctcctcaaatcatgatcaaaaacactcccgttccagccaatcctcccacaaacttcagttctgccaagtttgcttctttcatcacacagtattccacgggccaggtcagcgtggagattgagtgggagctgcagaaggagaacagcaaacgctggaaccccgagatccagtatacttccaactacaacaaatctgttaatgtggactttactgtggacactaatggtgtgtattcagagcctcgccccattggcaccagatacctgactcgtaatctgtaa

SEQ ID NO: 195 - protein, 735 aa, Artificial Sequence
  source: /note="Description of Artificial Sequence: Synthetic polypeptide"
MAADGYLPDWLEDTLSEGIRQWWKLKPGPPPPKPAERHQDDSRGLVLPGYKYLGPFNGLDKGEPVNEADAAALEHDKAYDRQLDSGDNPYLKYNHADAEFQERLKEDTSFGGNLGRAVFQAKKRVLEPLGLVEEPVKTAPGKKRPVEHSPVEPDSSSGTGKAGHQPARKRLNFGQTGDADSVPDPQPLGQPPAAPTSLGSTTMATGSGAPMADNNEGADGVGNSSGNWHCDSQWLGDRVITTSTRTWALPTYNNHLYKQISSQSGASNDNHYFGYSTPWGYFDFNRFHCHFSPRDWQRLINNNWGFRPKRLNFKLFNIQVKEVTQNDGTTTIANNLTSTVQVFTDSEYQLPYVLGSAHQGCLPPFPADVFMVPQYGYLTLNNGSQAVGRSSFYCLEYFPSQMLRTGNNFTFSYTFEDVPFHSSYAHSQSLDRLMNPLIDQYLYYLNRTQSNSGTLQQSRLLFSQAGPTSMSLQAKNWLPGPCYRQQRLSKQANDNNNSNFPWTAATKYRLNGRDSLVNPGPAMASHKDDEEKFFPMHGTLIFGKQGTNANDADLEHVMITDEEEIRTTNPVATEQYGNVSNNLQNSNTGPTTENVNHQGALPGMVWQDRDVYLQGPIWAKIPHTDGHFHPSPLMGGFGLKHPPPQIMIKNTPVPANPPTNFSSAKFASFITQYSTGQVSVEIEWELQKENSKRWNPEIQYTSNYNKSVNVDFTVDTNGVYSEPRPIGTRYLTRNL

SEQ ID NO: 196 - DNA, 2208 bp, Artificial Sequence
  source: /note="Description of Artificial Sequence: Synthetic polynucleotide"
atggctgccgatggttatcttccagattggctcgaggacactctctctgaaggaataagacagtggtggaagctcaaacctggcccaccaccaccaaagcccgcagagcggcatcaggacgacagcaggggtcttgtgcttcctgggtacaagtacctcggacccttcaacggactcgacaaaggagagccggtcaacgaggcagacgccgcggccctcgagcacgacaaggcctacgaccggcagctcgacagcggagacaacccgtacctcaagtacaaccacgccgacgcggagtttcaggagcgtcttaaagaagatacgtcttttgggggcaacctcggacgagcagtcttccaggcgaaaaagagggttcttgaacctctgggcctggttgaggaacctgttaagacggctccgggaaaaaagaggccggtagagcactctcctgtggagccagactcctcctcgggaaccggaaaagcgggccatcagcctgcgagaaagagattgaattttggtcagactggagacgcagactccgtacctgacccccagcctctcggacagccaccagcagcccccacaagtttgggatctactacaatggctacaggcagtggcgcaccaatggcagacaataacgagggtgccgatggagtgggtaattcctcaggaaattggcattgcgattcccaatggctgggcgacagagtcatcaccaccagcacccgaacctgggccctgcccacctacaacaaccacctctacaagcaaatctccagccaatcaggagcctcgaacgacaaccactactttggctacagcaccccctgggggtattttgacttcaacagattccactgtcacttctccccacgtgattggcaaagactcatcaacaacaactggggattccgacccaagagactcaacttcaagctctttaacattcaagtcaaagaggtcacgcagaatgacggtacgacgacgattgccaataaccttaccagcacggttcaggtgtttactgactcggagtaccagctcccgtacgtcctcggctcggcgcatcaaggatgcctcccgccgtttccagcggacgtcttcatggtcccacagtatggatacctcaccctgaacaacgggagtcaggcggtaggacgcccttccttttactgcctggagtactttccttctcagatgctgcgtactggaaacaactttaccttcagctacacctttgaggacgttcctttccacagcagctacgctcacagccagagtttggaccggctgatgaatcctctgatcgaccagtatctatattatctgaacaggacacaatcaaatagtggaactcttcagcagtctaggctactgtttagccaagctggacccaccagcatgtctcttcaagctaaaaactggctgcctggaccttgctacagacagcagcgtctttcaaagcaggcaaacgacaacaacaacagcaactttccctggactgcggctacaaagtatcatctaaatggccgggactcgttggttaatccaggaccagctatggccagccacaaagacgatgaagaaaagtttttccccatgcatgggaccctgatatttggtaaacaaggaacaaatgctaacgacgcggatttggagcatgttatgattacagatgaagaagaaatcaggaccaccaatcctgtggctacagagcagtacggaaacgtgtcaaataatttgcaaaactcaaatactggtccaactacagaaaatgtcaatcaccagggagcgttacctggtatggtgtggcaggatcgagacgtgtacctgcagggacccatttgggccaagattcctcacaccgacggacactttcacccttctccactgatgggaggttttggactcaaacacccgcctcctcaaatcatgatcaaaaacactcccgttccagccaatcctcccacaaacttcagttctgccaagtttgcttctttcatcacacagtattccacgggccaggtcagcgtggagattgagtgggagctgcagaaggagaacagcaaacgctggaaccccgagatccagtatacttccaactacaacaaatctgttaatgtggactttactgtggacactaatggtgtgtattcagagcctcgccccattggcaccagatacctgactcgtaatctgtaa

SEQ ID NO: 197 - protein, 735 aa, Artificial Sequence
  source: /note="Description of Artificial Sequence: Synthetic polypeptide"
MAADGYLPDWLEDTLSEGIRQWWKLKPGPPPPKPAERHQDDSRGLVLPGYKYLGPFNGLDKGEPVNEADAAALEHDKAYDRQLDSGDNPYLKYNHADAEFQERLKEDTSFGGNLGRAVFQAKKRVLEPLGLVEEPVKTAPGKKRPVEHSPVEPDSSSGTGKAGHQPARKRLNFGQTGDADSVPDPQPLGQPPAAPTSLGSTTMATGSGAPMADNNEGADGVGNSSGNWHCDSQWLGDRVITTSTRTWALPTYNNHLYKQISSQSGASNDNHYFGYSTPWGYFDFNRFHCHFSPRDWQRLINNNWGFRPKRLNFKLFNIQVKEVTQNDGTTTIANNLTSTVQVFTDSEYQLPYVLGSAHQGCLPPFPADVFMVPQYGYLTLNNGSQAVGRPSFYCLEYFPSQMLRTGNNFTFSYTFEDVPFHSSYAHSQSLDRLMNPLIDQYLYYLNRTQSNSGTLQQSRLLFSQAGPTSMSLQAKNWLPGPCYRQQRLSKQANDNNNSNFPWTAATKYHLNGRDSLVNPGPAMASHKDDEEKFFPMHGTLIFGKQGTNANDADLEHVMITDEEEIRTTNPVATEQYGNVSNNLQNSNTGPTTENVNHQGALPGMVWQDRDVYLQGPIWAKIPHTDGHFHPSPLMGGFGLKHPPPQIMIKNTPVPANPPTNFSSAKFASFITQYSTGQVSVEIEWELQKENSKRWNPEIQYTSNYNKSVNVDFTVDTNGVYSEPRPIGTRYLTRNL

SEQ ID NO: 198 - DNA, 2208 bp, Artificial Sequence
  source: /note="Description of Artificial Sequence: Synthetic polynucleotide"
atggctgccgatggttatcttccagattggctcgaggacactctctctgaaggaataagacagtggtggaagctcaaacctggcccaccaccaccaaagcccgcagagcggcataaggacgacagcaggggtcttgtgcttcctgggtacaagtacctcggacccttcaacggactcgacaagggagagccggtcaacgaggcagacgccgcggccctcgagcacgacaaggcctacgaccggcagctcgacagcggagacaacccgtacctcaagtacaaccacgccgacgcggagtttcaggagcgccttaaagaagatacgtcttttgggggcaacctcggacgagcagtcttccaggcaaaaaagagggttcttgaacctctgggcctggttgaggagcctgttaaaacggctccgggaaaaaagaggccggtagagcactctcctgcggagccagactcctcctcgggaaccggaaaagcgggccagcagcctgcaagaaaaagattgaatttcggtcagactggagacgcagactccgtacctgacccccagcctctcggacagccaccagcagccccctctggtctgggaactaatacgatggcttcaggcagtggcgcaccaatggcagacaataacgagggcgccgacggagtgggtaattcctcgggaaattggcattgcgattccacatggatgggcgacagagtcatcaccaccagcacccgaacttgggccctgcccacctacaacaaccatctctacaagcaaatctccagccaatcaggagccagcaacgacaaccactactttggctacagcaccccttgggggtattttgacttcaacagattccactgccacttttcaccacgtgactggcaaagactcatcaacaacaactggggattccggcccaagagactcaacttcaagctctttaacattcaagtcaaagaggtcacgcagaatgacggtacgacgacgattgccaataaccttaccagcacggttcaggtgtttactgactcggagtaccagctcccgtacgtcctcggctcggcgcatcaaggatgcctcccgccgttcccagcagacgtcttcatggtgccacagtatggatacctcaccctgaacaacgggagtcaggcagtaggacgctcttcattttactgcctggagtactttccttctcagatgctgcgtaccggaaacaactttaccttcagctacacctttgaggacgttcctttccacagcagctacgctcacagccagagtttggaccgtctcatgaatcctctcatcgaccagtacctgtattacttgagcagaacaaacactccaagcggaaccaccacgcagtccaggcttcagttttctcaggccggagcaagtgacattcgggaccagtctaggaactggcttcctggaccctgttaccgccagcagcgagtatcaaagacatctgcggataacaacaacagtgaatactcgtggactggagctaccaagtaccacctcaatggcagagactctctggtgaatccgggcccggccatggccagccacaaggacgatgaagaaaagttttttcctcagagcggggttctcatctttgggaagcaaggctcagagaaaacaaatgtggacattgaaaaggtcatgattacagacgaagaggaaatcaggaccaccaatcccgtggctacggagcagtatggttctgtatctaccaacctgcagggcggcaacacacaagcagctaccgcagatgtcaacacacaaggcgttcttccaggcatggtctggcaggacagagacgtgtacctgcaggggcccatctgggcaaagattccacacacggacggacattttcacccctctcccctcatgggcggattcggacttaaacaccctcctccacagattctcatcaagaacaccccggtacctgcgaatccttcgaccaccttcagtgcggcaaagtttgcttctttcatcacacagtattccacggggcaggtcagcgtggagatcgagtgggagctgcagaaggagaacagcaaacgctggaatcccgagatccagtacacttccaactacaacaaatctgttaatgtggactttactgttgacactaatggcgtgtattcagagcctcgccccattggcaccagatacctgactcgtaatctgtaa

SEQ ID NO: 199 - protein, 735 aa, Artificial Sequence
  source: /note="Description of Artificial Sequence: Synthetic polypeptide"
MAADGYLPDWLEDTLSEGIRQWWKLKPGPPPPKPAERHKDDSRGLVLPGYKYLGPFNGLDKGEPVNEADAAALEHDKAYDRQLDSGDNPYLKYNHADAEFQERLKEDTSFGGNLGRAVFQAKKRVLEPLGLVEEPVKTAPGKKRPVEHSPAEPDSSSGTGKAGQQPARKRLNFGQTGDADSVPDPQPLGQPPAAPSGLGTNTMASGSGAPMADNNEGADGVGNSSGNWHCDSTWMGDRVITTSTRTWALPTYNNHLYKQISSQSGASNDNHYFGYSTPWGYFDFNRFHCHFSPRDWQRLINNNWGFRPKRLNFKLFNIQVKEVTQNDGTTTIANNLTSTVQVFTDSEYQLPYVLGSAHQGCLPPFPADVFMVPQYGYLTLNNGSQAVGRSSFYCLEYFPSQMLRTGNNFTFSYTFEDVPFHSSYAHSQSLDRLMNPLIDQYLYYLSRTNTPSGTTTQSRLQFSQAGASDIRDQSRNWLPGPCYRQQRVSKTSADNNNSEYSWTGATKYHLNGRDSLVNPGPAMASHKDDEEKFFPQSGVLIFGKQGSEKTNVDIEKVMITDEEEIRTTNPVATEQYGSVSTNLQGGNTQAATADVNTQGVLPGMVWQDRDVYLQGPIWAKIPHTDGHFHPSPLMGGFGLKHPPPQILIKNTPVPANPSTTFSAAKFASFITQYSTGQVSVEIEWELQKENSKRWNPEIQYTSNYNKSVNVDFTVDTNGVYSEPRPIGTRYLTRNL

SEQ ID NO: 200 - DNA, 3161 bp, Artificial Sequence
  source: /note="Description of Artificial Sequence: Synthetic polynucleotide"
gattgaatttagcggccgcgaattcgcccttgctgcgtcaactggaccaatgagaactttccattcaatgattgcgtcgacaagatggtgatctggtgggaggagggaaagatgaccgccaaggtcatggagtcggccaaagccattctcggaggaagcaaggtgcgcgtggaccagaaatgtaagtcctcggcccagatagacccgactcccgtgattgtcacctccaacaccaacatgtgcgccgtgattgacgggaactcaacgaccttcgagcaccagcagccgttgcaagaccggatgttcaaatttgaactcacccgccgtctggatcatgactttgggaaggtcaccaagcaggaagtcaaagactttttccggtgggcaaaggatcacgtggttgaggtggagcatgaattctacgtcaaaaagggtggagccaagaaaagacccgcccccagtgacgcagatataagtgagcccaaacgggcgcgcgggtcagttgcgcagccatcgacgtcagacgcggaagcttcgatcaactacgcggacaggtaccaaaacaaatgttctcgtcacgtgggcatgaatctgatgctgtttccctgcagacaatgcgagagaatgaatcaaaattcaaatatctgcttcactcacggacagaaggactgtttagagtgctttcccgtgtcagaatctcaacccgtttctgtcgtcaaaaaggcgtatcagaaactttgctacattcatcatatcatgggaaaggtgccagacgcttgcactgcctgcgatctggtcaatgtggatttggatgactgcatctctgaacaataaatgatttaaatcaggtatggctgccgatggttatcttccagattggctcaaggacactctctctgaaggaataagacagtggtggaagctcaaacctggcccaccaccaccaaagcccgcagagcggcataaggacgacagcgggggtcttgtgcttcctgggtacaagtacctcggacccttcaacggactcgacaagggagagccggtcaacgaggcagacgccgcggccctcgagtacgacaaggcctacgaccggcagctcgacagcggagacaacccgtacctcaagtacaaccacgccgacgcggagtttcaggagcgccttaaagaagatacgtcttttgggggcaacctcggacgagcagtcttccaggcgaaaaagagggttcttgaacctctgggcctggttgaggaacctgttaagacggctccgggaaaaaagaggccggtagagcactctcctgtggagccagactcctcctcgggaacaggaaaagcgggccagcagcctgcgagaaagagattgaattttggtcagactggagacgcagactccgtacctgacccccagcctctcggacagccaccagcagccccctctggtctgggaactaatacgatggctacaggcagtggcgcaccaatggcagacaataacgagggcgccgacggagtgggtaattcctcgggaagttggcattgcgattccacatggatgggcgacagagtcatcaccaccagcacccgaacctgggctctgcccacctacaacaaccatctgtacaagcagatctccagccaatcaggagccagcaacgacaaccactactttggctacagcaccccttgggggtattttgacttcaacagattccactgccacttttcaccacgtgactggcaaagactcatcaacaacaactggggattccggcccaagagactcaacttcaagctctttaacattcaagtcaaggaggtcacgcagaatgacggtacgacgacgattgccaataaccttaccagcacggttcaggtgtttactgactcggagtaccagctcccgtacgtccccggctcggcgcatcaaggatgcctcccgccgttcccagcagacgtcttcatggtgccacagtatggatacctcaccctgaacaacgggagtcaggcagtaggacgctcttcattttactgcctggagtactttccttctcagatgcttcgtaccggaaacaactttaccttcagctacacctttgaggatgttcctttccacagcagctacgctcacagccagagtttggaccgtctcatgaatcctctcatcgaccagtacctgtattacttgagcagaacaaacactccaagcggaaccaccacgcagtccaggcttcagttttctcaggccggagcaagtgacattcgggaccagtctaggaactggcttcctggaccctgttaccgccagcagcgagtatcaaagacagctgcggacaacaacaacagtgaatactcgtggactggagctaccaagtaccacctcaatggcagagactctctggtgaatccgggcccggccatggccagccacaaggacgatgaagaaaagttttttcctcaaagcggggttctcatctttgggaagcaaggctcagagaaaacaaatgtggacattgaaaaggtcatgattacagacgaagaggaaatcagaaccaccaatcccgtggccacggagcagtatggttctgtatctaccaacctccagagcggcaacacacaagcagctactgcagatgtcaacacacaaggcgttcttccaggcatggtctggcaggacagagacgtgcacctgcaggggcctatctgggcaaagattccacacacggacggacattttcacccctctcccctcatgggcggatttggacttaaacaccctcctccacagattctcatcaagaacaccccggtacctgcaaatccttcgaccaccttcagtgcggcaaagtttgcttccttcatcacacagtattccacagggcaggtcagcgtggagatcgagtgggagctgcagaaggagaacagcaaacgctggaaccccgagatccagtacacttccaactacaacaaatctgttaatgtggactttactgtggacactaatggtgtgtattcagagcctcgccccattggcaccagatacctgactcgtaatctgtaattgcttgttaatcaataaaccgtttaattcgtttcagttgaactttggtctctgcgaagggcgaattcgtttaaaccctgcaggactagtccctttagtgagg

SEQ ID NO: 201 - DNA, 3162 bp, Artificial Sequence
  source: /note="Description of Artificial Sequence: Synthetic polynucleotide"
gaattgaatttagcggccgcgaattcgcccttcgcagagaccaaagttcaactgaaacgaattaaacggtttattgattaacaagcaattacagattacgagtcaggtatctggtgccaatggggcgaggctctgaatacacgccattagtgtccacagtaaagtccacattaacagacttgttgtagttggaagtgtactgaatttcgggattccagcgtttgctgttttccttctgcagctcccactcgatctccacgctgacctgtcccgtggagtactgtgtgatgaaggaagcaaactttgccgcactgaaggtggtcgaaggattcgcaggtaccggggtgttcttgatgagaatctgtggaggagggtgtttaagtccgaatccacccatgaggggagaggggtgaaaatgtccgtccgtgtgtggaatctttgcccagatgggcccctgaaggtacacatctctgtcctgccagaccatgcctggaagaacgccttgtgtgttgacatctgcggtagctgcttgtctgttgcctctctggaggttggtagatacagaaccgtactgctccgtagccacgggattggttgtcctgatttcctcttcgtctgtaatcatgaccttttcaatgtccacatttgttttctctgagccttgcttcccaaagatgagaaccccgctctgaggaaaaaacttttcttcattgtccttgtggcttgccatggccgggcccggattcaccagagagtctctgccattgaggtggtacttggtagctccagtccacgagtattcactgttgttgttatccgcagatgtctttgatactcgctgctggcggtaacagggtccaggaagccagttcctagactggtcccgaatgtcactcgctccggcctgagaaaactgaagccttgactgcgtggtggttccacttggagtgtttgttgtgctcaagtaatacaggtactggtcgatgagaggattcatgagacggtccagactctggctgtgagcgtagccgctgtggaaaggaacgtcctcaaaagtgtagctgaaggtaaagttgtttccggtacgcagcatctgagaaggaaagtactccaggcagtaaaatgaagagcgtcctactgcctgactcccgttgttcagggtgaggtatccatactgtggcaccatgaagacgtctgctgggaacggcgggaggcatccttgatgcgccgagccgaggacgtacgggagctggtactccgagtcagtaaacacctgaaccgtgctggtaaggttattggcaatcgtcgtcgtaccgtcattctgcgtgacctctttgacttgaatgttaaagagcttgaagttgagtctcttgggtcggaatccccagttgttgttgatgagtctttgccagtcacgtggtgaaaagtggcagtggaatctgttgaagtcaaaatacccccaaggggtgctgtagccaaagtagtgattgtcgttcgaggctcctgattggctggaaatttgtttgtagaggtggttgttgtaggtgggcagggcccaggttcgggtgctggtggtgatgactctgtcgcccatccatgtggaatcgcaatgccaatttcccgaggaattacccactccgtcggcgccctcgttattgtctgccattggtgcgccactgcctgtagccatcgtattagttcccagaccagagggggctgctggtggctgtccgagaggctgggggtcaggtactgagtctgcgtctccagtctgaccaaaattcaatctttttcttgcaggctgctggcccgcctttccggttcccgaggaggagtctggctccacaggagagtgctctaccggcctcttttttcctggagccgtcttgacaggttccccaaccaggcccagaggttcaagaaccctctttttcgcctggaagactgctcgtccgaggttgcccccaaaagacgtatcttctttaaggcgctcctgaaactccgcgtcggcgtggttgtacttgaggtacgggttgtctccgctgtcgagctgccggtcgtaggctttgtcgtgctcgagggccgcggcgtctgcctcgttgaccggctctcccttgtcgagtccgttgaagggtccgaggtacttgtacccaggaagcacaagacccctgctgtcgtccttatgccgctctgcgggctttggtggtggtgggccaggtttgagcttccaccactgtcttattccttcagagagagtgtcctcgagccaatctggaagataaccatcggcagccatacctgatttaaatcatttattgttcaaagatgcagtcatccaaatccacattgaccagatcgcaggcagtgcaagcgtctggcacctttcccatgatatgatgaatgtagcacagtttctgatacgcctttttgacgacagaaacgggttgagattctgacacgggaaagcactctaaacagtctttctgtccgtgagtgaagcagatatttgaattctgattcattctctcgcattgtctgcagggaaacagcatcagattcatgcccacgtgacgagaacatttgttttggtacctgtctgcgtagttgatcgaagcttccgcgtctgacgtcgatggctgcgcaactgactcgcgcacccgtttgggctcacttatatctgcgtcactgggggcgggtcttttcttggctccaccctttttgacgtagaattcatgctccacctcaaccacgtgatcctttgcccaccggaaaaagtctttgacttcctgcttggtgaccttcccaaagtcatgatccagacggcgggtgagttcaaatttgaacatccggtcttgcaacggctgctggtgttcgaaggtcgttgagttcccgtcaatcacggcgcacatgttggtgttggaggtgacgatcacgggagtcgggtctatctgggccgaggacttgcatttctggtccacgcgcaccttgcttcctccgagaatggctttggccgactccacgaccttggcggtcatcttcccctcctcccaccagatcaccatcttgtcgacacagtcgttgaagggaaagttctcattggtccagttgacgcagcaagggcgaattcgtttaaacctgcaggactagtccctttagtgaggg

SEQ ID NO: 202 - DNA, 3164 bp, Artificial Sequence
  source: /note="Description of Artificial Sequence: Synthetic polynucleotide"
gcgaattgaatttagcggccgcgaattcgcccttcgcagagaccaaagttcaactgaaacgaattaaacggtttattgattaacaagcaattacaaattacgagtcaggtatctggtgccaatggggcgaggctctgaatacacgccattagtgtccacagtaaagtccacattaacagacttgttgtagttggaagtgtactgaatttcgggattccagcgtttgctgttttccttctgcagctcccactcgatctccacgctgacctgtcccgtggagtactgtgtgatgaaggaagcaaactttgccgcactgaaggtggtcgaaggattcgcaggtaccggggtgttcttgatgagaatctgtggaggagggtgtttaggtccgaatccacccatgaggggagaggggtgaaaatgtccgtccgtgtgtggaatctttgcccagatgggcccctgaaggtacacatctctgtcctgccagaccatgcctggaagaacgccttgtgtgttgacatctgcggtagctgcttgtctgttgcctctctggaggttggtagatacagaaccatactgctccgtagccacgggattggttgtcctgatttcctcttcgtctgtaatcatgaccttttcaatgtccacatttgttttctctgagccttgcttcccaaagatgagaaccccgctctgaggaaaaaacttttcttcattgtccttgtggcttgccatggccgggcccggattcaccagagagtctctgccattgaggtggtacttggtagctccagtccacgagtattcactgttgttgttatccgcagatgtctttgatactcgctgctggcggtaacagggtccaggaagccagttcctagactggtcccgaatgtcactcgctccggcctgagaaaactgaagccttgactgcgtggtggttccacttggagtgtttgttgtgctcaagtaatacaggtactggtcgatgagaggattcatgagacggtccagactctggctgtgagcgtagctgctgtggaaaggaacgtcctcaaaagtgtagctgaaggtaaagttgtttccggtacgcagcatctgagaaggaaagtactccgggcagtaaaatgaagagcgtcctactgcctgactcccgttgctcagggtgaggtatccatactgtggcaccatgaagacgtctgctgggaacggcgggaggcatccttgatgcgccgagccgaggacgtacgggagctggtactccgagtcagtaaacacctgaaccgtgctggtaaggttattggcaatcgtcgtcgtaccgtcattctgcgtgacctctttgacttgaatgttaaagagcttgaagttgagtctcttgggtcggaatccccagttgttgttgatgagtctttgccagtcacgtggtgaaaagtggcagtggaatctgttgaagtcaaaatacccccaaggggtgctgtagccaaagtagtgattgtcgttcgaggctcctgattggctggaaatttgtctgtagaggtggttgttgtaggtgggcagggcccaggttcgggtgctggtggtgatgactctgtcgcccatccatgtggaatcgcaatgccgatttcccgaggaattacccactccgtcggcgccctcgttattgtctgccattggtgcgccactgcctgtagccatcgtattagttcccagaccagagggggctgctggtggctgtccgagaggctgggggtcaggtactgagtctgcgtctccagtctgaccaaaattcaatctttttcttgcaggctgctggcccgcctttccggttcccgaggaggagtctggctccacaggagagtgctctaccggcctcttttttcccggagccgtcttaacaggttccccaaccaggcccagaggttcaagaaccctctttttcgcctggaagactgctcgtccgaggttgcccccaaaagacgtatcttctttaaggcgctcctgaaactccgcgtcggcgtggttgtacttgaggtacgggttgtctccgctgtcgagctgccggtcgtaggctttgtcgtgctcgagggccgcggcgtctgcctcgttgaccggctctcccttgtcgagtccgttgaagggtccgaggtacttgtacccaggaagcacaagacccctgctgtcgtccttatgccgctctgcgggctttggtggtggtgggccaggtttgagcttccaccactgtcttattccttcagagagagtgtcctcgagccaatctggaagataaccatcggcagccatacctgatttaaatcatttattgttcaaagatgcagtcatccaaatccacattgaccagatcgcaggcagtgcaagcgtctggcacctttcccatgatatgatgaatgtagcacagtttctgatacgcctttttgacgacagaaacgggttgagattctgacacgggaaagcactctaaacagtctttctgtccgtgagtgaagcagatatttgaattctgattcattctctcgcattgtctgcagggaaacagcatcagattcatgcccacgtgacgagaacatttgttttggtacctgtctgcgtagttgatcgaagcttccgcgtctgacgtcgatggctgcgcaactgactcgcgcacccgtttgggcccacttatatctgcgtcactgggggcgggtcttttcttggctccaccctttttgacgtagaattcatgctccacctcaaccacgtgatcctttgcccaccggaaaaagtctttgacttcctgcttggtgaccttcccaaagtcatgatccagacggcgggtgagttcaaatttgaacatccggtcttgcaacggctgctggtgttcgaaggtcgttgagttcccgtcaatcacggcgcacatgttggtgttggaggtgacgatcacgggagtcgggtctatctgggccgaggacttgcatttctggtccacgcgcaccttgcttcctccgagaatggctttggccgactccacgaccttggcggtcatcttcccctcctcccaccagatcaccatcttgtcgacacagtcgttgaagggaaagttctcattggtccagttgacgcagcaagggcgaattcgtttaaacctgcaggactagtccctttagtgaggg

SEQ ID NO: 203 - DNA, 3163 bp, Artificial Sequence
  source: /note="Description of Artificial Sequence: Synthetic polynucleotide"
accctcactaaagggactagtcctgcaggtttaaacgaattcgcccttgctgcgtcaactggagcaatgagaactttcccttcaacgactgtgtcgacaagatggtgatttggtgggaggaggggaagatgaccgccaaggtcgtggagtcggccaaagccattctcggaggaagcaaggtgcgcgtggaccagaaatgcaagtcctcggcccagatagatccgactcccgtgatcgtcacctccaacaccaacatgtgcgccgtgattgacgggaactcaacgaccttcgaacaccagcagccgttgcaagaccggatgttcaaatttgaactcacccgccgtctggatcatgactttgggaaggtcaccaagcaggaagtcaaagactttttccggtgggcaaaggatcacgtggttgaggtggagcatggattctacgtcaaaaagggtggagccaagaaaagacccgcccctagtgacgcagatataagtgagcccaaacgggtgcgcgagtcagttgcgcagccatcgacgtcggacgcggaagcttcgatcaactacgcggacaggtaccaaaacaaatgttctcgtcacgtgggcatgaatctgatgctgtttccctgcagacaatgcgagagaatgaatcaaaattcaaatatctgcttcactcacggacagaaagactgtttagagtgctttcccgtgtcagaatctcaacctgtttctgtcgtcaaaaaggcgtatcagaaactgcgctacattcatcatatcatgggaaaggtgccagacgcttgcactgcctgcgatctggtcaatgtggatttggatgactgcatctctgaacaataaatgatttaaatcaggtatggctgccgatggttatcttccagattggctcgaggacactctctctgaaggaataagacagtggtggaagctcaaacctggcccaccaccaccaaagcccgcagagcggcataaggacgacagcaggggtcttgtgcttcctgggtacaagtacctcggacccttcaacggactcgacaagggagagccggtcaacgaggcagacgccgcggccctcgagcacgacaaggcctacgaccggcagctcgacagcggagacaacccgtacctcaagtacaaccacgccgacgcggagtttcaggagcgtcttaaagaagatacgtcttttgggggcaacctcggacgagcagtcttccaggcgaaaaagagggttcttgaacctctgggcctggttgaggaacctgttaagacggctccgggaaaaaagaggccggtagagcactctcctgcggagccagactcctcctcgggaaccggaaaagcgggccagcagcctgcaagaaaaagactgaatttcggtcagactggagacgcagactccgtacctgacccccagcctctcggacagccaccagcagcccccacaagtttgggatctactacaatggctacaggcagtggcgcaccaatggcagacaataacgagggtgccgatggagtgggtaattcctcaggaaattggcattgcgattcccaatggctgggcgacagagtcatcaccaccagcacccgaacctgggccctgcccacctacaacaaccacctttacaagcaaatctccagccaatcaggagcctcaaacgacaaccactactttggctacagcaccccctgggggtattttgacttcaacagattccactgccacttttcaccacgtgactggcaaagactcatcaacaacaactggggattccgacccaagagactcaacttcaagctctttaacattcaagtcaaagaggtcacgcagaatgacggtacgacgacgattgccaataaccttaccagcacggttcaggtgtttactgactcggagtaccagctcccgtacgtcctcggctcggcgcatcaaggatgcctcccgccgtttccagcggacgtcttcatggtcccacagtatggatacctcaccctgaacaacgggagtcaggcggtaggacgctcttccttttactgcctggagtgctttccttctcagatgctgcgtactggaaacaactttcagttcagctacacttttgaagacgtgcctttccacagcagctacgctcacagccagagtttggatcggctgatgaatcctctgatcgaccagtacctgtattatctaaacagaacacaaacagctagtggaactcagcagtctcggctactgtttagccaagctggacccacaagcatgtctcttcaagctaaaaactggctgcctggaccgtgttatcgccagcagcgtttgtcaaagcaggcaaacgacaacaacaacagcaactttccctggactggagctaccaagtaccacctcaatggcagagactctttggtgaacccgggcccggccatggccagccacaaggacgatgaagaaaagtttttccccatgcatggaaccctaatatttggtaaagaaggaacaaatgctaccaacgcggaattggaaaatgtcatgattacagatgaagaggaaatcaggaccaccaatcccgtggctacagagcagtacggatatgtgtcaaataatttgcaaaactcaaatactgctgcaagtactgaaactgtgaatcaccaaggagcattacctggtatggtgtggcaggatcgagacgtgtacctgcagggacccatttgggccaagattcctcacaccgatggacactttcatccttctccactgatgggaggttttggactcaaacacccgcctcctcagattatgatcaaaaacactcccgttccagccaatcctcccacaaacttcagttctgccaagtttgcttccttcatcacacagtattccacgggacaggtcagcgtggagatcgagtgggagctgcagaaggagaacagcaaacgctggaatcccgaaattcagtacacttccaactacaacaaatctgttaatgtggactttactgtggacactaatggtgtgtattcagagcctcgccccattggcaccagatacctgactcgtaatctgtaattgcttgttaatcaataaaccgtttaattcgtttcagttgaactttggtctctgcgaagggcgaattcgcggccgctaaattcaattcgcc

SEQ ID NO: 204 - protein, 735 aa, Artificial Sequence
  source: /note="Description of Artificial Sequence: Synthetic polypeptide"
MAADGYLPDWLEDTLSEGIRQWWKLKPGPPPPKPAERHKDDSRGLVLPGYKYLGPFNGLYKGEPVDEADAAALEHDKAYDRQLDSGDNPYLKYNHADAEFQERLKEDTSFGGNLGRAVFQAKKRVLEPLGLVGEPVKTAPGKKRPVEHSPVEPDSSSGTGKAGNQPARKRLNFGQTGDADSVPDPQPLGQPPAAPSGLGSTTMATGSGAPVADNNEGADGVGNSSGNWHCDSQWLGDRVITTSTRTWALPTYNNHLYKQISSQSGASNDNHYFGYSTPWGYFDFNRFHCHFSPRDRQRLINNNWGFRPKRLNFKLFNIQVKEVTQNDGTTTIANNLTSTVQVFTDSGYQLPYVLGLAHQGCLPPFPADVFMVPQYGYLTLNNGSQAVGRSSFYCLEYFPSQMLRTGNNFQFSYTFEDVPFHSSYAHSQSLDRLMNPLIDQYLYYLNKTQSNSGTLQQSRLLFSQAGPTSMSLQAKNWLPGPCYRQQRLSKQANDNNNSNFPWTAATKYHLNGRDSLVNPGPAMASHKDDEEKFFPMHGTLIFGKQGTNANDADLDNVMITDEEEIRTTNPVATEQYGYVSNNLQNSNTGPTTGTVNHQGALPGMVWQDRDVYLQGPIWAKIPHTDGHFHPSPLMGGFGLKHPPPQIMIKNTPVPANPPTNFSSAKFASFITQYSTGQVSVEIEWELQKEDSKRWNPEIQYTSNYNKPVNVDFTVDTNGVYSEPRPIGTRYLTRNL

SEQ ID NO: 205 - DNA, 2208 bp, Artificial Sequence
  source: /note="Description of Artificial Sequence: Synthetic polynucleotide"
atggctgccgatggttatcttccagattggctcgaggacactctctctgaaggaataagacagtggtggaagctcaaacctggcccaccaccaccaaagcccgcagagcggcataaggacgacagcaggggtcttgtgcttcctgggtacaagtacctcggacccttcaacggactctacaagggagagccggtcgacgaggcagacgccgcggccctcgagcacgacaaggcctacgaccggcagctcgacagcggagacaacccgtacctcaagtacaaccacgccgacgcggagtttcaggagcgccttaaagaagatacgtcttttgggggcaacctcggacgagcagtcttccaggccaaaaagagggttcttgaacctctgggcttggttggggagcctgttaaaacggctccgggaaaaaagaggccggtagagcactctcctgtggagccagactcctcctcgggaaccggaaaagcgggcaaccagcctgcaagaaaaagattgaattttggtcagactggagacgcagactccgtacctgacccccagcctctcggacagccaccagcagccccctctggtctgggatctactacaatggctacaggcagtggcgcaccagtggcagacaataacgagggtgccgatggagtgggtaattcctcaggaaattggcattgcgattcccaatggctgggcgacagagtcatcaccaccagcacccgaacctgggctctgcccacctacaataaccacctctacaagcaaatctccagccaatcaggagcctcaaacgacaaccactactttggctacagcaccccctgggggtattttgacttcaacagattccactgccacttttcaccacgtgaccggcaaagactcatcaacaacaactggggattccgaccaaaaagactcaacttcaagctctttaacattcaagtcaaagaggtcacgcagaatgacggtacgacgacgattgccaataaccttaccagcacggttcaggtgtttactgactcggggtaccagctcccgtacgtcctcggcttggcgcatcaaggatgcctcccgccgttcccagcagacgtcttcatggtgccacagtatggatacctcaccctgaacaacgggagtcaggcggtaggacgctcttccttttactgcctggagtactttccttctcagatgctgcgtactggaaacaactttcagttcagctacacctttgaagacgttcctttccacagcagctacgctcacagccagagtctggatcggctgatgaatcctctgatcgaccagtacctgtattatctgaacaagacacaatcaaatagtggaactcttcagcagtctcggctactgtttagccaagctggacccaccagcatgtctcttcaagctaaaaactggctgcctggaccttgctacagacagcagcgtctgtcaaagcaggcaaacgacaacaacaacagcaactttccctggactgcggctacaaagtatcatctaaatggccgggactcgttggttaatccaggaccagctatggccagccacaaagacgatgaagaaaagtttttccccatgcatggaaccctgatatttggtaaacaaggaacaaatgctaacgacgcggatttggacaatgtcatgattacagatgaagaagaaatccgcaccaccaatcccgtggctacggagcagtacggatatgtgtcaaataatttgcaaaactcaaatactggtccaactactggaactgtcaatcaccaaggagcgttacctggtatggtgtggcaggatcgagacgtgtacctgcagggacccatttgggccaagattcctcacaccgatggacactttcatccttctccacttatgggaggttttggactcaaacacccacctcctcagatcatgattaaaaacactcccgttccagccaatcctcccacaaacttcagttctgccaagtttgcttctttcatcacacagtattccacgggacaagtcagcgtggagatcgagtgggagctgcagaaggaggacagcaaacgctggaaccccgagatccagtacacttccaactataacaaacctgttaatgtggactttactgtggacactaatggtgtgtattcagagcctcgccccattggcaccagatacctgactcgtaatctgtaa

SEQ ID NO: 206 - DNA, 3161 bp, Artificial Sequence
  source: /note="Description of Artificial Sequence: Synthetic polynucleotide"
cgaattgatttagcggccgcgaattcgcccttcgcagagaccaaagttcaactgaaacgaattaaacggtttattgattaacaagcaattacagattacgagtcaggtatctggtgccaatggggcgaggctctgaatacacaccattagtgtccacagtaaagtccacattaacagatttgttgtagttggaagtgtactggatctcgggattccagcgtttgctgttctccttctgtagctcccactcgatctccacgctgacccgccccgtggaatactgtgtgatgaaggaagcaaactttgccgcactgaaggtggtcgaaggattcgcaggtaccggggtgtttttgatgagaatctgtggaggagggtgtttaagtccgaatccgcccatgaggggagaggggtgaaaatgtccgtccgtgtgcggaatctttgcccagataggcccctgcaggtacacgtctctgtcctgccagaccatgcctggaagaacgccttgtgtgttgacatctgcagtagatgcttgtgtgttgccgctctggaggttggtagatacagaaccatactgctccgtggccacgggattggtggttctgatttcctcttcgtctgtaatcatgaccttttcaatgtccacatttgttttctctgatccttgttttccaaagatgagaaccccgctctgaggaaaaaacttttcttcatcgtccttgtggctggccattgccgggcccggattcaccagagagtctctgccattgaggtggtacttggtagctccaatccacgagtattcactgttgttgttgtccgcagatgtctttgatactcgctgctggcggtaacagggtccaggaagccagttcctagactgatcccgaatgtcactcgctccggcctgagaaaactgaagcctggactgcgtggtggttccgcttggagtgtttgttctgctcaagtaatacaggtactggtcgatgagaggattcatgagacggtccaaactctggctgtgagcgtagctgctgtggaaaggaacatcctcaaaggtgtagctgaaggtaaagttgtttccggtacgcagcatctgagaagggaagtactccaggcagtaaaatgaagagcgtcctactgcctgactcccgttgttcagggtgaggtatccatactgtggcaccatgaagacgtctgctgggaacggcgggaggcatccttgatgcgccgagccgaggacgtacgggagctggtactccgagtcagtaaacacctgaaccgtgctggtaaggttattggcaatcgtcgtcgtaccatcattctgcgtgacctctctgacttgaatgttaaagagcttgaagttgagtctcttgggccggaatccccagttgttgttgatgagtctttgccagtcacgtggtgaaaagtggcagtggaatctgttgaagtcaaaatacccccaaggggtgctgtagccaaagtagtggttgtcgttgctggctcctgattggctggaaatctgcttgtacagatggttgttgtaggtgggcagagcccaggttcgggtgctggtggtgatgactctgtcgcccatccatgtggaatcgcaatgccaatttcccgaggaattacccactccgtcggcgccatcgttattgtctgccattggtgcgccactgcctgtagccatcgtattagttcccagaccagagggggctgctggtggctgtccgagaggctgggggtcaggtacggagtctgcgtctccagtctgaccgaaattcaatctctttcttgcaggctggttgcccgcttttccggttcccgaggaggagtctggctccacaggagagtgctctaccggcctcttttttcccggagccgtcttaacaggctcctcaaccaggcccagaggttcaagaaccctcttttttgcctggaagactgctcgtccgaggttgcccccaaaagacgtatcttctttaaggcgctcctgaaactccgcgtcggcgtggtcgtacttgaggtacgggttgtctccgctgtcgagctgccggtcgtaggccttgtcgtgctcgagggccgcggcgtctgcctcgttgaccggctctcccttgtcgagtccgttgaagggtccgaggtacttgtacccaggaagcacaagacccctgctgtcgtccttatgccgctctgcgggctttggtggtggtgggccaggtttgagcttccaccactgtcttattccttcagagagagtgtcctcgagccaatctggaagataaccatcggcagccatacctgatttaaatcatttattgttcagagatgcagtcatccaaatccacattgaccagatcgcaggcagtgcaagcgtctggcacctttcccatgatatgatgaatgtagcaaagtttctgatacgcctttttgacgacagaaacgggttgagattctgacacgggaaagcactctaaacagtctttctgtccgtgagtgaagcagatatttgaattctgattcattctctcgcattgtctgcagggaaacagcatcagattcatgcccacgtgacgagaacatttgttttggtacctgtccgcgtagttgatcgaagcttccgcgtctgacgtcgatggctgcgcaactgactcgcgcgcccgtttgggctcacttatatctgcgtcactgggggcgggtcttttcttggctccaccctttttgacgtagaattcatgctccacctcaaccacgtgatcctttgcccaccggaaaaagtctttcacttcctgcttggtgaccttcccaaagtcatgatccagacggcgggttagttcaaatttgaacatccggtcttgcaacggctgctggtgttcgaaggtcgttgagttcccgtcaatcacggcgcacatgttggtgttggaggtggcgatcacgggagtcgggtctatctgggccgaggacttgcacttttggtccacgcgcaccttgcttcctccgagaatggcttcggccgattccacgaccttggcggtcatctttccctcctcccaccagatcaccatcttgtcgacacagtcgttgaagggaaagttctcattggtccagttgacgcagcaagggcgaattcgtttaaacctgcaggaactagtcccttagtgagg

SEQ ID NO: 207 - protein, 735 aa, Artificial Sequence
  source: /note="Description of Artificial Sequence: Synthetic polypeptide"
MAADGYLPDWLEDTLSEGIRQWWKLKPGPPPPKPAERHKDDSRGLVLPGYKYLGPFNGLYKGEPVNEADAAALEHDKAYDRQLDSGDNPYLKYNHAGAEFQERLKEDTSFGGNLGRAVFQAKKRVLEPLGLVEEPVKTAPGKKRPVEHSPVEPDSSSGTGKAGNQPARKRLNFGQTGDADSVPDPQPLGQPPAAPSGLGSTTMATGSGAPVADNNEGADGVGNSSGNWHCDSQWLGDRVITTSTRTWALPTYNNHLYKQISSQSGASNDNHYFGYSTPWGYFDFNRFHCHFSPRDWQRLINNNWGFRPKRLNFKLFNIQVKEVTQNDGTTTIANNLTSTVQVFTDSEYQLPYVLGSAHQGCLPPFPADVFMVPQYGYLTLNNGSQAVGRSSFYCLEYFPSQMLRTGNNFQFSYTFEDVPFHSSYAHSQSLDRLMNPLIDQYLYYLNKTQSNSGTLQQSRLLFSQAGPTSMSLQAKNWLPGPCYRQQRLSKQANDNNNSNFPWTAATKYHLNGRDSLVNPGPAMASHKDDEEKFFPMHGTLIFGKQGTNANDADLDNVMITDEEEIRTTNPVATEQYGYVSNNLQDSNTGPTTGTVNHQGALPGMVWQDRDVYLQGPIWAKIPHTDGHFHPSPLMGGFGLKHPPPQIMIKNTPVPANPPTNFSSAKFASFITQYSTGQVSVEIEWELQKENSKRWNPEIQYTSNYNKSVNVDFTVDTNGVYSEPRPIGTRYLTRNL

SEQ ID NO: 208 - DNA, 2208 bp, Artificial Sequence
  source: /note="Description of Artificial Sequence: Synthetic polynucleotide"
atggctgccgatggttatcttccagattggctcgaggacactctctctgaaggaataagacagtggtggaagctcaaacctggcccaccaccgccaaagcccgcagagcggcataaggacgacagcaggggtcttgtgcttcctgggtacaagtacctcggacccttcaacggactctacaagggagagccggtcaacgaggcagacgccgcggccctcgagcacgacaaggcctacgaccggcagctcgacagcggagacaacccgtacctcaagtacaaccacgccggcgcggagtttcaggagcgccttaaagaagatacgtcttttgggggcaacctcggacgagcagtcttccaggccaaaaagagggttcttgaacctctgggcttggttgaggagcctgttaaaacggctccgggaaaaaagaggccggtagagcactctcctgtggagccagactcctcctcgggaaccggaaaagcgggcaaccagcctgcaagaaaaagattgaattttggtcagactggagacgcagactccgtacctgacccccagcctctcggacagccaccagcagccccctctggtctgggatctactacaatggctacaggcagtggcgcaccagtggcagacaataacgagggtgccgatggagtgggtaattcctcaggaaattggcattgcgattcccaatggctgggcgacagagtcatcaccaccagcacccgaacctgggctctgcccacctacaacaaccacctctacaagcaaatctccagccaatcaggagcctcaaacgacaaccactactttggctacagcaccccctgggggtattttgacttcaacagattccactgccacttttcaccacgtgactggcaaagactcatcaacaacaactggggattccgaccaaagagactcaacttcaagctctttaacattcaagtcaaagaggtcacgcagaatgacggtacgacgacgattgccaataaccttaccagcacggttcaggtgtttactgactcggagtaccagctcccgtacgtcctcggctcggcgcatcaaggatgcctcccgccgttcccagcagacgtcttcatggtgccacagtatggatacctcaccctgaacaacgggagtcaggcggtaggacgctcttccttttactgcctggagtactttccttctcagatgctgcgtactggaaacaactttcagttcagctacacctttgaagacgttcctttccacagcagctacgctcacagccagagtctggatcggctgatgaatcctctgatcgaccagtacctgtattatctgaacaagacacaatcaaatagtggaacccttcagcagtctcggctactgtttagccaagctggacccaccagcatgtctcttcaagctaaaaactggctgcctggaccttgctacagacagcagcgtctgtcaaagcaggcaaacgacaacaacaacagcaactttccctggactgcggctacaaagtatcatctaaatggccgggactcgttggttaatccaggaccagctatggccagccacaaagacgatgaagaaaagtttttccccatgcatggaaccctgatatttggtaaacaaggaacaaatgctaacgacgcggatttggacaatgtcatgattacagatgaagaagaaatccgcaccaccaatcccgtggctacggagcagtacggatatgtgtcaaataatttgcaagactcaaatactggtccaactactggaactgtcaatcaccaaggagcgttacctggtatggtgtggcaggatcgagacgtgtacctgcagggacccatttgggccaagattcctcacaccgatggacactttcatccttctccacttatgggaggttttggactcaaacacccacctcctcagatcatgattaaaaacactcccgttccagccaatcctcccacaaacttcagttctgccaagtttgcttctttcatcacacagtattccacgggacaagtcagcgtagagatcgagtgggagctgcagaaggagaacagcaaacgctggaaccccgagatccagtacacttccaactataacaaatctgttaatgtggactttactgtggacactaatggtgtgtattcagagcctcgccccattggcaccagatacctgactcgtaatctgtaa

SEQ ID NO: 209 - protein, 738 aa, Artificial Sequence
  source: /note="Description of Artificial Sequence: Synthetic polypeptide"
MAADGYLPDWLEDNLSEGIREWWDLKPGAPKPKANQQKQDDGRGLVLPGCKYLGPFNGLDKGEPVNAADAAALEHDKAYDQQLKAGDNPYLRYNHADAEFQERLQEDTSFGGNLGRAVFQAKKRVLEPLGLVEEGAKTAPGKKRPVEPSPQRSPDSSTGIGKTGQQPAKKRLNFGQTGDSESVPDPQPIGEPPAGPSGLGSGTMAAGGGAPMADNNEGADGVGSSSGNWHCDSTWLGDRVITTSTRTWALPTYNNHLYKQISNGTSGGSTNDNTYFGYSTPWGYFDFNRFHCHFSPRDWQRLINNNWGFRPKRLNFKLFNIQVKEVTQNEGTKTIANNLTSTIQVFTDSEYQLPYVLGSAHQGCPPPFPADVFMIPQYGYLTLNNGSQAVGRSSFYCLEYFPSQMRRTGNNFEFSYQFEDVPFHSSYAHSQSLDRLMNPLIDQYLYYLSRTQSTGGTAGTQQLLFSQAGPNNMSAQAKNWLPGPCYRQQRVSTTLSQNNNSNFAWTGATKYHLNGRDSLVNPGVAMATHKDDEERFFPSSGVLMFGKQGAGKDNVDYSSVMLTSEEEIKTTNPVATEQYGVVADNLQQQNAAPIVGAVNSQGALPGMVWQNRDVYLQGPIWAKIPHTDGNFHPSPLMGGFGLKHPPPQILIKNTPVPADPPTTFSQAKLASFITQYSTGQVSVEIEWELQKENSKRWNPEIQYTSNYNKSVNVDFTVDTNGVYSEPRPIGTRYLTRNL

SEQ ID NO: 210 - DNA, 2217 bp, Artificial Sequence
  source: /note="Description of Artificial Sequence: Synthetic polynucleotide"
atggctgccgatggttatcttccagattggctcgaggacaacctctctgagggcattcgcgagtggtgggacttgaaacctggagccccgaaacccaaagccaaccagcaaaagcaggacgacggccggggtctggtgcttcctggctgcaagtacctcggacccttcaacggactcgacaagggggagcccgtcaacgcggcggacgcagcggccctcgagcacgacaaggcctacgaccagcagctcaaagcgggtgacaatccgtacctgcggtataaccacgccgacgccgagtttcaggagcgtctgcaagaagatacgtcttttgggggcaacctcgggcgagcagtcttccaggccaagaagcgggttctcgaacctctcggtctggttgaggaaggcgctaagacggctcctggaaagaagagaccggtagagccatcaccccagcgttctccagactcctctacgggcatcggcaagacaggccagcagcccgcgaaaaagagactcaactttgggcagactggcgactcagagtcagtgcccgaccctcaaccaatcggagaaccccccgcaggcccctctggtctgggatctggtacaatggctgcaggcggtggcgctccaatggcagacaataacgaaggcgccgacggagtgggtagttcctcaggaaattggcattgcgattccacatggctgggcgacagagtcatcaccaccagcacccgaacctgggccctccccacctacaacaaccacctctacaagcaaatctccaacgggacatcgggaggaagcaccaacgacaacacctacttcggctacagcaccccctgggggtattttgactttaacagattccactgccacttctcaccacgtgactggcagcgactcatcaacaacaactggggattccggcccaagagactcaacttcaagctcttcaacatccaggtcaaggaggtcacgcagaatgaaggcaccaagaccatcgccaataaccttaccagcacgattcaggtctttacggactcggaataccagctcccgtacgtcctcggctctgcgcaccagggctgcccgcctccgttcccggcggacgtcttcatgattcctcagtacgggtacctgactctgaacaacggcagtcaggccgtgggccgttcctccttctactgcctggagtactttccttctcaaatgcggagaacgggcaacaactttgagttcagctaccagtttgaggacgtgccttttcacagcagctacgcgcatagccaaagcctggaccggctgatgaaccccctcatcgaccagtacctgtactacctgtctcggactcagtccacgggaggtaccgcaggaactcagcagttgctattttctcaggccgggcctaataacatgtcggctcaggccaaaaactggctacccgggccctgctaccggcagcaacgcgtctccacgacactgtcgcaaaataacaacagcaactttgcttggaccggtgccaccaagtatcatctgaatggcagagactctctggtaaatcccggtgtcgctatggcaacgcacaaggacgacgaagagcgattttttccatccagcggagtcttgatgtttgggaaacagggagctggaaaagacaacgtggactatagcagcgttatgctaaccagtgaggaagaaatcaaaaccaccaacccagtggccacagaacagtacggcgtggtggccgataacctgcaacagcaaaacgccgctcctattgtaggggccgtcaacagtcaaggagccttacctggcatggtctggcagaaccgggacgtgtacctgcagggtcctatctgggccaagattcctcacacggacggcaactttcatccttcgccgctgatgggaggctttggactgaaacacccgcctcctcagatcctgattaagaatacacctgttcccgcggatcctccaactaccttcagtcaagccaagctggcgtcgttcatcacgcagtacagcaccggacaggtcagcgtggaaattgaatgggagctgcagaaagagaacagcaagcgctggaacccagagattcagtatacttccaactataacaaatctgttaatgtggactttactgtggacactaatggtgtgtattcagagcctcgccccattggcaccagatacctgactcgtaatctgtaa

SEQ ID NO: 211 - DNA, 3167 bp, Artificial Sequence
  source: /note="Description of Artificial Sequence: Synthetic polynucleotide"
attgaatttagcggccgcgaattcgcccttcgcagagaccaaagttcaactgaaacgaattaaacggtttattgattaacaagcaattacagattacgagtcaggtacctggtgccaatggggcgaggctctgaatacacaccattagtgtccacagtaaagtccacattaacagatttgttgtagttggaagtgtactgaatctcgggattccagcgtttgctgttctccttctgcagctcccactcgatctccacgctgacctgccccgtggagtactgtgtaatgaaggaagcaaactttgccgcactgaaggtagtcgaaggattcgcaggtaccggggtgttcttgatgagaatctgcgggggagggtgtttaagtccgaatccgcccatgaggggagaggggtgaaaatgtccgtccgtgtgtggaatctttgcccagatgggcccctgcaggtacacgtctctgtcctgccacaccatgcctggaagaacgccttgtgtgttgacatctgaggtagctgcttgtgtgttgccgctctggaggttggtagatacagaaccatactgctccgtagccacgggattggtggtcctgatttcctcttcgtctgtaatcatgaccttttcaatgtccacattagtttttcccgagtcttgttttccaaagatgagaaccccgctctgaggaaaaaacttttcttcatcgtccttgtggctggccatggccgggcccggattcaccagagagtctcttccattaaggtggtacttggtagctccagtccacgagtattcactgttgttgttatccgcagatgtctttgatactcgctgctggcggtaacagggtccaggaagccagttcctagactggtcccgaatgtcacttgctccggcctgagaaaactgaagccttgactgcgtggtggttccgcttggagtgtttgttctgctcaagtaatacaggtactggtcgatgagaggattcatgagacggtccaaactctggctgtgggcgtagctgctgtggaaaggaacgtcctcaaaggtgtagctgaaggtaaagttgtttccggtacgcagcatctgagaaggaaagtactccaggcagtaaaatgaagagcgtcctactgcctgactcccgttgttcagggtgaggtatccatactgtggcaccatgaagacgtctgctgggaacggcgggaggcatccttgatgcgccgagccgaggacgtacgggagctggtactccgagtcagtaaacacctgaaccgtgctggtaaggttattggcaatcgtcgtcgtaccgtcattctgcgtgacctccttgacttgaatgttaaagagcttgaagttgagtcttttgggccggaatccccaattgttgttgatgagtctttgccagtcacgtggcgaaaagtggcagtggaatctgttgaagtcaaaatacccccaaggggtgctgtagccaaagtagtggttgtcgtttgaggctcctgattggctggaaatctgcttgtagaggtggttgttgtaggtgggcagagcccaggtgcgggtgctggtggtgatgactctgtcgcccatccatgtggaatcgcaatgccaatttcccgaggaattacccactccgtcggcgccctcgttattgtctgccattggtgcgccactgcctgtagccatcgtattagttcccagaccagagggggctgctggtggctgtccgagaggctgggggtcaggtacggagtctgcgtctccagtctgaccgaaattcaatctctttcttgcaggctgctggcccgcttttccggttcccgaggaggagtctggctccgcaggagagtgctctaccggcctcttttttcccggagccgtcttaacaggttcctcaaccaggcccagaggttcaagaaccctctttttcgcctggaagactgctcgtccgaggttgcccccaaaagacgtatcttctttaagacgctcctggaactccgcgtcggcgtggttgtacttggggtacgggttgtctccgctgtcgagctgccggtcgtaggccttgtcgtgctcgagggccgcggcgtctgcctcgttgaccggctctcccttgtcgagtccgttgaagggtccaaggtacttgtacccaggaagcacaagacccctgctgtcgtccttatgccgctctgcgggctttggtggtggtgggccaggtttgagcttccaccactgtcttattccttcagagagagtgtcctcgagccaatctggaagataaccatcggcagccatacctgatttaaatcatttattgttcagagatgcagtcatccaaatccacattgaccagatcgcaagcagtgcaagcgtctggcacctttcccatgatatgatgaatgtagcacagtttctgatacgcctttttgacgacagaaacgggttgagattctgacacgggaaagcactctaaacagtctttctgtccgtgagtgaagcagatatttgaattctgattcattctctcgcattgtctgcagggaaacagcatcagattcatgcccacgtgacgagaacatttgttttggtacctgtccgcgtagttgattgaagcttccgcgtctgacgtcgatggctgcgcaactgactcgcgcgcccgtttgggctcacttatatctgcgtcactgggggcgggtctttttttggctccaccctttttgacgtagaattcatgctctacctcaaccacgtgatcctttgcccaccggaaaaagtctttgacttcctgcttggtgaccttcccaaagtcatgatccagacggcgggtgagttcaaatttgaacatccggtcttgcaacggctgctggtgttcgaaggtcgttgagttcccgtcaatcactgcgcacatgttggtgttggaggtgacaatcacgggagtcgggtctatctgggccgaggacttgcatttctggtccacgcgcaccttgcttcctccgagaatggctttggccgactccacgaccttggcggtcatcttcccctcctcccaccagatcaccatcttgtcgacgcaatcattgaaaggaaagttctcattggtccagttgacgcagccgtagaaagggcgaattcgtttaaacctgcaggactagtccctttagtgagggt

SEQ ID NO: 212 - DNA, 3161 bp, Artificial Sequence
  source: /note="Description of Artificial Sequence: Synthetic polynucleotide"
aattgaatttagcggccgcgaattcgcccttcgcagagaccaaagttcaactgaaacgaattaaacggtttattgattaacaagcaattacagattacgagtcaggtatctggtgccaatggggcgaggctctgaatacacaccattagtgtccacagtaaagtccacattaacagatttgttgtagttggaagtgtactgaatctcgggattccagcgtttgctgttctccttctgcagctcccactcgatctccacgctgacctgccccgtggagtactgtgtaatgaaggaagcaaactttgccgcactgaaggtagtcgaaggattcgcaggtaccggggtgttcttgatgagaatctgcgggggagggtgtttaagtccgaatccgcccatgaggggagaggggtgaaaatgtccgtccgtgtgtggaatctttgcccagatgggcccctgcaggtacacgtctctgtcctgccacaccatgcctggaagaacgccttgtgtgttgacatctgaggtagctgcttgtgtgttgccgctctggaggttggtagatacagaaccatactgctccgtagccacgggattggtggtcctgatttcctcttcgtctgtaatcatgaccttttcaatgtccacattagtttttcccgagtcttgttttccaaagatgagaaccccgctctgaggaaaaaacttttcttcatcgtccttgtggctggccatggccgggcccggattcaccagagagtctcttccattaaggtggtacttggtagctccagtccacgagtattcactgttgttgttatccgcagatgtctttgatactcgctgctggcggtaacagggtccaggaagccagttcctagactggtcccgaatgtcacttgctccggcctgagaaaactgaagccttgactgcgtggtggttccgcttggagtgtttgttctgctcaagtaatacaggtactggtcgacgagaggattcatgagacggtccaaactctggctgtgggcgtagctgctgtggaaaggaacgtcctcaaaggtgtagctgaaggtaaagttgtttccggtacgcagcatctgagaaggaaagtactccaggcagtaaaatgaagagcgtcctactgcctgactcccgttgttcagggtgaggtatccatactgtggcaccatgaagacgtctgctgggaacggcgggaggcatccttgatgcgccgagccgaggacgtacgggagctggtactccgagtcagtaaacacctgaaccgtgctggtaaggttattggcaatcgtcgtcgtaccgtcattctgcgtgacctccttgacttgaatgttaaagagcttgaagttgagtcttttgggccgggatccccaattgttgttgatgagtctttgccagtcacgtggcgaaaagtggcagtggaatctgttgaagtcaaaatacccccaaggggtgctgtagccaaagtagtggttgtcgtttgaggctcctgattggctggaaatctgcctgtagaggtggttgttgtaggtgggcagagcccaggtgcgggtgctggtggtgatgactctgtcgcccatccatgtggaatcgcaatgccaatttcccgaggaattacccactccgtcggcgccctcgttattgtctgccattggtgcgccactgcctgtagccatcgtattagttcccagaccagagggggctgctggtggctgtccgagaggctgggggtcaggtacggagtctgcgtctccagtctgaccgaaattcaatctccttcttgcaggctgctggcccgcttttccggttcccgaggaggagtctggctccgcaagagagtgctctaccggcctcttttttcccggagccgtcttaacaggttcctcaaccaggcccagaggttcaagaaccctctttttcgcctggaagactgctcgtccgaggttgcccccaaaagacgtatcttctttaagacgctcctggaactccgcgtcggcgtggttgtacttgaggtacgggttgtctccgccgtcgagctgccggtcgtaggccttgtcgtgctcgagggccgcggcgtctgcctcgttgaccggctctcccttgtcgagtccgttgaagggtccaaggtacttgtacccaggaagcacaagacccctgctgtcgtccttatgccgctctgcgggctttggtggtggtgggccaggtttgagcttccaccactgtcttattccttcagagagagtgtcctcgagccaatctggaagataaccatcggcagccatacctgatttaaatcatttattgttcagagatgcagtcatccaaatccacattgaccagatcgcaagcagtgcaagcgtctggcacctttcccatgatatgatgaatgtagcacagtttctgatacgcctttttgacgacagaaacgggttgagattctgacacgggaaagcactctaaacagtctttctgtccgtgagtgaagcagatatttgaattctgattcattctctcgcattgtctgcagggaaacagcatcagattcatgcccacgtgacgagaacatttgttttggtacctgtccgcgtagttgattgaagcttccgcgtctgacgtcgatggctgcgcaactgactcgcgcgcccgtttgggctcacttatatctgcgtcactgggggcgggtctttttttggctccaccctttttgacgtagaattcatgctctacctcaaccacgtgatcctttgcccaccggaaaaagtctttgacttcctgcttggtgaccttcccaaagtcatgatccagacggcgggtgagttcaaatttgaacatccggtcttgcaacggctgctggtgttcgaaggtcgttgagttcccgtcaatcactgcgcacatgttggtgttggaggtgacaatcacgggagtcgggtctatctgggccgaggacttgcatttctggtccacgcgcaccttgcttcctccgagaatggctttggccgactccacgaccttggcggtcatcttcccctcctcccaccagatcaccatcttgtcgacgcaatcattgaaaggaaagttctcattggtccagttgacgcagcaagggcgaattcgtttaaacctgcaggactagtccctttagtgaggg

SEQ ID NO: 213 - DNA, 3172 bp, Artificial Sequence
  source: /note="Description of Artificial Sequence: Synthetic polynucleotide"
gattgaatttagcggccgcgaattcgcccttgctgcgtcaactggaccaatgagaactttcccttcaacgattgcgtcgacaagatggtgatctggtgggaggagggcaagatgaccgccaaggtcgtggagtccgccaaggccattctgggtggaagcaaggtgcgcgtggaccaaaagtgcaagtcatcggcccagatcgaccccacgcccgtgatcgtcacctccaacaccaacatgtgcgccgtgatcgacgggaacagcaccaccttcgagcaccagcagcccctgcaggaccgcatgttcaagttcgagctcacccgccgtctggagcacgactttggcaaggtgaccaagcaggaagtcaaagagttcttccgctgggctcaggatcacgtgactgaggtggcgcatgagttctacgtcagaaagggcggagccaccaaaagacccgcccccagtgacgcggatataagcgagcccaagcgggcctgcccctcagttgcggagccatcgacgtcagacgcggaagcaccggtggactttgcggacaggtaccaaaacaaatgttctcgtcacgcgggcatgcttcagatgctgtttccctgcaagacatgcgagagaatgaatcagaatttcaacgtctgcttcacgcacggggtcagagactgctcagagtgcttccccggcgcgtcggaatctcaacccgtcgtcagaaaaaagacgtatcagaaactgtgcgcgattcatcatctgctggggcgggcacccgagattgcgtgttcggcctgcgatctcgtcaacgtggacttggatgactgtgtttctgagcaataaatgacttaaaccaggtatggctgctgacggttatcttccagattggctcgaggacaacctctctgagggcattcgcgagtggtgggacctgaaacctggagcccccaagcccaaggccaaccagcagaagcaggacgacggccggggtctggtgcttcctggctacaagtacctcggacccttcaacggactcgacaagggggagcccgtcaacgcggcggacgcagcggccctcgagcacgacaaggcctacgaccagcagctcaaagcgggtgacaatccgtacctgcggtataaccacgccgacgccgagtttcaggagcgtctgcaagaagatacgtcttttgggggcaacctcgggcgagcagtcttccaggccaagaagcgggttctcgaacctctcggtctggttgaggaagctgctaagacggctcctggaaagaagagaccggtagaaccgtcacctcagcgttcccccgactcctccgcgggcatcggcaagaaaggccagcagcccgctaaaaagagactgaactttggtcagactggcgactcagagtcagtccccgaccctcaaccaatcggagaaccaccagcaggcccctctggtctgggatctggtacaatggctgcaggcggtggcgctccaatggcagacaataacgaaggcgccgacggagtgggtagttcctcaggaaattggcattgcgattccacatggctgggcgacagagtcatcaccaccagcacccgaacctgggccctgcccacctacaacaaccacctctacaagcaaatatccaatgggacatcgggaggaagcaccaacgacaacacctacttcggctacagcaccccctgggggtattttgacttcaacagattccactgccacttctcaccacgtgactggcagcgactcatcaacaacaactggggattccggccaaaaagactcagcttcaagctcttcaacatccaggtcaaggaggtcacgcagaatgaaggcaccgagaccatcgccaataaccttaccagcacgattcaggtatttacggactcggaataccagctgccgtacgtcctcggctccgcgcaccagggctgcctgcctccgttcccggcggacgtcttcatgattccccagtacggctaccttacactgaacaatggaagtcaagccgtaggccgttcctccttctactgcctggaatattttccatctcaaatgctgcgaactggaaacaattttgaattcagctacaccttcgaggacgtgcctttccacagcagctgcgcacacagccagagctcggaccgactgatgaatcctctcatcgaccagtacctgtactacttatccagaactcggtccacaggaggaactcaaggtacccagcaattgttattttctcaagctgggcctgcaaacatgtcggctcaggctaagaactggctacctggaccttgctaccggcagcagcgagtctctacgacactgtcgcaaaacaacaacagcaactttgcttggactggtgccaccaaatatcacctgaacggaagagactctttggtaaatcccggtgtcgccatggcaacccacaaggacgacgaggaacgcttcttcccgtcgagtggagtcctgatgtttggaaaacagggtgctggaagagacaatgtggactacagcagcgttatgctaaccagcgaagaagaaattaaaaccactaaccctgtagccacagaacaatacggtgtggtggctgacaacttgcagcaaaccaatacagggcctattgtgggaaatgtcaacagccaaggagccttacctggcatggtctggcagaaccgagacgtgtacctgcagggtcccatctgggccaagattcctcacacggacggcaacttccacccttcaccgctaatgggaggatttggactgaagcacccacctcctcagatcctgatcaagaacacgccggtacctgcggatcctccaacaacgttcagccaggcgaaattggcttccttcattacgcagtacagcaccggacaggtcagcgtggaaatcgagtgggagctgcagaaggagaacagcaaacgctggaacccagagattcagtacacttcaaactactacaaatctacaaatgtggactttgctgtcaatacagagggaacttattctgagcctcgccccattggtactcgttacctcacccgtaatctgtaattgctggttaatcaataaaccgtttgattcgtttcagttgaactttggtctctgcgaagggcgaattcgtttaaacctgcaggactagtccctttagtgagg

SEQ ID NO: 214 - DNA, 3172 bp, Artificial Sequence
  source: /note="Description of Artificial Sequence: Synthetic polynucleotide"
gattgaatttagcggccgcgaattcgcccttgctgcgtcaactggaccaatgagaactttcccttcaacgattgcgtcgacaagatggtgatctggtgggaggagggcaagatgaccgccaaggtcgtggagtccgccaaggccattctgggtggaagcaaggtgcgcgtggaccaaaagtgcaagtcatcggcccagatcgaccccacgcccgtgatcgtcacctccaacaccaacatgtgcgccgtgatcggcgggaacagcaccaccttcgagcaccagcagcccctgcaggaccgcatgttcaagttcgagctcacccgccgtctggagcacgactttggcaaggtgaccaagcaggaagtcaaagagttcttccgctgggctcaggatcacgtgactgaggtggcgcatgagttctacgtcagaaagggcggagccaccaaaagacccgcccccagtgacgcggatataagcgagcccaagcgggcctgcccctcagttgcggagccatcgacgtcagacgcggaagcaccggtggactttgcggacaggtaccaaaacaaatgttctcgtcacgcgggcatgcttcagatgctgtttccctgcaagacatgcgagagaatgaatcagaatttcaacgtctgcttcacgcacggggtcagagactgctcagagtgcctccccggcgcgtcagaatctcaacccgtcgtcagaaaaaagacgtatcagaaactgtgcgcgattcatcatctgctggggcgggcacccgagattgcgtgttcggcctgcgatctcgtcaacgtggacttggatgactgtgtttctgagcaataaatgacttaaaccaggtatggctgctgacggttatcttccagattggctcgaggacaacctctctgagggcattcgcgagtggtgggacctgaaacctggagcccccaagcccaaggccaaccagcagaagcaggacgacggccggggtctggtgcttcttggctacaagtacctcggacccttcaacggactcgacaagggggagcccgtcaatgcggcggacgcagcggccctcgagcacgacaaggcctacgaccagcagctcaaagcgggtgacaatccgtacctgcggtataaccacgccgacgccgagtttcaggagcgtctgcaagaagatacgtcttttgggggcaacctcgggcgagcagtcttccaggccaagaagcgggttctcgaacctctcggtctggttgaggaagctgctaagacggctcctggaaagaagagaccggtagaaccgtcacctcagcgttcccccgactcctccacgggcatcggcaagaaaggccagcagcccgctaaaaagagactgaactttggtcagactggcgactcagagtcagtccccgaccctcaaccaatcggagaaccaccagcaggcccctctggtctgggatctggtacaatggctgcaggcggtggcgctccaatggcagacaataacgaaggcgccgacggagtgggtagttcctcaggaaattggcattgcgattccacatggctgggcgacagagtcatcaccaccagcacccgaacctgggccctgcccacctacaacaaccacctctacaagcaaatatccaatgggacatcgggaggaagcaccaacgacaacacctacttcggctacagcaccccctgggggtattttgacttcaacagattccactgccacttctcaccacgtgactggcagcgactcatcaacaacaactggggattccggccaaaaagactcagcttcaagctcttcaacatccaggtcaaggaggtcacgcagaatgaaggcaccaagaccatcgccaataaccttaccagcacgattcaggtatttacggactcggaataccagctgccgtacgtcctcggctccgcgcaccagggctgcctgcctccgttcccggcggacgtcttcatgattccccagtacggctaccttacactgaacaatggaagtcaagccgtaggccgttcctccttctactgcctggaatattttccatctcaaatgctgcgaactggaaacaattttgaattcagctacaccttcgaggacgtgcctttccacagcggctacgcacacagccagagcttggaccgactgatgaatcctctcatcgaccagtacctgtactacttatccagaactcagtccacaggaggaactcaaggtacccagcaattgttattttctcaagctgggcctgcaaacatgtcggctcaggctaagaactggctacctggaccttgctaccggcagcagcgagtctctacgacactgtcgcaaaacaacaacagcaactttgcttggactggtgccaccaaatatcacctgaacggaagagactctttggtaaatcccggtgtcgccatggcaacccacaaggacgacgaggaacgcttcttcccgtcgagtggagtcctgatgtttggaaaacagggtgctggaagagacaatgtggactacagcagcgttatgctaaccagcgaagaagaaattaaaaccactaaccctgtagccacagaacaatacggtgtggtggctgacaacttgcagcaaaccaatacagggcctattgtgggaaatgtcaacagccaaggagccttacctggcatggtctggcagaaccgagacgtgtacctgcagggtcccatctgggccaagattcctcacacggacggcaacttccacccttcaccgctaatgggaggatttggactgaagcacccacctcctcagatcctgatcaagaacacgccggtacctgcggatcctccaacgacgttcagccaggcgaaattggcttccttcattacgcagtacagcaccggacaggtcagcgtggaaatcgagtgggagctgcagaaggagaacagcaaacgctggaacccagagattcagtacacttcaaactactacaaatctacaaatgtggactttgctgtcaatacagagggaacttattctgagcctcgccccattggtactcgttacctcacccgtaatctgtaattgctggttaatcaataaaccgtttgattcgtttcagttgaactttggtctctgcgaagggcgaattcgtttaaacctgcaggactagtccctttagtgagg

SEQ ID NO: 215 - DNA, 2208 bp, Artificial Sequence
  source: /note="Description of Artificial Sequence: Synthetic polynucleotide"
atggctgccgatggttatcttccagattggctcgaggacactctctctgaaggaataagacagtggtggaagctcaaacctggcccaccaccaccaaagcccgcagagcggcataaggacgacagcaggggtcttgtgcttcctgggtacaagtacctcggacccttcaacggactcgacaagggagagccggtcaacgaggcagacgccgcggccctcgagcacgacaaggcctacgaccggcagctcgaaagcggagacaacccgtacctcaagtacaaccacgccgacgcggagtttcaggagcgtcttaaagaagatacgtcttttgggggcaacctcggacgagcagtcttccaggcgaaaaagagggttcttgaacctctgggcctggttgaggagcctgttaaaacggctccgggaaaaaagaggccggtagagcactctcctgtggagccagactcctcctcgggaaccggaaaagcgggccagcagcctgcgagaaaaagattgaattttggtcagactggagacgcagactccgtacctgacccccagcctctcggacagccaccagcagccccctctggtctgggatctactacaatggcttcaggcagtggcgcaccagtggcagacaataacgagggtgccgatggagtgggtaattcctcaggaaattggcattgcgattcccaatggctgggcgacagagtcatcaccaccagcacccgaacctgggccctgcccacctacaacaaccacctctacaagcaaatctccagccaatcaggagcctcaaacgacaaccactactttggctacagcaccccctgggggtattttgacttcaacagattccactgccacttttcaccacgtgactggcaaagactcatcaacaacagctggggattccgacccaaaagactcaacttcaagctctttaacattcaagtcaaagaggtcacgcagaatgacggtacgacgacgattgccaataaccttaccagcacggttcaagtgtttaccgactcggagtaccagctcccgtacgtcctcggctcggcgcatcaaggatgcctcccgccgttcccagcagacgtctttatggtcccacagtatggatacctcaccctgaacaacgggagtcaggcggtaggacgctcttccttttactgcctggagtactttccttctcagatgctgcgtactggaaacaactttcagttcagctacacctttgaagacgttcccttccacagcagctacgctcacagccagagtctggatcggctgctgaatcctctgatcgaccagtacctatattatctgaacaagacacaatcaaatagtggaactcttcagcagtctcggctactgtttagccaagctggacccaccagcatgtctcttcaagctaaaaactggctgcctggaccttgctacagacagcagcgtctgtcaaagcaggcaaacgacaacaacaacagcaactttccctggactgcggctacaaagtatcatctaaatggccgggactcgttggttaatccaggaccagctatggccagccacaaagacgatgaagaaaagtttttccccatgcatggaaccctgatatttggtaaacaaggaacaaatgctaacgacgcggatttggacaatgtcatgattacagatgaagaagaaatccgcaccaccaatcccgtggctacggagcagtacggatatgtgtcaaataatttgcaaaactcaaatactggtccaactactggaactgtcaatcaccaaggagcgttacctggtatggtgtggcaggatcgagacgtgtacctgcagggacccatttgggccaagattcctcacacggacgggcactttcatccttctccactaatgggaggttttgggctcaaacacccgcctcctcagatcatgatcaaaaacactcccgttccagccaatcctcctacaaacttcagttcttccaagtttgcttctttcatcacacagtattccacggggcaggtcagcgtggagatcgagtgggagctgcagaaggagaacagcaaacgctggaatcccgaaattcagtatacttccaactacaacaaatctgttaatgtggactttactgtggacactaatggtgtgtattcagagcctcgccccattggcaccagatacccgactcgtaatctgtaa

SEQ ID NO: 216 - protein, 735 aa, Artificial Sequence
  source: /note="Description of Artificial Sequence: Synthetic polypeptide"
MAADGYLPDWLEDTLSEGIRQWWKLKPGPPPPKPAERHKDDSRGLVLPGYKYLGPFNGLDKGEPVNEADAAALEHDKAYDRQLESGDNPYLKYNHADAEFQERLKEDTSFGGNLGRAVFQAKKRVLEPLGLVEEPVKTAPGKKRPVEHSPVEPDSSSGTGKAGQQPARKRLNFGQTGDADSVPDPQPLGQPPAAPSGLGSTTMASGSGAPVADNNEGADGVGNSSGNWHCDSQWLGDRVITTSTRTWALPTYNNHLYKQISSQSGASNDNHYFGYSTPWGYFDFNRFHCHFSPRDWQRLINNSWGFRPKRLNFKLFNIQVKEVTQNDGTTTIANNLTSTVQVFTDSEYQLPYVLGSAHQGCLPPFPADVFMVPQYGYLTLNNGSQAVGRSSFYCLEYFPSQMLRTGNNFQFSYTFEDVPFHSSYAHSQSLDRLLNPLIDQYLYYLNKTQSNSGTLQQSRLLFSQAGPTSMSLQAKNWLPGPCYRQQRLSKQANDNNNSNFPWTAATKYHLNGRDSLVNPGPAMASHKDDEEKFFPMHGTLIFGKQGTNANDADLDNVMITDEEEIRTTNPVATEQYGYVSNNLQNSNTGPTTGTVNHQGALPGMVWQDRDVYLQGPIWAKIPHTDGHFHPSPLMGGFGLKHPPPQIMIKNTPVPANPPTNFSSSKFASFITQYSTGQVSVEIEWELQKENSKRWNPEIQYTSNYNKSVNVDFTVDTNGVYSEPRPIGTRYPTRNL

SEQ ID NO: 217 - DNA, 2208 bp, Artificial Sequence
  source: /note="Description of Artificial Sequence: Synthetic polynucleotide"
atggctgccgatggttatcttccagattggctcgaggacactctctctgaaggaataagacagtggtggaagctcaaacctggcccaccaccaccaaagcccgcagagcggcataaggacgacagcaggggtcttgtgcttcctgggtacaagtacctcggacccttcaacggactcgacaagggagagccggtcaacgaggcagacgccgcggccctcgagcacgacaaggcctacgaccggcagctcgacagcggagacaacccgtacctcaagtacaaccacgccgacgcggagtttcaggagcgtcttaaagaagatacgtcttttgggggcaacctcggacgagcagtcttccaggccaaaaagaggattcttgaacctctgggcctggttgaggaacctgttaagacggctccgggagaaaagaggccggtagagcactctcctgcggagccagactcctcctcgggaaccggaaaagcgggccagcagcctgcaagaaagagattgaattttggccagactggagacgcagactcagtacctgacccccagcctctcggacagccaccagcagccccctctggtctgggaactaatacgatggcttcaggcagtggcgcaccaatggcagacaataacgagggcgccgacggagtgggtaattcctcgggaaattggtattgcgattccacatggatgggcgacagagtcatcaccaccagcacccgcacctgggccctgcccacctacaacaaccatctgtacaagcaaatctccagccagtctggagccagcaacgacaaccactactttggctacagcaccccctgggggtattttgacttcaacagattccactgccacttctccccacgtgactggcaaagactcatcaacaacaactggggattccggcccaagagactcagcttcaagctctttaacattcaagtcaaagaggtcacgcagaatgacggtacgacgacgattgccaataaccttaccagcacggttcaggtgtttactgactcggagtaccagctcccgtacgtcctcggctcggcgcatcaaggatgcctcccgccgttcccagcagacgtcttcatggtgccacagtatggatacctcaccctgaacaacggcagtcaggcggtaggacgctcttccttttactgcctggagtactttccttctcagatgcttcgtaccggaaacaactttaccttcagctacacctttgaagacgttcctttccatagcagctacgctcacagccaaagtctggaccgtctcatgaatcctctcatcgaccagtacctgtattacttgagcagaacaaacactccaagcggaaccaccacgatgtccaggcttcagttttctcaggccggagcaagtgacattcgggaccagtctagaaactggcttcctggaccctgttaccgccagcagcgagtatcaaagacagctgcggacaacaacaacagtgattactcgtggactggagctaccaagtaccacctcaatggaagagactctctggtgaatccgggcccagctatggccagccacaaggacgatgaagaaaaatattttcctcagagcggggttctcatctttggaaaacaagactcgggaaaaactaatgtggacattgaaaaggttatgattacagacgaagaggaaatcaggaccaccaatcccgtggctacggagcagtatggttctgtatctaccaacctccagagcggcaacacacaagcagctacctcagatgtcaacacacaaggcgttcttccaggcatggtctggcaggacagagacgtgtacctgcaggggcccatctgggcaaagattccacacacggacggacattttcacccctctcccctcgtgggcggattcggacttaaacaccctcctccacaaattctcatcaagaacaccccggtacctgcgaatccttcgaccactttcagtgcggcaaagtttgcttccttcatcacacagtactccacggggcaggtcagcgtggagatcgagtgggagctgcagaaggagaacagcaaacgctggaatcccgaaattcagtacacttccaactacaacaaatctgttaatgtggactttactgtggacactaatggtgtgtattcagagcctcgccccattggcaccagatacctgactcgtaatctgtaa

SEQ ID NO: 218 - protein, 735 aa, Artificial Sequence
  source: /note="Description of Artificial Sequence: Synthetic polypeptide"
MAADGYLPDWLEDTLSEGIRQWWKLKPGPPPPKPAERHKDDSRGLVLPGYKYLGPFNGLDKGEPVNEADAAALEHDKAYDRQLDSGDNPYLKYNHADAEFQERLKEDTSFGGNLGRAVFQAKKRILEPLGLVEEPVKTAPGEKRPVEHSPAEPDSSSGTGKAGQQPARKRLNFGQTGDADSVPDPQPLGQPPAAPSGLGTNTMASGSGAPMADNNEGADGVGNSSGNWYCDSTWMGDRVITTSTRTWALPTYNNHLYKQISSQSGASNDNHYFGYSTPWGYFDFNRFHCHFSPRDWQRLINNNWGFRPKRLSFKLFNIQVKEVTQNDGTTTIANNLTSTVQVFTDSEYQLPYVLGSAHQGCLPPFPADVFMVPQYGYLTLNNGSQAVGRSSFYCLEYFPSQMLRTGNNFTFSYTFEDVPFHSSYAHSQSLDRLMNPLIDQYLYYLSRTNTPSGTTTMSRLQFSQAGASDIRDQSRNWLPGPCYRQQRVSKTAADNNNSDYSWTGATKYHLNGRDSLVNPGPAMASHKDDEEKYFPQSGVLIFGKQDSGKTNVDIEKVMITDEEEIRTTNPVATEQYGSVSTNLQSGNTQAATSDVNTQGVLPGMVWQDRDVYLQGPIWAKIPHTDGHFHPSPLVGGFGLKHPPPQILIKNTPVPANPSTTFSAAKFASFITQYSTGQVSVEIEWELQKENSKRWNPEIQYTSNYNKSVNVDFTVDTNGVYSEPRPIGTRYLTRNL

SEQ ID NO: 219 - DNA, 2209 bp, Artificial Sequence
  source: /note="Description of Artificial Sequence: Synthetic polynucleotide"
atggctgccgatggttatcctccagattggctcgaggacactctctctgaagggataagacagtggtggaagctcaaacctggcccaccaccaccaaagcccgcagagcggcataaggacgacagcaggggtcttgtgcttcctgggtacaagtacctcggacccttcaacggactcgacaagggggagccggtcaacgaggcagacgccgcggccctcgagcacgacaaggcctacgaccggcagctcgacagcggagacaacccgtacctcaagtacaaccacgccgacgcagagtttcaggagcgccttaaagaagatacgtcttttgggggcaacctcggacgagcagtcttccaggcgaaaaagagggttcttgaacctctgggcctggttgaggaacctgttaagacggctccgggaaaaaagaggccggtagagcactctcctgtggagccagactcctcctcgggaaccggaaaagcgggccagcggcctgcaagaaaaagattaaattttggtcagactggagacgcagactccgtacctgacccccagcctctcggacagccaccagcagccccctctggtctgggatctactacaatggctacaggcagtggcgcaccaatggcagacaataacgagggtgccgatggagtgggtaattcctcaggaaattggcattgcgattcccaatggctgggcgacagagtcatcaccaccagcacccgaacctgggccctgcccacatacaacaaccacctctacaagcaaatctccagccaatcaggagccagcaacgacaaccactactttggctacagcaccccctgggggtattttgacttcaacagattccactgccacttttcaccacgtgactggcaaagactcatcaacaacaactggggattccggcccaaaagactcaacttcaagctctttaatattcaagtcaaagaggtcacgcagaatgacggtacgacgacgattgccaataaccttaccagcacggttcaggtgtttactgactcggagtaccagctcccgtacgtcctgggctcggcgcatcaaggatgcctcccgccgtttccagcggacgtcttcatggtcccacagtatggatacctcaccctgaacaacgggagtcaggcggtaggacgctcttccttttactgcctggagtactttccttctcagatgctgcgtactggaaacaactttcagttcagctacacttttgaagacgtgcctttccacagcagctacgctcacagccagagtctggatcggctgatgaatcctctgatcgaccagtacctgtattatctgaacaagacacaaacaaatagtggaactcttcagcagtctcggctactgtttagccaagctggaccaaccaacatgtctcttcaagctaaaaactggctgcctggaccttgctacagacagcagcgtctgtcaaaacaggcaaacgacaacaacaacagcaactttccctggactgcagctacaaagtatcatctaaatggccgggactcgttggttaatccaggaccagctatggccagtcacaaggatgacgaagaaaagtttttccccatgcatggaaccctgatatttggtaaacaaggaacaaatgccaacgacgcggatttggaaaatgtcatgattacagatgaagaagaaatcagggccaccaatcccgtggctacggagcagtacgggactgtgtcaaataatttgcaaaactcaaacactggtccaactactggaactgtcaatcgccaaggagcgttacctggtatggtgtggcaggatcgagacgtgtacctgcagggacccatttgggccaagattcctcacaccgatggacactttcatccttctccactgatgggaggttttggactcaaacacccgcctcctcagatcatgatcaaaaacactcccgttccagccaatcctcccacaaacttcagttctgccaagtttgcttctttcatcacacagtattccacgggacaggtcagcgtggagatcgagtgggagctgcagaaggagaacagcaaacgctggaatcccgaaattcagtacacttccaactacaacaagtctgttaatgtggactttactgtggacactaatggtgtgtattcagagcctcgccccattggcaccagatacctgactcgtaatctgtaat

SEQ ID NO: 220 - protein, 735 aa, Artificial Sequence
  source: /note="Description of Artificial Sequence: Synthetic polypeptide"
MAADGYPPDWLEDTLSEGIRQWWKLKPGPPPPKPAERHKDDSRGLVLPGYKYLGPFNGLDKGEPVNEADAAALEHDKAYDRQLDSGDNPYLKYNHADAEFQERLKEDTSFGGNLGRAVFQAKKRVLEPLGLVEEPVKTAPGKKRPVEHSPVEPDSSSGTGKAGQRPARKRLNFGQTGDADSVPDPQPLGQPPAAPSGLGSTTMATGSGAPMADNNEGADGVGNSSGNWHCDSQWLGDRVITTSTRTWALPTYNNHLYKQISSQSGASNDNHYFGYSTPWGYFDFNRFHCHFSPRDWQRLINNNWGFRPKRLNFKLFNIQVKEVTQNDGTTTIANNLTSTVQVFTDSEYQLPYVLGSAHQGCLPPFPADVFMVPQYGYLTLNNGSQAVGRSSFYCLEYFPSQMLRTGNNFQFSYTFEDVPFHSSYAHSQSLDRLMNPLIDQYLYYLNKTQTNSGTLQQSRLLFSQAGPTNMSLQAKNWLPGPCYRQQRLSKQANDNNNSNFPWTAATKYHLNGRDSLVNPGPAMASHKDDEEKFFPMHGTLIFGKQGTNANDADLENVMITDEEEIRATNPVATEQYGTVSNNLQNSNTGPTTGTVNRQGALPGMVWQDRDVYLQGPIWAKIPHTDGHFHPSPLMGGFGLKHPPPQIMIKNTPVPANPPTNFSSAKFASFITQYSTGQVSVEIEWELQKENSKRWNPEIQYTSNYNKSVNVDFTVDTNGVYSEPRPIGTRYLTRNL

SEQ ID NO: 221 - DNA, 2208 bp, Artificial Sequence
  source: /note="Description of Artificial Sequence: Synthetic polynucleotide"
atggctgccgatggttatcttccagattggctcgaggacactctctctgaaggaataagacagtggtggaagctcaaacctggcccaccaccaccaaagcccgcagagcggcataaggacgacagcaggggtcttgtgcttcctgggtacaggtacctcggacccttcaacggactcgacaagggagagccggtcaacgaggcagacgccgcggccctcgagcacgacaaggcctacgaccggcagctcgacagcggagacaacccgtacctcaagtacaaccacgtcgacgcggagtttcaggagcgtcttaaagaagatacgtcttttgggggcaacctcggacgagcagtcttccaggccaaaaagaggattcttgaacctctgggcctggttgaggaacctgttaaggcggctccgggagaaaagaggccggtagagcactctcctgcggagccagactcctcctcgggaaccggaaaagcgggccagcagcctgcaagaaagagattgaattttggtcagactggagacgcagactcagtacctgacccccagcctctcggacagccaccagcagccccctctggtctgggaactaatacgatggcttcaggcagtggcgcaccaatggcagacaataacgagggcgccgacggagtgggtaattcctcgggaaattggcattgcgattccacatggatgggcgacagagtcatcaccaccagcacccgcacctgggccctgcccacctacaacaaccatctgtacaagcaaatctccagccagtctggagccagcaacgacaaccactactttggctacagcaccccctgggggcattttgacttcaacagattccactgccacttctccccacgtgactggcaaagactcatcaacaacaactggggattccggcccaagagactcagcttcaagctctttaacattcaagtcaaagaggtcacgcagaatgacggtacgacgacgattgccaataaccttaccagcacggttcaggtgtttactgactcggagtaccagctcccgtacgtcctcggctcggcgcatcaaggatgcctcccgccgttcccagcagacgtcttcatggtgccacagtatggatacctcaccctgaacaacggcagtcaggcggtaggacgctcttccttttactgcctggagtactttccttctcagatgcttcgtaccggaaacaactttaccttcagctacacctttgaagacgttcctttccatagcagctacgctcacagccaaagtctggaccgtctcatgaatcctctcatcgaccagtacctgtattacttgagcagaacaaacactccaagcggaaccaccacgatgtccaggcttcagttttctcaggccggagcaagtgacattcgggaccagtctagaaactggcttcctggaccctgttaccgccagcagcgagtatcaaagacagctgcggacaacaacaacagtgattactcgtggactggagctaccaagtaccacctcaatggaagagactctctggtgaatccgggcccagctatggccagccacaaggacgatgaagaaaaatattttcctcagagcggggttctcatctttggaaaacaagactcgggaaaaactaatgtggacattgaaaaggttatgattacagacgaagaggaaatcaggaccaccaatcccgtggctacggagcagtatggttctgtatctaccaacctccagagcggcaacacacaagcagctacctcagatgtcaacacacaaggcgttcttccaggcatggtctggcaggacagagacgtgtacctgcaggggcccatctgggcaaagattccacacacggacggacattttcacccctctccccccatgggcggattcggacttaaacaccctcctccacaaattctcatcaagaacaccccggtacctgcgaatccttcgaccactttcagtgcggcaaagtttgcttccttcatcacacagtactccacggggcaggtcagcgtggagatcgagtgggagctgcagaaggagaacagcaaacgctggaatcccgaaattcagtacacttccaactacaacaaatctgttaatgtggactttactgtggacactaatggtgtgtattcagagcctcgccccattggcgccagatacctgactcgtaatctgtaa

SEQ ID NO: 222 - protein, 735 aa, Artificial Sequence
  source: /note="Description of Artificial Sequence: Synthetic polypeptide"
MAADGYLPDWLEDTLSEGIRQWWKLKPGPPPPKPAERHKDDSRGLVLPGYRYLGPFNGLDKGEPVNEADAAALEHDKAYDRQLDSGDNPYLKYNHVDAEFQERLKEDTSFGGNLGRAVFQAKKRILEPLGLVEEPVKAAPGEKRPVEHSPAEPDSSSGTGKAGQQPARKRLNFGQTGDADSVPDPQPLGQPPAAPSGLGTNTMASGSGAPMADNNEGADGVGNSSGNWHCDSTWMGDRVITTSTRTWALPTYNNHLYKQISSQSGASNDNHYFGYSTPWGHFDFNRFHCHFSPRDWQRLINNNWGFRPKRLSFKLFNIQVKEVTQNDGTTTIANNLTSTVQVFTDSEYQLPYVLGSAHQGCLPPFPADVFMVPQYGYLTLNNGSQAVGRSSFYCLEYFPSQMLRTGNNFTFSYTFEDVPFHSSYAHSQSLDRLMNPLIDQYLYYLSRTNTPSGTTTMSRLQFSQAGASDIRDQSRNWLPGPCYRQQRVSKTAADNNNSDYSWTGATKYHLNGRDSLVNPGPAMASHKDDEEKYFPQSGVLIFGKQDSGKTNVDIEKVMITDEEEIRTTNPVATEQYGSVSTNLQSGNTQAATSDVNTQGVLPGMVWQDRDVYLQGPIWAKIPHTDGHFHPSPPMGGFGLKHPPPQILIKNTPVPANPSTTFSAAKFASFITQYSTGQVSVEIEWELQKENSKRWNPEIQYTSNYNKSVNVDFTVDTNGVYSEPRPIGARYLTRNL

SEQ ID NO: 223 - DNA, 2208 bp, Artificial Sequence
  source: /note="Description of Artificial Sequence: Synthetic polynucleotide"
atggctgccgatggttatcttccagattggctcgaggacaccctctctgaaggaataagacagtggtggaagctcaaacctggcccaccaccaccaaagcccgcagagcggcataaggacgacagcaggggtcttgtgcttcctgggtacaagtacctcggacccttcaacggactcgacaagggagagccggtcaacgaggcagacgccgcggccctcgagcacgacaaggcctacgaccggcagctcgacagcggagataacccgtacctcaagtacaaccacgccgacgcggagtttcaggagcgccttaaagaggatacgtcttttgggggcaacctcggacgagcagtcttccaggccaaaaagaggattcttgaacctctgggcctggttgaggaacctgttaagacggctccgggaaaaaagaggccggtagagcactctcctgcggagccagactcctcctcgggaaccggaaaagcgggccagcagcctgcaagaaagagattgaattttggtcagactggagacgcagactcagtacctgacccccggcctctcggacagccaccagcagccccctctggtctgggaactaatacgatggcttcaggcagtggcgcaccaatggcagacaataacgagggcgccgacggagtgggtaattcctcgggaaattggcattgcgattccacatggatgggcgacagagtcatcaccaccagcacccgcacctgggccctgcccacctacaacaaccatctgtacaagcaaatctccagccagtctggagccagcaacgacaaccactactttggctacagcaccccctgggggtattttgacttcaacagattccactgccacttctccccacgtgactggcaaagactcatcaacaacaactggggattccggcccaagagactcagcttcaagctctttaacattcaagtcaaagaggtcacgcagaatgacggtacgacgacgattgccaataaccttaccagcacggttcaggtgtttactgactcggagtaccagctcccgtacgtcctcggctcggcgcatcaaggatgcctcccgccgttcccagcagacgtcttcatggtgccacagtatggatacctcaccctgaacaacggcagtcaggcggtaggacgctcttccttttactgcctggagtactttccttctcagatgcttcgtaccggaaacaactttaccttcagctacacctttgaagacgttcctttccatagcagctacgctcacagccaaagtctggaccgtctcatgaatcctctcatcgaccagtacctgtattacttgagcagaacaaacactccaagcggaaccaccacgatgtccaggcttcagttttctcaggccggagcaagtgacattcgggaccagtctagaaactggcttcctggaccctgttaccgccagcagcgagtatcaaagacagctgcggacaacaacaacagtgattactcgtggactggagctaccaagtaccacctcaatggaagagactctctggtgaatccgggcccagctatggccagccacaaggacgatgaagaaaaatattttcctcagagcggggttctcatctttggaaaacaagactcgggaaaaactaatgtggacattgaaaaggttatgattacagacgaagaggaaatcaggaccaccaatcccgtggctacggagcagtatggttctgtatctaccaacctccagagcggcaacacacaagcagctacctcagatgtcaacacacaaggcgttcttccaggcatggtctggcaggacagagacgtgtacctgcaggggcccatctgggcaaagattccacacacggacggacattttcacccctctcccctcatgggcggattcggacttaaacaccctcctccacaaattctcatcaagaacaccccggtacctgcgaatccttcgaccactttcagtgcggcaaagtttgcttccttcatcacacagtactccacggggcaggtcagcgtggagatcgagtgggagctgcagaaggagaacagcaaacgctggaatcccgaaattcagtacacttccaactacaacaaatctgttaatgtggactttactgtggacactaatggtgtgtattcagagcctcgccccattggcaccagatacctgactcgtaatctgtaa

SEQ ID NO: 224 - protein, 735 aa, Artificial Sequence
  source: /note="Description of Artificial Sequence: Synthetic polypeptide"
MAADGYLPDWLEDTLSEGIRQWWKLKPGPPPPKPAERHKDDSRGLVLPGYKYLGPFNGLDKGEPVNEADAAALEHDKAYDRQLDSGDNPYLKYNHADAEFQERLKEDTSFGGNLGRAVFQAKKRILEPLGLVEEPVKTAPGKKRPVEHSPAEPDSSSGTGKAGQQPARKRLNFGQTGDADSVPDPRPLGQPPAAPSGLGTNTMASGSGAPMADNNEGADGVGNSSGNWHCDSTWMGDRVITTSTRTWALPTYNNHLYKQISSQSGASNDNHYFGYSTPWGYFDFNRFHCHFSPRDWQRLINNNWGFRPKRLSFKLFNIQVKEVTQNDGTTTIANNLTSTVQVFTDSEYQLPYVLGSAHQGCLPPFPADVFMVPQYGYLTLNNGSQAVGRSSFYCLEYFPSQMLRTGNNFTFSYTFEDVPFHSSYAHSQSLDRLMNPLIDQYLYYLSRTNTPSGTTTMSRLQFSQAGASDIRDQSRNWLPGPCYRQQRVSKTAADNNNSDYSWTGATKYHLNGRDSLVNPGPAMASHKDDEEKYFPQSGVLIFGKQDSGKTNVDIEKVMITDEEEIRTTNPVATEQYGSVSTNLQSGNTQAATSDVNTQGVLPGMVWQDRDVYLQGPIWAKIPHTDGHFHPSPLMGGFGLKHPPPQILIKNTPVPANPSTTFSAAKFASFITQYSTGQVSVEIEWELQKENSKRWNPEIQYTSNYNKSVNVDFTVDTNGVYSEPRPIGTRYLTRNL

SEQ ID NO: 225 - DNA, 2208 bp, Artificial Sequence
  source: /note="Description of Artificial Sequence: Synthetic polynucleotide"
atggctgccgatggttatcttccagattggctcgaggacactctctctgaaggaataagacagtggtggaagctcaaacctggcccaccaccaccaaagcccgcagagcggcataaggacgacagcaggggtcttgtgcttcctgggtacaagtacctcggacccttcaacggactcgacaagggagagccggtcaacgaggcagacgccgcggccctcgagcacgacaaggcctacgaccggcagctcgacagcggagacaacccgtacctcaagtacaaccacgccgacgcggagtttcaggagcgccttaaaggagatacgtcttttgggggcaacctcggacgagcagtcttccaggccaaaaagaggattcttgaacctctgggcctggttgaggaacctgttaagacggctccgggaaaaaagaggccggtagagcactctcctgcggagccagactcctcctcgggaaccggaaaagcgggccagcagcctgcaagaaagagattgaattttggtcagactggagacgcagactcagtacctgacccccagcctctcggacagccaccagcagccccctctggtctgggaactaatacgatggcttcaggcagtggcgcaccaatggcagacaataacgagggcgccgacggagtgggtaattcctcgggaaattggcattgcgattccacatggatgggcggcagagtcatcaccaccagcacccgcacctgggccctgcccacctacaacaaccatctgtacaagcaaatctccagccagtctggagccagcaacgacaaccactactttggctacagcaccccctgggggtattttgacttcaacagattccactgccacttctccccacgtgactggcaaagactcatcaacaacaactggggattccggcccaagagactcagcttcaagctctttaacattcaagtcaaagaggtcacgcagaatgacggtacgacgacgattgccaataaccttaccagcacggttcaggtgtttactgactcggagtaccagctcccgtacgtcctcggctcggcgcatcaaggatgcctcccgccgttcccagcagacgtcttcatggtgccacagtatggatacctcaccctgaacaacggcagtcaggcggtaggacgctcttccttttactgcctggagtactttccttctcagacgcttcgtaccggaaacaactttaccttcagctacacctttgaagacgttcctttccatagcagctacgctcacagccaaagtctggaccgtctcatgaatcctctcatcgaccagtacctgtattacttgagcagaacaaacactccaagcggaaccaccacgatgtccaggcttcagttttctcaggccggagcaagtgacattcgggaccagtctagaaactggcttcctggaccctgttaccgccagcagcgagtatcaaagacagctgcggacaacaacaacagtgattactcgtggactggagctaccaagtaccacctcaatggaagagactctctggtgaatccgggcccagctatggccagccacaaggacgatgaagaaaaatattttcctcagagcggggttctcatctttggaaaacaagactcgggaaaaactaatgtggacattgaaaaggttatgattacagacgaagaggaaatcaggaccaccaatcccgtggctacggagcagtatggttctgtatctaccaacctccagagcggcaacacacaagcagctacctcagatgtcaacacacaaggcgttcttccaggcatggtctggcaggacagagacgtgtacctgcaggggcccatctgggcaaagattccacacacggacggacattttcacccctctcccctcatgggcggattcggacttaaacaccctcctccacaaattctcatcaagaacaccccggtacctgcgaatccttcgaccactttcagtgcggcaaagtttgcttccttcatcacacagtactccacggggcaggtcagcgtggagatcgagtgggagctgcagaaggagaacagcaaacgctggaatcccgaaattcagtacacttccaactacaacaaatctgttaatgtggactttactgtggacactaatggtgtgtattcagagcctcgccccattggcaccagatacctgactcgtaatctgtaa

SEQ ID NO: 226 - protein, 735 aa, Artificial Sequence
  source: /note="Description of Artificial Sequence: Synthetic polypeptide"
MAADGYLPDWLEDTLSEGIRQWWKLKPGPPPPKPAERHKDDSRGLVLPGYKYLGPFNGLDKGEPVNEADAAALEHDKAYDRQLDSGDNPYLKYNHADAEFQERLKGDTSFGGNLGRAVFQAKKRILEPLGLVEEPVKTAPGKKRPVEHSPAEPDSSSGTGKAGQQPARKRLNFGQTGDADSVPDPQPLGQPPAAPSGLGTNTMASGSGAPMADNNEGADGVGNSSGNWHCDSTWMGGRVITTSTRTWALPTYNNHLYKQISSQSGASNDNHYFGYSTPWGYFDFNRFHCHFSPRDWQRLINNNWGFRPKRLSFKLFNIQVKEVTQNDGTTTIANNLTSTVQVFTDSEYQLPYVLGSAHQGCLPPFPADVFMVPQYGYLTLNNGSQAVGRSSFYCLEYFPSQTLRTGNNFTFSYTFEDVPFHSSYAHSQSLDRLMNPLIDQYLYYLSRTNTPSGTTTMSRLQFSQAGASDIRDQSRNWLPGPCYRQQRVSKTAADNNNSDYSWTGATKYHLNGRDSLVNPGPAMASHKDDEEKYFPQSGVLIFGKQDSGKTNVDIEKVMITDEEEIRTTNPVATEQYGSVSTNLQSGNTQAATSDVNTQGVLPGMVWQDRDVYLQGPIWAKIPHTDGHFHPSPLMGGFGLKHPPPQILIKNTPVPANPSTTFSAAKFASFITQYSTGQVSVEIEWELQKENSKRWNPEIQYTSNYNKSVNVDFTVDTNGVYSEPRPIGTRYLTRNL

SEQ ID NO: 227 - DNA, 2208 bp, Artificial Sequence
  source: /note="Description of Artificial Sequence: Synthetic polynucleotide"
atggctgccgatggttatcttccagattggctcgaggacactctctctgaaggaataagacagtggtggaagctcaaacctggcccaccaccaccaaagcccgcagagcggcataaggacgacagcaggggtcttgtgcttcctgggtacaagtacctcggacccttcaacggactcgacaagggagagccggtcaacgaggcagacgccgcggccctcgagcacgacaaggcctacgaccggcagctcgacagcggagacaacccgtacctcaagtacaaccacgccgacgcggagtttcaggagcgtcttaaagaagatacgtcttttgggggcaacctcggacgagcagtcttccaggccaaaaagaggattcttgaacctctgggcctggttgaggaacctgttaagacggctccgggaaaaaagaggccggtagagcactctcctgcggagccagactcctcctcgggaaccggaaaagcgggccagcagcctgcaagaaagagattgaattttggtcagactggagacgcagactcagtacctgacccccagcctctcggacagccaccagcagccccctctggtctgggaactaatacgatggcttcaggcagtggcgcaccaatggcagacaataacgagggcgccgacggagtgggtaattcctcgggaaattggcattgcgattccacatggatgggcgacagagtcatcaccaccagcacccgcacctgggccctgcccacctgcaacaaccatctgtacaagcaaatctccagccagtctggagccagcaacgacaaccactactttggctacagcaccccctgggggtattttgacttcaacagattccactgccacttctccccacgtgactggcaaagactcatcaacaacaactggggattccggcccaagagactcagcttcaagctctttaacattcaagtcaaagaggtcacgcagaatgacggtacgacgacgattgccaataaccttaccagcacggttcaggtgtttactgactcggagtaccagctcccgtacgtcctcggctcggcgcatcaaggatgcctcccgccgttcccagcagacgtcttcatggtgccacagtatggatacctcaccctgaacaacggcagtcaggcggtaggacgctcttccttttactgcctggagtattttccttctcagatgcttcgtaccggaaacaactttaccttcagctacacctttgaagacgttcctttccatagcagctacgctcacagccaaagtctggaccgtctcatgaatcctctcatcgaccagtacctgtattacttgagcagaacaaacactccaagcggaaccaccacgatgtccaggcttcagttttctcaggccggagcaagtgacattcgggaccagtctagaaactggcttcctggaccctgttaccgccagcagcgagtatcaaagacagctgcggacaacaacaacagtgattactcgtggactggagctaccaagtaccacctcaatggaagagactctctggtgaatccgggcccagctatggccagccacaaggacgatgaagaaaaatattttcctcagagcggggttctcatctttggaaaacaagactcgggaaaaactaatgtggacattgaaaaggttatgattacagacgaagaggaaatcaggaccaccaatcccgtggctacggagcagtatggttctgtatctacctacctccagagcggcaacacacaagcagctacctcagatgtcaacacacaaggcgttcttccaggcatggtctggcaggacagagacgtgtacctgcgggggcccatctgggcaaagattccacacacggacggacattttcacccctctcccctcatgggcggatttggacttaaacaccctcctccacaaattctcatcaagaacaccccggtacctgcgaatccttcgaccactttcagtgcggcaaagtttgcttccttcatcacacagtactccacggggcaggtcagcgtggagatcgagtgggagctgcagaaggagaacagcaaacgctggaatcccgaaattcagtacacttccaactacaacaaatctgttaatgtggactttactgtggacactaatggtgtgtattcagagcctcgccccattggcaccagatacctgactcgtaatctgtaa

SEQ ID NO: 228 - protein, 735 aa, Artificial Sequence
  source: /note="Description of Artificial Sequence: Synthetic polypeptide"
MAADGYLPDWLEDTLSEGIRQWWKLKPGPPPPKPAERHKDDSRGLVLPGYKYLGPFNGLDKGEPVNEADAAALEHDKAYDRQLDSGDNPYLKYNHADAEFQERLKEDTSFGGNLGRAVFQAKKRILEPLGLVEEPVKTAPGKKRPVEHSPAEPDSSSGTGKAGQQPARKRLNFGQTGDADSVPDPQPLGQPPAAPSGLGTNTMASGSGAPMADNNEGADGVGNSSGNWHCDSTWMGDRVITTSTRTWALPTCNNHLYKQISSQSGASNDNHYFGYSTPWGYFDFNRFHCHFSPRDWQRLINNNWGFRPKRLSFKLFNIQVKEVTQNDGTTTIANNLTSTVQVFTDSEYQLPYVLGSAHQGCLPPFPADVFMVPQYGYLTLNNGSQAVGRSSFYCLEYFPSQMLRTGNNFTFSYTFEDVPFHSSYAHSQSLDRLMNPLIDQYLYYLSRTNTPSGTTTMSRLQFSQAGASDIRDQSRNWLPGPCYRQQRVSKTAADNNNSDYSWTGATKYHLNGRDSLVNPGPAMASHKDDEEKYFPQSGVLIFGKQDSGKTNVDIEKVMITDEEEIRTTNPVATEQYGSVSTYLQSGNTQAATSDVNTQGVLPGMVWQDRDVYLRGPIWAKIPHTDGHFHPSPLMGGFGLKHPPPQILIKNTPVPANPSTTFSAAKFASFITQYSTGQVSVEIEWELQKENSKRWNPEIQYTSNYNKSVNVDFTVDTNGVYSEPRPIGTRYLTRNL

SEQ ID NO: 229 - DNA, 2208 bp, Artificial Sequence; identical to SEQ ID NO: 223
  source: /note="Description of Artificial Sequence: Synthetic polynucleotide"

SEQ ID NO: 230 - protein, 735 aa, Artificial Sequence; identical to SEQ ID NO: 224
  source: /note="Description of Artificial Sequence: Synthetic polypeptide"

SEQ ID NO: 231 - DNA, 2208 bp, Artificial Sequence
  source: /note="Description of Artificial Sequence: Synthetic polynucleotide"
atggctgccgatggttatcttccagattggctcgaggacactctctctgaaggaataagacagtggtggaagctcaaacctggcccaccaccaccaaagcccgcagagcggcataaggacggcagcaggggtcttgtgcttcctgggtacaagtacctcggacccttcaacggactcgacaagggagagccggtcaacgaggcagacgccgcggccctcgagcacgacaaggcctacgaccggcagctcaacagcggagacaacccgtacctcaagtacaaccacgccgacgcggagtttcaggagcgccttaaagaagatacgtcttttgggggcaacctcggacgagcagtcttccaggcaaaaaagagggttcttgaacctctgggcctggttgaggagcctgttaaaacggctccgggaaaaaagagaccggtagagcactctcctgcggagccagactcctcctcgggaaccggaaaagcgggccagcagcctgcaagaaagagattgaattttggtcagactggagacgcagactccgtacctgacccccagcctctcggacagccaccagcagccccctctggtctgggatctactacaatggctacaggcagtggcgcaccaatggcagacaataacgagggtgccgatggagtgggtaattcctcaggaaattggcattgcgattcccaatggctgggcgacagagtcatcaccacaagcactcgaacctgggccctgcccacctacaacaaccacctctacaagcaaatctccagccaatcaggagcctcaaacgacaaccactattttggctacagcaccccttgggggtattttgacttcaacagattccactgccacttttcaccacgtgactggcaaagactcatcaacaacaactggggattccgacccaagagactcaacttcaagctctttaacattcaagtcaaagaggtcacgcagaatgacggtacgacgacgattgccaataaccttaccagcacggttcaggtgtttactgactcggagtaccagctcccgtacgtcctcggctcggcgcatcaaggatgcctcccgccgttcccagcggacgtcttcatggtcccacagtatggatacctcaccctgaacaacgggagtcaggcggtaggacgctctcccttttactgcctggagtactttccttctcagatgctgcgtactggaaacaactttcagttcagctacacttttgaagacgtgcctttccacagcagctacgctcacagccagagtctggatcggctgatgaatcctctgatcgaccagtacctgtattatctgaacaagacacaaacaaatagtggaactcttcagcagtctcggctactgtttagccaagctggacccaccaacatgtctcttcaagctaaaaactggctgcctggaccttgctacagacagcagcgtctgtcaaagcaggcaaacgacaacaacaacagcaactttccctggactgcagctacaaagtatcatctaaatggccgggactcgttggttaatccaggaccagctatggccagtcacaaggatgacgaagaaaagtttttccccatgcatggaaccctgatatttggtaaacaaggaacaaatgccaacgacgcggatttggaaaatgtcatgattacagatgaagaagaaatcaggaccaccaatcccgtggctacggagcagtacgggactgtgtcaaataatttgcaaaactcaaacactggtccaactactggaactgtcaatcaccaaggagcgttacctggtatggtgtggcaggatcgagatgtgtaccttcagggacccatttgggccaagattcctcacaccgatggacactttcatccttctccactgatgggaggttttggactcaaacacccgcctcctcagattatgatcaaaaacactcccgttccagccaatcctcctacaaacttcagttctgccaagtttgcttctttcatcacacagtattccacggggcaggtcagcgtggagatcgagtgggagctgcagaaggagaacagcaaacgctggaatcccgaaattcagtacacttccaactacaacaaatctgttaatgtggactttactgtggacaataatggcgtgtactcagagcctcgccccattggcaccagatacctgactcgtaatctgtaa

SEQ ID NO: 232 - protein, 735 aa, Artificial Sequence
  source: /note="Description of Artificial Sequence: Synthetic polypeptide"
MAADGYLPDWLEDTLSEGIRQWWKLKPGPPPPKPAERHKDGSRGLVLPGYKYLGPFNGLDKGEPVNEADAAALEHDKAYDRQLNSGDNPYLKYNHADAEFQERLKEDTSFGGNLGRAVFQAKKRVLEPLGLVEEPVKTAPGKKRPVEHSPAEPDSSSGTGKAGQQPARKRLNFGQTGDADSVPDPQPLGQPPAAPSGLGSTTMATGSGAPMADNNEGADGVGNSSGNWHCDSQWLGDRVITTSTRTWALPTYNNHLYKQISSQSGASNDNHYFGYSTPWGYFDFNRFHCHFSPRDWQRLINNNWGFRPKRLNFKLFNIQVKEVTQNDGTTTIANNLTSTVQVFTDSEYQLPYVLGSAHQGCLPPFPADVFMVPQYGYLTLNNGSQAVGRSPFYCLEYFPSQMLRTGNNFQFSYTFEDVPFHSSYAHSQSLDRLMNPLIDQYLYYLNKTQTNSGTLQQSRLLFSQAGPTNMSLQAKNWLPGPCYRQQRLSKQANDNNNSNFPWTAATKYHLNGRDSLVNPGPAMASHKDDEEKFFPMHGTLIFGKQGTNANDADLENVMITDEEEIRTTNPVATEQYGTVSNNLQNSNTGPTTGTVNHQGALPGMVWQDRDVYLQGPIWAKIPHTDGHFHPSPLMGGFGLKHPPPQIMIKNTPVPANPPTNFSSAKFASFITQYSTGQVSVEIEWELQKENSKRWNPEIQYTSNYNKSVNVDFTVDNNGVYSEPRPIGTRYLTRNL

SEQ ID NO: 233 - DNA, 2208 bp, Artificial Sequence
  source: /note="Description of Artificial Sequence: Synthetic polynucleotide"
atggctgccgatggttatcttccagattggctcgaggacactctctctgaaggaataagacagtggtggaagctcaaacctggcccaccaccaccaaagcccgcagagcggcataaggacgacagcaggggtcttgtgcttcctgggtacaagtacctcggacccttcaacggactcgacaagggagagccggtcaacgaggcagacgccgcggccctcgagcacgacaaggcctacgaccggcagctcgacagcggagacaacccgtacctcaagtacaaccacgccgacgcggagtttcaggagcgtcttaaagaagatacgtcttttgggggcaacctcggacgagcagtcttccaggccaaaaagaggattcttgaacctctgggcctggttgaggaacctgttaagacggctccgggaaaaaagaggccggtagagcactctcctgcggagccagactcctcctcgggaaccggaaaagcgggccagcagcctgcaagaaagagattgaattttggtcagactggagacgcagactcagtacctgacccccagcctctcggacagccaccagcagccccctctggtctgggaactaatacgatggcttcaggcagtggcgcaccaatggcagacaataacgagggcgccgacggagtgggtaattcctcgggaaattggcattgcgattccacatggatgggcgacagagtcatcaccaccagcacccgcacctgggccctgcccacctacaacaaccatctgtacaagcaaatctccagccagtctggagccagcaacgacaaccactactttggctacagcaccccctgggggtattttgacttcaacagattccactgccacttctccccacgtgactggcaaagactcatcaacaacaactggggattccggcccaagagactcagcttcaagctctttaacattcaagtcaaagaggtcacgcagaatgacggtacgacgacgattgccaataaccttaccagcacggttcaggtgtttactgactcggagtaccagctcccgtacgtcctcggctcggcgcatcaaggatgcctcccgccgttcccagcagacgtcttcatggtgccacagtatggatacctcaccctgaacaacggcagtcaggcggtaggacgctcttccttttactgcctggagtactttccttctcagatgcttcgtaccggaaacaactttaccttcagctacacctttgaagacgttcctttccatagcagctacgctcacagccaaagtctggaccgtctcatgaatcctctcatcgaccagtacctgtattacttgagcagaacaaacactccaagcggaaccaccacgatgtccaggcttcagttttctcaggccggagcaagtgacattcgggaccagtctagaaactggcttcctggaccctgttaccgccagcagcgagtatcaaagacagctgcggacaacaacaacagtgattactcgtggactggagctaccaagtaccacctcaatggaagagactctctggtgaatccgggcccagctatggccagccacaaggacgatgaagaaaaatattttcctcagagcggggttctcatctttggaaaacaagactcgggaaaaactaatgtggacattgaaaaggttatgattacagacgaagaggaaatcaggaccaccaatcccgtggctacggagcagtatggttctgtatctaccaacctccagagcggcaacacacaagcagctacctcagatgtcaacacacaaggcgttcttccaggcatggtctggcaggacagagacgtgtacctgcaggggcccatctgggcaaagattccacacacggacggacattttcacccctctcccctcatgggcggattcggacttaaacaccctcctccacaaattctcatcaagaacaccccggtacctgcgaatccttcgaccactttcagtgcggcaaagtttgcttccttcatcacacagtactccacggggcaggtcagcgtggagatcgagtgggagctgcagaaggagaacagcaaacgctggaatcccgaaattcagtacacttccaactacaacaaatctgttaatgtggactttactgtggacactaatggtgtgtattcagagcctcgccccattggcaccagatacctgactcgtaatctgtaa

SEQ ID NO: 234 - protein, 735 aa, Artificial Sequence
  source: /note="Description of Artificial Sequence: Synthetic polypeptide"
MAADGYLPDWLEDTLSEGIRQWWKLKPGPPPPKPAERHKDDSRGLVLPGYKYLGPFNGLDKGEPVNEADAAALEHDKAYDRQLDSGDNPYLKYNHADAEFQERLKEDTSFGGNLGRAVFQAKKRILEPLGLVEEPVKTAPGKKRPVEHSPAEPDSSSGTGKAGQQPARKRLNFGQTGDADSVPDPQPLGQPPAAPSGLGTNTMASGSGAPMADNNEGADGVGNSSGNWHCDSTWMGDRVITTSTRTWALPTYNNHLYKQISSQSGASNDNHYFGYSTPWGYFDFNRFHCHFSPRDWQRLINNNWGFRPKRLSFKLFNIQVKEVTQNDGTTTIANNLTSTVQVFTDSEYQLPYVLGSAHQGCLPPFPADVFMVPQYGYLTLNNGSQAVGRSSFYCLEYFPSQMLRTGNNFTFSYTFEDVPFHSSYAHSQSLDRLMNPLIDQYLYYLSRTNTPSGTTTMSRLQFSQAGASDIRDQSRNWLPGPCYRQQRVSKTAADNNNSDYSWTGATKYHLNGRDSLVNPGPAMASHKDDEEKYFPQSGVLIFGKQDSGKTNVDIEKVMITDEEEIRTTNPVATEQYGSVSTNLQSGNTQAATSDVNTQGVLPGMVWQDRDVYLQGPIWAKIPHTDGHFHPSPLMGGFGLKHPPPQILIKNTPVPANPSTTFSAAKFASFITQYSTGQVSVEIEWELQKENSKRWNPEIQYTSNYNKSVNVDFTVDTNGVYSEPRPIGTRYLTRNL

SEQ ID NO: 235 - DNA, 2208 bp, Artificial Sequence
  source: /note="Description of Artificial Sequence: Synthetic polynucleotide"
atggctgccgatggttatcttccagattggctcgaggacactctctctgaaggaataagacagtggtggaagctcaaacctggcccaccaccaccaaagcccgcagagcggcataaggacgacagcaggggtcttgtgcttcctgggtacaagtacctcggacccttcaacggactcgacaagggagagccggtcaacgaggcagacgccgcggccctcgagcacgacaaggcctacgaccggcagctcgacagcggagacaacccgtacctcaagtacaaccacgccgacgcggagtttcaggagcgtcttaaagaagatacgtcttttgggggcaacctcggacgagcagtcttccaggccaaaaagaggattcttgaacctctgggcctggttgaggaacctgttaagacggctccgggaaaaaagaggccggtagagcactctcctgcggagccagactcctcctcgggaaccggaaaagcgggccagcagcctgcaagaaagagattgaattttggtcagactggagacgcagactcagtacctgacccccagcctctcggacagccaccagcagccccctctggtctgggaactaatacgatggcttcaggcagtggcgcaccaatggcagacaataacgagggcgccgacggagtgggtaattcctcgggaaattggcattgcgattccacatggatgggcgacagagtcatcaccaccagcacccgcacctgggccctgcccacctacaacaaccatctgtacaagcaaatctccagccagtctggagccagcaacgacaaccactactttggctacagcaccccctgggggtatttcgacttcaacagattccactgccacttctccccacgtgactggcaaagactcatcaacaacaactggggattccggcccaagagactcagcttcaagctctttaacattcaagtcaaagaggtcacgcagaatgacggtacgacgacgattgccaataaccttaccagcacggttcaggtgtttactgactcggggtaccagctcccgtacgtcctcggctcggcgcatcaaggatgccttccgccgttcccagcagacgtcttcatggtgccacagtatggatacctcaccctgaacaacggcagtcaggcggtaggacgctcttccttttactgcctggagtactttccttctcagatgcttcgtaccggaaacaactttaccttcagctacacctttgaagacgttcctttccatagcagctacgctcacggccaaagtctggaccgtctcatgaatcctctcatcgaccagtacctgtattacttgagcagaacaaacactccaagcggaaccaccacgatgtccaggcttcagttttctcaggccggagcaagtgacgttcgggaccagtctagaaactggcttcctggaccctgttaccgccagcagcgagtatcaaagacagctgcggacaacaacaacagtgattactcgtggactggagctaccaagtaccacctcaatggaagagactctctggtgaatccgggcccagctatggccagccacaaggacgatgaagaaaaatattttcctcagagcggggttctcgtctttggaaaacaagactcgggaaaaactaatgtggacattgaaaaggttatgattacagacgaagaggaaatcaggaccaccaatcccgcggctacggagcagtatggttctgtatctaccaacctccagagcggcaacacacaagcagctacctcagatgtcaacacacaaggcgttcttccaggcatggtctggcaggacagagacgtgtacctgcaggggcccatctgggcaaagattccacacacggacggacattttcacccctctcccctcatgggcggattcggacttaaacaccctcctccacaaattctcatcaagaacaccccggtacctgcgaatccttcgaccactttcagtgcggcaaagtttgtttccttcatcacacagtactccacggggcaggtcagcgtggagatcgagtgggagctgcagaaggagaacagcaaacgctggaatcccgaaattcagtacacttccaactacaacaaatctgttaatgtggactttactgtggacactaatggtgtgtattcagagcctcgccccattggcaccagatacctgactcgtaatctgtaa

SEQ ID NO: 236 - protein, 735 aa, Artificial Sequence
  source: /note="Description of Artificial Sequence: Synthetic polypeptide"
MAADGYLPDWLEDTLSEGIRQWWKLKPGPPPPKPAERHKDDSRGLVLPGYKYLGPFNGLDKGEPVNEADAAALEHDKAYDRQLDSGDNPYLKYNHADAEFQERLKEDTSFGGNLGRAVFQAKKRILEPLGLVEEPVKTAPGKKRPVEHSPAEPDSSSGTGKAGQQPARKRLNFGQTGDADSVPDPQPLGQPPAAPSGLGTNTMASGSGAPMADNNEGADGVGNSSGNWHCDSTWMGDRVITTSTRTWALPTYNNHLYKQISSQSGASNDNHYFGYSTPWGYFDFNRFHCHFSPRDWQRLINNNWGFRPKRLSFKLFNIQVKEVTQNDGTTTIANNLTSTVQVFTDSGYQLPYVLGSAHQGCLPPFPADVFMVPQYGYLTLNNGSQAVGRSSFYCLEYFPSQMLRTGNNFTFSYTFEDVPFHSSYAHGQSLDRLMNPLIDQYLYYLSRTNTPSGTTTMSRLQFSQAGASDVRDQSRNWLPGPCYRQQRVSKTAADNNNSDYSWTGATKYHLNGRDSLVNPGPAMASHKDDEEKYFPQSGVLVFGKQDSGKTNVDIEKVMITDEEEIRTTNPAATEQYGSVSTNLQSGNTQAATSDVNTQGVLPGMVWQDRDVYLQGPIWAKIPHTDGHFHPSPLMGGFGLKHPPPQILIKNTPVPANPSTTFSAAKFVSFITQYSTGQVSVEIEWELQKENSKRWNPEIQYTSNYNKSVNVDFTVDTNGVYSEPRPIGTRYLTRNL

SEQ ID NO: 237 - DNA, 2208 bp, Artificial Sequence
  source: /note="Description of Artificial Sequence: Synthetic polynucleotide"
atggctgccgatggttatcttccagattggctcgaggacactctctctgaaggaataagacagtggtggaaactcaaacctggcccaccaccaccaaagcccgcagagcggcataaggacgacagcaggggtcttgtgcttcctgggtacaagtacctcggacccttcaacggactcgacaagggagagccggtcaacgaggcagacgccgcggccctcgagcacgacaaggcctacgaccggcagctcgacagcggagacaacccgtacctcaagtacaaccacgccgacgcggagtttcaggagcgccttaaagaagatacgtcttttgggggcaacctcggacgagcagtcttccaggcaaaaaagagggttctggaacctctgagcctggttgaggagcctgttaagacggctccgggaaaaaagaggccggtagagcactctcccgcagagccagattcctcctccggaactggaaagtcgggcaaccagcctgcaagaaagagattgaatttcggtcagactggagactcagactccgtacctgacccccagcctctcggacagccaccagcagccccctctggtctgggaactaatacgatggctacaggcagtggcgcaccaatggcagacaataacgagggcgccgacggagtgggtaattcctcgggaaattggcattgcgattccacatggatgggcgacagagtcatcaccaccagcacccgaacctgggccctgcccacctacaacaaccatctgtacaagcaaatatccagccagtctggagccagcaacgacaatcactactttggctacagcaccccctgggggtattttgacttcaacagattccactgccacttttcaccacgtgactggcaaagactcatcaacaacaactggggattccgacccaagagactcaacttcaagctctttaacattcaagtcaaagaggtcacgcagaatgacggtacgacgacgattgccaataaccttaccagcacggttcaggtgtttactgactcggagtaccagctcccgtacgtcctcggctcggcgcatcaaggatgcctcccgccgttcccagcagacgtcttcatggtgccacagtatggatacctcaccctgaacaacgggagtcaggcagtaggacgctcttcattttactgcctagagtactttccttctcagatgctgcgtaccggaaacaactttaccttcagctacacctttgaggacgttcctttccacagcagctacgctcacagccagagtttggaccgtctcatgaatcctctcatcgaccagtacctgtattacttgagcagaacaaacactccaagcggaaccaccacgcagtccaggcttcagttttctcaggccggagcgagtgacattcaggaccagtctaggaactggcttcctggaccctgttaccgtcagcagcgagtatcaaagacatctgcggataacaacaacagtgaatactcgtggactggagctaccaagtaccacctcaatggcagagactctctggtgaatccgggcccggccatggccagccacaaagacgatgaagaaaagttttttcctcagagcggggttcttatctttgggaagcaaggctcagagaaaacaaatgtggatattgaaaaggtcatgattacagacgaagaggaaatcaggaccaccaatcccgtggctacggagcagtatggttctgtatctaccaacctccagagcggcaacacacaagcagctaccgcagatgtcaacacacaaggcgttcttccaggcatggtcgggcaagacagagacgtgtacctgcaggggcctacttgggcaaagattccacacacggacggacattttcacccctctcccctcatgggcggatttggacttaaacaccctcctccacagattctcatcaagaacaccccggtacctgcgaatccttcgaccaccttcagtgcggcaaagtttgcttccttcattacacagtactccacggggcaggtcagcgtggagatcgagtgggagctgcagaaggagaacagcaaacgctggaatcccgagatccagtacacttccaactacaacaagtctgttaatgtggactttactgtggacactaatggcgtgtattcagagcctcgccccattggcaccagatacctgactcgtaatctgtaa

SEQ ID NO: 238 - protein, 735 aa, Artificial Sequence
  source: /note="Description of Artificial Sequence: Synthetic polypeptide"
MAADGYLPDWLEDTLSEGIRQWWKLKPGPPPPKPAERHKDDSRGLVLPGYKYLGPFNGLDKGEPVNEADAAALEHDKAYDRQLDSGDNPYLKYNHADAEFQERLKEDTSFGGNLGRAVFQAKKRVLEPLSLVEEPVKTAPGKKRPVEHSPAEPDSSSGTGKSGNQPARKRLNFGQTGDSDSVPDPQPLGQPPAAPSGLGTNTMATGSGAPMADNNEGADGVGNSSGNWHCDSTWMGDRVITTSTRTWALPTYNNHLYKQISSQSGASNDNHYFGYSTPWGYFDFNRFHCHFSPRDWQRLINNNWGFRPKRLNFKLFNIQVKEVTQNDGTTTIANNLTSTVQVFTDSEYQLPYVLGSAHQGCLPPFPADVFMVPQYGYLTLNNGSQAVGRSSFYCLEYFPSQMLRTGNNFTFSYTFEDVPFHSSYAHSQSLDRLMNPLIDQYLYYLSRTNTPSGTTTQSRLQFSQAGASDIQDQSRNWLPGPCYRQQRVSKTSADNNNSEYSWTGATKYHLNGRDSLVNPGPAMASHKDDEEKFFPQSGVLIFGKQGSEKTNVDIEKVMITDEEEIRTTNPVATEQYGSVSTNLQSGNTQAATADVNTQGVLPGMVGQDRDVYLQGPTWAKIPHTDGHFHPSPLMGGFGLKHPPPQILIKNTPVPANPSTTFSAAKFASFITQYSTGQVSVEIEWELQKENSKRWNPEIQYTSNYNKSVNVDFTVDTNGVYSEPRPIGTRYLTRNL

SEQ ID NO: 239 - DNA, 2208 bp, Artificial Sequence
  source: /note="Description of Artificial Sequence: Synthetic polynucleotide"
atggctgccgatggttatcttccagattggctcgaggacactctctctgaaggaataagacagtggtggaagctcaaacctggcccaccaccaccaaagcccgcagagcggcataaggacgacagcaggggtcttgtgcttcctgggtacaagtacctcggacccttcaacggactcgacaagggagagccggtcaacgaggcagacgccgcggccctcgagcacgacaaggcctacgaccggcagctcgacagcggagacaacccgtacctcaagtacaaccacgccgacgcagagtttcaggagcgccttaaagaagatacgtcttttgggggcaacctcggacgagcagtcttccaggcaaaaaagagggttctggaacctctgggcctggttgaggagcctgttaagacggctccgggaaaaaagaggccggtagagcactctcctgcagagccagattcctcctccggaactggaaagtcgggcaaccagcctgcaagaaagagattgaatttcggtcagactggagactcagactccgtacctgacccccagcctctcggacagccaccagcagccccctctggtctgggaactaatacgatggctacaggcagtggcgcaccaatggcagacaataacgagggcgccgacggagtgggtaattcctcgggaaattggcattgcgattccacatggatgggcgacagagtcatcaccaccagcacccgaacctgggccctgcccacctacaacaaccatctgtacaagcaaatatccagccagtctggagccagcaacgacaatcactactttggctacagcaccccctgggggtattttgacttcaacagattccactgccacttttcaccacgtgactggcaaagactcatcaacaacaactggggattccgacccaagagactcaacttcaagctctttaacattcaagtcaaagaggtcacgcagaatgacggtacgacgacgattgccaataaccttaccagcacggttcaggtgtttactgactcggagtaccagctcccgtacgtcctcggctcggcgcatcaaggatgcctcccgccgttcccagcagacgtcttcatggtgccacagtatggatacctcaccctgaacaacgggagtcaggcagtaggacgctcttcattttactgcctagggtactttccttctcagatgctgcgtaccggaaacaactttaccttcagctacacctttgaggacgttcctttccacagcagctacgctcacagccagagtttggaccgtctcatgaatcctctcatcgaccagtacctgtattacttgagcagaacaaacactccaagcggaaccaccacgcagtccaggcttcagttttctcaggccggagcgagtgacattcgggaccagtctaggaactggcttcctggaccctgttaccgtcagcagcgagtatcaaagacatctgcggataacaacaacagtgaatactcgtggactggagctaccaagtaccacctcaatggcagagactctctggtgaatccgggcccggccatggccagccacaaagacgatgaagaaaagttttttcctcagagcggggttcttatctttgggaagcaaggcccagagaaaacaaatgtggatattgaaaaggtcatgattacagacgaagaggaaatcaggaccaccaatcccgtggctacggagcagtatggttctgtatctaccaacctccagagcggcaacacacaagcagctaccgcagatgtcaacacacaaggcgttcttccaggcatggtctggcaagacagagacgtgtacctgcaggggcctatttgggcaaagattccacacacggacggacattttcacccctctcccctcatgggcggatttggacttaaacaccctcctccacagattctcatcaagaacaccccggtacctgcgaatccttcgaccaccttcagtgcggcaaagtttgcttccttcattacacagtactccacggggcaggtcagcgtggagatcgagtgggagctgcagaaggagaacagcaaacgctggaatcccgagatccagtacacttccaactacaacaagtctgttaatgtggactttactgtggacactaatggcgtgtattcagagcctcgccccattggcaccagatacctgactcgtaatctgtaa

SEQ ID NO: 240 - protein, 735 aa, Artificial Sequence
  source: /note="Description of Artificial Sequence: Synthetic polypeptide"
MAADGYLPDWLEDTLSEGIRQWWKLKPGPPPPKPAERHKDDSRGLVLPGYKYLGPFNGLDKGEPVNEADAAALEHDKAYDRQLDSGDNPYLKYNHADAEFQERLKEDTSFGGNLGRAVFQAKKRVLEPLGLVEEPVKTAPGKKRPVEHSPAEPDSSSGTGKSGNQPARKRLNFGQTGDSDSVPDPQPLGQPPAAPSGLGTNTMATGSGAPMADNNEGADGVGNSSGNWHCDSTWMGDRVITTSTRTWALPTYNNHLYKQISSQSGASNDNHYFGYSTPWGYFDFNRFHCHFSPRDWQRLINNNWGFRPKRLNFKLFNIQVKEVTQNDGTTTIANNLTSTVQVFTDSEYQLPYVLGSAHQGCLPPFPADVFMVPQYGYLTLNNGSQAVGRSSFYCLGYFPSQMLRTGNNFTFSYTFEDVPFHSSYAHSQSLDRLMNPLIDQYLYYLSRTNTPSGTTTQSRLQFSQAGASDIRDQSRNWLPGPCYRQQRVSKTSADNNNSEYSWTGATKYHLNGRDSLVNPGPAMASHKDDEEKFFPQSGVLIFGKQGPEKTNVDIEKVMITDEEEIRTTNPVATEQYGSVSTNLQSGNTQAATADVNTQGVLPGMVWQDRDVYLQGPIWAKIPHTDGHFHPSPLMGGFGLKHPPPQILIKNTPVPANPSTTFSAAKFASFITQYSTGQVSVEIEWELQKENSKRWNPEIQYTSNYNKSVNVDFTVDTNGVYSEPRPIGTRYLTRNL

SEQ ID NO: 241 - protein, 735 aa, Artificial Sequence
  source: /note="Description of Artificial Sequence: Synthetic polypeptide"
MAADGYLPDWLEDTLSEGIRQWWKLKPGPPPPKPAERHKDDSRGLVLPGYKYLGPFNGLDKGEPVNEADAAALEHDKAYDRQLDSGDNPYLKYNHADAEFQERLKEDTSFGGNLGRAVFQAKKRVLEPLGLVEEPVKTAPGKKRPVEHSPAEPDSSSGTGKSGNQPARKRLNFGQTGDSDSVPDPQPLGQPPAAPSGLGTNTMATGSGAPMADNNEGADGVGNSSGNWHCDSTWMGDRVITTSTRTWALPTYNNHLYKQISSQSGASNDNHYFGYSTPWGYFDFNRFHCHFSPRDWQRLINNNWGFRPKRLNFKLFNIQVKEVTQNDGTTTIANNLTSTVQVFTDSEYQLPYVLGSAHQGCLPPFPADVFMVPQYGYLTLNNGSQAVGRSSFYCLEYFPSQMLRTGNNFTFSYTFEDVPFHSSYAHSQSLDRLMNPLIDQYLYYLSRTNTPSGTTTQSRLQFSQAGASDIRDQSRNWLPGPCYRQQRVSKTSADNNNSEYSWTGATKYHLNGRDSLVNPGPAMASHKDDEEKFFPQSGVLIFGKQGPEKTNVDIEKVMITDEEEIRTTNPVATEQYGSVSTNLQSGNTQAATADVNTQGVLPGMVWQDRDVYLQGPIWAKIPHTDGHFHPSPLMGGFGLKHPPPQILIKNTPVPANPSTTFSAAKFASFITQYSTGQVSVEIEWELQKENSKRWNPEIQYTSNYNKSVNVDFTVDTNGVYSEPRPIGTRYLTRNL

SEQ ID NO: 242 - protein, 735 aa, Artificial Sequence; identical to SEQ ID NO: 241
  source: /note="Description of Artificial Sequence: Synthetic polypeptide"

SEQ ID NO: 243 - DNA, 2211 bp, Artificial Sequence
  source: /note="Description of Artificial Sequence: Synthetic polynucleotide"
atggctgccgatggttatcttccagattggctcgaggacactctctctgaaggaataagacagtggtggaagctcaaacctggcccaccaccaccaaagcccgcagagcggcataaggacgacagcaggggtcttgtgcttcctgggtacaagtacctcggacccttcaacggactcgacaagggggagccggtcaacgaggcagacgccgcggccctcgagcacgacaaggcctacgaccggcagctcgacagcggagacaacccgtacctcaagtacaaccacgccgacgcagagtttcaggagcgccttaaagaagatacgtcttttgggggcaacctcggacgagcagtcttccaggcgaaaaagagggttcttgaacctctgcggcctggtttgaggaaacctgttaagacggctccgggaaaaaagaggccggtagagcactctcctgtggagccagactcctcctcgggaaccggaaaagcgggccagcagcctgcaagaaaaagattaaattttggtcagactggagacgcagactccgtacctgacccccagcctctcggacagccaccagcagccccctctggtctgggatctactacaatggctacaggcagtggcgcaccaatggcagacaataacgagggtgccgatggagtgggtaattcctcaggaaattggcattgcgattcccaatggctggacgacagagtcatcgccaccagcacccgaacctgggccctgcccacatacaacaaccacctctacaagcaaatctccagccaatcaggagcctgcaacgacaaccactactttggctacagcaccccctgggggtattttgacttcaacagattccactgccacttttcaccacgtgactggcaaagactcatcaacagcaactggggattccggcccaaaagactcaacttcaagctctttaatattcaagtcaaagaggtcacgcagaatgacggtacgacgacgattgccaataaccttaccagcacggttcaggtgtttactgactcggagtaccagctcccgtacgtcccgggctcggcgcatcaaggatgcctcccgccgtttccagcggacgtcttcatggtcccacagtatggatacctcaccctgaacaacgggagtcaggcggtaggacgctcttccttttactgcctggagtactttccttctcagatgctgcgtactggaaacaactttcagttcagctacacttttgaagacgtgcctttccacagcagctacgctcactgccagagtctggatcggctgatgaatcctctgatcgaccagtacctgtattatctgaacaagacacaaacaaatagtggaactcttcagcagtctcggctactgtttagccaagctggaccaaccaacatgtctcttcaagctaaaaactggctgcctggaccttgctacagacagcagcgtctgtcaaaacaggcaaacgacaataacaactgcaactttccctggactgcagctacaaagtatcatctaaatggccgggactcgttggttaatccaggaccagctatggccagtcacaaggatgacgaagaaaagtttttccccatgcatggaaccctgatatttggtaaacaaggaacaaatgccaacgacgcggatttggaaaatgtcatgattacagatgaagaagaaatcaggcccaccaatcccgtggctacggagcagtacgggactgtgtcaaataatttgcaaaactcaaacactggtccaactacaggaactgtcaatcaccaaggagcgttacctggtatggtgtggcaggatcgagacgtgtacctgcagggacccatttgggccaagattcctcacaccgatggacactttcatccttctccactgatgggaggttttggactcaaacacccgcctcctcagatcatgatcaaaagcactcccgttccagccaatcctcccacaaacttcagttctgccaagtttgcttcttccatcacacagtattccacgggacaggtcagcgtggagatcgagtgggagctgcagaaggagaacagcaaacgctggaatcccgaaattcagtacacttccaactacaacaagtctgttaatgtggactttactgtggacactaatggtgtgtattcagagcctcgccccattggcaccagatacctgactcgtaatctgtaa

SEQ ID NO: 244 - protein, 736 aa, Artificial Sequence
  source: /note="Description of Artificial Sequence: Synthetic polypeptide"
MAADGYLPDWLEDTLSEGIRQWWKLKPGPPPPKPAERHKDDSRGLVLPGYKYLGPFNGLDKGEPVNEADAAALEHDKAYDRQLDSGDNPYLKYNHADAEFQERLKEDTSFGGNLGRAVFQAKKRVLEPLRPGLRKPVKTAPGKKRPVEHSPVEPDSSSGTGKAGQQPARKRLNFGQTGDADSVPDPQPLGQPPAAPSGLGSTTMATGSGAPMADNNEGADGVGNSSGNWHCDSQWLDDRVIATSTRTWALPTYNNHLYKQISSQSGACNDNHYFGYSTPWGYFDFNRFHCHFSPRDWQRLINSNWGFRPKRLNFKLFNIQVKEVTQNDGTTTIANNLTSTVQVFTDSEYQLPYVPGSAHQGCLPPFPADVFMVPQYGYLTLNNGSQAVGRSSFYCLEYFPSQMLRTGNNFQFSYTFEDVPFHSSYAHCQSLDRLMNPLIDQYLYYLNKTQTNSGTLQQSRLLFSQAGPTNMSLQAKNWLPGPCYRQQRLSKQANDNNNCNFPWTAATKYHLNGRDSLVNPGPAMASHKDDEEKFFPMHGTLIFGKQGTNANDADLENVMITDEEEIRPTNPVATEQYGTVSNNLQNSNTGPTTGTVNHQGALPGMVWQDRDVYLQGPIWAKIPHTDGHFHPSPLMGGFGLKHPPPQIMIKSTPVPANPPTNFSSAKFASSITQYSTGQVSVEIEWELQKENSKRWNPEIQYTSNYNKSVNVDFTVDTNGVYSEPRPIGTRYLTRNL

SEQ ID NO: 245 - DNA, 2208 bp, Artificial Sequence
  source: /note="Description of Artificial Sequence: Synthetic polynucleotide"
atggctgccgatggttatcttccagattggctcgaggacactctctctgaaggaataagacagtggtggaagctcaaacctggcccaccaccaccaaagcccgcagagcggcataaggacgacagcaggggtcttgtgcttcctgggtacaagtacctcggacccttcaacggactcgacaagggagagccggtcaacgaggcagacgccgcggccctcgagcacgacaaggcctacgaccggcagctcgacagcggagacaacccgtacctcaagtacaaccacgccgacgcggagtttcaggagcgccttaaagaggatacgtcttttgggggcaacctcggacgagcagtcttccaggcaaaaaagagggttctggaacctctgggcctggttgaggagcctgttaagacggctccgggaaaaaagaggccggtagagcactctcctgcagagccagattcctcctccggaactggaaagtcgggcaaccagcctgcaagaaagagattgaatttcggtcagactggagactcagactccgtacctgacccccagcctctcggacagccaccagcagccccctctggtctgggaactaatacgatggctacaggcagtggcgcaccaatggcagacaataacgagggcgccgacggagtgggtaattcctcgggaaattggcattgcgattccacatggatgggcgacagagtcatcaccaccagcacccgaacctgggccctgcccacctacaacaaccatctgtacaagcaaatatccagccagtctggagccagcaacgacaatcactactttggctacagcaccccctgggggtattttgacttcaacagattccactgccacttttcaccacgtgactggcaaagactcatcaacaacaactggggattccgacccaagagactcaacttcaagctctttaacattcaagtcaaagaggtcacgcagaatgacggtacgacgacgattgccaataaccttaccagcacggttcaggtgtttactgactcggagtaccagctcccgtacgtcctcggctcggcgcatcaaggatgcctcccgccgttcccagcagacgtcttcatggtgccacagtatggatacctcaccctgaacaacgggagtcaggcagtaggacgctcttcattttactgcctagagtactttccttctcagatgctgcgtaccggaaacagctttaccttcagctacacctttgaggacgttcctttccacagcagctacgctcacagccagagtttggaccgtctcatgaatcctctcatcgaccagtacctgtattacttgagcagaacaaacactccaagcggaaccaccacgcagtccaggcttcagttttctcaggccggagcgagtgacattcgggaccagtctaggaactggcttcctggaccctgttaccgtcagcagcgagtatcaaagacatctgcggataacaacaacagtgaatactcgtggactggagctaccaagtaccacctcaatggcagagactctctggtgaatccgggcccggccatggccagccacaaagacgatgaagaaaagttctttcctcagagcggggttcttatctttgggaagcaaggctcagagaaaacaaatgtggatattgaaaaggtcatgattacagacgaagaggaaatcaggaccaccaatcccgtggctacggagcagtatggttctgtatctaccaacctccagagcggcaacacacaagcagctaccgcagatgtcaacacacaaggcgttcttccaggcatggtctggcaagacagagacgtgtacctgcaggggcctatttgggcaaagattccacacacggacggacattttcacccctctcccctcatgggcggatttggacttaaacaccctcctccacagattctcatcaagaacaccccggtacctgcgaatccttcgaccaccttcagtgcggcaaagtttgcttccttcattacacagtactccacggggcaggtcagcgtggagatcgagtgggagctgcagaaggagaacagcaaacgctggaatcccgagatccagtacacttccaactacaacaagtctgttaatgtggactttactgtggacactaatggcgtgtattcagagcctcgccccattggcaccagatacctgactcgtaatctgtaa

SEQ ID NO: 246 - protein, 735 aa, Artificial Sequence
  source: /note="Description of Artificial Sequence: Synthetic polypeptide"
MAADGYLPDWLEDTLSEGIRQWWKLKPGPPPPKPAERHKDDSRGLVLPGYKYLGPFNGLDKGEPVNEADAAALEHDKAYDRQLDSGDNPYLKYNHADAEFQERLKEDTSFGGNLGRAVFQAKKRVLEPLGLVEEPVKTAPGKKRPVEHSPAEPDSSSGTGKSGNQPARKRLNFGQTGDSDSVPDPQPLGQPPAAPSGLGTNTMATGSGAPMADNNEGADGVGNSSGNWHCDSTWMGDRVITTSTRTWALPTYNNHLYKQISSQSGASNDNHYFGYSTPWGYFDFNRFHCHFSPRDWQRLINNNWGFRPKRLNFKLFNIQVKEVTQNDGTTTIANNLTSTVQVFTDSEYQLPYVLGSAHQGCLPPFPADVFMVPQYGYLTLNNGSQAVGRSSFYCLEYFPSQMLRTGNSFTFSYTFEDVPFHSSYAHSQSLDRLMNPLIDQYLYYLSRTNTPSGTTTQSRLQFSQAGASDIRDQSRNWLPGPCYRQQRVSKTSADNNNSEYSWTGATKYHLNGRDSLVNPGPAMASHKDDEEKFFPQSGVLIFGKQGSEKTNVDIEKVMITDEEEIRTTNPVATEQYGSVSTNLQSGNTQAATADVNTQGVLPGMVWQDRDVYLQGPIWAKIPHTDGHFHPSPLMGGFGLKHPPPQILIKNTPVPANPSTTFSAAKFASFITQYSTGQVSVEIEWELQKENSKRWNPEIQYTSNYNKSVNVDFTVDTNGVYSEPRPIGTRYLTRNL

SEQ ID NO: 247 - DNA, 2211 bp, Artificial Sequence; identical to SEQ ID NO: 137
  source: /note="Description of Artificial Sequence: Synthetic polynucleotide"

SEQ ID NO: 248 - protein, 736 aa, Artificial Sequence
  source: /note="Description of Artificial Sequence: Synthetic polypeptide"
MAADGYLPDWLEDTLSEGIRQWWKLKPGPPPPKPAERHKDDSRGLVLPGYKYLGPGNGLDKGEPVNAADAAALEHDKAYDQQLKAGDNPYLKYNHADAEFQERLKEDTSFGGNLGRAVFQAKKRLLEPLGLVEEAAKTAPGKKRPVEQSPQEPDSSAGIGKSGSQPAKKKLNFGQTGDTESVPDPQPIGEPPAAPSGVGSLTMASGGGAPVADNNEGADGVGSSSGNWHCDSQWLGDRVITTSTRTWALPTYNNHLYKQISNSTSGGSSNDNAYFGYSTPWGYFDFNRFHCHFSPRDWQRLINNNWGFRPKRLNFKLFNIQVKEVTDNNGVKTIANNLTSTVQVFTDSDYQLPYVLGSAHEGCLPPFPADVFMIPQYGYLTLNDGGQAVGRSSFYCLEYFPSQMLRTGNNFQFSYEFENVPFHSSYAHSQSLDRLMNPLIDQYLYYLSKTINGSGQNQQTLKFSVAGPSNMAVQGRNYIPGPSYRQQRVSTTVTQNNNSEFAWPGASSWALNGRNSLMNPGPAMASHKEGEDRFFPLSGSLIFGKQGTGRDNVDADKVMITNEEEIKTTNPVATESYGQVATNHQSAQAQAQTGWVQNQGILPGMVWQDRDVYLQGPIWAKIPHTDGNFHPSPLMGGFGMKHPPPQILIKNTPVPADPPTAFNKDKLNSFITQYSTGQVSVEIEWELQKENSKRWNPEIQYTSNYYKSNNVEFAVSTEGVYSEPRPIGTRYLTRNL

SEQ ID NO: 249 - DNA, 2211 bp, Artificial Sequence
  source: /note="Description of Artificial Sequence: Synthetic polynucleotide"
atggctgccgatggttatcttccagattggctcgaggacactctctctgaaggaataagacagtggtggaagctcaaacctggcccaccaccaccaaagcccgcagagcggcataaggacgacagcaggggtcttgtgcttcctgggtacaagtacctcggacccggcaacggactcgacaagggggagccggtcaacgcagcagacgcggcggccctcgagcacgacaaggcctacgaccagcagctcaaggccggagacaacccgtacctcaagtacaaccacgccgacgccgagttccaggagcggctcaaagaagatacgtcttttgggggcaacctcgggcgagcagtcttccaggccaaaaagaggcttcttgaacctcttggtctggttgaggaagcggctaagacggctcctggaaagaagaggcctgtagagcagtctcctcaggaaccggactcctccgcgggtattggcaaatcgggttcacagcccgctaaaaagaaactcaatttcggtcagactggcgacacagagtcagtccccgaccctcaaccaatcggagaacctcccgcagccccctcaggtgtgggatctcttacaatggcttcaggtggtggcgcaccagtggcagacaataacgaaggtgccgatggagtgggtagttcctcgggaaattggcattgcgattcccaatggctgggggacagagtcatcaccaccagcacccgaacctgggccctgcccacctacaacaatcacctctacaagcaaatctccaacagcacatctggaggatcttcaaatgacaacgcctacttcggctacagcaccccctgggggtattttgacttcaacagattccactgccacttctcaccacgtgactggcagcgactcatcaacaacaactggggattccggcctaagcgactcaacttcaagctcttcaacattcaggtcaaagaggttacggacaacaatggagtcaagaccatcgccaataaccttaccagcacggtccaggtcttcacggactcagactatcagctcccgtacgtgctcgggtcggctcacgagggctgcctcccgccgttcccagcggacgttttcatgattcctcagtacgggtatctgacgcttaatgatgggagccaggccgtgggtcgttcgtccttttactgcctggaatatttcccgtcgcaaatgctaagaacgggtaacaacttccagttcagctacgagtttgagaacgtacctttccatagcagctacgctcacagccaaagcctggaccgactaatgaatccactcatcgaccaatacttgtactatctctcaaagactattaacggttctggacagaatcaacaaacgctaaaattcagcgtggccggacccagcaacatggctgtccagggaagaaactacatacctggacccagctaccgacaacaacgtgtctcaaccactgtgactcaaaacaacaacagcgaatttgcttggcctggagcttcttcttgggctctcaatggacgtaatagcttgatgaatcctggacctgctatggccagccacaaagaaggagaggaccgtttctttcctttgtctggatctttaatttttggcaaacaaggaactggaagagacaacgtggatgcggacaaagtcatgataaccaacgaagaagaaattaaaactactaacccggtagcaacggagtcctatggacaagtggccacaaaccaccagagtgcccaagcacaggcgcagaccggctgggttcaaaaccaaggaatacttccgggtatggtttggcaggacagagatgtgtacctgcaaggacccatttgggccaaaattcctcacacggacggcaactttcacccttctccgctaatgggagggtttggaatgaagcacccgcctcctcagatcctcatcaaaaacacacctgtacctgcggatcctccaacggctttcaataaggacaagctgaactctttcatcacccagtattctactggccaagtcagcgtggagattgagtgggagctgcagaaggaaaacagcaagcgctggaacccggagatccagtacacttccaactattacaagtctaataatgttgaatttgctgttaatactgaaggtgtatatagtgaaccccgccccattggcaccagatacctgactcgtaatctgtaa

SEQ ID NO: 250 - protein, 736 aa, Artificial Sequence
  source: /note="Description of Artificial Sequence: Synthetic polypeptide"
MAADGYLPDWLEDTLSEGIRQWWKLKPGPPPPKPAERHKDDSRGLVLPGYKYLGPGNGLDKGEPVNAADAAALEHDKAYDQQLKAGDNPYLKYNHADAEFQERLKEDTSFGGNLGRAVFQAKKRLLEPLGLVEEAAKTAPGKKRPVEQSPQEPDSSAGIGKSGSQPAKKKLNFGQTGDTESVPDPQPIGEPPAAPSGVGSLTMASGGGAPVADNNEGADGVGSSSGNWHCDSQWLGDRVITTSTRTWALPTYNNHLYKQISNSTSGGSSNDNAYFGYSTPWGYFDFNRFHCHFSPRDWQRLINNNWGFRPKRLNFKLFNIQVKEVTDNNGVKTIANNLTSTVQVFTDSDYQLPYVLGSAHEGCLPPFPADVFMIPQYGYLTLNDGSQAVGRSSFYCLEYFPSQMLRTGNNFQFSYEFENVPFHSSYAHSQSLDRLMNPLIDQYLYYLSKTINGSGQNQQTLKFSVAGPSNMAVQGRNYIPGPSYRQQRVSTTVTQNNNSEFAWPGASSWALNGRNSLMNPGPAMASHKEGEDRFFPLSGSLIFGKQGTGRDNVDADKVMITNEEEIKTTNPVATESYGQVATNHQSAQAQAQTGWVQNQGILPGMVWQDRDVYLQGPIWAKIPHTDGNFHPSPLMGGFGMKHPPPQILIKNTPVPADPPTAFNKDKLNSFITQYSTGQVSVEIEWELQKENSKRWNPEIQYTSNYYKSNNVEFAVNTEGVYSEPRPIGTRYLTRNL

SEQ ID NO: 251 - DNA, 2208 bp, Artificial Sequence
  source: /note="Description of Artificial Sequence: Synthetic polynucleotide"
atggctgccgatggttatcttccagattggctcgaggacactctctctgaaggaataagacagcggtggaagctcaaacctggcccaccaccaccagagcccgcagagcggcataaggacgacagcaggggtcttgtgcttcctgggtacaagtacctcggacccttcaacggactcgacaagggagagccggtcaacgaggcagacgccgcggccctcgagcacgacaaagcctacgaccggcagctcgacagcggagacaacccgtacctcaagtacaaccacgccgacgcggagtttcaggagcgccttaaagaagatacgtcttttgggggcaacctcggacgagcagtcttccaggcgaaaaagagggtacttgaacctctgggcctggttgaggaacctgttaagacggctccgggaaaaaagaggccggtagagcactctcctgtggagccagactcctcctcgggaaccggaaaggcgggccagcagcctgcaagaaaaagattgaattttggtcagactggagacgcagactcagtacctgacccccagcctctcggacagccaccagcagccccctctggtctgggaactaatacgatggctacaggcagtggcgcaccaatggcagacaataacgagggcgccgacggagtgggtaattcctcgggaaattggcattgcgattccacatggatgggcgacagagtcatcaccaccagcacccgaacctgggccctgcccacctacaacaaccacctctacaaacaaatttccagccaatcaggagcctcgaacgacaatcactactttggctacagcaccccttgggggtattttgacttcaacagattccactgccacttttcaccacgtgactggcaaagactcatcaacaacaactggggattccgacccaagagactcaacttcaagctctttaacattcaagtcaaagaggtcacgcagaatgacggtacgacgacgattgccaataaccttaccggcacggttcaggtgtttactgactcggagtaccagctcccgtacgtcctcggctcggcgcatcaaggatgcctcccgccgttcccagcagacgtcttcatggtgccacagtatggatacctcaccctgaacaacgggagtcaggcagtaggacgctcttcattttactgcctggagtactttccttctcagatgctgcgtaccggaaacaactttaccttcagctacacttttgaggacgttcctttccacagcagctacgctcacagccagagtctgggccgtctcatgaatcctctcatcgaccagtacctgtattacttgagcagaacaaacactccaagtggaaccaccacgcagtcaaggcttcagttttctcaggccggagcgagtgacattcgggaccagtctaggaactggcttcctggaccctgttaccgccagcagcgagtatcaaagacatctgcggataacaacaacagtgaatactcgtggactggagctaccaagtaccacctcaatggcagagactctctggtgaatccgggcccggccatggcaagccacaaggacgatgaagaaaagttttttcctcagagcggggttctcatctttgggaagcaaggctcagagaaaacaaatgtggacattgaaaaggtcatgattacagacgaagaggaaatcaggacaaccaatcccgtggctacggagcagtatggttctgtatctaccaacctccagagaggcaacagacaagcagctaccgcagatgtcaacacacaaggcgttcttccaggcatggtctggcaggacagagatgtgtaccttcaggggcccatctgggcaaagattccacacacggacggacattttcacccctctcccctcatgggtggattcggacttaaacaccctcctccacagattctcatcaagaacaccccggtacctgcgaatccttcgaccaccttcagtgcggcaaagtttgcttccttcatcacacagtactccacgggacaggtcagcgtggagatcgagtgggagctgcagaaggaaaacagcaaacgctggaatcccgaaattcagtacacttccaactacaacaagtctgttaatgtggactttactgtggacactaatggcgtgtattcagagcctcgccccattggcaccagatacctgactcgtaatctgtaa

SEQ ID NO: 252 - protein, 735 aa, Artificial Sequence
  source: /note="Description of Artificial Sequence: Synthetic polypeptide"
MAADGYLPDWLEDTLSEGIRQRWKLKPGPPPPEPAERHKDDSRGLVLPGYKYLGPFNGLDKGEPVNEADAAALEHDKAYDRQLDSGDNPYLKYNHADAEFQERLKEDTSFGGNLGRAVFQAKKRVLEPLGLVEEPVKTAPGKKRPVEHSPVEPDSSSGTGKAGQQPARKRLNFGQTGDADSVPDPQPLGQPPAAPSGLGTNTMATGSGAPMADNNEGADGVGNSSGNWHCDSTWMGDRVITTSTRTWALPTYNNHLYKQISSQSGASNDNHYFGYSTPWGYFDFNRFHCHFSPRDWQRLINNNWGFRPKRLNFKLFNIQVKEVTQNDGTTTIANNLTGTVQVFTDSEYQLPYVLGSAHQGCLPPFPADVFMVPQYGYLTLNNGSQAVGRSSFYCLEYFPSQMLRTGNNFTFSYTFEDVPFHSSYAHSQSLGRLMNPLIDQYLYYLSRTNTPSGTTTQSRLQFSQAGASDIRDQSRNWLPGPCYRQQRVSKTSADNNNSEYSWTGATKYHLNGRDSLVNPGPAMASHKDDEEKFFPQSGVLIFGKQGSEKTNVDIEKVMITDEEEIRTTNPVATEQYGSVSTNLQRGNRQAATADVNTQGVLPGMVWQDRDVYLQGPIWAKIPHTDGHFHPSPLMGGFGLKHPPPQILIKNTPVPANPSTTFSAAKFASFITQYSTGQVSVEIEWELQKENSKRWNPEIQYTSNYNKSVNVDFTVDTNGVYSEPRPIGTRYLTRNL

SEQ ID NO: 253 - DNA, 2208 bp, Artificial Sequence
  source: /note="Description of Artificial Sequence: Synthetic polynucleotide"
atggctgccgatggttatcttccagattggctcgaggacactctctctgaaggaataagacagcggtggaagctcaaacctggcccaccaccaccagagcccgcagagcggcataaggacgacagcaggggtcttgtgcttcctgggtacaagtacctcggacccttcaacggactcgacaagggagagccggtcaacgaggcagacgccgcggccctcgagcacgacaaagcctacgaccggcagctcgacagcggagacaacccgtacctcaagtacaaccacgccgacgcggagtttcaggagcgccttaaagaagatacgtcctttgggggcaacctcggacgagcagtcttccaggcgaaaaagagggtacttgaacctctgggcctggttgaggaacctgttaagacggctccgggaaaaaagaggccggtagagcactctcctgtggagccagactcctcctcgggaaccggaaaggcgggccagcagcctgcaagaaaaagattgaattttggtcagactggagacgcagactcagtacctgacccccagcctctcggacagccaccagcagccccctctggtctgggaactaatacgatggctacaggcagtggcgcaccaatggcagacaataacgagggcgccgacggagtgggtaattcctcgggaaattggcattgcgattccacatggatgggcgacagagtcatcaccaccagcacccgaacctgggccctgcccacctacaacaaccacctctacaaacaaatttccagccaatcaggagcctcgaacgacaatcactactttggctacagcaccccttgggggtattttgacttcaacagattccactgccacttttcaccacgtgactggcaaagactcatcaacaacaactggggattccgacccaagagactcaacttcaagctctttaacattcaagtcaaagaggtcacgcagaatgacggtacgacgacgattgccaataaccttaccagcacggttcaggtgtttactgactcggagtaccagctcccgtacgtcctcggctcggcgcatcaaggatgcctcccgccgttcccagcagacgtcttcatggtgccacagtatggatacctcaccctgaacaacgagagtcaggcagtaggacgctcttcattttactgcctggagtactttccttctcagatgctgcgtaccggaaacaactttaccttcagctacacttttgaggacgttcctttccacagcagctacgctcacagccagagtctgggccgtctcatgaatcctctcatcgaccagtacctgtattacttgagcagaacaaacactccaagtggaaccaccacgcagtcaaggcttcagttttctcaggccggagcgagtgacattcgggaccagtctaggaactggcttcctggaccctgttaccgccagcagcgagtatcaaagacatctgcggataacaacaacagtgaatactcgtggactggagctaccaagtaccacctcaatggcagagactctctggtgaatccgggcccggccatggcaagccacaaggacgatgaagaaaagttttttcctcagagcggggttctcatctttgggaagcaaggctcagagaaaacaaatgtggacattgaaaaggtcatgattacagacgaagaggaaatcaggacaaccaatcccgtggctacggagcagtatggttctgtatctaccaacctccagagaggcaacagacaagcagctaccgcagatgtcaacacacaaggcgttcttccaggcatggtctggcaggacagagatgtgtaccttcaggggcccatctgggcaaagattccacacacggacggacattttcacccctctcccctcatgggtggattcggacttaaacaccctcctccacagattctcatcaagaacaccccggtacctgcgaatccttcgaccaccttcagtgcggcaaagtttgcttccttcatcacacagtactccacgggacaggtcagcgtggagatcgagtgggagctgcagaaggaaaacagcaaacgctggaatcccgaaattcagtacacttccaactacaacaagtctgttaatgtggactttactgtggacactaatggcgtgtattcagagcctcgccccattggcaccagatacctgactcgtaatctgtaa

SEQ ID NO: 254 - protein, 735 aa, Artificial Sequence
  source: /note="Description of Artificial Sequence: Synthetic polypeptide"
MAADGYLPDWLEDTLSEGIRQRWKLKPGPPPPEPAERHKDDSRGLVLPGYKYLGPFNGLDKGEPVNEADAAALEHDKAYDRQLDSGDNPYLKYNHADAEFQERLKEDTSFGGNLGRAVFQAKKRVLEPLGLVEEPVKTAPGKKRPVEHSPVEPDSSSGTGKAGQQPARKRLNFGQTGDADSVPDPQPLGQPPAAPSGLGTNTMATGSGAPMADNNEGADGVGNSSGNWHCDSTWMGDRVITTSTRTWALPTYNNHLYKQISSQSGASNDNHYFGYSTPWGYFDFNRFHCHFSPRDWQRLINNNWGFRPKRLNFKLFNIQVKEVTQNDGTTTIANNLTSTVQVFTDSEYQLPYVLGSAHQGCLPPFPADVFMVPQYGYLTLNNESQAVGRSSFYCLEYFPSQMLRTGNNFTFSYTFEDVPFHSSYAHSQSLGRLMNPLIDQYLYYLSRTNTPSGTTTQSRLQFSQAGASDIRDQSRNWLPGPCYRQQRVSKTSADNNNSEYSWTGATKYHLNGRDSLVNPGPAMASHKDDEEKFFPQSGVLIFGKQGSEKTNVDIEKVMITDEEEIRTTNPVATEQYGSVSTNLQRGNRQAATADVNTQGVLPGMVWQDRDVYLQGPIWAKIPHTDGHFHPSPLMGGFGLKHPPPQILIKNTPVPANPSTTFSAAKFASFITQYSTGQVSVEIEWELQKENSKRWNPEIQYTSNYNKSVNVDFTVDTNGVYSEPRPIGTRYLTRNL

SEQ ID NO: 255 - DNA, 2208 bp, Artificial Sequence
  source: /note="Description of Artificial Sequence: Synthetic polynucleotide"
atggctgccgatggttatcttccagattggctcgaggacactctctctgaaggaataagacagcggtggaagctcaaacctggcccaccaccaccagagcccgcagagcggcataaggacgacagcaggggtcttgtgcttcctgggtacaagtacctcggacccttcaacggactcgacaagggagagccggtcaacgaggcagacgccgcggccctcgagcacgacaaagcctacgaccggcagctcgacagcggagacaacccgtacctcaagtacaaccacgccgacgcggagtttcaggagcgccttaaagaagatacgtcttttgggggcaacctcggacgagcagtcttccaggcgaaaaagagggtacttgaacctctgggcctggttgaggaacctgttaagacggctccgggaaaaaagaggccggtagagcactctcctgtggagccagactcctcctcgggaaccggaaaggcgggccagcagcctgcaagaaaaagattgaattttggtcagactggagacgcagactcagtacctgacccccagcctctcggacagccaccagcagccccctctggtctgggaactaatacgatggctacaggcagtggcgcaccaatggcagacaataacgagggcgccgacggagtgggtaattcctcgggaaattggcattgcgattccacatggatgggcgacagagtcatcaccaccagcacccgaacctgggccctgcccacctacaacaaccacctctacaaacaaatttccagccaatcaggagcctcgaacgacaatcactactttggctacagcaccccttgggggtattttgacttcaacagattccactgccacttttcaccacgtgactggcaaagactcatcaacaacaactggggattccgacccaagagactcaacttcaagctctttaacattcaagtcaaagaggtcacgcagaatgacggtacgacgacgattgccaataaccttaccagcacggttcaggtgtttactgactcggagtaccagctcccgtacgtcctcggctcggcgcatcaaggatgcctcccgccgttcccagcagacgtcttcatggtaccacagtatggatacctcaccctgaacaacgggagtcaggcagtaggacgctcttcattttactgcctggagtactttccttctcagatgctgcgtaccggaaacaactttaccttcagctacacttttgaggacgttcctttccacagcagctacgctcacagccagagtctgggccgtctcatgaatcctctcatcgaccagtacctgtattacttgagcagaacaaacactccaagtggaaccaccacgcagtcaaggcttcagttttctcaggccggagcgagtgacattcgggaccagtctaggaactggcttcctggaccctgttaccgccagcagcgagtatcaaagacatctgcggataacaacaacagtgaatactcgtggactggagctaccaagtaccacctcaatggcagagactctctggtgaatccgggcccggccatggcaagccacaaggacgatgaagaaaagttttttcctcagagcggggttctcatctttgggaagcaaggctcagagaaaacaaatgtggacattgaaaaggtcatgattacagacgaagaggaaatcaggacaaccaatcccgtggctacggagcagtatggttctgtatctaccaacctccagagaggcaacagacaagcagctaccgcagatgtcaacacacaaggcgttcttccaggcatggtctggcaggacagagatgtgtaccttcaggggcccatctgggcaaagattccacacacggacggacattttcacccctctcccctcatgggtggattcggacttaaacaccctcctccacagattctcatcaagaacaccccggtacctgcgaatccttcgaccaccttcagtgcggcaaagtttgcttccttcatcacacagtactccacgggacaggtcagcgtggagatcgagtgggagctgcagaaggaaaacagcaaacgctggaatcccgaaattcagtacacttccaactacaacaagtctgttaatgtggactttactgtggacactaatggcgtgtattcagagcctcgccccattggcaccagatacctgactcgtaatctgtaa

SEQ ID NO: 256 - protein, 735 aa, Artificial Sequence
  source: /note="Description of Artificial Sequence: Synthetic polypeptide"
MAADGYLPDWLEDTLSEGIRQRWKLKPGPPPPEPAERHKDDSRGLVLPGYKYLGPFNGLDKGEPVNEADAAALEHDKAYDRQLDSGDNPYLKYNHADAEFQERLKEDTSFGGNLGRAVFQAKKRVLEPLGLVEEPVKTAPGKKRPVEHSPVEPDSSSGTGKAGQQPARKRLNFGQTGDADSVPDPQPLGQPPAAPSGLGTNTMATGSGAPMADNNEGADGVGNSSGNWHCDSTWMGDRVITTSTRTWALPTYNNHLYKQISSQSGASNDNHYFGYSTPWGYFDFNRFHCHFSPRDWQRLINNNWGFRPKRLNFKLFNIQVKEVTQNDGTTTIANNLTSTVQVFTDSEYQLPYVLGSAHQGCLPPFPADVFMVPQYGYLTLNNGSQAVGRSSFYCLEYFPSQMLRTGNNFTFSYTFEDVPFHSSYAHSQSLGRLMNPLIDQYLYYLSRTNTPSGTTTQSRLQFSQAGASDIRDQSRNWLPGPCYRQQRVSKTSADNNNSEYSWTGATKYHLNGRDSLVNPGPAMASHKDDEEKFFPQSGVLIFGKQGSEKTNVDIEKVMITDEEEIRTTNPVATEQYGSVSTNLQRGNRQAATADVNTQGVLPGMVWQDRDVYLQGPIWAKIPHTDGHFHPSPLMGGFGLKHPPPQILIKNTPVPANPSTTFSAAKFASFITQYSTGQVSVEIEWELQKENSKRWNPEIQYTSNYNKSVNVDFTVDTNGVYSEPRPIGTRYLTRNL

SEQ ID NO: 257 - DNA, 2208 bp, Artificial Sequence
  source: /note="Description of Artificial Sequence: Synthetic polynucleotide"
atggctgccgatggttatcttccagattggctcgaggacactctctctgaaggaataagacagcggtggaagctcaaacctggcccaccaccaccagagcccgcagagcggcataaggacgacagcaggggtcttgtgcttcctgggtacaagtacctcggacccttcaacggactcgacaagggagagccggtcaacgaggcagacgccgcggccctcgagcacgacaaagcctacgaccggcagctcgacagcggagacaacccgtacctcaagtacaaccacgccgacgcggagtttcaggagcgccttaaagaagatacgtcttttgggggcaacctcggacgagcagtcttccaggcgaaaaagagggtactcgaacctctgggcctggttgaggaacctgttaagacggctccgggaaaaaagaggccggtagagcactctcctgtggagccagactcctcctcgggaaccggaaaggcgggccagcagcctgcaagaaaaagattgaattttggtcagactggagacgcagactcagtacctgacccccagcctctcggacagccaccagcagccccctctggtctgggaactaatacgatggctacaggcagtggcgcaccaatggcagacaataacgagggcgccgacggagtgggtaattcctcgggaaattggcattgcgattccacatggatgggcgacagagtcatcaccaccagcacccgaacctgggccctgcccacctacaacaaccacctctacaaacaaatttccagccaatcaggagcctcgaacgacaatcactactttggctacagcaccccttgggggtattttgacttcaacagattccactgccacttttcaccacgtgactggcaaagactcatcaacaacaactggggattccgacccaagagactcaacttcaagctctttaacattcaagtcaaagaggtcacgcagaatgacggtacgacgacgattgccaataaccttaccagcacggttcaggtgtttactgactcggagtaccagctcccgtacgtcctcggctcggcgcatcaaggatgcctcccgccgttcccagcagacgtcttcatggtgccacagtatggatacctcaccctgaacaacgggagtcaggcagcaggacgctcttcattttactgcctggagtactttccttctcagatgctgcgtaccggaaacaactttaccttcagctacacttttgaggacgttcctttccacagcagctacgctcacagccagagtctgggccgtctcatgaatcctctcatcgaccagtacctgtattacttgagcagaacaaacactccaagtggaaccaccacgcagtcaaggcttcagttttctcaggccggagcgagtgacattcgggaccagtctaggaactggcttcctggaccctgttaccgccagcagcgagtatcaaagacatctgcggataacaacaacagtgaatactcgtggactggagctaccaagtaccacctcaatggcagagactctctggtgaatccgggcccggccatggcaagccacaaggacgatgaagaaaagttttttcctcagagcggggttctcatctttgggaagcaaggctcagagaaaacaaatgtggacattgaaaaggtcatgattacagacgaagaggaaatcaggacaaccaatcccgtggctacggagcagtatggttctgtatctaccaacctccagagaggcaacagacaagcagctaccgcagatgtcaacacacaaggcgttcttccaggcatggtctggcaggacagagatgtgtaccttcaggggcccatctgggcaaagattccacacacggacggacattttcacccctctcccctcatgggtggattcggacttaaacaccctcctccacagattctcatcaagaacaccccggtacctgcgaatccttcgaccaccttcagtgcggcaaagtttgcttccttcatcacacagtactccacgggacaggtcagcgtggagatcgagtgggagctgcagaaggaaaacagcaaacgctggaatcccgaaattcagtacacttccaactacaacaagtccgttaatgtggactttactgtggacactaatggcgtgtattcagagcctcgccccattggcaccagatacctgactcgtaatctgtaa

SEQ ID NO: 258 - protein, 735 aa, Artificial Sequence
  source: /note="Description of Artificial Sequence: Synthetic polypeptide"
MAADGYLPDWLEDTLSEGIRQRWKLKPGPPPPEPAERHKDDSRGLVLPGYKYLGPFNGLDKGEPVNEADAAALEHDKAYDRQLDSGDNPYLKYNHADAEFQERLKEDTSFGGNLGRAVFQAKKRVLEPLGLVEEPVKTAPGKKRPVEHSPVEPDSSSGTGKAGQQPARKRLNFGQTGDADSVPDPQPLGQPPAAPSGLGTNTMATGSGAPMADNNEGADGVGNSSGNWHCDSTWMGDRVITTSTRTWALPTYNNHLYKQISSQSGASNDNHYFGYSTPWGYFDFNRFHCHFSPRDWQRLINNNWGFRPKRLNFKLFNIQVKEVTQNDGTTTIANNLTSTVQVFTDSEYQLPYVLGSAHQGCLPPFPADVFMVPQYGYLTLNNGSQAAGRSSFYCLEYFPSQMLRTGNNFTFSYTFEDVPFHSSYAHSQSLGRLMNPLIDQYLYYLSRTNTPSGTTTQSRLQFSQAGASDIRDQSRNWLPGPCYRQQRVSKTSADNNNSEYSWTGATKYHLNGRDSLVNPGPAMASHKDDEEKFFPQSGVLIFGKQGSEKTNVDIEKVMITDEEEIRTTNPVATEQYGSVSTNLQRGNRQAATADVNTQGVLPGMVWQDRDVYLQGPIWAKIPHTDGHFHPSPLMGGFGLKHPPPQILIKNTPVPANPSTTFSAAKFASFITQYSTGQVSVEIEWELQKENSKRWNPEIQYTSNYNKSVNVDFTVDTNGVYSEPRPIGTRYLTRNL

SEQ ID NO: 259 - protein, 738 aa, Artificial Sequence; identical to SEQ ID NO: 101
  source: /note="Description of Artificial Sequence: Synthetic polypeptide"

SEQ ID NO: 260 - DNA, 2217 bp, Artificial Sequence
  source: /note="Description of Artificial Sequence: Synthetic polynucleotide"
atggctgctgacggttatcttccagattggctcgaggacaacctctctgagggcattcgcgagtggtgggacctgaaacctggagcccccaagcccaaggccaaccagcagaagcaggacgacggccggggtctggtgcttcctggctacaagtacctcggacccttcaacggactcgacaagggggagcccgtcaacgcggcggacgcagcggccctcgagcacgacaaggcctacgaccagcagctcaaagcgggtgacaatccgtacctgcggtataaccacgccgacgccgagtttcaggagcgtctgcaagaagatacgtcttttgggggcaacctcgggcgagcagtcttccaggccaagaagcgggttctcgaacctctcggtctggttgaggaagctgctaagacggctcctggaaagaagagaccggtagaaccgtcacctcagcgttcccccgactcctccacgggcatcggcaagaaaggccagcagcccgctaaaaagagactgaactttggtcagactggcgactcagagtcagtccccgaccctcaaccaatcggagaaccaccagcaggcccctctggtctgggatctggtacaatggctgcaggcggtggcgctccaatggcagacaataacgaaggcgccgacggagtgggtagttcctcaggaaattggcattgcgattccacatggctgggcgacagagtcatcaccaccagcacccgaacctgggccctgcccacctacaacaaccacctctacaagcaaatatccaatgggacatcgggaggaagcaccaacgacaacacctacttcggctacagcaccccctgggggtattttgacttcaacagattccactgccacttctcaccacgtgactggcagcgactcatcaacaacaactggggattccggccaaaaagactcagcttcaagctcttcaacatccaggtcaaggaggtcacgcagaatgaaggcaccaagaccatcgccaataaccttaccagcacgattcaggtatttacggactcggaataccagctgccgtacgtcctcggctccgcgcaccagggctgcctgcctccgttcccggcggacgtcttcatgattccccagtacggctaccttacactgaacaatggaagtcaagccgtaggccgttcctccttctactgcctggaatattttccatctcaaatgctgcgaactggaaacaattttgaattcagctacaccttcgaggacgtgcctttccacagcagctacgcacacagccagagcttggaccgactgatgaatcctctcatcgaccagtacctgtactacttatccagaactcagtccacaggaggaactcaaggtacccagcaattgttattttctcaagctgggcctgcaaacatgtcggctcaggctaagaactggctacctggaccttgctaccggcagcagcgagtctctacgacactgtcgcaaaacaacaacagcaactttgcttggactggtgccaccaaatatcacctgaacggaagagactctttggtaaatcccggtgtcgccatggcaacccacaaggacgacgaggaacgcttcttcccgtcgagtggagtcctgatgttcggaaaacagggtgctggaagagacaatgtggactacagcagcgttatgctaaccagcgaagaagaaattaaaaccactaaccccgtagccacagaacaatacggtgtggtggctgacaacttgcagcaaaccaatacagggcctattgtgggaaatgtcaacagccaaggagccttacctggcatggtctggcagaaccgagacgtgtacctgcagggtcccatctgggccaagattcctcacacggacggcaacttccacccttcaccgctaatgggaggatttggactgaagcacccacctcctcagatcctgatcaagaacacgccggtacctgcggatcctccaacaacgttcagccaggcgaaattggcttccttcattacgcagtacagcaccggacaggtcagcgtggaaatcgagtgggagctgcagaaggagaacagcaaacgctggaacccagagattcagtacacttcaaactactacaaatctacaaatgtggactttgctgtcaatacagagggaacttattctgagcctcgccccattggtactcgttacctcacccgtaatctgtaa

SEQ ID NO: 261 - protein, 738 aa, Artificial Sequence
  source: /note="Description of Artificial Sequence: Synthetic polypeptide"
MAADGYLPDWLEDNLSEGIREWWDLKPGAPKPKANQQKQDDGRGLVLPGYKYLGPFNGLDKGEPVNAADAAALEHDKAYDQQLKAGDNPYLRYNHADAEFQERLQEDTSFGGNLGRAVFQAKKRVLEPLGLVEEAAKTAPGKKRPVEPSPQRSPDSSTGIGKKGQQPAKKRLNFGQTGDSESVPDPQPIGEPPAGPSGLGSGTMAAGGGAPMADNNEGADGVGSSSGNWHCDSTWLGDRVITTSTRTWALPTYNNHLYKQISNGTSGGSTNDNTYFGYSTPWGYFDFNRFHCHFSPRDWQRLINNNWGFRPKRLSFKLFNIQVKEVTQNEGTKTIANNLTSTIQVFTDSEYQLPYVLGSAHQGCLPPFPADVFMIPQYGYLTLNNGSQAVGRSSFYCLEYFPSQMLRTGNNFEFSYTFEDVPFHSSYAHSQSLDRLMNPLIDQYLYYLSRTQSTGGTQGTQQLLFSQAGPANMSAQAKNWLPGPCYRQQRVSTTLSQNNNSNFAWTGATKYHLNGRDSLVNPGVAMATHKDDEERFFPSSGVLMFGKQGAGRDNVDYSSVMLTSEEEIKTTNPVATEQYGVVADNLQQTNTGPIVGNVNSQGALPGMVWQNRDVYLQGPIWAKIPHTDGNCHPSPLMGGFGLKHPPPQILIKNTPVPADPPTTFSQAKLASFITQYSTGQVSVEIEWELQKENSKRWNPEIQYTSNYYKSTNVDFAVNTEGTYSEPRPIGTRYLTRNL

SEQ ID NO: 262 - protein, 738 aa, Artificial Sequence
  source: /note="Description of Artificial Sequence: Synthetic polypeptide"
MAADGYLPDWLEDNLSEGIREWWDLKPGAPKPKANQQKQDDGRGLVLPGYKYLGPFNGLDKGEPVNAADAAALEHDKAYDQQLKAGDNPYLRYNHADAEFQERLQEDTSFGGNLGRAVFQAKKRVLEPLGLVEEGAKTAPGKKRPVEPSPQRSPDSSTGIGKKGQQPARKRLNFGRTGDSESVPDPQPIGEPPAAPSSVGSGTMAAGGGAPMADNNEGADGVGSSSGNWHCDSTWLGDRVITTSTRTWALPTYNNHLYKQISNGTSGGSTNDNTYFGYSTPWGYLDFNRFHCHFSPRDWQRLINNNWGFRPKRLSFKLFNIQVKEVTQNEGTKTIANNLASTIQVFTDSEYQPPYVLGSAHQGCLPPFPADVFMIPQYGYLTLNNGSQAVGRSSFYCLEYFPSQMLRTGNNFSFSYTFEDVPFHSSYAHSQSLDRLMNPLIDQYLYYLSRTQSTGGTAGTQQLLFSRAGPSNMSAQARNWLPGPCYRQQRVSTTLSQNNNSNFAWTGATKYHLNGRDSLVNPGVAMATNKDDEDRFFPSSGILMFGKQGAGKDNVDYSNVMLTSEEEIKTTNPVATEQYGVVADNLQQQNTAPTVGAVNSQGALPGMVWQNRDVYLQGPIWAKIPHTDGNFHPSPLMGGFGLKHPPPQILIKNTPVPADPPTAFNQAKLNSFIAQYSTGQVSVEIEWELQKENSKRWNPEIQYTSNYYKSTNADFAVNTEGVYSEPRPIGTRYLTRNL

SEQ ID NO: 263 - DNA, 2217 bp, Artificial Sequence
  source: /note="Description of Artificial Sequence: Synthetic polynucleotide"
atggctgccgatggttatcttccagattggctcgaggacaacctctctgagggcattcgcgagtggtgggacctgaaacctggagccccgaaacccaaagccaaccagcaaaagcaggacgacggccggggtctggtgcttcctggctacaagtacctcggacccttcaacggactcgacaagggggagcccgtcaacgcggcggacgcagcggccctcgagcacgacaaggcctacgaccagcagctcaaagcgggtgacaatccgtacctgcggtataatcacgccgacgccgagtttcaggagcgtctgcaagaagatacgtcttttgggggcaacctcgggcgagcagtcttccaggccaagaagcgggttctcgaacctctcggtctggttgaggaaggcgctaagacggctcctggaaagaagagaccggtagagccgtcaccacagcgttcccccgactcctccacgggcatcggcaagaaaggccagcagcccgccagaaagagactcaatttcggtcggactggcgactcagagtcagtccccgaccctcaacctatcggagaacctccagcagcgccctctagtgtgggatctggtacaatggctgcaggcggtggcgcaccaatggcagacaataacgaaggtgccgacggagtgggtagttcctcgggaaattggcattgcgattccacatggctgggcgacagagttatcaccaccagcacccgaacctgggccctgcccacctacaacaaccacctctacaagcaaatctccaacgggacctcgggaggcagcaccaacgacaacacctactttggctacagcaccccctgggggtatcttgactttaacagattccactgccacttctcaccacgtgactggcagcgactcatcaacaacaactggggattccggcccaagagactcagcttcaagctcttcaacatccaggtcaaagaggtcacgcagaatgaaggcaccaagaccatcgccaataacctcgccagcaccatccaggtgtttacggactcggaataccagccgccgtacgtcctcggctctgcccaccagggctgcctgcctccgttcccggcggacgtcttcatgattcctcagtacggctacctgactctcaacaacggtagtcaggccgtgggacgttcctccttctactgcctggagtacttcccctctcagatgctgagaacgggcaacaacttttccttcagctacactttcgaggacgtgcctttccacagcagctacgcgcacagccagagtttggacaggctgatgaatcctctcatcgaccagtacctgtactacctgtcaagaacccagtctacgggaggcacagcgggaacccagcagttgctgttttctcgggccgggcctagcaacatgtcggctcaggccagaaactggctgcctggaccctgctacagacagcagcgcgtctccacgacactgtcgcaaaacaacaacagcaactttgcctggactggtgccaccaagtatcatctgaacggcagagactctctggtgaatccgggcgtcgccatggcaaccaacaaggacgacgaggaccgcttcttcccatccagcggcatcctcatgtttggcaagcagggagctggaaaagacaacgtggactatagcaacgtgatgctaaccagcgaggaagaaatcaagaccaccaaccccgtggccacagaacagtatggcgtggtggctgataacctacagcagcaaaacaccgctcctactgtgggggccgtcaacagccagggagccttacctggcatggtctggcagaaccgggacgtgtacctgcagggtcctatttgggccaagattcctcacacagatggcaactttcacccgtctcctttaatgggcggctttggacttaaacatccgcctcctcagatcctcatcaaaaacactcctgttcctgcggatcctccaacagcgttcaaccaggccaagctgaattctttcatcgcgcagtacagcaccggacaagtcagcgtggagatcgagtgggagctgcagaaggagaacagcaagcgctggaacccagagattcagtatacttccaactactacaaatctacaaatgcggactttgctgttaatactgagggtgtttactctgagcctcgccccattggcactcgttacctcacccgtaatctgtaa

SEQ ID NO: 264 - DNA, 2208 bp, Artificial Sequence
  source: /note="Description of Artificial Sequence: Synthetic polynucleotide"
atggctgccgatggttatcttccagattggctcgaggacactctctctgaaggaataagacagtggtggaagctcaaacctggcccaccaccaccaaagcccgcagagcggcataaggacgacagcaggggtcttgtgcttcctgggtacaagtacctcggacccttcaacggactcgacaagggggagccggtcaacgaggcagacgccgcggccctcgagcacgacaaggcctacgaccggcagctcgacagcggagacaacccgtacctcaagtacaaccacgccgacgcagagtttcaggagcgccttaaagaagatacgtcttttgggggcaacctcggacgagcagtcttccaggcgaaaaagagggttcttgaacctctgggcctggttgaggagcctgttaagacggctccgggaaaaaagaggccggtagagcactctcctgtggagccagactcctcctcgggaaccggaaaagcgggccagcagcctgcaagaaaaagattaaattttggtcagactggagacgcagactccgtacctgacccccagcctctcggacagccaccagcagccccctctggtctgggatctactacaatggctacaggcagtggcgcaccaatggcagacaataacgagggtgccgatggagtgggtaattcctcaggaaattggcattgcgattcccaatggctgggcgacagagtcatcaccaccagcacccgaacctgggccctgcccacatacaacaaccacctctacaagcaaatctccagccaatcaggagccagcaacgacaaccactactttggctacagcaccccctgggggtattttgacttcaacagattccactgccacttttcaccacgtgactggcaaagactcgtcaacaacaaccggggattccggcccaaaagactcaacttcaagctctttaatattcaagtcaaagaggtcacgcagaatgacggtacgacgacgattgccaataaccttaccagcacggttcaggtgtttactgactcggagtaccagctcccgtacgtcctgggctcggcgcatcaaggatgcctcccgccgtttccagcggacgtcttcatggtcccacagtatggatacctcaccctgaacaacgggagtcaggcggtaggacgctcttccttttactgcctggagtactttccttctcagatgctgcgtactggaaacaactttcagttcagctacacttttgaagacgtgcctttccacagcagctacgctcacagccagagtctggatcggctgatgaatcctctgatcgaccagtacctgtattatctgaacaagacacaaacaaatagtggaactcttcagcagtctcggctactgtttagccaagctggaccaaccaacatgtctcttcaagctaaaaactggctgcctggaccttgctacagacagcagcgtctgtcaaaacaggcaaacgacaacaacaacagcaactttccctggactgcagctacaaagtatcatctaaatggccgggactcgttggttaatccaggaccagctatggccagtcacaaggatgacgaagaaaagtttttccccatgcatggaaccctgatatttggtaaacaaggaacaaatgccaacgacgcggatttggaaaatgtcatgattacagatgaagaagaaatcagggccaccaatcccgtggctacggagcagtacgggactgtgtcaaataatttgcaaaactcaaacactggtccaactactggaactgtcaatcaccaaggagcgttacctggtatggtgtggcaggatcgagacgtgtacctgcagggacccatttgggccaagattcctcacaccgatggacactttcatccttctccactgatgggaggttttggactcaaacacccgcctcctcagatcatgatcaaaaacactcccgttccagccaatcctcccacaaacttcagttctgccaagtttgcttctttcatcacacagtattccacgggacaggtcagcgtggagatcgagtgggagctgcagaaggagaacagcaaacgctggaatcccgaaattcagtacacttccaactacaacaagtctgttaatgtggactttactgtggacactaatggtgtgtattcagagcctcgccccattggcaccagatacctgactcgtaatctgtaa

SEQ ID NO: 265 - protein, 735 aa, Artificial Sequence
  source: /note="Description of Artificial Sequence: Synthetic polypeptide"
MAADGYLPDWLEDTLSEGIRQWWKLKPGPPPPKPAERHKDDSRGLVLPGYKYLGPFNGLDKGEPVNEADAAALEHDKAYDRQLDSGDNPYLKYNHADAEFQERLKEDTSFGGNLGRAVFQAKKRVLEPLGLVEEPVKTAPGKKRPVEHSPVEPDSSSGTGKAGQQPARKRLNFGQTGDADSVPDPQPLGQPPAAPSGLGSTTMATGSGAPMADNNEGADGVGNSSGNWHCDSQWLGDRVITTSTRTWALPTYNNHLYKQISSQSGASNDNHYFGYSTPWGYFDFNRFHCHFSPRDWQRLVNNNRGFRPKRLNFKLFNIQVKEVTQNDGTTTIANNLTSTVQVFTDSEYQLPYVLGSAHQGCLPPFPADVFMVPQYGYLTLNNGSQAVGRSSFYCLEYFPSQMLRTGNNFQFSYTFEDVPFHSSYAHSQSLDRLMNPLIDQYLYYLNKTQTNSGTLQQSRLLFSQAGPTNMSLQAKNWLPGPCYRQQRLSKQANDNNNSNFPWTAATKYHLNGRDSLVNPGPAMASHKDDEEKFFPMHGTLIFGKQGTNANDADLENVMITDEEEIRATNPVATEQYGTVSNNLQNSNTGPTTGTVNHQGALPGMVWQDRDVYLQGPIWAKIPHTDGHFHPSPLMGGFGLKHPPPQIMIKNTPVPANPPTNFSSAKFASFITQYSTGQVSVEIEWELQKENSKRWNPEIQYTSNYNKSVNVDFTVDTNGVYSEPRPIGTRYLTRNL

SEQ ID NO: 266 - protein, 738 aa, Artificial Sequence
  source: /note="Description of Artificial Sequence: Synthetic polypeptide"
MAADGYLPDWLEDNLSEGIREWWDLKPGAPKPKANQQKQDDGRGLVLPGYKYLGPFNGLDKGEPVNAADAAALEHDKAYDQQLKAGDNPYLRYNHADAEFQERLQEDTSFGGNLGRAVFQAKKRVLEPLGLVEEAAKTAPGKKRPVEPSPQRSPDSSTGIGKKGQQPAKKRLSFGQTGDSESVPDPQPIGEPPAGPSGLGSGTMAAGGGAPMADNNEGADGVGSSSGNWHCDSTWLGDRVITTSTRTWALPTYNNHLYKQISNGTSGGSTNDNTYFGYSTPWGYFDFNRFHCHFSPRDWQRLINNNWGFRPKRLSFKLFNIQVKEVTQNEGTKTIANNLTSTIQVFTDSEYQLPYVLGSAHQGCLPPFPADVFMIPQYGYLTLNNGSQAVGRSSFYCLEYFPSQMLRTGNNSEFSYTFEDVPFHSSYAHSQSLDRLMNPLIDQYLYYLSRTQSTGGTQGTQQLLFSQAGPANMSAQAKNWLPGPCYRQQRVSTTLSQNNNSNFAWTGATKYHLNGRDSLVNPGVAMATHKDDEERFFPSSGVLMFGKQGAGRDNVDYSSVMLTSEEEIKTTNPVATEQYGVVADNLQQTNTGPIVGNVNSQGALPGMVWQNRDVYLQGPIWAKIPHTDGNFHPSPLMGGFGLKHPPPQILIKNTPVPADPPTTFSQAKLASFITQYSTGQVSVEIEWELQKENSKRWNPEIQYTSNYYKSTNVDFAVNTEGTYSEPRPIGTRYLTRNL

SEQ ID NO: 267 - DNA, 2217 bp, Artificial Sequence
  source: /note="Description of Artificial Sequence: Synthetic polynucleotide"
atggctgctgacggttatcttccagattggctcgaggacaacctctctgagggcattcgcgagtggtgggacctgaaacctggagcccccaagcccaaggccaaccagcagaagcaggacgacggccggggtctggtgcttcctggctacaagtacctcggacccttcaacggactcgacaagggggagcccgtcaacgcggcggacgcagcggccctcgagcacgacaaggcctacgaccagcagctcaaagcgggtgacaatccgtacctgcggtataaccacgccgacgccgagtttcaggagcgtctgcaagaagatacgtcttttgggggcaacctcgggcgagcagtcttccaggccaagaagcgggttctcgaacctctcggtctggttgaggaagctgctaagacggctcctggaaagaagagaccggtagaaccgtcacctcagcgttcccccgactcctccacgggcatcggcaagaaaggccagcagcccgctaaaaagagactgagctttggtcagactggcgactcagagtcagtccccgaccctcaaccaatcggagaaccaccagcaggcccctctggtctgggatctggtacaatggctgcaggcggtggcgctccaatggcagacaataacgaaggcgccgacggagtgggtagttcctcaggaaattggcattgcgattccacatggctgggcgacagagtcatcaccaccagcacccgaacctgggccctgcccacctacaacaaccacctctacaagcaaatatccaatgggacatcgggaggaagcaccaacgacaacacctacttcggctacagcaccccctgggggtattttgacttcaacagattccactgccacttctcaccacgtgactggcagcgactcatcaacaacaactggggattccggccaaaaagactcagcttcaagctcttcaacatccaggtcaaggaggtcacgcagaatgaaggcaccaagaccatcgccaataaccttaccagcacgattcaggtatttacggactcggaataccagctgccgtacgtcctcggctccgcgcaccagggctgcctgcctccgttcccggcggacgtcttcatgattccccagtacggctaccttacactgaacaatggaagtcaagccgtaggccgttcctccttctactgcctggaatattttccatctcaaatgctgcgaactggaaacaattctgaattcagctacaccttcgaggacgtgcctttccacagcagctacgcacacagccagagcttggaccgactgatgaatcctctcatcgaccagtacctgtactacttatccagaactcagtccacaggaggaactcaaggtacccagcaattgttattttctcaagctgggcctgcaaacatgtcggctcaggctaagaactggctacctggaccttgctaccggcagcagcgagtctctacgacactgtcgcaaaacaacaacagcaactttgcttggactggtgccaccaaatatcacctgaacggaagagactctttggtaaatcccggtgtcgccatggcaacccacaaggacgacgaggaacgcttcttcccgtcgagtggagtcctgatgtttggaaaacagggtgctggaagagacaatgtggactacagcagcgttatgctaaccagcgaagaagaaattaaaaccactaaccctgtagccacagaacaatacggtgtggtggctgacaacttgcagcaaaccaatacagggcctattgtgggaaatgtcaacagccaaggagccttacctggcatggtctggcagaaccgagacgtgtacctgcagggtcccatctgggccaagattcctcacacggacggcaacttccacccttcaccgctaatgggaggatttggactgaagcacccacctcctcagatcctgatcaagaacacgccggtacctgcggatcctccaacaacgttcagccaggcgaaattggcttccttcattacgcagtacagcaccggacaggtcagcgtggaaatcgagtgggagctgcagaaggagaacagcaaacgctggaacccagagattcagtacacttcaaactactacaaatctacaaatgtggactttgctgtcaatacagagggaacttattctgagcctcgccccattggtactcgttacctcacccgtaatctgtaa

SEQ ID NO: 268 - protein, 738 aa, Artificial Sequence
  source: /note="Description of Artificial Sequence: Synthetic polypeptide"
MAADGYLPDWLEDNLSEGIREWWDLKPGAPKPKANQQKQDDGRGLVLPGYKYLGPFNGLDKGEPVNAADAAALEHDKAYDQQLKAGDNPYLRYNHADAEFQERLQEDTSFGGNLGRAVFQAKKRVLEPLGPVEEAAKTAPGKKRPVEPPPQRSPDSSTGIGKKGQQPAKKRLNFGQTGDSESVPDPQPIGEPPAGPSGLGSGTMAAGGGAPMADNNEGADGVGSSSGNWHCDSTWLGDRVITTSTRTWALPTYNNHLYKQISNGTSGGSTNDNTYFGYSTPWGYFDFNRFHCHFSPRDWQRLINNNWGFRPKRLSFKLFNIQVKEVTQNEGTKTVANNLTSTIQVFTDSEYQLPYVLGSAHQGCLPPFPADVFMIPQYGYLTLNNGSQAVGRSSFYCLEYFPSQMLRTGNNFEFSYTFEDVPFHSSYAHSQSLDRLMNPLIDQYLYYLSRTQSTGGTQGTQQLLFSQAGPANMSAQAKNWLPGPCYRQQRVSTTLSQNNNSNFAWTGATKYHLNGRDSLVNPGVAMATHKDDEERFFPSSGVLMFGKQGAGRDNVDYSSVMLTSEEEIKTTNPVATEQYGVVADNLQQTNTGPIVGNVNSQGALPGMVWQNRDVYLQGPIWAKIPHTDGNFHPSPLMGGFGLKHPPPQILIKNTPVPADPPTTFSQAKLASFITQYSTGQVSVEIEWELQKENSKRWNPEIQYTSNYYKSTNVDFAVNTEGTYSEPRPIGTRYLTRNL

SEQ ID NO: 269 - DNA, 2217 bp, Artificial Sequence
  source: /note="Description of Artificial Sequence: Synthetic polynucleotide"
atggctgctgacggttatcttccagattggctcgaggacaacctctctgagggcattcgcgagtggtgggacctgaaacctggagcccccaagcccaaggccaaccagcagaagcaggacgacggccggggtctggtgcttcctggctacaagtacctcggacccttcaacggactcgacaagggggagcccgtcaacgcggcggacgcagcggccctcgagcacgacaaggcctacgaccagcagctcaaagcgggtgacaatccgtacctgcggtataaccacgccgacgccgagtttcaggagcgtctacaagaagatacgtcttttgggggcaacctcgggcgagcagtcttccaggccaagaagcgggttctcgaacctctcggtccggttgaggaagctgctaagacggctcctggaaagaagagaccggtagaaccgccacctcagcgttcccccgactcctccacgggcatcggcaagaaaggccagcagcccgctaaaaagagactgaactttggtcagactggcgactcagagtcagtccccgaccctcaaccaatcggagaaccaccagcaggcccctctggtctgggatctggtacaatggctgcaggcggtggcgctccaatggcagacaataacgaaggcgccgacggagtgggtagttcctcaggaaattggcattgcgattccacatggctgggcgacagagtcatcaccaccagcacccgaacctgggccctgcccacctacaacaaccacctctacaagcaaatatccaatgggacatcgggaggaagcaccaacgacaacacctacttcggctacagcaccccctgggggtattttgacttcaacagattccactgccacttctcaccacgtgactggcagcgactcatcaacaacaactggggattccggccaaaaagactcagcttcaagctcttcaacatccaggtcaaggaggtcacgcagaatgaaggcaccaagaccgtcgccaataaccttaccagcacgattcaggtatttacggactcggaataccagctgccgtacgtcctcggctccgcgcaccagggctgcctgcctccgttcccggcggacgtcttcatgattccccagtacggctaccttacactgaacaatggaagtcaagccgtaggccgttcctccttctactgcctggaatattttccatctcaaatgctgcgaactggaaacaattttgaattcagctacaccttcgaggacgtgcctttccacagcagctacgcacacagccagagcttggaccgactgatgaatcctctcatcgaccagtacctgtactacttatccagaactcagtccacaggaggaactcaaggtacccagcaattgttattttctcaagctgggcctgcaaacatgtcggctcaggctaagaactggctacctggaccttgctaccggcagcagcgagtctctacgacactgtcgcaaaacaacaacagcaactttgcttggactggtgccaccaaatatcacctgaacggaagagactctttggtaaatcccggtgtcgccatggcaacccacaaggacgacgaggaacgcttcttcccgtcgagtggagtcctgatgtttggaaaacagggtgctggaagagacaatgtggactacagcagcgttatgctaaccagcgaagaagaaattaaaaccactaaccctgtagccacagaacaatacggtgtggtggctgacaacttgcagcaaaccaatacagggcctattgtgggaaatgtcaacagccaaggagccttacctggcatggtctggcagaaccgagacgtgtacctgcagggtcccatctgggccaagattcctcacacggacggcaacttccacccttcaccgctaatgggaggatttggactgaagcacccacctcctcagatcctgatcaagaacacgccggtacctgcggatcctccaacaacgttcagccaggcgaaattggcttccttcattacgcagtacagcaccggacaggtcagcgtggaaatcgagtgggagctgcagaaggagaacagcaaacgttggaacccagagattcagtacacttcaaactactacaaatctacaaatgtggactttgctgtcaatacagagggaacttattctgagcctcgccccattggtactcgttacctcacccgtaatctgtaa

SEQ ID NO: 270 - protein, 738 aa, Artificial Sequence
  source: /note="Description of Artificial Sequence: Synthetic polypeptide"
MAADGYLPDWLEDNLSEGIREWWDLKPGAPKPKANQQKQDDGRGLVLPGYKYLGPFNGLDKGEPVNAADAAALEHDKAYDQQLKAGDNPYLRYNHADAEFQERLQEDTSFGGNLGRAVFQAKKRVLEPLGLVEEAAKTAPGKKRPVEPSPQRSPDSSTGIGKKGQQPAKKRLNFGQTGDSESVPDPQPIGEPPAGPSGLGSGTMAAGGGAPMADNNEGADGVGSSSGNWHCDSTWLGDRVITTSTRTWALPTYNNHLYKQISNGTSGGSTNDNTYFGYSTPWGYFDFNRFHCHFSPRDWQRLINNNWGFRPKRLSFKLFNIQVKEVTQNEGTKTIANNLTSTIQVFTDSEYQLPYVLGSAHQGCLPPFPADVFMIPQYGYLTLNNGSQAVGRSSFYCLEYFPSQMLRTGNNFEFSYTFEDVPFHSSYAHSQSLDRLMNPLIDQYLYYLSRTQSTGGTQGTQQLLFSQAGPANMSAQAKNWLPGPCYRQQRVSTTLSQSNNSNFAWTGATKYHLNGRDSLVNPGVAMATHKDDEERFFPSSGVLMFGKQGAGRDNVDYSSVMLTSEEEIKTTNPVATEQYGVVADNLQQTNTGPIVGNVNSQGALPGMVWQNRDVYLQGPIWAKIPHTDGNFHPSPLMGGLGLKHPPPQILIKNTPVPADPPTTFSQAKLASFITQYSTGQVSVEIEWELQKENSKRWNPEIQYTSNYYKSTNVDFAVNTEGTYSEPRPIGTRYLTRNL

SEQ ID NO: 271 - DNA, 2217 bp, Artificial Sequence
  source: /note="Description of Artificial Sequence: Synthetic polynucleotide"
atggctgctgacggttatcttccagattggctcgaggacaacctctctgagggcattcgcgagtggtgggacctgaaacctggagcccccaagcccaaggccaaccagcagaagcaggacgacggccggggtctggtgcttcctggctacaagtacctcggacccttcaacggactcgacaagggggagcccgtcaacgcggcggacgcagcggccctcgagcacgacaaggcctacgaccagcagctcaaagcgggtgacaatccgtacctgcggtataaccacgccgacgccgagtttcaggagcgtctgcaagaagatacgtcttttgggggcaacctcgggcgagcagtcttccaggccaagaagcgggttctcgaacctctcggtctggttgaggaagcggctaagacggctcctggaaagaagagaccggtagaaccgtcacctcagcgttcccccgactcctccacgggcatcggcaagaaaggccagcagcccgctaaaaagagactgaactttggtcagactggcgactcagagtcagtccccgaccctcaaccaatcggagaaccaccagcaggcccctctggtctgggatctggtacaatggctgcaggcggtggcgctccaatggcagacaataacgaaggcgccgacggagtgggtagttcctcaggaaattggcattgcgattccacatggctgggcgacagagtcatcaccaccagcacccgaacctgggccctgcccacctacaacaaccacctctacaagcaaatatccaatgggacatcgggaggaagcaccaacgacaacacctacttcggctacagcaccccctgggggtattttgacttcaacagattccactgccacttctcaccacgtgactggcagcgactcatcaacaacaactggggattccggccaaaaagactcagcttcaagctcttcaacatccaggtcaaggaggtcacgcagaatgaaggcaccaagaccatcgccaataaccttaccagcacgattcaggtatttacggactcggaataccagctgccgtacgtcctcggctccgcgcaccagggctgcctgcctccgttcccggcggacgtcttcatgattccccagtacggctaccttacactgaacaatggaagtcaagccgtaggccgttcctccttctactgcctggaatattttccatctcaaatgctgcgaactggaaacaattttgaattcagctacaccttcgaggacgtgcctttccacagcagctacgcacacagccagagcttggaccgactgatgaatcctctcatcgaccagtacctgtactacttatccagaactcagtccacaggaggaactcaaggtacccagcaattgttattttctcaagctgggcctgcaaacatgtcggctcaggctaagaactggctacctggaccttgctaccggcagcagcgagtctctacgacactgtcgcaaagcaacaacagcaactttgcttggactggtgccaccaaatatcacctgaacggaagagactctttggtaaatcccggtgtcgccatggcaacccacaaggacgacgaggaacgcttcttcccgtcgagtggagtcctgatgtttggaaaacagggtgctggaagagacaatgtggactacagcagcgttatgctaaccagcgaagaagaaattaaaaccactaaccctgtagccacagaacaatacggtgtggtggctgacaacttgcagcaaaccaatacagggcctattgtgggaaatgtcaacagccaaggagccttacctggcatggtctggcagaaccgagacgtgtacctgcagggtcccatctgggccaagattcctcacacggacggcaacttccacccttcaccgctaatgggaggacttggactgaagcacccacctcctcagatcctgatcaagaacacgccggtacctgcggatcctccaacaacgttcagccaggcgaaattggcttccttcattacgcagtacagcaccggacaggtcagcgtggaaatcgagtgggagctgcagaaggagaacagcaaacgctggaacccagagattcagtacacttcaaactactacaaatctacaaatgtggactttgctgtcaatacagagggaacttattctgagcctcgccccattggtactcgttacctcacccgtaatctgtaa

SEQ ID NO: 272 - protein, 737 aa, Artificial Sequence
  source: /note="Description of Artificial Sequence: Synthetic polypeptide"
MAADGYLPDWLEDNLSEGIREWWDLKPGAPKPKANQQKQDDGRGLVLPGYKYLGPFNGLDKGEPVNAADAAALEHDKAYDQQLKAGDNPYPRYNHADAEFQERLQEDTPFGGNLGRAVFQAKKRVLEPLGLVEEAAKTAPGKKRPVEPSPQRSPDSSTGIGKKGQQPAKKRLNFGQTGDSESVPDPQPIGEPPAGPSGLGSGTMAAGGGAPMADNNEGADGVGNASGNWHCDSTWLGDRVITTSTRTWALPTYNNHLYKQISSASTGASNDNHYFGYSTPWGYFDFNRFHCHFSPRDWQRLINNNWGFRPKRLNFKLFNIQVKEVTTNDGVTTIANNLTSTVQVFSDSEYQLPYVLGSAHQGCLPPFPADVFMIPQYGYLTLNNGSQAVGRSSFYCLEYFPSQMLRTGNNFTFSYTFEEVPLHSSYAHSQSLDRLMNPLIVQYLYYLNRTQNQSGSAQNKDLLFSRGSPAGMSVQPKNWLPGPCYRQQRVSKTKTDNNNSNFTWTGASKYNLNGRESIINPGTAMASHKDDEDKFFPMSGVMIFGKESAGASNTALDNVMITDEEEIKATNPVATERFGTVAVNFQSSSTDPATGDVHAMGALPGMVWQDRDVYLQGPIWAKIPHTDGHFHPSPLMGGFGLKNPPPQILIKNTPVPANPPAEFSATKFASFITQYSTGQVSVEIEWELQKENSKRWNPEVQYTSNYAKSASVDFTVDNNGLYTEPRPIGTRYLTRPL

SEQ ID NO: 273 - protein, 737 aa, Artificial Sequence
  source: /note="Description of Artificial Sequence: Synthetic polypeptide"
MAADGYLPDWLEDNLSEGIREWWDLKPGAPKPKANQQKQDDGRGLVLPGYKYLGPFNGLDKGEPVNAADAAALEHDKAYDQQLKAGDNPYPRYNHADAEFQERLQEDTSFGGNLGRAVFQAKKRVLEPLGLVEEAAKTAPGKKRPVEPSPQRSPDSSTGIGKKGQQPAKKRLNFGQTGDSESVPDPQPIGEPPAGPSGLGSGTMAAGGGAPMADNNEGADGVGNASGNWHCDSTWLGDRVITTSTRTWALPTYNNHLYKQISSASTGASNDNHYFGYSTPWGYFDFNRFHCHFSPRDWQRLINNNWGFRPKRLNFKLFNIQVKEVTTNDGVTTIANNLTSTVQVFSDSEYQLPYVLGSAHQGCLPPFPADVFMIPQYGYLTLNNGSQAVGRSSFYCLEYFPSQMLRTGNNFTFSYTFEEVPLHSSYAHSQSLDRLMNPLIDQYLYYLNRTQNQSGSAQNKDLLFSRGSPAGMSVQPKNWLPGPCYRQQRVSKTKTDNNNSNFTWTGASKYNLNGRESIINPGTAMASHKDDEDKFFPMSGVMIFGKESAGASNTALDNVMITDEEEIKATNPVATERFGTVAVNFQSSSTDPATGDVHAMGALPGMVWQDRDVYLQGPIWAKIPHTDGHFHPSPLMGGFGLKNPPPQILIKNTPVPANPPAEFSATKFASFITQYSTGQVSVEIEWELQKENSKRWNPEVQYTSNYAKSASVDFTVDNNGLYTEPRPIGTRYLTRPL

SEQ ID NO: 274 - DNA, 2214 bp, Artificial Sequence
  source: /note="Description of Artificial Sequence: Synthetic polynucleotide"
atggctgctgacggttatcttccagattggctcgaggacaacctctctgagggcattcgcgagtggtgggacctgaaacctggagcccccaagcccaaggccaaccagcagaagcaggacgacggccggggtctggtgcttcctggctacaagtacctcggacccttcaacggactcgacaagggggagcccgtcaacgcggcggacgcagcggccctcgagcacgacaaggcctacgaccagcagctcaaagcgggtgacaatccgtacccgcggtataaccacgccgacgccgagtttcaggagcgtctgcaagaagatacgccttttgggggcaacctcgggcgagcagtcttccaggccaagaagcgggttctcgaacctctcggtctggttgaggaagctgctaagacggctcctggaaagaagagaccggtagaaccgtcacctcagcgttcccccgactcctccacgggcatcggcaagaaaggccagcagcccgctaaaaagagactgaactttggtcagactggcgactcagagtcagtccccgaccctcaaccaatcggagaaccaccagcaggcccctctggtctgggatctggtacaatggctgcaggcggtggcgctccaatggcagacaataacgaaggcgccgacggagtgggtaatgcctcaggaaattggcattgcgattccacatggctgggcgacagagtcatcaccaccagcacccgcacctgggccttgcccacctacaataaccacctctacaagcaaatctccagtgcttcaacgggggccagcaacgacaaccactacttcggctacagcaccccctgggggtattttgatttcaacagattccactgccacttttcaccacgtgactggcagcgactcatcaacaacaattggggattccggcccaagagactcaacttcaaactcttcaacatccaagtcaaggaggtcacgacgaatgatggcgtcacaaccatcgctaataaccttaccagcacggttcaagtcttctcggactcggagtaccagcttccgtacgtcctcggctctgcgcaccagggctgcctccctccgttcccggcggacgtgttcatgattccgcaatacggctacctgacgctcaacaatggcagccaagccgtgggacgttcatccttttactgcctggaatatttcccttctcagatgctgagaacgggcaacaactttaccttcagctacacctttgaggaagtgcctctccacagcagctacgcgcacagccagagcctggaccggctgatgaatcctctcatcgtccaatacctgtattacctgaacagaactcaaaatcagtccggaagtgcccaaaacaaggacttgctgttcagccgtgggtctccagctggcatgtctgttcagcccaaaaactggctacctggaccctgttatcggcagcagcgcgtttctaaaacaaaaacagacaacaacaacagcaattttacctggactggtgcttcaaaatataacctcaatgggcgtgaatccatcatcaaccctggcactgctatggcctcacacaaagacgacgaagacaagttctttcccatgagcggtgtcatgatttttggaaaagagagcgccggagcttcaaacactgcattggacaatgtcatgattacagacgaagaggaaattaaagccactaaccctgtggccaccgaaagatttgggaccgtggcagtcaatttccagagcagcagcacagaccctgcgaccggagatgtgcatgctatgggagcattacctggcatggtgtggcaagatagagacgtgtacctgcagggtcccatttgggccaaaattcctcacacagatggacactttcacccgtctcctcttatgggcggctttggactcaagaacccgcctcctcagatcctcatcaaaaacacgcctgttcctgcgaatcctccggcggagttttcagctacaaagtttgcttcattcatcacccaatactccacaggacaagtgagtgtggaaattgaatgggagctgcagaaagaaaacagcaagcgctggaatcccgaagtgcagtacacatccaattatgcaaaatctgccagcgttgattttactgtggacaacaatggactttatactgagcctcgccccattggcacccgttaccttacccgtcccctgtaa

SEQ ID NO: 275 - protein, 736 aa, Artificial Sequence
  source: /note="Description of Artificial Sequence: Synthetic polypeptide"
MAADGYLPDWLEDTLSEGIRQWWKLRPGPPPPKPAERHKDDSRGLVLPGYKYLGPFNGLDKGEPVNEADAAALEHDKAYDRQLDSGDNPYLKYNHADAEFQERLKEDTSFGGNLGRAVFQAKKRVLEPLGLVEEGAETAPGKKRPVEQSPQGPDSSSGIGKTGQQPAKKRLNFGQTGDSESVPDPQPLGEPPATPAAVGPTTMASGGGAPMADNNEGADGVGNASGNWHCDSTWLGDRVITTSTRTWALPTYNNHLYKQISSASTGASNDNHYFGYSTPWGYFDFNRFHCHFSPRDWQRLINNNWGFRPKRLNFKLFNIQVKEVTTNDGVTTIANNLTSTVQVFSDSEYQLPYVLGSAHQGCLPPFPADVFMIPQYGYLTLNNGSQAVGRSSFYCLEYFPSQMLRTGNNFTFSYTFEEVPFHSSYAHSQSLDRLMNPLIDQYLYYPNRTQNQSGSAQNKDLLFSRGSPAGMSVQPKNWLPGPCYRQQRVSKTKTDNNNSNFTWTGASKYNLNGRESIINPGTAMASHKDDEDKFFPMSGVMIFGKESAGASNTALDNVMITDEEEIKATNPVATERFGTVAVNFQSSSTDPATGDVHAMGALPGMVWQGRDVYLQGPIWAKIPHTDGHFHPSPLMGGFGLKNPPPQILIKNTPVPANPPAEFSATKFASFITQYSTGQVSVEIEWELQKENSKRWNPEVQYTSNYAKSANVDFTVDNNGLYTEPRPIGTRYLTRPL

SEQ ID NO: 276 - DNA, 2211 bp, Artificial Sequence
  source: /note="Description of Artificial Sequence: Synthetic polynucleotide"
atggctgccgatggttatcttccagattggctcgaggacactctctctgaaggaataagacagtggtggaagctcagacctggcccaccaccaccaaagcccgcagagcggcataaggacgacagcaggggtcttgtgcttcctgggtacaagtacctcggacccttcaacggactcgacaagggagagccggtcaacgaggcagacgccgcggccctcgagcacgacaaagcctacgaccggcagctcgacagcggagacaacccgtacctcaagtacaaccacgccgacgcggagtttcaggagcgccttaaagaagatacgtcttttgggggcaacctcgggcgagcagtcttccaggccaagaagcgggttctcgaacctctcggtctggttgaggaaggcgctgagacggctcctggaaagaaacgtccggtagagcagtcgccacaagggccagactcctcctcgggcatcggcaagacaggccagcagcccgctaaaaagagactcaattttggtcagactggcgactcagagtcagtccccgatccacaacctctcggagaacctccagcaacccccgctgctgtgggacctactacaatggcttcaggcggtggcgcaccaatggcagacaataacgaaggcgccgacggagtgggtaatgcctcaggaaattggcattgcgattccacatggctgggcgacagagtcatcaccaccagcacccgcacctgggccttgcccacctacaataaccacctctacaagcaaatctccagtgcttcaacgggggccagcaacgacaaccactacttcggctacagcaccccctgggggtattttgatttcaacagattccactgccacttttcaccacgtgactggcagcgactcatcaacaacaattggggattccggcccaagagactcaacttcaaactcttcaacatccaagtcaaggaggtcacgacgaatgatggcgtcacaaccatcgctaataaccttaccagcacggttcaagtcttctcggactcggagtaccagcttccgtacgtcctcggctctgcgcaccagggctgcctccctccgttcccggcggacgtgttcatgattccgcaatacggctacctgacgctcaacaatggcagccaagccgtgggacgttcatccttttactgcctggaatatttcccttctcagatgctgagaacgggcaacaactttaccttcagctacacctttgaggaagtgcctttccacagcagctacgcgcacagccagagcctggaccggctgatgaatcctctcatcgaccaatacctgtattacccgaacagaactcaaaatcagtccggaagtgcccaaaacaaggacttgctgtttagccgtgggtctccagctggcatgtctgttcagcccaaaaactggctacctggaccctgttatcggcagcagcgcgtttctaaaacaaaaacagacaacaacaacagcaattttacctggactggtgcttcaaaatataacctcaatgggcgtgaatccatcatcaaccctggcactgctatggcctcacacaaagacgacgaagacaagttctttcccatgagcggtgtcatgatttttggaaaagagagcgccggagcttcaaacactgcattggacaatgtcatgattacagacgaagaggaaattaaagccactaaccctgtggccaccgaaagatttgggaccgtggcagtcaatttccagagcagcagcacagaccctgcgaccggagatgtgcatgctatgggagcattacctggcatggtgtggcaaggtagagacgtgtacctgcagggtcccatttgggccaaaattcctcacacagatggacactttcacccgtctcctcttatgggcggctttggactcaagaacccgcctcctcagatcctcatcaaaaacacgcctgttcctgcgaatcctccggcggagttttcagctacaaagtttgcttcattcatcacccaatactccacaggacaagtgagtgtggaaattgaatgggagctgcagaaagaaaacagcaagcgctggaatcccgaagtgcagtacacatccaattatgcaaaatctgccaacgttgattttactgtggacaacaatggactttatactgagcctcgccccattggcacccgttaccttacccgtcccctgtaa

SEQ ID NO: 277 - protein, 736 aa, Artificial Sequence
  source: /note="Description of Artificial Sequence: Synthetic polypeptide"
MAADGYLPDWLEDTLSEGIRQWWKLRPGPPPPKPAERHKDDSRGLVLPGYKYLGPFNGLDKGEPVNEADAAALEHDKAYDRQLDSGDNPYLKYNHADAEFQERLKEDTSFGGNLGRAVFQAKKRVLEPLGLVEEGAKTAPGKKRPVEQSPQGPDSSSGIGKTGQQPAKKRLNFGQTGDSESVPDPQPLGEPPATPAAVGPTTMASGGGAPMADNNEGADGVGNASGNWHCDSTWLGDRVITTSTRTWALPTYNNHLYKQISSASTGASNDNHYFGYSTPWGYFDFNRFHCHFSPRDWQRLINNNWGFRPKRLNFKLFNIQVKEVTTNDGVTTIANNLTSTVQVFSDSEYQLPYVLGSAHQGCLPPFPADVFMIPQYGYLTLNNGSQAVGRSSFYCLEYFPSQMLRTGNNFTFSYTFEEVPFHSSYAHSQSLDRLMNPLIDQYLYYPNRTQNQSGSAQNKDLLFSRGSPAGMSVQPKNWLPGPCYRQQRVSKTKTDNNNSNFTWTGASKYNLNGRESIINPGTAMASHKDDEDKFFPMSGVMIFGKESAGASNTALDNVMITDEEEIKATNPVATERFGTVAVNFQSSSTDPATGDVHAMGALPGMVWQGRDVYLQGPIWAKIPHTDGHFHPSPLMGGFGLKNPPPQILIKNTPVPANPPAEFSATKFASFITQYSTGQVSVEIEWELQKENSKRWNPEVQYTSNYAKSANVDFTVDNNGLYTEPRPIGTRYLTRPL

SEQ ID NO: 278 - protein, 736 aa, Artificial Sequence
  source: /note="Description of Artificial Sequence: Synthetic polypeptide"
MAADGYLPDWLEDTLSEGIRQWWKLRPGPPPPKPAERHKDDSRGLVLPGYKYLGPFNGLDKGEPVNEADAAALEHDKAYDRQLDSGDNPYLKYNHADAEFQERLKEDTSFGGNLGRAVFQAKKRVLEPLGLVEEGAKTAPGKKRPVEQSPQGPDSSSGIGKTGQQPAKKRLNFGQTGDSESVPDPQPLGEPPATPAAVGPTTMASGGGAPMADNNEGADGVGNASGNWHCDSTWLGDRVITTSTRTWALPTYNNHLYKQISSASTGASNDNHYFGYSTPWGYFDFNRFHCHFSPRDWQRLINNNWGFRPKRLNFKLFNIQVKEVTTNDGVTTIANNLTSTVQVFSDSEYQLPYVLGSAHQGCLPPFPADVFMIPQYGYLTLNNGSQAVGRSSFYCLEYFPSQMLRTGNNFTFSYTFEEVPFHSSYAHSQSLDRLMNPLIDQYLYYLNRTQNQSGSAQNKDLLFSRGSPAGMSVQPKNWLPGPCYRQQRVSKTKTDNNNSNFTWTGASKYNLNGRESIINPGTAMASHKDDEDKFFPMSGVMIFGKESAGASNTALDNVMITDEEEIKATNPVATERFGTVAVNFQSSSTDPATGDVHAMGALPGMVWQGRDVYLQGPIWAKIPHTDGHFHPSPLMGGFGLKNPPPQILIKNTPVPANPPAEFSATKFASFITQYSTGQVSVEIEWELQKENSKRWNPEVQYTSNYAKSANVDFTVDNNGLYTEPRPIGTRYLTRPL

SEQ ID NO: 279 - protein, 736 aa, Artificial Sequence
  source: /note="Description of Artificial Sequence: Synthetic polypeptide"
MAADGYLPDWLEDTLSEGIRQWWKLRPGPPPPKPAERHKDDSRGLVLPGYKYLGPFNGLDKGEPVNEADAAALEHDKAYDRQLDSGDNPYLKYNHADAEFQERLKEDTSFGGNLGRAVFQAKKRVLEPLGLVEEGAKTAPGKKRPVEQSPQGPDSSSGIGKTGQQPAKKRLNFGQTGDSESVPDPQPLGEPPATPAAVGPTTMASGGGAPMADNNEGADGVGNASGNWHCDSTWLGDRVITTSTRTWALPTYNNHLYKQISSASTGASNDNHYFGYSTPWGYFDFNRFHCHFSPRDWQRLINNNWGFRPKRLNFKLFNIQVKEVTTNDGVTTIANNLTSTVQVFSDSEYQLPYVLGSAHQGCLPPFPADVFMIPQYGYLTLNNGSQAVGRSSFYCLEYFPSQMLRTGNNFTFSYTFEEVPFHSSYAHSQSLDRLMNPLIDQYLYYLNRTQNQSGSAQNKDLLFSRGSPAGMSVQPKNWLPGPCYRQQRVSKTKTDNNNSNFTWTGASKYNLNGRESIINPGTAMASHKDDEDKFFPMSGVMIFGKESAGASNTALDNVMITDEEEIKATNPVATERFGTVAVNFQSSSTDPATGDVHAMGALPGMVWQDRDVYLQGPIWAKIPHTDGHFHPSPLMGGFGLKNPPPQILIKNTPVPANPPAEFSATKFASFITQYSTGQVSVEIEWELQKENSKRWNPEVQYTSNYAKSANVDFTVDNNGLYTEPRPIGTRYLTRPL

SEQ ID NO: 280 - DNA, 2208 bp, Artificial Sequence
  source: /note="Description of Artificial Sequence: Synthetic polynucleotide"
atggctgccgatggctatcttccagattggctcgaggacactctctctgaaggaataagacagtggtggaagctcaaacctggcccaccaccaccaaagcccgcagagcggcatagggacgacagcaggggtcttgtgcttcctgggtacaagtacctcggacccttcaacggactcgacaagggagagccggtcaacgaggcagacgccgcggccctcgagcacgacaaagcctacgaccggcagctcgacagcggagacaacccgtacctcaagtacaaccacgccgacgcggagtttcaggagcgccttaaagaagatacgtcttttgggggcaacctcggacgagcagtcttccaggcgaaaaagagggttcttgaacctctgggcctggttgaggaacctgttaagacggctccgggaaaaaagaggccggtagagcactctcctgtggagccagactcctcctcgggaaccggaaaggcgggccagcagcctgcaagaaaaagattgaattttggtcagactggagacgcagactcagtacctgacccccagcctctcggacagccaccagcagccccctctggtctgggaactaatacgatggctacaggcagtggcgcaccaatggcagacaataacgagggcgccgacggagtgggtaattcctcgggaaattggcattgcgattccacatggatgggcgacagagtcatcaccaccagcacccgaacctgggccctgcccacctacaacaaccacctctacaaacaaatttccagccaatcaggagcctcgaacgacaatcactactttggctacagcaccccttgggggtattttgacttcaacagattccactgccacttttcaccacgtgactggcaaagactcatcaacaacaactggggattccgacccaagagactcaacttcaagctctttaacattcaagtcaaagaggtcacgcagaatgacggtacgacgacgattgccaataaccttaccagcacggttcaggtgtttactgactcggggtaccagctcccgtacgtcctcggctcggcgcatcaaggatgcctcccgccgttcccagcagacgtcttcatggtgccacagtatggataccccaccctgaacaacgggagtcaggcagtaggacgctcttcattttactgcctggagtactttccttctcagatgctgcgtaccggaaacaactttaccttcagctacacttttgaggacgttcctttccacagcagctacgctcacagccagagtctggaccgtctcatgaatcctctcatcgaccagtacctgtattacttgagcacaacaaacactccaagtggaaccaccacgcagtcaaggcttcagttttctcaggccggagcgagtgacattcgggaccagtctaggaactggcttcctggaccctgttaccgccagcagcgagtatcaaagacatctgcggataacaacaacagtgaatactcgtggactggagctaccaagtaccacctcaatggcagagactctctggtgaatccgggcccggccgtggcaagccacaaggacgatgaagaaaagttttttcctcagagcggggttctcatctttgggaagcaaggctcagagaaaacaaatgtggacattgaaaaggtcatgattacagacgaagaggaaatcaggacaaccaatcccgtggctacggagcagtatggttctgtatctaccaacctccagagaggcaacagacaagcagctaccgcagatgtcaacacacaaggcgttcttccaggcatggtctggcaggacagagatgtgtaccttcaggggcccatctgggcaaagattccacacacggacggacattttcacccctctcccctcatgggtggattcggacttaaacaccctcctccacagattctcatcaagaacaccccggtacctgcgaatccttcgaccaccttcagtgcggcaaagtttgcttccttcatcacacagtactccacgggacaggtcagcgtggagatcgagtgggagctgcagaaggaaaacagcaaacgctggaatcccgaaattcagtacacttccaactacaacaagtctgttaatgtggactttactgtggacactaatggcgtgtattcagagcctcgccccattggcaccagatacctgactcgtaatctgtaa

SEQ ID NO: 281 - protein, 735 aa, Artificial Sequence
  source: /note="Description of Artificial Sequence: Synthetic polypeptide"
MAADGYLPDWLEDTLSEGIRQWWKLKPGPPPPKPAERHRDDSRGLVLPGYKYLGPFNGLDKGEPVNEADAAALEHDKAYDRQLDSGDNPYLKYNHADAEFQERLKEDTSFGGNLGRAVFQAKKRVLEPLGLVEEPVKTAPGKKRPVEHSPVEPDSSSGTGKAGQQPARKRLNFGQTGDADSVPDPQPLGQPPAAPSGLGTNTMATGSGAPMADNNEGADGVGNSSGNWHCDSTWMGDRVITTSTRTWALPTYNNHLYKQISSQSGASNDNHYFGYSTPWGYFDFNRFHCHFSPRDWQRLINNNWGFRPKRLNFKLFNIQVKEVTQNDGTTTIANNLTSTVQVFTDSGYQLPYVLGSAHQGCLPPFPADVFMVPQYGYPTLNNGSQAVGRSSFYCLEYFPSQMLRTGNNFTFSYTFEDVPFHSSYAHSQSLDRLMNPLIDQYLYYLSTTNTPSGTTTQSRLQFSQAGASDIRDQSRNWLPGPCYRQQRVSKTSADNNNSEYSWTGATKYHLNGRDSLVNPGPAVASHKDDEEKFFPQSGVLIFGKQGSEKTNVDIEKVMITDEEEIRTTNPVATEQYGSVSTNLQRGNRQAATADVNTQGVLPGMVWQDRDVYLQGPIWAKIPHTDGHFHPSPLMGGFGLKHPPPQILIKNTPVPANPSTTFSAAKFASFITQYSTGQVSVEIEWELQKENSKRWNPEIQYTSNYNKSVNVDFTVDTNGVYSEPRPIGTRYLTRNL

SEQ ID NO: 282 - DNA, 2211 bp, Artificial Sequence
  source: /note="Description of Artificial Sequence: Synthetic polynucleotide"
atggctgccgacggttatcttccagattggctcgaggacactctctctgaaggaataagacagtggtggaagctcaaacctggcccaccaccaccaaagcccgcagagcggcataaggacgacagcaggggtcttgtgcttcctgggtacaagtacctcggacccttcaacggactcgacaagggagagccggtcaacgaggcagacgccgcggccctcgagcacgacaaagcctacgaccggcagctcgacagcggagacaacccgtacctcaagtacaaccacgccgacgcggagtttcaggagcgccttaaagaagatacgtcttttgggggcaacctcgggcgggcagtcttccaggccaagaagcgggttctcgaacctctcggtctggttgaggaaggcgctaagacggctcctggaaagaaacgtccggtagagcagtcgccacaagagccagactccccctcgggcatcggcaagacaggccagcagcccgctaaaaagagactcaattttggtcagactggcgactcagagtcagtccccgatccacaacctctcggagaacctccagcaacccccgctgctgtgggacctactacaatggcttcaggcggtggcgcaccaatggcagacaataacgaaggcgccgacggagtgggtaatgcctcaggaaattggcactgcgattccacatggctgggcgacagagtcatcaccaccagcacccgcacctgggccttgcccacctacaataaccacctctacaagcaaatctccagtgcttcaacgggggccagcaacgacaaccactacttcggctacagcaccccctgggggtattttgatttcaacagattccactgccacttttcaccacgtgactggcagcgactcatcaacaacaattggggattccggcccaagagactcaacttcaaactcttcaacatccaagtcaaggaggtcacgacgaatgatggcgtcacaaccatcgctaataaccttaccagcacggttcaagtcttctcggactcggagtaccagcttccgtacgtcctcggctctgcgcaccagggccgcctccctccgttcccggcggacgtgttcatgattccgcaatacggctacctgacgctcaacaatggcagccaagccgtgggacgttcatcctcttactgcctggaatatttcccttctcagatgctgagaacgggcaacaactttaccttcagctacacctttgaggaagtgcctctccacagcagctgcgcgcacagccagagcctggaccggctgatgaatcctctcatcgaccaatacctgtattacctgaacagaactcaaaatcagtccggaagtgcccaaaacagggacttgctgttcagccgtgggtctccagctggcatgtctgttcagcccaaaaactggctacctggaccctgttatcggcagcagcgcgtttctaaaacaaaaacagacaacaacaacagcaattttacctggactggtgcttcaaaatataacctcaatgggcgtgaatccatcatcaaccctggcactgctatggcctcacacaaagacgacgaagacaagttctttcccatgagcggtgtcatgatttttggaaaagagagcgccggagcttcaaacactgcattggacaatgtcatgattacagacgaagaggaaattaaagccactaaccctgtggccaccgaaagatttgggaccgtggcagtcaatttccagagcagcagcacagaccctgcgaccggagatgtgcatgctatgggagcattacctggcatggtgtggcaagatagagacgtgtacctgcagggtcccatttgggccaaaattcctcacacagatggacactttcacccgtctcctcttatgggcggctttggactcaagaacccgcctcctcagatcctcatcaaaaacacgcctgttcctgcgaatcctccggcggagttttcagctacaaagtttgcttcattcatcacccaatactccgcaggacaagtgagtgtggaaattgaatgggagctgcagaaagaaaacagcaagcgctggaatcccgaagtgcagtacacatccaattatgcaaaatctgccaacgttgattttactgtggacaacaatggactttatactgagcctcgccccattggcacccgttaccttacccgtcccctgtaa

SEQ ID NO: 283 - protein, 736 aa, Artificial Sequence
  source: /note="Description of Artificial Sequence: Synthetic polypeptide"
MAADGYLPDWLEDTLSEGIRQWWKLKPGPPPPKPAERHKDDSRGLVLPGYKYLGPFNGLDKGEPVNEADAAALEHDKAYDRQLDSGDNPYLKYNHADAEFQERLKEDTSFGGNLGRAVFQAKKRVLEPLGLVEEGAKTAPGKKRPVEQSPQEPDSPSGIGKTGQQPAKKRLNFGQTGDSESVPDPQPLGEPPATPAAVGPTTMASGGGAPMADNNEGADGVGNASGNWHCDSTWLGDRVITTSTRTWALPTYNNHLYKQISSASTGASNDNHYFGYSTPWGYFDFNRFHCHFSPRDWQRLINNNWGFRPKRLNFKLFNIQVKEVTTNDGVTTIANNLTSTVQVFSDSEYQLPYVLGSAHQGRLPPFPADVFMIPQYGYLTLNNGSQAVGRSSSYCLEYFPSQMLRTGNNFTFSYTFEEVPLHSSCAHSQSLDRLMNPLIDQYLYYLNRTQNQSGSAQNRDLLFSRGSPAGMSVQPKNWLPGPCYRQQRVSKTKTDNNNSNFTWTGASKYNLNGRESIINPGTAMASHKDDEDKFFPMSGVMIFGKESAGASNTALDNVMITDEEEIKATNPVATERFGTVAVNFQSSSTDPATGDVHAMGALPGMVWQDRDVYLQGPIWAKIPHTDGHFHPSPLMGGFGLKNPPPQILIKNTPVPANPPAEFSATKFASFITQYSAGQVSVEIEWELQKENSKRWNPEVQYTSNYAKSANVDFTVDNNGLYTEPRPIGTRYLTRPL

SEQ ID NO: 284 - protein, 736 aa, Artificial Sequence
  source: /note="Description of Artificial Sequence: Synthetic polypeptide"
MAADGYLPDWLEDTLSEGIRQWWKLKPGPPPPKPAERHKDDSRGLVLPGYKYLGPFNGLDKGEPVNEADAAALEHDKAYDRQLDSGDNPYLKYNHADAEFQERLKEDTSFGGNLGRAVFQAKKRVLEPLGLVEEGAKTAPGKKRPVEQSPQEPDSSSGIGKTGQQPAKKRLNFGQTGDSESVPDPQPLGEPPATPAAVGPTTMASGGGAPMADNNEGADGVGNASGNWHCDSTWLGDRVITTSTRTWALPTYNNHLYKQISSASTGASNDNHYFGYSTPWGYFDFNRFHCHFSPRDWQRLINNNWGFRPKRLNFKLFNIQVKEVTTNDGVTTIANNLTSTVQVFSDSEYQLPYVLGSAHQGCLPPFPADVFMIPQYGYLTLNNGSQAVGRSSFYCLEYFPSQMLRTGNNFTFSYTFEEVPLHSSCAHSQSLDRLMNPLIDQYLYYLNRTQNQSGSAQNRDLLFSRGSPAGMSVQPKNWLPGPCYRQQRVSKTKTDNNNSNFTWTGASKYNLNGRESIINPGTAMASHKDDEDKFFPMSGVMIFGKESAGASNTALDNVMITDEEEIKATNPVATERFGTVAVNFQSSSTDPATGDVHAMGALPGMVWQDRDVYLQGPIWAKIPHTDGHFHPSPLMGGFGLKNPPPQILIKNTPVPANPPAEFSATKFASFITQYSTGQVSVEIEWELQKENSKRWNPEVQYTSNYAKSANVDFTVDNNGLYTEPRPIGTRYLTRPL

SEQ ID NO: 285 - DNA, 2208 bp, Artificial Sequence
  source: /note="Description of Artificial Sequence: Synthetic polynucleotide"
atggctgccgatggctatcttccagattggctcgaggacactctctctgaaggaataagacagtggtggaagctcaaacctggcccaccaccaccaaagcccgcagagcggcatagggacgacagcaggggtcttgtgcttcctgggtacaagtacctcggacccttcaacggactcgacaagggagagccggtcaacgaggcagacgccgcggccctcgagcacgacaaagcctacgaccggcagctcgacagcggagacaacccgtacctcaagtacaaccacgccgacgcggagtttcaggagcgccttaaagaagatacgtcttttgggggcaacctcggacgagcagtcttccaggcgaaaaagagggttcttgaacctctgggcctggttggggaacctgttaagacggctccgggaaaaaagaggccggtagagcactctcctgtggagccagactcctcctcgggaaccggaaaggcgggccagcagcctgcaagaaaaagattgaattttggtcagactggagacgcagactcagtacctgacccccagcctctcggacagccaccagcagccccctctggtctgggaactaatacgatggctacaggcagtggcgcaccaatggcagacaataacgagggcgccgacggagtgggtaattcctcgggaaattggcattgcgattccacatggatgggcgacagagtcatcaccaccagcacccgaacctgggccctgcccacctacaacaaccacctctacaaacaaatttccagccaatcaggagcctcgaacgacagtcactactttggctacagcaccccttgggggtattttgacttcaacagattccactgccacttttcaccacgtgactggcaaagactcatcaacaacaactggggattccgacccaagagactcaacttcaagctctttaacattcaagtcaaagaggtcacgcagaatgacggtacgacgacgattgccaataaccttaccagcacggttcaggtgtttactgactcggagtaccagctcccgtacgtcctcggctcggcgcatcaaggatgcctcccgccgttcccagcagacgtcttcatggtgccacagtatggatacctcaccctgaacaacgggagtcaggcagtaggacgctcttcattttactgcctggagtactttccttctcagatgctgcgtaccggaaacaactttaccttcagctacacttttgaggacgttcctttccacagcagctacgctcacagccagagtctggaccgtctcatgaatcctctcatcgaccagtacctgtattacttgagcacaacaaacactccaagtggaaccaccacgcagtcaaggctccagttttctcaggccggagcgagtgacattcgggaccagtctaggaactggcttcctggaccctgttaccgccagcagcgagtatcaaagacatctgcggataacaacaacagtgaatactcgtggactggagctaccaagtaccacctcaatggcagagactctctggtgaatccgggcccggccatggcaagccacaaggacaatgaagaaaagttttttcctcagagcggggttctcatctttgggaagcaaggctcagagaaaacaaatgtggacattgaaaaggtcatgattacagacgaagaggaaatcaggacaaccaatcccgtggctacggagcagtatggttctgtatctaccaacctccagagaggcaacagacaagcagctaccgcagatgtcaacacacaaggcgttcttccaggcatggtctggcaggacagagatgtgtaccttcaggggcccatctgggcaaagattccacacacggacggacattttcacccctctcccctcatgggtggattcggacttaaacaccctcctccacagattctcatcaagaacaccccggtacctgcgaatccttcgaccaccttcagtgcggcaaagtttgcttccttcatcacacagtactccacgggacaggtcagcgtggagatcgagtgggagctgcagaaggaaaacagcaaacgctggaatcccgaaattcagtacacttccaactacaacaagtctgttaatgtggactttactgtggacactaatggcgtgtattcagagcctcgccccattggcaccagatacctgactcgtaatctgtaa

SEQ ID NO: 286 - protein, 735 aa, Artificial Sequence
  source: /note="Description of Artificial Sequence: Synthetic polypeptide"
MAADGYLPDWLEDTLSEGIRQWWKLKPGPPPPKPAERHRDDSRGLVLPGYKYLGPFNGLDKGEPVNEADAAALEHDKAYDRQLDSGDNPYLKYNHADAEFQERLKEDTSFGGNLGRAVFQAKKRVLEPLGLVGEPVKTAPGKKRPVEHSPVEPDSSSGTGKAGQQPARKRLNFGQTGDADSVPDPQPLGQPPAAPSGLGTNTMATGSGAPMADNNEGADGVGNSSGNWHCDSTWMGDRVITTSTRTWALPTYNNHLYKQISSQSGASNDSHYFGYSTPWGYFDFNRFHCHFSPRDWQRLINNNWGFRPKRLNFKLFNIQVKEVTQNDGTTTIANNLTSTVQVFTDSEYQLPYVLGSAHQGCLPPFPADVFMVPQYGYLTLNNGSQAVGRSSFYCLEYFPSQMLRTGNNFTFSYTFEDVPFHSSYAHSQSLDRLMNPLIDQYLYYLSTTNTPSGTTTQSRLQFSQAGASDIRDQSRNWLPGPCYRQQRVSKTSADNNNSEYSWTGATKYHLNGRDSLVNPGPAMASHKDNEEKFFPQSGVLIFGKQGSEKTNVDIEKVMITDEEEIRTTNPVATEQYGSVSTNLQRGNRQAATADVNTQGVLPGMVWQDRDVYLQGPIWAKIPHTDGHFHPSPLMGGFGLKHPPPQILIKNTPVPANPSTTFSAAKFASFITQYSTGQVSVEIEWELQKENSKRWNPEIQYTSNYNKSVNVDFTVDTNGVYSEPRPIGTRYLTRNL

SEQ ID NO: 287 - protein, 737 aa, Artificial Sequence
  source: /note="Description of Artificial Sequence: Synthetic polypeptide"
RMAADGYLPDWLEDNLSEGIREWWDLKPGAPKPKANQQKQDDGRGLVLPGYKYLGPFNGLDKGEPVNAADAAALEHDKAYDQQLKAGDNPYLRYNHADAEFQERLQEDTSFGGNLGRAVFQAKKRVLEPLGLVEEGAKTAPGKKRPVEQSPQEPDSSSGIGKTGQQPAKKRLNFGQTGDSESVPDPQPLGEPPATPAAVGPTTMASGGGAPMADNNEGADGVGNASGNWHCDSTWLGDRVITTSTRTWALPTYNNHLYKQISSTSTGASNDNHYFGYGTPWGYFDFNRFHCHFSPRDWQRLINNNWGFRPKRLNFKLFNIQVEEVTTNDGVTTIANNLTSTVQVFSDSEYQLPYVLGSAHQGCLPPFPADVFMIPQYGYLTLNNGSQAVGRSSFYCLEYFPSQMLRTGNNFTFSYTFEEVPFHSSYAHSQSLDRLMNPLIDQYLYYLNRTQNQSGSAQNKDLLFSRGSPAGMSVQPKNWLPGPCYRQQRVSKTKTDNNNSNFTWTGASKYNLNGRESIINPGTAVASHKDDEDKFFPMSGVMIFGKESAGASSTALDNVMITDEEEIKATNPVATERFGTVAVNFQSSSTDPATGDVHAMGALPGMVWQDRDVYLQGPIWAKIPHTDGHFHPSPLMGGFGLKNPPPQILIKNTPVPANPPAEFSATKFASFITQYSTGQVSVEIEWELQKENSKRWNPEVQYTSNYAKSANVDFTVDNNGLYTEPRPIGTRYLTRPL

SEQ ID NO: 288 - protein, 736 aa, Artificial Sequence
  source: /note="Description of Artificial Sequence: Synthetic polypeptide"
MAADGYLPDWLEDNLSEGIREWWDLKPGAPKPKANQQKQDDGRGLVLPGYKYLGPFNGLDKGEPVNAADAAALEHDKAYDQQLKAGDNPYLRYNHADAEFQERLQEDTSFGGNLGRAVFQAKKRVLEPLGLVEEGAKTAPGKKRPVEQSPQEPDSSSGIGKTGQQPAKKRLNFGQTGDSESVPDPQPLGEPPATPAAVGPTTMASGGGAPMADNNEGADGVGNASGNWHCDSTWLGDRVITTSTRTWALPTYNNHLYKQISSTSTGASNDNHYFGYGTPWGYFDFNRFHCHFSPRDWQRLINNNWGFRPKRLNFKLFNIQVEEVTTNDGVTTIANNLTSTVQVFSDSEYQLPYVLGSAHQGCLPPFPADVFMIPQYGYLTLNNGSQAVGRSSFYCLEYFPSQMLRTGNNFTFSYTFEEVPFHSSYAHSQSLDRLMNPLIDQYLYYLNRTQNQSGSAQNKDLLFSRGSPAGMSVQPKNWLPGPCYRQQRVSKTKTDNNNSNFTWTGASKYNLNGRESIINPGTAVASHKDDEDKFFPMSGVMIFGKESAGASSTALDNVMITDEEEIKATNPVATERFGTVAVNFQSSSTDPATGDVHAMGALPGMVWQDRDVYLQGPIWAKIPHTDGHFHPSPLMGGFGLKNPPPQILIKNTPVPANPPAEFSATKFASFITQYSTGQVSVEIEWELQKENSKRWNPEVQYTSNYAKSANVDFTVDNNGLYTEPRPIGTRYLTRPL

SEQ ID NO: 289 - DNA, 2211 bp, Artificial Sequence
  source: /note="Description of Artificial Sequence: Synthetic polynucleotide"
atggctgccgatggttatcttccagattggctcgaggacaacctctctgagggcattcgcgagtggtgggacttgaaacctggagccccgaagcccaaagccaaccagcaaaagcaggacgacggccggggtctggtgcttcctggctacaagtacctcggacccttcaacggactcgacaagggggagcccgtcaacgcggcggacgcagcggccctcgagcacgacaaggcctacgaccagcagctcaaagcgggtgacaatccgtacctgcggtataaccacgccgacgccgagtttcaggagcgtctgcaagaagatacgtcttttgggggcaacctcgggcgagcagtcttccaggccaagaagcgggttctcgaacctctcggtctggttgaggaaggcgctaagacggctcctggaaagaaacgtccggtagagcagtcgccacaagagccagactcctcctcgggcatcggcaagacaggccagcagcccgctaaaaagagactcaattttggccagactggcgactcagagtcagtccccgatccacaacctctcggagaacctccagcaacccccgctgctgtgggacctactacaatggcttcaggcggtggcgcaccaatggcagacaataacgaaggcgccgacggagtgggtaatgcctcaggaaattggcattgcgattccacatggctgggcgacagagtcatcaccaccagcacccgcacctgggccttgcccacctacaataaccacctctacaagcaaatctccagtacttcaacgggggccagcaacgacaaccactacttcggctacggcaccccctgggggtattttgatttcaacagattccactgccacttttcaccacgtgactggcagcgactcatcaacaacaattggggattccggcccaagagactcaacttcaaactcttcaacatccaagtcgaggaggtcacgacgaatgatggcgtcacaaccatcgctaataaccttaccagcacggttcaagtcttctcggactcggagtaccagcttccgtacgtcctcggctctgcgcaccagggctgcctccctccgttcccggcggacgtgttcatgattccgcaatacggctacctgacgctcaacaatggcagccaagccgtgggacgttcatccttttactgcctggaatatttcccttctcagatgctgagaacgggcaacaactttaccttcagctacacctttgaggaagtgcctttccacagcagctacgcgcacagccagagcctggaccggctgatgaatcctctcatcgaccaatacctgtattacctgaacagaacacaaaatcagtccggaagtgcccaaaacaaggacttgctgtttagccgtgggtctccagctggcatgtctgttcagcccaaaaactggctacctggaccctgttatcggcagcagcgcgtttctaaaacaaaaacagacaacaacaacagcaattttacctggactggtgcttcaaaatataacctcaatgggcgtgaatccatcatcaaccctggcaccgctgtggcctcacacaaagacgacgaagacaagttctttcccatgagcggtgtcatgatttttggaaaagagagcgccggagcttcaagcactgcattggacaatgtcatgattacagacgaagaggaaattaaagccactaaccctgtggccaccgaaagatttgggaccgtggcagtcaatttccagagcagcagcacagaccctgcgaccggagatgtgcatgctatgggagcattacctggcatggtgtggcaagatagagacgtgtacctgcagggtcccatttgggccaaaattcctcacacagatggacactttcacccgtctcctcttatgggcggctttggactcaagaacccgcctcctcagatcctcatcaaaaacacgcctgttcctgcgaatcctccggcggagttttcagctacaaagtttgcttcattcatcacccaatactccacaggacaagtgagtgtggaaattgaatgggagctgcagaaagaaaacagcaagcgctggaatcccgaagtgcagtacacatccaattatgcaaaatctgccaacgttgattttactgtggacaacaatggactttatactgagcctcgccccattggcacccgttaccttacccgtcccctgtaa

SEQ ID NO: 290 - protein, 737 aa, Artificial Sequence
  source: /note="Description of Artificial Sequence: Synthetic polypeptide"
RMAADGYLPDWLEDNLSEGIREWWDLKPGAPKPKANQQKQDDGRGLVLPGYKYLGPFNGLDKGEPVNAADAAALEHDKAYDQQLKAGDNPYLRYNHADAEFQERLQEDTSFGGNLGRAVFQAKKRVLEPLGLVEEGAKTAPGKKRPVEQSPQEPDSSSGIGKTGQQPAKKRLNFGQTGDSESVPDPQPLGEPPATPAAVGPTTMASGGGAPMADNNEGADGVGNASGNWHCDSTWLGDRVITTSTRTWALPTYNNHLYKQISSTSTGASNDNHYFGYSTPWGYFDFNRFHCHFSPRDWQRLINNNWGFRPKRLNFKLFNIQVEEVTTNDGVTTIANNLTSTVQVFSDSEYQLPYVLGSAHQGCLPPFPADVFMIPQYGYLTLNNGSQAVGRSSFYCLEYFPSQMLRTGNNFTFSYTFEEVPFHSSYAHSQSLDRLMNPLIDQYLYYLNRTQNQSGSAQNKDLLFSRGSPAGMSVQPKNWLPGPCYRQQRVSKTKTDNNNSNFTWTGASKYNLNGRESIINPGTAVASHKDDEDKFFPMSGVMIFGKESAGASSTALDNVMITDEEEIKATNPVATERFGTVAVNFQSSSTDPATGDVHAMGALPGMVWQDRDVYLQGPIWAKIPHTDGHFHPSPLMGGFGLKNPPPQILIKNTPVPANPPAEFSATKFASFITQYSTGQVSVEIEWELQKENSKRWNPEVQYTSNYAKSANVDFTVDNNGLYTEPRPIGTRYLTRPL

SEQ ID NO: 291 - protein, 737 aa, Artificial Sequence
  source: /note="Description of Artificial Sequence: Synthetic polypeptide"
RMAADGYLPDWLEDNLSEGIREWWDLKPGAPKPKANQQKQDDGRGLVLPGYKYLGPFNGLDKGEPVNAADAAALEHDKAYDQQLKAGDNPYLRYNHADAEFQERLQEDTSFGGNLGRAVFQAKKRVLEPLGLVEEGAKTAPGKKRPVEQSPQEPDSSSGIGKTGQQPAKKRLNFGQTGDSESVPDPQPLGEPPATPAAVGPTTMASGGGAPMADNNEGADGVGNASGNWHCDSTWLGDRVITTSTRTWALPTYNNHLYKQISSTSTGASNDNHYFGYSTPWGYFDFNRFHCHFSPRDWQRLINNNWGFRPKRLNFKLFNIQVKEVTTNDGVTTIANNLTSTVQVFSDSEYQLPYVLGSAHQGCLPPFPADVFMIPQYGYLTLNNGSQAVGRSSFYCLEYFPSQMLRTGNNFTFSYTFEEVPFHSSYAHSQSLDRLMNPLIDQYLYYLNRTQNQSGSAQNKDLLFSRGSPAGMSVQPKNWLPGPCYRQQRVSKTKTDNNNSNFTWTGASKYNLNGRESIINPGTAVASHKDDEDKFFPMSGVMIFGKESAGASSTALDNVMITDEEEIKATNPVATERFGTVAVNFQSSSTDPATGDVHAMGALPGMVWQDRDVYLQGPIWAKIPHTDGHFHPSPLMGGFGLKNPPPQILIKNTPVPANPPAEFSATKFASFITQYSTGQVSVEIEWELQKENSKRWNPEVQYTSNYAKSANVDFTVDNNGLYTEPRPIGTRYLTRPL

SEQ ID NO: 292 - protein, 737 aa, Artificial Sequence
  source: /note="Description of Artificial Sequence: Synthetic polypeptide"
RMAADGYLPDWLEDNLSEGIREWWDLKPGAPKPKANQQKQDDGRGLVLPGYKYLGPFNGLDKGEPVNAADAAALEHDKAYDQQLKAGDNPYLRYNHADAEFQERLQEDTSFGGNLGRAVFQAKKRVLEPLGLVEEGAKTAPGKKRPVEQSPQEPDSSSGIGKTGQQPAKKRLNFGQTGDSESVPDPQPLGEPPATPAAVGPTTMASGGGAPMADNNEGADGVGNASGNWHCDSTWLGDRVITTSTRTWALPTYNNHLYKQISSTSTGASNDNHYFGYSTPWGYFDFNRFHCHFSPRDWQRLINNNWGFRPKRLNFKLFNIQVKEVTTNDGVTTIANNLTSTVQVFSDSEYQLPYVLGSAHQGCLPPFPADVFMIPQYGYLTLNNGSQAVGRSSFYCLEYFPSQMLRTGNNFTFSYTFEEVPFHSSYAHSQSLDRLMNPLIDQYLYYLNRTQNQSGSAQNKDLLFSRGSPAGMSVQPKNWLPGPCYRQQRVSKTKTDNNNSNFTWTGASKYNLNGRESIINPGTAVASHKDDEDKFFPMSGVMIFGKESAGANSTALDNVMITDEEEIKATNPVATERFGTVAVNFQSSSTDPATGDVHAMGALPGMVWQDRDVYLQGPIWAKIPHTDGHFHPSPLMGGFGLKNPPPQILIKNTPVPANPPAEFSATKFASFITQYSTGQVSVEIEWELQKENSKRWNPEVQYTSNYAKSANVDFTVDNNGLYTEPRPIGTRYLTRPL

SEQ ID NO: 293 - DNA, 2208 bp, Artificial Sequence
  source: /note="Description of Artificial Sequence: Synthetic polynucleotide"
atggctgccgatggttatcttccagattggctcaaggacactctctctgaaggaataagacagtggtggaagctcaaacctggcccaccaccaccaaagcccgcagagcggcataaggacgacagcgggggtcttgtgcttcctgggtacaagtacctcggacccttcaacggactcgacaagggagagccggtcaacgaggcagacgccgcggccctcgagtacgacaaggcctacgaccggcagctcgacagcggagacaacccgtacctcaagtacaaccacgccgacgcggagtttcaggagcgccttaaagaagatacgtcttttgggggcaacctcggacgagcagtcttccaggcgaaaaagagggttcttgaacctctgggcctggttgaggaacctgttaagacggctccgggaaaaaagaggccggtagagcactctcctgtggagccagactcctcctcgggaacaggaaaagcgggccagcagcctgcgagaaagagattgaattttggtcagactggagacgcagactccgtacctgacccccagcctctcggacagccaccagcagccccctctggtctgggaactaatacgatggctacaggcagtggcgcaccaatggcagacaataacgagggcgccgacggagtgggtaattcctcgggaagttggcattgcgattccacatggatgggcgacagagtcatcaccaccagcacccgaacctgggctctgcccacctacaacaaccatctgtacaagcagatctccagccaatcaggagccagcaacgacaaccactactttggctacagcaccccttgggggtattttgacttcaacagattccactgccacttttcaccacgtgactggcaaagactcatcaacaacaactggggattccggcccaagagactcaacttcaagctctttaacattcaagtcaaggaggtcacgcagaatgacggtacgacgacgattgccaataaccttaccagcacggttcaggtgtttactgactcggagtaccagctcccgtacgtccccggctcggcgcatcaaggatgcctcccgccgttcccagcagacgtcttcatggtgccacagtatggatacctcaccctgaacaacgggagtcaggcagtaggacgctcttcattttactgcctggagtactttccttctcagatgcttcgtaccggaaacaactttaccttcagctacacctttgaggatgttcctttccacagcagctacgctcacagccagagtttggaccgtctcatgaatcctctcatcgaccagtacctgtattacttgagcagaacaaacactccaagcggaaccaccacgcagtccaggcttcagttttctcaggccggagcaagtgacattcgggaccagtctaggaactggcttcctggaccctgttaccgccagcagcgagtatcaaagacagctgcggacaacaacaacagtgaatactcgtggactggagctaccaagtaccacctcaatggcagagactctctggtgaatccgggcccggccatggccagccacaaggacgatgaagaaaagttttttcctcaaagcggggttctcatctttgggaagcaaggctcagagaaaacaaatgtggacattgaaaaggtcatgattacagacgaagaggaaatcagaaccaccaatcccgtggccacggagcagtatggttctgtatctaccaacctccagagcggcaacacacaagcagctactgcagatgtcaacacacaaggcgttcttccaggcatggtctggcaggacagagacgtgcacctgcaggggcctatctgggcaaagattccacacacggacggacattttcacccctctcccctcatgggcggatttggacttaaacaccctcctccacagattctcatcaagaacaccccggtacctgcaaatccttcgaccaccttcagtgcggcaaagtttgcttccttcatcacacagtattccacagggcaggtcagcgtggagatcgagtgggagctgcagaaggagaacagcaaacgctggaaccccgagatccagtacacttccaactacaacaaatctgttaatgtggactttactgtggacactaatggtgtgtattcagagcctcgccccattggcaccagatacctgactcgtaatctgtaa

SEQ ID NO: 294 - protein, 735 aa, Artificial Sequence
  source: /note="Description of Artificial Sequence: Synthetic polypeptide"
MAADGYLPDWLKDTLSEGIRQWWKLKPGPPPPKPAERHKDDSGGLVLPGYKYLGPFNGLDKGEPVNEADAAALEYDKAYDRQLDSGDNPYLKYNHADAEFQERLKEDTSFGGNLGRAVFQAKKRVLEPLGLVEEPVKTAPGKKRPVEHSPVEPDSSSGTGKAGQQPARKRLNFGQTGDADSVPDPQPLGQPPAAPSGLGTNTMATGSGAPMADNNEGADGVGNSSGSWHCDSTWMGDRVITTSTRTWALPTYNNHLYKQISSQSGASNDNHYFGYSTPWGYFDFNRFHCHFSPRDWQRLINNNWGFRPKRLNFKLFNIQVKEVTQNDGTTTIANNLTSTVQVFTDSEYQLPYVPGSAHQGCLPPFPADVFMVPQYGYLTLNNGSQAVGRSSFYCLEYFPSQMLRTGNNFTFSYTFEDVPFHSSYAHSQSLDRLMNPLIDQYLYYLSRTNTPSGTTTQSRLQFSQAGASDIRDQSRNWLPGPCYRQQRVSKTAADNNNSEYSWTGATKYHLNGRDSLVNPGPAMASHKDDEEKFFPQSGVLIFGKQGSEKTNVDIEKVMITDEEEIRTTNPVATEQYGSVSTNLQSGNTQAATADVNTQGVLPGMVWQDRDVHLQGPIWAKIPHTDGHFHPSPLMGGFGLKHPPPQILIKNTPVPANPSTTFSAAKFASFITQYSTGQVSVEIEWELQKENSKRWNPEIQYTSNYNKSVNVDFTVDTNGVYSEPRPIGTRYLTRNL

SEQ ID NO: 295 - DNA, 2208 bp, Artificial Sequence
  source: /note="Description of Artificial Sequence: Synthetic polynucleotide"
atggctgccgatggttatcttccagattggctcgaggacactctctctgaaggaataagacagtggtggaagctcaaacctggcccaccaccaccaaagcccgcagagcggcataaggacgacagcaggggtcttgtgcttcctgggtacaagtacctcggacccttcaacggactcgacaagggggagccggtcaacgaggcagacgccgcggccctcgagcacgacaaggcctacgaccggcagctcgacagcggagacaacccgtacctcaagtacaaccacgccgacgcagagtttcaggagcgccttaaagaagatacgtcttttgggggcaacctcggacgagcagtcttccaggcgaaaaagagggttcttgaacctctgggcctggttgaggaacctgttaagacggctccgggaaaaaagaggccggtagagcactctcctgtggagccagactcctcctcgggaaccggaaaagcgggccagcagcctgcaagaaaaagattaaattttggtcagactggagacgcagactccgtacctgacccccagcctctcggacagccaccagcagccccctctggtctgggatctactacaatggctacaggcagtggcgcaccaatggcagacaataacgagggtgccgatggagtgggtaattcctcaggaaattggcattgcgattcccaatggctgggcgacagagtcatcaccaccagcacccgaacctgggccctgcccacatacaacaaccacctctacaagcaaatctccagccaatcaggagccagcaacgacaaccactactttggctacagcaccccctgggggtattttgacttcaacagattccactgccacttttcaccacgtgactggcaaagactcatcaacaacaactggggattccggcccaaaagactcaacttcaagctctttaatattcaagtcaaagaggtcacgcagaatgacggtacgacgacgattgccaataaccttaccagcacggttcaggtgtttactgactcggagtaccagctcccgtacgtcctgggctcggcgcatcaaggatgcctcccgccgtttccagcggacgtcttcatggtcccacagtatggatacctcaccctgaacaacgggagtcaggcggtaggacgctcttccttttactgcctggagtactttccttctcagatgctgcgtactggaaacaactttcagttcagctacacttttgaagacgtgcctttccacagcagctacgctcacagccagagtctggatcggctgatgaatcctctgatcgaccagtacctgtattatctgaacaagacacaaacaaatagtggaactcttcagcagtctcggctactgtttagccaagctggaccaaccaacatgtctcttcaagctaaaaactggctgcctggaccttgctacagacagcagcgtctgtcaaaacaggcaaacgacaacaacaacagcaactttccctggactgcagctacaaagtatcatctaaatggccgggactcgttggttaatccaggaccagctatggccagtcgcaaggatgacgaagaaaagtttttccccatgcatggaaccctgatatttggtaaacaaggaacaaatgccaacgacgcggatttggaaaatgtcatgattacagatgaagaagaaatcagggccaccaatcccgtggctacggagcagtacgggactgtgtcaaataatttgcaaaactcaaacactggtccaactactggaactgtcaatcaccaaggagcgttacctggtatggtgtggcaggatcgagacgtgtacctgcagggacccatttgggccaagattcctcacaccgatggacactttcatccttctccactgatgggaggttttggactcaaacacccgcctcctcagatcatgatcaaaaacactcccgttccagccaatcctcccacaaacttcagttctgccaagtttgcttctttcatcacacagtattccacgggacaggtcagcgtggagatcgagtgggagctgcagaaggagaacagcaaacgctggaatcccgaaattcagtacacttccaactacaacaagtctgttaatgtggactttactgtggacactaatggtgtgtattcagagcctcgccccattggcaccagatacctgactcgtaatctgtaa

SEQ ID NO: 296 - protein, 735 aa, Artificial Sequence
  source: /note="Description of Artificial Sequence: Synthetic polypeptide"
MAADGYLPDWLEDTLSEGIRQWWKLKPGPPPPKPAERHKDDSRGLVLPGYKYLGPFNGLDKGEPVNEADAAALEHDKAYDRQLDSGDNPYLKYNHADAEFQERLKEDTSFGGNLGRAVFQAKKRVLEPLGLVEEPVKTAPGKKRPVEHSPVEPDSSSGTGKAGQQPARKRLNFGQTGDADSVPDPQPLGQPPAAPSGLGSTTMATGSGAPMADNNEGADGVGNSSGNWHCDSQWLGDRVITTSTRTWALPTYNNHLYKQISSQSGASNDNHYFGYSTPWGYFDFNRFHCHFSPRDWQRLINNNWGFRPKRLNFKLFNIQVKEVTQNDGTTTIANNLTSTVQVFTDSEYQLPYVLGSAHQGCLPPFPADVFMVPQYGYLTLNNGSQAVGRSSFYCLEYFPSQMLRTGNNFQFSYTFEDVPFHSSYAHSQSLDRLMNPLIDQYLYYLNKTQTNSGTLQQSRLLFSQAGPTNMSLQAKNWLPGPCYRQQRLSKQANDNNNSNFPWTAATKYHLNGRDSLVNPGPAMASRKDDEEKFFPMHGTLIFGKQGTNANDADLENVMITDEEEIRATNPVATEQYGTVSNNLQNSNTGPTTGTVNHQGALPGMVWQDRDVYLQGPIWAKIPHTDGHFHPSPLMGGFGLKHPPPQIMIKNTPVPANPPTNFSSAKFASFITQYSTGQVSVEIEWELQKENSKRWNPEIQYTSNYNKSVNVDFTVDTNGVYSEPRPIGTRYLTRNL

SEQ ID NO: 297 - DNA, 2208 bp, Artificial Sequence
  source: /note="Description of Artificial Sequence: Synthetic polynucleotide"
atggctgccgatggttatcttccagattggctcgaggacactctctctgaaggaataagacagtggtggaagctcaaacctggcccaccaccaccaaagcccgcagagcggcataaggacgacagcaggggtcttgtgcttcctgggtacaagtacctcggacccttcaacggactcgacaagggagagccggtcaacgaggcagacgccgcggccctcgagcacgacaaagcctacgaccggcagctcgacagcggagacaacccgtacctcaagtacaaccacgccgacgcggagtttcaggagcgccttaaagaagatacgtcttttgggggcaacctcggacgagcagtcttccaggcgaaaaagagggttcttgaacctctgggcctggttggggaacctgtcaagacggctccaggaaaaaagaggccggtagagcactctcctgtggagccagactcctcctcgggaaccggaaaggcgggccagcagcctgcaagaaaaagattgaattttggtcagactggagacgcagactcagtacctgacccccagcctctcggacagccaccagcagccccctctggtctgggaactaatacgatggctacaggcagtggcgcaccaatggcagacaataacgagggcgccgacggagtgggtaattcctcgggaaattggcattgcgattccacatggatgggcgacagagtcatcaccaccagcacccgaacctgggccctgcccacctacaacaaccacctctacaaacaaatttccagccaatcaggagcctcgaacgacaatcactactttggctacagcaccccttgggggtattttgacttcaacagattccactgccacttttcaccacgtgactggcaaagactcatcaacaacaactggggattccgacccaagagactcaacttcaagctctttaacattcaagtcaaagaggtcacgcagaatgacggtacgacgacgattgccaataaccttaccagcacggttcaggtgtttactgactcggagtaccagctcccgtacgtcctcggctcggcgcatcaaggatgcctcccgccgttcccagcagacgtcttcatggtgccacagtatggatacctcaccctgaacaacgggagtcaggcagtaggacgctcttcattttactgcctggagtactttccttctcagatgctgcgtaccggaaacaactttaccttcagctacacttttgaggacgttcctttccacagcggctacgctcacagccagagtctggaccgtctcatgaatcctctcatcgaccagtacctgtattacttgagcacaacaaacactccaagtggaaccaccacgcagtcaaggcttcagttttctcaggccggagcgagtgacattcgggaccagtctaggaactggcttcctggaccctgttaccgccagcagcgagtatcaaagacatctgcggataacaacaacagtgaatactcgtggactggagctaccaagtaccacctcaatggcagagactctctggtgaatccgggcccggccatggcaagccacaaggacaatgaagaaaagttttttcctcagagcggggttctcatctttgggaagcaaggctcagagaaaacaaatgtggacattgaaaaggtcatgattacagacgaagaggaaatcaggacaaccaatcccgtggctacggagcagtacggttctgtatctaccaacctccagagaggcaacagacaagcagctaccgcagatgtcaacacacaaggcgttcttccaggcatggtctggcaggacagagatgtgtaccttcaggggcccatctgggcaaagattccacacacggacggacattttcacccctctcccctcatgggtggattcggacttaaacaccctcctccacagattctcatcaagaacaccccggtacctgcgaatccttcgaccaccttcagtgcggcaaagtttgcttccttcatcacacagtactccacgggacaggtcagcgtggagatcgagtgggagctgcagaaggaaaacagcaaacgctggaatcccgaaattcagtacacttccaactacaacaagtctgttaatgtggactttactgtggacactaatggcgtgtattcagagcctcgccccattggcaccagatacctgactcgtaatctgtaa

SEQ ID NO: 298 - protein, 735 aa, Artificial Sequence
  source: /note="Description of Artificial Sequence: Synthetic polypeptide"
MAADGYLPDWLEDTLSEGIRQWWKLKPGPPPPKPAERHKDDSRGLVLPGYKYLGPFNGLDKGEPVNEADAAALEHDKAYDRQLDSGDNPYLKYNHADAEFQERLKEDTSFGGNLGRAVFQAKKRVLEPLGLVGEPVKTAPGKKRPVEHSPVEPDSSSGTGKAGQQPARKRLNFGQTGDADSVPDPQPLGQPPAAPSGLGTNTMATGSGAPMADNNEGADGVGNSSGNWHCDSTWMGDRVITTSTRTWALPTYNNHLYKQISSQSGASNDNHYFGYSTPWGYFDFNRFHCHFSPRDWQRLINNNWGFRPKRLNFKLFNIQVKEVTQNDGTTTIANNLTSTVQVFTDSEYQLPYVLGSAHQGCLPPFPADVFMVPQYGYLTLNNGSQAVGRSSFYCLEYFPSQMLRTGNNFTFSYTFEDVPFHSGYAHSQSLDRLMNPLIDQYLYYLSTTNTPSGTTTQSRLQFSQAGASDIRDQSRNWLPGPCYRQQRVSKTSADNNNSEYSWTGATKYHLNGRDSLVNPGPAMASHKDNEEKFFPQSGVLIFGKQGSEKTNVDIEKVMITDEEEIRTTNPVATEQYGSVSTNLQRGNRQAATADVNTQGVLPGMVWQDRDVYLQGPIWAKIPHTDGHFHPSPLMGGFGLKHPPPQILIKNTPVPANPSTTFSAAKFASFITQYSTGQVSVEIEWELQKENSKRWNPEIQYTSNYNKSVNVDFTVDTNGVYSEPRPIGTRYLTRNL

SEQ ID NO: 299 - DNA, 2208 bp, Artificial Sequence
  source: /note="Description of Artificial Sequence: Synthetic polynucleotide"
atggctgccgatggttatcttccagattggctcgaggacactctctctgaaggaataagacagtggtggaagctcaaacctggcccaccaccaccaaagcccgcagagcggcataaggacgacagcaggggtcttgtgcttcctgggtacaagtacctcggacccttcaacggactcgacaagggagagccggtcaacgaggcagacgccgcggccctcgagcacgacaaagcctacgaccggcagctcgacagcggagacaacccgtacctcaagtacaaccacgccgacgcggagtttcaggagcgccttaaagaagatacgtcttttgggggcaacctcggacgagcagtcttccaggcgaaaaagagggttcttgaacctctgggcctggttggggaacctgttaagacggctccgggaaaaaagaggccggtagagcactctcctgtggagccagactcctcctcgggaaccggaaaggcgggccagcagcctgcaagaaaaagattgaattttggtcagactggagacgcagactcagtacctgacccccagcctctcggacagccaccagcagccccctctggtctgggaactaatacgatggctacaggcagtggcgcaccaatggcagacaataacgagggcgccgacggagtgggtaattcctcgggaaatcggcattgcgattccacatggatgggcgacagagtcatcaccaccagcacccgaacctgggccctgcccacctacaacaaccacctctacagacaaatttccagccaatcaggagcctcgaacgacaatcactactttggctacagcaccccttgggggtattttgacttcaacagattccactgccacttttcaccacgtgactggcaaagactcatcaacaacaactggggattccgacccaagagactcaacttcaagctctttaacattcaagtcaaagaggtcacgcagaatgacggtacgacgacgattgccaataaccttaccagcacggttcaggtgtttactgactcggagtaccagctcccgtacgtcctcggctcggcgcatcaaggatgcctcccgccgttcccagcagacgtcttcatggtgccacagtatggatacctcaccctgagcaacgggagtcaggcagtaggacgctcttcattttactgcccggagtactttccttctcagatgctgcgtaccggaaacaactttaccttcagctacacttttgaggacgttcctttccacagcagctacgctcacagccagagtctggaccgtctcatgaatcctctcatcgaccagtacctgtattacttgagcacaacaaacactccaagtggaaccaccacgcagtcaaggcttcagttttctcaggccggagcgagtgacattcgggaccagtctaggaactggcttcctggaccctgttaccgccagcagcgagtatcaaagacatctgcggataacaacaacagtgaatactcgtggactggagctaccaagtaccacctcaatggcagagactctctggtgaatccgggcccggccatggcaagccacaaggacaatgaagaaaagttttttcctcagagcggggttctcatctttgggaagcaaggctcagagaaaacaaatgtggacattgaaaaggtcatgattacagacgaagaggaaatcaggacaaccaatcccgtggctacggagcagtatggttctgtatctaccaacctccagagaggcaacagacaagcagctaccgcagatgtcaacacacaaggcgttcttccaggcatggtctggcaggacagagatgtgtaccttcaggggcccatctgggcaaagattccacacacggacggacattttcacccctctcccctcatgggtggattcggacctaaacaccctcctccacagattctcatcaagaacaccccggtacctgcgaatccttcgaccaccttcagtgcggcaaagtttgcttccttcatcacacagtactccacgggacaggtcagcgtggagatcgagtgggagctgcagaaggaaaacagcaaacgctggaatcccgaaattcagtacacttccaactacaacaagtctgttaatgtggactttactgtggacactaatggcgtgtattcagagcctcgccccattggcaccagatacctgactcgtaatttgtaa

SEQ ID NO: 300 - protein, 735 aa, Artificial Sequence
  source: /note="Description of Artificial Sequence: Synthetic polypeptide"
MAADGYLPDWLEDTLSEGIRQWWKLKPGPPPPKPAERHKDDSRGLVLPGYKYLGPFNGLDKGEPVNEADAAALEHDKAYDRQLDSGDNPYLKYNHADAEFQERLKEDTSFGGNLGRAVFQAKKRVLEPLGLVGEPVKTAPGKKRPVEHSPVEPDSSSGTGKAGQQPARKRLNFGQTGDADSVPDPQPLGQPPAAPSGLGTNTMATGSGAPMADNNEGADGVGNSSGNRHCDSTWMGDRVITTSTRTWALPTYNNHLYRQISSQSGASNDNHYFGYSTPWGYFDFNRFHCHFSPRDWQRLINNNWGFRPKRLNFKLFNIQVKEVTQNDGTTTIANNLTSTVQVFTDSEYQLPYVLGSAHQGCLPPFPADVFMVPQYGYLTLSNGSQAVGRSSFYCPEYFPSQMLRTGNNFTFSYTFEDVPFHSSYAHSQSLDRLMNPLIDQYLYYLSTTNTPSGTTTQSRLQFSQAGASDIRDQSRNWLPGPCYRQQRVSKTSADNNNSEYSWTGATKYHLNGRDSLVNPGPAMASHKDNEEKFFPQSGVLIFGKQGSEKTNVDIEKVMITDEEEIRTTNPVATEQYGSVSTNLQRGNRQAATADVNTQGVLPGMVWQDRDVYLQGPIWAKIPHTDGHFHPSPLMGGFGPKHPPPQILIKNTPVPANPSTTFSAAKFASFITQYSTGQVSVEIEWELQKENSKRWNPEIQYTSNYNKSVNVDFTVDTNGVYSEPRPIGTRYLTRNL

SEQ ID NO: 301 - DNA, 2205 bp, Artificial Sequence
  source: /note="Description of Artificial Sequence: Synthetic polynucleotide"
atggctgccgatggttatcttccagattggctcgaggacactctctctgaaggaataagacagtggtggaagctcaaacctggcccaccaccaccaaagcccgcagagcggcataaggacgacagcaggggtcttgtgcttcctgggtacaagtacctcggacccttcaacggactcgacaagggagagccggtcaacgaggcagacgccgcggccctcgagcacgacaaggcctacgaccggcagctcgacagcggagacaacccgtacctcaagtacaaccacgccgacgcggagtttcaggagcgtcttaaagaagatacgtcttttgggggcaacctcggacgagcagtcttccaggcgaaaaagagggttcttgaacctctgggcctggttgaggaacctgttaagacggctccgggaaaaaagaggccggtagagcactctcctgcggagccagactcctcctcgggaaccggaaaagcgggccagcagcctgcaagaaaaagactgaatttcggtcagactggagacgcagactccgtacctgacccccagcctctcagacagccaccagcagcccccacaagtttgggatctactacaatggctacaggcagtggcgcaccaatggcagacaataacgagggtgccgatggagtgggtaattcctcaggaaattggcattgcgattcccaatggctgggcgacagagtcatcaccaccagcacccgaacctgggccctgcccacctacaacaaccacctttacaagcaaatctccagccaatcaggagcctcaaacgacaaccactactttggctacagcaccccctgggggtattttgacttcaacagattccactgccacttttcaccacgtgactggcaaagactcatcaacaacaactggggattccgacccaagagactcaacttcaagctctttaacattcaagtcaaagaggtcacgcagaatgacggtacgacgacgattgccaataaccttaccagcacggttcaggtgtttactgactcggagtaccagctcccgtacgtcctcggctcggcgcatcaaggatgcctcccgccgtttccagcggacgtcttcatggtcccacagtatggatacctcaccctgaacaacgggagtcaggcggtaggacgctcttccttttactgcctggagtactttccttctcagatgctgcgtactggaaacaactttcagttcagctacacttttgaagacgtgcctttccacagcagctacgctcacagccagagtttggatcggctgatgaatcctctgatcgaccagtacctgtattatctaaacagaacacaaacagctagtggaactcagcagtctcggctactgtttagccaagctggacccacaagcatgtctcttcaagctaaaaactggctgcctggaccgtgttatcgccagcagcgtttgtcaaagcaggcaaacgacaacaacaacagcaactttccctggactggagctaccaagtactacctcaatggcagagactctttggtgaacccgggcccggccatggccagccacaaggacgatgaagaaaagtttttccccatgcatggaaccctaatatttggtaaagaaggaacaaatgctaccaacgcggaattggaaaatgtcatgattacagatgaagaggaaatcaggaccaccaatcccgtggctacagagcagtacggatatgtgtcaaataatttgcaaaactcaaatactgctgcaagtactgaaactgtgaatcaccaaggagcattacctggtatggtgtggcaggatcgagacgtgtacctgcagggacccatttgggccaagattcctcacaccgatggacactttcatccttctccactgatgggaggttttggactcaaacacccgcctcctcagattatgatcaaaaacactcccgttccagccaatcctcccacaaacttcagttctgccaagtttgcttccttcatcacacagtattccacgggacaggtcagcgtggagatcgagtgggagctgcagaaggagaacagcaaacgctggaatcccgaaattcagtacacttccaactacaacaaatctgttaatgtggactttactgtggacactaatggtgtgtattcagagcctcgccccattggcaccagatacctgactcgtaatctgtaa

SEQ ID NO: 302 - protein, 734 aa, Artificial Sequence
  source: /note="Description of Artificial Sequence: Synthetic polypeptide"
MAADGYLPDWLEDTLSEGIRQWWKLKPGPPPPKPAERHKDDSRGLVLPGYKYLGPFNGLDKGEPVNEADAAALEHDKAYDRQLDSGDNPYLKYNHADAEFQERLKEDTSFGGNLGRAVFQAKKRVLEPLGLVEEPVKTAPGKKRPVEHSPAEPDSSSGTGKAGQQPARKRLNFGQTGDADSVPDPQPLRQPPAAPTSLGSTTMATGSGAPMADNNEGADGVGNSSGNWHCDSQWLGDRVITTSTRTWALPTYNNHLYKQISSQSGASNDNHYFGYSTPWGYFDFNRFHCHFSPRDWQRLINNNWGFRPKRLNFKLFNIQVKEVTQNDGTTTIANNLTSTVQVFTDSEYQLPYVLGSAHQGCLPPFPADVFMVPQYGYLTLNNGSQAVGRSSFYCLEYFPSQMLRTGNNFQFSYTFEDVPFHSSYAHSQSLDRLMNPLIDQYLYYLNRTQTASGTQQSRLLFSQAGPTSMSLQAKNWLPGPCYRQQRLSKQANDNNNSNFPWTGATKYYLNGRDSLVNPGPAMASHKDDEEKFFPMHGTLIFGKEGTNATNAELENVMITDEEEIRTTNPVATEQYGYVSNNLQNSNTAASTETVNHQGALPGMVWQDRDVYLQGPIWAKIPHTDGHFHPSPLMGGFGLKHPPPQIMIKNTPVPANPPTNFSSAKFASFITQYSTGQVSVEIEWELQKENSKRWNPEIQYTSNYNKSVNVDFTVDTNGVYSEPRPIGTRYLTRNL

SEQ ID NO: 303 - DNA, 3160 bp, Artificial Sequence
  source: /note="Description of Artificial Sequence: Synthetic polynucleotide"
acccttcactaaagggactagtcctgcaggtttaaacgaattcgcccttgctgcgtcaactggaccaatgagaactttcccttcaacgactgtgtcgacaagatggtgatttggtgggaggaggggaagatgaccgccaaggtcgtggagtcggccaaagccattctcggaggaagcaaggtgcgcgtggaccagaaatgcaagtcctcggcccagatagatccgactcccgtgatcgtcacctccaacaccaacatgtgcgccgtgattgacgggaactcaacgaccttcgaacaccagcagccgttgcaagaccggatgttcaaatttgaactcacccgccgtctggatcatgactttgggaaggtcaccaagcgggaagtcaaagactttttccggtgggcaaaggatcacgtggttgaggtggagcatgaattctacgtcaaaaagggtggagccaagaaaagacccgcccctagtgacgcagatataagtgagcccaaacgggtgcgcgagtcagttgcgcagccatcgacgtcagacgcggaagcttcgatcaactacgcggacaggtaccaaaacaaatgttctcgtcacgtgggcatgaatctgatgctgtttccctgcagacaatgcgagagaatgaatcaaaattcaaatatctgcttcactcacggacagaaagactgtttagagtgctttcccgtgtcagaatctcaacctgtttctgtcgtcaaaaaggcgtatcagaaactgtgctacattcatcatatcatgggaaaggtgccagacgcttgcactgcctgcgatctggtcaatgtggatttggatgactgcatctctgaacaataaatgatttaaatcaggtatggctgccgatggttatcttccagattggctcgaggacactctctctgaaggaataagacagtggtggaagctcaaacctggcccaccaccaccaaagcccgcagagcggcataaggacgacagcaggggtcttgtgcttcctgggtacaagtacctcggacccttcaacggactcgacaagggagagccggtcaacgaggcagacgccgcggccctcgagcacgacaaggcctacgaccggcagctcgacagcggagacaacccgtacctcaagtacaaccacgccgacgcggagtttcaggagcgtcttaaagaagatacgtcttttgggggcaacctcggacgagcagtcttccaggcgaaaaagagggttcttgaacctctgggcctggttgaggaacctgttaagacggctccgggaaaaaagaggccggtagagcactctcctgcggagccagactcctcctcgggaaccggaaaagcgggccagcagcctgcaagaaaaagactgaatttcggtcagactggagacgcagactccgtacctgacccccagcctctcagacagccaccagcagcccccacaagtttgggatctactacaatggctacaggcagtggcgcaccaatggcagacaataacgagggtgccgatggagtgggtaattcctcaggaaattggcattgcgattcccaatggctgggcgacagagtcatcaccaccagcacccgaacctgggccctgcccacctacaacaaccacctttacaagcaaatctccagccaatcaggagcctcaaacgacaaccactactttggctacagcaccccctgggggtattttgacttcaacagattccactgccacttttcaccacgtgactggcaaagactcatcaacaacaactggggattccgacccaagagactcaacttcaagctctttaacattcaagtcaaagaggtcacgcagaatgacggtacgacgacgattgccaataaccttaccagcacggttcaggtgtttactgactcggagtaccagctcccgtacgtcctcggctcggcgcatcaaggatgcctcccgccgtttccagcggacgtcttcatggtcccacagtatggatacctcaccctgaacaacgggagtcaggcggtaggacgctcttccttttactgcctggagtactttccttctcagatgctgcgtactggaaacaactttcagttcagctacacttttgaagacgtgcctttccacagcagctacgctcacagccagagtttggatcggctgatgaatcctctgatcgaccagtacctgtattatctaaacagaacacaaacagctagtggaactcagcagtctcggctactgtttagccaagctggacccacaagcatgtctcttcaagctaaaaactggctgcctggaccgtgttatcgccagcagcgtttgtcaaagcaggcaaacgacaacaacaacagcaactttccctggactggagctaccaagtactacctcaatggcagagactctttggtgaacccgggcccggccatggccagccacaaggacgatgaagaaaagtttttccccatgcatggaaccctaatatttggtaaagaaggaacaaatgctaccaacgcggaattggaaaatgtcatgattacagatgaagaggaaatcaggaccaccaatcccgtggctacagagcagtacggatatgtgtcaaataatttgcaaaactcaaatactgctgcaagtactgaaactgtgaatcaccaaggagcattacctggtatggtgtggcaggatcgagacgtgtacctgcagggacccatttgggccaagattcctcacaccgatggacactttcatccttctccactgatgggaggttttggactcaaacacccgcctcctcagattatgatcaaaaacactcccgttccagccaatcctcccacaaacttcagttctgccaagtttgcttccttcatcacacagtattccacgggacaggtcagcgtggagatcgagtgggagctgcagaaggagaacagcaaacgctggaatcccgaaattcagtacacttccaactacaacaaatctgttaatgtggactttactgtggacactaatggtgtgtattcagagcctcgccccattggcaccagatacctgactcgtaatctgtaattgcttgttaatcaataaaccgtttaattcgtttcagttgaactttggtctctgcgaagggcgaattcgcggccgctaaatcaatcg

SEQ ID NO: 304 - protein, 734 aa, Artificial Sequence
  source: /note="Description of Artificial Sequence: Synthetic polypeptide"
MAADGYLPDWLEDTLSEGIRQWWKLKPGPPPPKPAERHKDDSRGLVLPGYKYLGPFNGLDKGEPVNEADAAALEHDKAYDRQLDSGDNPYLKYNHADAEFQERLKEDTSFGGNLGRAVFQAKKRVLEPLGLVEEPVKTAPGKKRPVEHSPAEPDSSSGTGKAGQQPARKRLNFGQTGDADSVPDPQPLGQPPAAPTSLGSTTMATGSGAPMADNNEGADGVGNSSGNWHCDSQWLGDRVITTSTRTWALPTYNNHLYKQISSQSGASNDNHYFGYSTPWGYFDFNRFHCRFSPRDWQRLINNNWGFRPKRLNFKLFNIQVKEVTQNDGTTTIANNLTSTVQVFTDSEYQLPYVLGSAHQGCLPPFPADVFMVPQYGYLTLNNGSQAVGRSSFYCLEYFPSQMLRTGNNFQFSYTFEDVPFHSSYAHSQGLDRLMNPLIDQYLYYLNRTQTASGTQQSRLLFSQAGPTSMSLQAKNWLPGPCYRQQRLSKQANDNNNSNFPWTGATKYHLNGGDSLVNPGPAMASHKDDEEKFFPMHGTLIFGKEGTNATNAELENVMITDEEEIRTTNPVATEQYGYVSNNLQNSNTAASTETVNHQGALPGMVWQDRDVYLRGPIWAKIPHADGHFHPSPLMGGFGLKHPPPQIMIKNTPVPANPPTNFSSAKFASFITQYSTGQVSVEIEWELQKENSKRWNPEIQYTSNYNKSVNVDFTVDTNGVYSEPRPIGTRYLTRNL

SEQ ID NO: 305 - DNA, 3157 bp, Artificial Sequence
  source: /note="Description of Artificial Sequence: Synthetic polynucleotide"
ctcactaagggactagtcctgcaggtttaaacgaattcgcccttgctgcgtcaactggaccaatgagaactttcccttcaacgactgtgtcgacaagatggtgatttggtgggaggaggggaagatgaccgccaaggtcgtggagtcggccaaagccactctcggaggaagcaaggtgcgcgtggaccagaaacgcaagtcctcggcccagatagatccgactcccgtgatcgtcacctccaacaccaacatgtgcgccgtgattgacgggaactcaacgaccttcgaacaccagcagccgttgcaagaccgaatgttcaaatttgaactcacccgccgtctggatcatgacttcgggaaggtcaccaagcaggaagtcaaagactttttccggtgggcaaaggatcacgtggttgaggtggagcatgaattctacgtcaaaaagggtggagccaagaaaagacccgcccctagtgacgcagatataagtgagcccaaacgggtgcgcgagtcagttgcgcagccatcgacgtcagacgcggaagcttcgatcaactacgcggacaggtaccaaaacaaatgttctcgtcacgtgggcatgaatctgatgctgtttccctgcagacaatgcgagagaatgaatcaaaattcaaatatctgcttcactcacggacagaaagactgtttagagtgctttcccgtgtcagaatctcaacctgtttctgtcgtcaaaaaggcgtatcagaaactgtgctacattcatcatatcatgggaaaggtgccagacgcttgcactgcctgcgatctggtcaatgtggatttggatgactgcatctctgaacaataaatgatttaaatcaggtatggctgccgatggttatcttccagattggctcgaggacactctctctgaaggaataagacagtggtggaagctcaaacctggcccaccaccaccaaagcccgcagagcggcataaggacgacagcaggggtcttgtgcttcctgggtacaagtacctcggacccttcaacggactcgacaagggagagccggtcaacgaggcagacgccgcggctctcgagcacgacaaggcctacgaccggcagctcgacagcggagacaacccgtacctcaagtacaaccacgccgacgcggagtttcaggagcgtcttaaagaagatacgtcttttgggggcaacctcggacgagcagtcttccaggcgaaaaagagggttcttgaacctctgggcctggttgaggaacctgttaagacggctccgggaaaaaagaggccggtagagcactctcctgcggagccagactcctcctcgggaaccggaaaagcgggccagcagcctgcaagaaaaagactgaatttcggtcagactggagacgcagactccgtacctgacccccagcctctcggacagccaccagcagcccccacaagtttgggatctactacaatggctacaggcagtggcgcaccaatggcagacaataacgagggtgccgatggagtgggtaattcctcaggaaattggcattgcgattcccaatggctgggcgacagagtcatcaccaccagcacccgaacctgggccctgcccacctacaacaaccacctttacaagcaaatctccagccaatcaggagcctcaaacgacaaccactactttggctacagcaccccctgggggtattttgacttcaacagattccactgccgcttttcaccacgtgactggcaaagactcatcaacaacaactggggattccgacccaagagactcaacttcaagctctttaacattcaagtcaaagaggtcacgcagaatgacggtacgacgacgattgccaataaccttaccagcacggttcaggtgtttactgactcggagtaccagctcccgtacgtcctcggctcggcgcatcaaggatgcctcccgccgtttccagcggacgtcttcatggtcccacagtatggatacctcaccctgaacaacgggagtcaggcggtaggacgctcttccttttactgcctggagtactttccttctcagatgctgcgtactggaaacaactttcagttcagctacacttttgaagacgtgcctttccacagcagctacgctcacagccagggtttggatcggctgatgaatcctctgatcgaccagtacctgtattatctaaacagaacacaaacagctagtggaactcagcagtctcggctactgtttagccaagctggacccacaagcatgtctcttcaagctaaaaactggctgcctggaccgtgttatcgccagcagcgtttgtcaaagcaggcaaacgacaacaacaacagcaactttccctggactggagctaccaagtaccacctcaatggcggagactctttggtgaacccgggcccggccatggccagccacaaggacgatgaagaaaagtttttccccatgcatggaaccctaatatttggtaaagaaggaacaaatgctaccaacgcggaattggaaaatgtcatgattacagatgaagaggaaatcaggaccaccaatcccgtggctacagagcagtacggatatgtgtcaaataatttgcaaaactcaaatactgctgcaagtactgaaactgtgaatcaccaaggagcattacctggtatggtgtggcaggatcgagacgtgtacctgcggggacccatttgggccaagattcctcacgccgatggacactttcatccttctccactgatgggaggttttggactcaaacacccgcctcctcagattatgatcaaaaacactcccgttccagccaatcctcccacaaacttcagttctgccaagtttgcttccttcatcacacagtattccacgggacaggtcagcgtggagatcgagtgggagctgcagaaggagaacagcaaacgctggaatcccgaaattcagtacacttccaactacaacaaatctgttaatgtggactttactgtggacactaatggtgtgtattcagagcctcgccccattggcaccagatacctgactcgtaatctgtaattgcttgttaatcaataaaccgtttaattcgtttcagttgaactttggtctctgcgaagggcgaattcgcggccgctaaattcaattcg

SEQ ID NO: 306 - protein, 734 aa, Artificial Sequence
  source: /note="Description of Artificial Sequence: Synthetic polypeptide"
MAADGYLPDWLEDTLSEGIRQWWKLKPGPPPPKPAERHKDDSRGLVLPGYKYLGPFNGLDKGEPVNEADAAALEHDKAYDRQLDSGDNPYLKYNHADAEFQERLKEDTSFGGNLGRAVFQAKKRVLEPLGLVEEPVKTAPGKKRPVEHSPAEPDSSSGTGKAGQQPARKRLNFGQTGDADSVPDPQPLGQPPAAPTSLGSTTMATGSGAPMADNNEGADGVGNSSGNWHCDSQWLGDRVITTSTRTWALPTYNNHLYKQISSQSGASNDNHYFGYSTPWGYFDFNRFHCHFSPRDWQRLINNNWGFRPKRLNFKLFNIQVKEVTQNDGTTTIANNLTSTVQVFTDSEYQLPYVLGSAHQGCLPPFPADVFMVPQYGYLTLNNGSQAVGRSSFYCLECFPSQMLRTGNNFQFSYTFEDVPFHSSYAHSQSLDRLMNPLIDQYLYYLNRTQTASGTQQSRLLFSQAGPTSMSLQAKNWLPGPCYRQQRLSKQANDNNNSNFPWTGATKYHLNGRDSLVNPGPAMASHKDDEEKFFPMHGTLIFGKEGTNATNAELENVMITDEEEIRTTNPVATEQYGYVSNNLQNSNTAASTETVNHQGALPGMVWQDRDVYLQGPIWAKIPHTDGHFHPSPLMGGFGLKHPPPQIMIKNTPVPANPPTNFSSAKFASFITQYSTGQVSVEIEWELQKENSKRWNPEIQYTSNYNKSVNVDFTVDTNGVYSEPRPIGTRYLTRNL

SEQ ID NO: 307 - DNA, 2208 bp, Artificial Sequence
  source: /note="Description of Artificial Sequence: Synthetic polynucleotide"
atggctgccgatggttatcttccagattggctcgaggacactctctctgaaggaataagacagtggtggaagctcaaacctggcccaccaccaccaaagcccgcagagcggcataaggacgacagcaggggtcttgtgcttcctggatacaagtacctcggacccttcaacggactcgacaagggagagccggtcaacgaggcagacgccgcggccctcgagcacgacaaggcctacgaccggcagctcgacagcggagacaacccgtacctcaagtacaaccacgccgacgcggagtttcaggagcgccttaaagaagatacgtcttttgggggcaacctcggacgagcagtcttccaggcgaaaaagagggttcttgaacctctgggcctggttgaggaacctgttaagacggctccgggaaaaaagaggccggtagagcactctcctgtggagccagactcctcctcgggaaccggaaaagcgggcaaccagcctgcaagaaaaagattgaatttcggtcagactggagacgcagactccgtacctgacccccagcctctcggacagccaccagcatccccctctggtctgggaactaatacgatggctacaggcagtggcgcaccaatggcagacaataacgagggcgccgacggagtgggtaattcctcgggaaattggcattgcgattccacatggatgggcgacagagtcgtcaccaccagcacccgcacctgggccctgcccacctacaacaaccacctctacaagcagatttccagccaatcaggagccagcaacgacaaccactactttggctacagcaccccttgggggtattttgacttcaacagattccactgccacttttcgccacgcgactggcagagactcatcaacaacaactggggattccggcccaaaagactcaacttcaagctgtttaacattcaagtcaaggaggtcacgcagaatgacggtacgacgacgattgccaataaccttaccagcacggttcaggtgtttactgacttggagtaccagctcccgtacgtcctcggctcggcgcatcaaggatgcctcccgccgttcccagcagacgtcttcatggtgccacagtatggatacctcaccctgaacaacgggagtcaggcggtaggacgctcttccttttactgcctggagtactttccttctcagatgcttcgcaccggaaacaactttaccttcagctacacttttgaagacgttcctttccacagcagctacgctcacagtcaaagtctggaccgtctcatgaatcctctcatcgaccagtacctgtattacttgagcagaacaaacactccaagcggaaccactacgcagtccaggcttcagttttctcaggccggagcgagtgacattcgggaccagtctaggaactggcttcctggaccctgttaccgccagcagcgagtatcaaagacagctgcggataacaacaacagtgaatactcgtggactggagctaccaagtaccacctcaatggcagagactctctggtgaatccgggcccggccatggccagccacaaggacgatgaagaaaagttttttcctcaaagcggggttctcatctttgggaagcaaggctcagagaaaacaaatgtggacattgaaaaggtcatgattacagacgaagaggaaatcaggaccaccaatcccgtggctacggagcagtatggttctgtatctaccaacctccagagcggcaacacacaagcagctacctcagatgtcaacacacaaggcgttcttccaggcatggtctggcaggacagagacgtgtacctgcaggggcccatctgggcaaaaattccacacacggacggacattttcacccctctcccctcatgggcggatttggacttaaacaccctcctccacagattctcattaagaataccccggtacctgcgaatccttcgaccaccttcagcgcggcaaagtttgcttccttcatcacacagtattccacggggcaggtcagcgtggagatcgagtgggagctgcagaaggagaacagcaaacgctggaatcccgaaattcagtacacttccaactacaacaaatctgttaatgtggactttactgtggacactaatggggtgtattcagagcctcgccctattggcaccagatacctgactcgtaatctgtaa

SEQ ID NO: 308 - DNA, 3159 bp, Artificial Sequence
  source: /note="Description of Artificial Sequence: Synthetic polynucleotide"
gattgatttagcggccgcgaattcgcccttgctgcgtcaactggaccaatgagaactttcccttcaacgattgcgtcgacaagatggtgatctggtgggaggagggaaagatgaccgccaaggtcgtggagtcggccaaagccattctcggaggaagcaaggtgcgtgtggaccaaaagtgcaagtcttcggcccagatcgacccgactcccgtgatcgtcacctccaacaccaacatgtgcgccgtgattgatggaaactcaacgaccttcgagcaccagcagccgttgcaagaccggatgttcaaatttgaacttacccgccgtctggatcatgactttggaaaggtcaccaagcaggaagtgaaagactttttccggtgggcaaaggatcacgtggttgaggtggagcatgagttctacgtcaaaaagggtggagccaaaaaaagacccgcccccagtgacgcagatataagtgagcccaaacgggcgcgcgagtcagttgcgcagccatcgacgtcagacgcggaagcttcgatcaactacgcggacaggtaccaaaacaaatgttctcgtcacgtgggcatgaatctgatgctgtttccctgcagacaatgcgagagaatgaatcagaattcaaatatctgcttcactcacggacagaaagactgtccatagtgctttcccgtgtcagaatctcaacccgtttctgtcgtcaaaaaggcgtatcagaaactgtgctacattcatcacatcatgggaaaggtgccagacgcttgcactgcttgcgacctggtcaatgtggatttggatgactgcatctctgaacaataaatgatttaaatcaggtatggctgccgatggttatcttccagattggctcgaggacactctctctgaaggaataagacagtggtggaagctcaaacctggcccaccaccaccaaagcccgcagagcggcataaggacgacagcaggggtcttgtgcttcctggatacaagtacctcggacccttcaacggactcgacaagggagagccggtcaacgaggcagacgccgcggccctcgagcacgacaaggcctacgaccggcagctcgacagcggagacaacccgtacctcaagtacaaccacgccgacgcggagtttcaggagcgccttaaagaagatacgtcttttgggggcaacctcggacgagcagtcttccaggcgaaaaagagggttcttgaacctctgggcctggttgaggaacctgttaagacggctccgggaaaaaagaggccggtagagcactctcctgtggagccagactcctcctcgggaaccggaaaagcgggcaaccagcctgcaagaaaaagattgaatttcggtcagactggagacgcagactccgtacctgacccccagcctctcggacagccaccagcatccccctctggtctgggaactaatacgatggctacaggcagtggcgcaccaatggcagacaataacgagggcgccgacggagtgggtaattcctcgggaaattggcattgcgattccacatggatgggcgacagagtcgtcaccaccagcacccgcacctgggccctgcccacctacaacaaccacctctacaagcagatttccagccaatcaggagccagcaacgacaaccactactttggctacagcaccccttgggggtattttgacttcaacagattccactgccacttttcgccacgcgactggcagagactcatcaacaacaactggggattccggcccaaaagactcaacttcaagctgtttaacattcaagtcaaggaggtcacgcagaatgacggtacgacgacgattgccaataaccttaccagcacggttcaggtgtttactgacttggagtaccagctcccgtacgtcctcggctcggcgcatcaaggatgcctcccgccgttcccagcagacgtcttcatggtgccacagtatggatacctcaccctgaacaacgggagtcaggcggtaggacgctcttccttttactgcctggagtactttccttctcagatgcttcgcaccggaaacaactttaccttcagctacacttttgaagacgttcctttccacagcagctacgctcacagtcaaagtctggaccgtctcatgaatcctctcatcgaccagtacctgtattacttgagcagaacaaacactccaagcggaaccactacgcagtccaggcttcagttttctcaggccggagcgagtgacattcgggaccagtctaggaactggcttcctggaccctgttaccgccagcagcgagtatcaaagacagctgcggataacaacaacagtgaatactcgtggactggagctaccaagtaccacctcaatggcagagactctctggtgaatccgggcccggccatggccagccacaaggacgatgaagaaaagttttttcctcaaagcggggttctcatctttgggaagcaaggctcagagaaaacaaatgtggacattgaaaaggtcatgattacagacgaagaggaaatcaggaccaccaatcccgtggctacggagcagtatggttctgtatctaccaacctccagagcggcaacacacaagcagctacctcagatgtcaacacacaaggcgttcttccaggcatggtctggcaggacagagacgtgtacctgcaggggcccatctgggcaaaaattccacacacggacggacattttcacccctctcccctcatgggcggatttggacttaaacaccctcctccacagattctcattaagaataccccggtacctgcgaatccttcgaccaccttcagcgcggcaaagtttgcttccttcatcacacagtattccacggggcaggtcagcgtggagatcgagtgggagctgcagaaggagaacagcaaacgctggaatcccgaaattcagtacacttccaactacaacaaatctgttaatgtggactttactgtggacactaatggggtgtattcagagcctcgccctattggcaccagatacctgactcgtaatctgtaattgcttgttaatcaataaaccgtttaattcgtttcagttgaactttggtctctgcgaagggcgaattcgtttaaacctgcaggactagtccctttagtgagg

SEQ ID NO: 309 - protein, 735 aa, Artificial Sequence
  source: /note="Description of Artificial Sequence: Synthetic polypeptide"
MAADGYLPDWLEDTLSEGIRQWWKLKPGPPPPKPAERHKDDSRGLVLPGYKYLGPFNGLDKGEPVNEADAAALEHDKAYDRQLDSGDNPYLKYNHADAEFQERLKEDTSFGGNLGRAVFQAKKRVLEPLGLVEEPVKTAPGKKRPVEHSPVEPDSSSGTGKAGNQPARKRLNFGQTGDADSVPDPQPLGQPPASPSGLGTNTMATGSGAPMADNNEGADGVGNSSGNWHCDSTWMGDRVVTTSTRTWALPTYNNHLYKQISSQSGASNDNHYFGYSTPWGYFDFNRFHCHFSPRDWQRLINNNWGFRPKRLNFKLFNIQVKEVTQNDGTTTIANNLTSTVQVFTDLEYQLPYVLGSAHQGCLPPFPADVFMVPQYGYLTLNNGSQAVGRSSFYCLEYFPSQMLRTGNNFTFSYTFEDVPFHSSYAHSQSLDRLMNPLIDQYLYYLSRTNTPSGTTTQSRLQFSQAGASDIRDQSRNWLPGPCYRQQRVSKTAADNNNSEYSWTGATKYHLNGRDSLVNPGPAMASHKDDEEKFFPQSGVLIFGKQGSEKTNVDIEKVMITDEEEIRTTNPVATEQYGSVSTNLQSGNTQAATSDVNTQGVLPGMVWQDRDVYLQGPIWAKIPHTDGHFHPSPLMGGFGLKHPPPQILIKNTPVPANPSTTFSAAKFASFITQYSTGQVSVEIEWELQKENSKRWNPEIQYTSNYNKSVNVDFTVDTNGVYSEPRPIGTRYLTRNL

SEQ ID NO: 310 - DNA, 2205 bp, Artificial Sequence
  source: /note="Description of Artificial Sequence: Synthetic polynucleotide"
atggctgccgatggttatcttccagattggctcgaggacactctctctgaaggaataagacagtggtggaagctcaaacctggcccaccaccaaagcccgcagagcggcataaggacgacagcaggggtcttgtgcttcctggatacaagtacctcggacccttcaacggactcgacaagggagagccggtcaacgaggcagacgccgcggccctcgagcacgacaaggcctacgaccggcagctcgacagcggagacaacccgtacctcaagtacaaccacgccgacgcggagtttcaggagcgccttaaagaagatacgtcttttgggggcaacctcggacgagcagtcttccaggcgaaaaagagggttcttgaacctctgggcctggttgaggaacctgttaagacggctccgggaaaaaagaggcccgtagagcactctcctgtggagccagactcctcctcgggaaccggaaaagcgggcaaccagcctgcaagaaaaagattgaatttcggtcagactggagacgcagactccgtacctgacccccagcctctcggacagccaccagcagccccctctggtctgggaactaatacgatggctacaggcagtggcgcaccaatggcagacaataacgagggcgccgacggagtgggtaattcctcgggagattggcattgcgattccacatggatgggcgacagagtcatcaccaccagcacccgcacctgggccctgcccacctacaacaaccacctctacaagcagatttccagccaatcaggagccagcaatgacaaccactactttggctacagcaccccttgggggtattttgacttcaacagattccactgccacttttcgccacgcgactggcagagactcatcaacaacaactggggattccggcccaaaagactcaacctcaagctgtttaacattcaagtcaaggaggtcacgcagaatgacggtacgacgacgattgccaataaccttaccagcacggttcaggtgtttactgacttggagtaccagctcccgtacgtcctcggctcggcgcatcaaggatgcctcccgccgttcccagcagacgtcttcatggtgccacagtatggatacctcaccctgaacaacgggagtcaggcggtaggacgctcttccttttactgcctggagtactttccttctcagatgcttcgtaccggaaacaactttaccttcagctacacttttgaagacgttcctttccacagcagctacgctcacagtcaaagtctggaccgtctcatgaatcctctcatcgaccagtacctgtattacttgagcagaacaaacactccaagcggaaccactacgcagtccaggcttcagttttctcaggccggagcgagtgacattcgggaccagtctaggaactggcttcctggaccctgttaccgccagcagcgagtatcaaagacagctgcggataacaacaacggtgaatactcgtggactggagctaccaagtaccacctcaatggcagagactctctggtgaatccgggcccggccatggccagccacaaggacgatgaagaaaagttttttcctcaaagcggggttctcatctttgggaagcaaggctcagagaaaacaaatgtggacattgaaaaggtcatgattacagacgaagaggaaatcaggaccaccaatcccgtggctacggagcagtatggttctgtatctaccaacctccagagcggcaacacacgagcagctacctcagatgtcaacacacaaggcgttcttccaggcatggtctggcaggacagagacgtgtacctgcaggggcccatctgggcaaaaattccacacacggacggacattttcacccctctcccctcatgggcggatttggacttaaacaccctcctccacagattctcattaagaataccccggtacctgcgaatccttcgaccaccttcagcgcggcaaagtttgcttccttcatcacacagtattccacggggcaggtcagcgtggagatcgagtgggagctgcagaaggagaacagcaaacgctggaatcccgaaattcagtacacttccaactacaacaaatctgttaatgtggactttactgtggacactaatggggtgtattcagagcctcgccctattggcaccagatacctgactcgtaatctgtaa

SEQ ID NO: 311 - DNA, 3156 bp, Artificial Sequence
  source: /note="Description of Artificial Sequence: Synthetic polynucleotide"
cgattgaatttagcggccgcgaattcgcccttgctgcgtcaacggaccaatgagaactttcccttcaacgattgcgtcgacaagatggtgatctggtgggaggagggaaagatgaccgccaaggtcgtggagtcggccaaagccattctcggaggaagcaaggtgcgtgtggaccaaaagtgcaagtcttcggcccagatcgacccgactcccgtgatcgtcacctccaacaccaacatgtgcgccgtgattgatggaaactcaacgaccttcgagcaccagcagccgttgcaagaccggatgttcaaatttgaacttacccgccgtctggatcatgactttggaaaggtcaccaagcaggaagtgaaagactttttccggtgggcaaaggatcacgtggttgaggtggagcatgagttctacgtcaaaaagggtggagccaaaaaaagacccgcccccagtgacgcagatataagtgagcccaaacgggcgcgcgagtcagttgcgcagccatcgacgtcagacgcggaagcttcgatcaactacgcggacaggtaccaaaacaaatgttctcgtcacgtgggcatgaatctgatgctgtttccctgcagacaatgcgagcgaatgaatcagaattcaaatatctgcttcactcacggacagaaagactgtttagagtgctttcccgtgtcagaatctcaacccgtttctgtcgtcaaaaaggcgtatcagaaactgtgctacattcatcacatcatgggaaaggtgccagacgcttgcactgcttgcgacctggtcaatgtggatttggatgactgcatctctgaacaataaatgatttaaatcaggtatggctgccgatggttatcttccagattggctcgaggacactctctctgaaggaataagacagtggtggaagctcaaacctggcccaccaccaaagcccgcagagcggcataaggacgacagcaggggtcttgtgcttcctggatacaagtacctcggacccttcaacggactcgacaagggagagccggtcaacgaggcagacgccgcggccctcgagcacgacaaggcctacgaccggcagctcgacagcggagacaacccgtacctcaagtacaaccacgccgacgcggagtttcaggagcgccttaaagaagatacgtcttttgggggcaacctcggacgagcagtcttccaggcgaaaaagagggttcttgaacctctgggcctggttgaggaacctgttaagacggctccgggaaaaaagaggcccgtagagcactctcctgtggagccagactcctcctcgggaaccggaaaagcgggcaaccagcctgcaagaaaaagattgaatttcggtcagactggagacgcagactccgtacctgacccccagcctctcggacagccaccagcagccccctctggtctgggaactaatacgatggctacaggcagtggcgcaccaatggcagacaataacgagggcgccgacggagtgggtaattcctcgggagattggcattgcgattccacatggatgggcgacagagtcatcaccaccagcacccgcacctgggccctgcccacctacaacaaccacctctacaagcagatttccagccaatcaggagccagcaatgacaaccactactttggctacagcaccccttgggggtattttgacttcaacagattccactgccacttttcgccacgcgactggcagagactcatcaacaacaactggggattccggcccaaaagactcaacctcaagctgtttaacattcaagtcaaggaggtcacgcagaatgacggtacgacgacgattgccaataaccttaccagcacggttcaggtgtttactgacttggagtaccagctcccgtacgtcctcggctcggcgcatcaaggatgcctcccgccgttcccagcagacgtcttcatggtgccacagtatggatacctcaccctgaacaacgggagtcaggcggtaggacgctcttccttttactgcctggagtactttccttctcagatgcttcgtaccggaaacaactttaccttcagctacacttttgaagacgttcctttccacagcagctacgctcacagtcaaagtctggaccgtctcatgaatcctctcatcgaccagtacctgtattacttgagcagaacaaacactccaagcggaaccactacgcagtccaggcttcagttttctcaggccggagcgagtgacattcgggaccagtctaggaactggcttcctggaccctgttaccgccagcagcgagtatcaaagacagctgcggataacaacaacggtgaatactcgtggactggagctaccaagtaccacctcaatggcagagactctctggtgaatccgggcccggccatggccagccacaaggacgatgaagaaaagttttttcctcaaagcggggttctcatctttgggaagcaaggctcagagaaaacaaatgtggacattgaaaaggtcatgattacagacgaagaggaaatcaggaccaccaatcccgtggctacggagcagtatggttctgtatctaccaacctccagagcggcaacacacgagcagctacctcagatgtcaacacacaaggcgttcttccaggcatggtctggcaggacagagacgtgtacctgcaggggcccatctgggcaaaaattccacacacggacggacattttcacccctctcccctcatgggcggatttggacttaaacaccctcctccacagattctcattaagaataccccggtacctgcgaatccttcgaccaccttcagcgcggcaaagtttgcttccttcatcacacagtattccacggggcaggtcagcgtggagatcgagtgggagctgcagaaggagaacagcaaacgctggaatcccgaaattcagtacacttccaactacaacaaatctgttaatgtggactttactgtggacactaatggggtgtattcagagcctcgccctattggcaccagatacctgactcgtaatctgtaattgcttgttaatcaataaaccgtttaattcgtttcagttgaactttggtctctgcgaagggcgaattcgtttaaacctgcaggactagtccctttagtgag

SEQ ID NO: 312 - protein, 734 aa, Artificial Sequence
  source: /note="Description of Artificial Sequence: Synthetic polypeptide"
MAADGYLPDWLEDTLSEGIRQWWKLKPGPPPKPAERHKDDSRGLVLPGYKYLGPFNGLDKGEPVNEADAAALEHDKAYDRQLDSGDNPYLKYNHADAEFQERLKEDTSFGGNLGRAVFQAKKRVLEPLGLVEEPVKTAPGKKRPVEHSPVEPDSSSGTGKAGNQPARKRLNFGQTGDADSVPDPQPLGQPPAAPSGLGTNTMATGSGAPMADNNEGADGVGNSSGDWHCDSTWMGDRVITTSTRTWALPTYNNHLYKQISSQSGASNDNHYFGYSTPWGYFDFNRFHCHFSPRDWQRLINNNWGFRPKRLNLKLFNIQVKEVTQNDGTTTIANNLTSTVQVFTDLEYQLPYVLGSAHQGCLPPFPADVFMVPQYGYLTLNNGSQAVGRSSFYCLEYFPSQMLRTGNNFTFSYTFEDVPFHSSYAHSQSLDRLMNPLIDQYLYYLSRTNTPSGTTTQSRLQFSQAGASDIRDQSRNWLPGPCYRQQRVSKTAADNNNGEYSWTGATKYHLNGRDSLVNPGPAMASHKDDEEKFFPQSGVLIFGKQGSEKTNVDIEKVMITDEEEIRTTNPVATEQYGSVSTNLQSGNTRAATSDVNTQGVLPGMVWQDRDVYLQGPIWAKIPHTDGHFHPSPLMGGFGLKHPPPQILIKNTPVPANPSTTFSAAKFASFITQYSTGQVSVEIEWELQKENSKRWNPEIQYTSNYNKSVNVDFTVDTNGVYSEPRPIGTRYLTRNL

SEQ ID NO: 313 - DNA, 2208 bp, Artificial Sequence
  source: /note="Description of Artificial Sequence: Synthetic polynucleotide"
atggctgccgatggttatcttccagattggctcgaggacactctctctgaaggaataagacagtggtggaagctcaaacctggcccaccaccaccaaagcccgcagagcggcataaggacgacagcaggggtcttgtgcttcctgggtacaagtacctcggacccttcaacggactcgacaagggagagccggtcaacgaggcagacgccgcggccctcgagcacgacaaggcctacgaccggcagctcgacagcggagacaacccgtacctcaagtacgaccacgccgacgcggagtttcaggagcgccttaaagaagatacgtcttttgggggcaacctcggacgagcagtcttccaggcaaaaaagagggttcttgaacctctgggcctggttgaggagcctgttaagacggctccgggaaaaaagaggccggtagagcactctcctgtggagccagactcctcctcgggaaccggaaaagcgggcaaccagcctgcaagaaagagattgaatttcggtcagactggagacgcagactccgtacctgacccccagcctctcggacagccaccagcagccccctctggtctgggaactaatacgatggctacaggcagtggcgcaccaatggcagacaataacgatggcgccgacggagtgggtaattcctcgggaaattggcattgcgattccacatggatgggcgacagagtcatcaccaccagcacccgaacctgggctctgcccacctacaacaaccatctgtacaagcagatttccagccaatcaggagccagcaacgacaaccactactttggctacagcaccccttgggggtattttgacttcaacagattccactgccacttttcaccacgtgactggcaaagactcatcaacaacaactggggattccggcccaagagactcaacttcaagctctttaacattcaagtcagagaggtcacgcagaatgatggtacgacgacgattgccaataaccttaccagcacggttcaggtgtttactgactcggagtaccagctcccgtacgtcctcggctcggcgcatcaaggatgcctcccgccgttcccagcagacgtcttcatggtgccacagtatggatacctcaccctgaacaacgggagtcaggcagtaggacgctcttcattttactgcctggagtacttcccttctcagatgctgcgtaccggaaacaactttaccttcagctacacctttgaggatgttcctttccacagcagctacgctcacagccagagtttggaccgtctcatgaatcctctcatcgaccagtacctgtattacttgagcagaacaaacactccaagcggaaccaccacgcagtccaggcttcagttttctcaggccggagcgagtgacattcgggatcagtctaggaactggcttcctggaccctgttaccgccagcagcgagtatcaaagacatctgcggacaacaacaacagtgaatactcgtggattggagctaccaagtaccacctcaatggcagagactctctggtgaatccgggcccggcaatggccagccacaaggacgatgaagaaaagttttttcctcagagcggggttctcatctttggaaaacaaggatcagagaaaacaaatgtggacattgaaaaggtcatgattacagacgaagaggaaatcagaaccaccaatcccgtggccacggagcagtatggttctgtatctaccaacctccagagcggcaacacacaagcatctactgcagatgtcaacacacaaggcgttcttccaggcatggtctggcaggacagagacgtgtacctgcaggggcctatctgggcaaagattccgcacacggacggacattttcacccctctcccctcatgggcggattcggacttaaacaccctcctccacagattctcatcaaaaacaccccggtacctgcgaatccttcgaccaccttcagtgcggcaaagtttgcttccttcatcacacagtattccacggggcgggtcagcgtggagatcgagtgggagctacagaaggagaacagcaaacgctggaatcccgagatccagtacacttccaactacaacaaatctgttaatgtggactttactgtggacactaatggtgtgtattcagagcctcgccccattggcaccagatacctgactcgtaatctgtaa

SEQ ID NO: 314 - protein, 735 aa, Artificial Sequence
  source: /note="Description of Artificial Sequence: Synthetic polypeptide"
MAADGYLPDWLEDTLSEGIRQWWKLKPGPPPPKPAERHKDDSRGLVLPGYKYLGPFNGLDKGEPVNEADAAALEHDKAYDRQLDSGDNPYLKYDHADAEFQERLKEDTSFGGNLGRAVFQAKKRVLEPLGLVEEPVKTAPGKKRPVEHSPVEPDSSSGTGKAGNQPARKRLNFGQTGDADSVPDPQPLGQPPAAPSGLGTNTMATGSGAPMADNNDGADGVGNSSGNWHCDSTWMGDRVITTSTRTWALPTYNNHLYKQISSQSGASNDNHYFGYSTPWGYFDFNRFHCHFSPRDWQRLINNNWGFRPKRLNFKLFNIQVREVTQNDGTTTIANNLTSTVQVFTDSEYQLPYVLGSAHQGCLPPFPADVFMVPQYGYLTLNNGSQAVGRSSFYCLEYFPSQMLRTGNNFTFSYTFEDVPFHSSYAHSQSLDRLMNPLIDQYLYYLSRTNTPSGTTTQSRLQFSQAGASDIRDQSRNWLPGPCYRQQRVSKTSADNNNSEYSWIGATKYHLNGRDSLVNPGPAMASHKDDEEKFFPQSGVLIFGKQGSEKTNVDIEKVMITDEEEIRTTNPVATEQYGSVSTNLQSGNTQASTADVNTQGVLPGMVWQDRDVYLQGPIWAKIPHTDGHFHPSPLMGGFGLKHPPPQILIKNTPVPANPSTTFSAAKFASFITQYSTGRVSVEIEWELQKENSKRWNPEIQYTSNYNKSVNVDFTVDTNGVYSEPRPIGTRYLTRNL

SEQ ID NO: 315 - DNA, 2217 bp, Artificial Sequence
  source: /note="Description of Artificial Sequence: Synthetic polynucleotide"
atggctgccgatggttatcttccagattggctcgaggacaacctctctgagggcattcgcgagtggtgggacttgaaacctggagccccgaaacccaaagccaaccagcaaaagcaggacgacggccggggtctggtgcttcctggctacaagtacctcggacccttcaacggactcgacaagggggagcccgtcaacgcggcggacgcagcggccctcgagcacgacaaggcctacgaccagcagctcaaagcgggtgacaatccgtacctgcggtataaccacgccgacgccgagtttcaggagcgtctgcaagaagatacgtcttttgggggcaacctcgggcgagcagtcttccaggccaagaagcgggttctcgaacctctcggtctggttgaggaaggcgctaagacggctcctggaaagaagagaccggtagagccatcaccccagcgttctccagactcctctacgggcatcggcaagacaggccagcagcccgcgaaaaagagactcaactttgggcagactggcgactcagagtcagtgcccgaccctcaaccaatcggagaaccccccgcaggcccctctggtctgggatctggtacaatggctgcaggcggtggcgctccaatggcagacaataacgaaggcgccgacggagtgggtagttcctcaggaaattggcattgcgattccgcatggctgggcgacagagtcatcaccaccagcacccgaccctgggccctccccacctacaacaaccacctctacaagcaaatctccaacgggacatcgggaggaagcaccaacgacaacacctacttcggctacagcaccccctgggggtattttgactttaacagattccactgccacttctcaccacgtgactggcagcgactcatcaacaacaactggggattccggcccaagagactcaacttcaagctcttcaacatccaggtcaaggaggtcacgcagaatgaaggcaccaagaccatcgccaataaccttaccagcacgattcaggtctttacggactcggaataccagctcccgtacgtcctcggctctgcgcaccagggctgcccgcctccgttcccggcggacgtcttcatgattcctcagtacgggtacctgactctgaacaacggcagtcaggccgtgggccgttcctccttctactgcctggagtactttccttctcaaatgcggagaacgggcaacaactttgagttcagctaccagtttgaggacgtgccttttcacagcagctacgcgcatagccaaagcctggaccggctgatgaaccccctcatcgaccagtacctgtactacctgtctcggactcagtccacgggaggtaccgcaggaactcagcagttgctattttctcaggccgggcctaataacatgtcggctcaggccaaaaactggctacccgggccctgctaccggcagcaacgcgtctccacgacactgtcgcaaaataacaacagcaactttgcttggaccggtgccaccaagtatcatctgaatggcagagactctctggtaaatcccggtgtcgctatggcaacgcacaaggacgacgaagagcgattttttccatccagcggagtcttgatgtttgggaaacagggagctggaaaagacaacgtggactatagcagcgttatgctaaccagtgaggaagaaatcaaaaccaccaacccagtggccacagaacagtacggcgtggtggccgataacctgcaacagcaaaacgccgctcctattgtaggggccgtcaacagtcaaggagccttacctggcatggtctggcagaaccgggacgtgtacctgcagggtcctatctgggccaagattcctcacacggacggcaactttcatccttcgccgctgatgggaggctttggactgaaacacccgcctcctcagatcctgattaagaatacacctgttcccgcggatcctccaactaccttcagtcaagccaagctggcgtcgttcatcacgcagtacagcaccggacaggtcagcgtggaaattgaatgggagctgcagaaagagaacagcaagcgctggaacccagagattcagtatacttccaactactacaaatctacaaatgtggactttgctgtcaatactgagggtacttattcagagcctcgccccattggcacccgttacctcacccgtaacctgtaa

SEQ ID NO: 316 - protein, 738 aa, Artificial Sequence
  source: /note="Description of Artificial Sequence: Synthetic polypeptide"
MAADGYLPDWLEDNLSEGIREWWDLKPGAPKPKANQQKQDDGRGLVLPGYKYLGPFNGLDKGEPVNAADAAALEHDKAYDQQLKAGDNPYLRYNHADAEFQERLQEDTSFGGNLGRAVFQAKKRVLEPLGLVEEGAKTAPGKKRPVEPSPQRSPDSSTGIGKTGQQPAKKRLNFGQTGDSESVPDPQPIGEPPAGPSGLGSGTMAAGGGAPMADNNEGADGVGSSSGNWHCDSAWLGDRVITTSTRPWALPTYNNHLYKQISNGTSGGSTNDNTYFGYSTPWGYFDFNRFHCHFSPRDWQRLINNNWGFRPKRLNFKLFNIQVKEVTQNEGTKTIANNLTSTIQVFTDSEYQLPYVLGSAHQGCPPPFPADVFMIPQYGYLTLNNGSQAVGRSSFYCLEYFPSQMRRTGNNFEFSYQFEDVPFHSSYAHSQSLDRLMNPLIDQYLYYLSRTQSTGGTAGTQQLLFSQAGPNNMSAQAKNWLPGPCYRQQRVSTTLSQNNNSNFAWTGATKYHLNGRDSLVNPGVAMATHKDDEERFFPSSGVLMFGKQGAGKDNVDYSSVMLTSEEEIKTTNPVATEQYGVVADNLQQQNAAPIVGAVNSQGALPGMVWQNRDVYLQGPIWAKIPHTDGNFHPSPLMGGFGLKHPPPQILIKNTPVPADPPTTFSQAKLASFITQYSTGQVSVEIEWELQKENSKRWNPEIQYTSNYYKSTNVDFAVNTEGTYSEPRPIGTRYLTRNL

SEQ ID NO: 317 - protein, 735 aa, Artificial Sequence
  source: /note="Description of Artificial Sequence: Synthetic polypeptide"
MAADGYLPDWLEDTLSEGIRQWWKLKPGPPPPKPAERHKDDSRGLVLPGYKYLGPFNGLDKGEPVNEADAAALEHDKAYDRQLDSGDNPYLKYNHADAEFQERLKEDTSFGGNLGRAVFQAKKRVLEPLGLVEEPVKTAPGKKRPVEHSPVEPDSSSGTGKAGQQPARKRLNFGQTGDADSVPDPQPLGQPPAAPSGLGSTTMATGSGAPMADNNEGADGVGNSSGNWHCDSQWLGDRVITTSTRTWALPTYNNHLYKQISSQSGASNDNHYFGYSTPWGYFDFNRFHCHFSPRDWQRLINNNWGFRPKRLNFKLFNIQVKEVTQNDGTTTIANNLTSTVQVFTDSEYQLPYVLGSAHQGCLPPFPADVFMVPQYGYLTLNNGSQAVGRSSFYCLEYFPSQMLRTGNNFQFSYTFEDVPFHSSYAHSQSLDRLMNPLVDQYLYYLNKTQTNSGTLQQSRLLFSQAGPTNMSLQAKNWLPGPCYRQQRLSKQANDNNNSNFPWTAATKYHLNGRDSLVNPGPAMASHKDDEEKFFPMHGTLIFGKQGTNANDADLENVMITDEEEIRTTNPVATEQYGTVSNNLQNSNTGPTTGTVNHQGALPGMVWQDRDVYLQGPIWAKIPHTDGHFHPSPLMGGFGLKHPPPQIMIKNTPVPANPPTNFSSAKFASFITQYSTGQVSVEIEWELQKENSKRWNPEIQYTSNYNKSVNVDFTVDTNGVYSEPRPIGTRYLTRNL

SEQ ID NO: 318 - DNA, 3158 bp, Artificial Sequence
  source: /note="Description of Artificial Sequence: Synthetic polynucleotide"
gattgaatttagcggccgcgaattcgcccttgctgcgtcaactggaccaatgagaactttcctttcaatgattgcgtcgacaagatggtgatctggtgggaggagggaaagatgaccgccaaggtcgtggagtcggccaaagccattctcggaggaagcaaggtgcgcgcggaccagaaatgcaagtcctcggcccagatagacccgactcccgtgattgtcacctccaacaccaacatgtgcgccgtgattgacgggaactcaacgaccttcgaacaccagcagccgttgcaagaccggatgttcaaatttgaactcacccgccgtctggatcatgactttgggaaggtcaccaagcaggaagtcaaagactttttccggtgggcaaaggatcacgtggttgaggtggagcatgaattctacgtcaaaaagggtggagctaagaaaagacccgcccccagtgacgcagatataagtgagcccaaacgggcgcgcgagtcagttgcgcagccatcgacgtcagacgcggaagcttcgatcaactacgcgggcaggtaccaaaacaaatgttctcgtcacgtgggcatgaatctgatgctgtttccctgcagacaatgcgagagaatgaatcagaattcaaatatctgcttcactcacggacagaaagactgtttagagtgctttcccgtgtcagaatctcaacccgtttctgtcgtcaaaaaggcgtatcagaaactttgctacattcatcatatcatgggaaaggtgccagacgcttgcactgcctgcgatctggtcaatgtggatttggatgactgcatctctgaacaataaatgatttaaatcaggtatggctgccgatggttatcttccagattggctcgaggacactctctctgaaggaataagacagtggtggaagctcaaacctggcccaccaccaccaaagcccgcagagcggcataaggacgacagcaggggtcttgtgcttcctgggtacaagtacctcggacccttcaacggactcgacaagggggagccggtcaacgaggcagacgccgcggccctcgagcacgacaaggcctacgaccggcagctcgacagcggagacaacccgtacctcaagtacaaccacgccgacgcggagtttcaggagcgccttaaagaagatacgtcttttgggggcaacctcggacgagcagtcttccaggcaaaaaagagggttcttgaacctctgggcctggttgaggaacctgttaaaacggctccgggaaaaaagaggccggtagagcactctcctgtggagccagactcctcctcgggaaccggaaaagcgggccagcagcctgcaagaaaaagattgaatttcggtcagactggagacgcagactccgtacctgacccccagcctctcggacagccaccagcagccccctctggtctgggatctactacaatggctacaggcagtggcgcaccaatggcagacaataacgagggtgccgatggagtgggtaattcctcgggaaattggcattgcgattcccaatggctgggcgacagagtcatcaccaccagcacccgcacctgggccctgcccacctacaacaaccacctctacaagcaaatctccagccaatcaggagcctcaaacgacaaccactactttggctacagcaccccctgggggtattttgacttcaacagattccactgccacttttcaccacgtgactggcaaagactcatcaacaacaactggggattccgacccaagagactcaacttcaagctctttaacattcaagtcaaagaggtcacgcagaatgacggtacgacgacgattgccaataaccttaccagcacggttcaggtgtttactgactcggagtaccagctcccgtacgtcctcggctcggcgcatcaaggatgcctcccgccgtttccagcggacgtcttcatggtcccacagtatggatacctcaccctgaacaacgggagtcaggcagtaggacgctcttcattttactgcctggagtactttccttctcagatgctgcgtaccggaaacaactttcaattcagctacacttttgaagacgtgcctttccacagcagctacgctcacagccagagtctggatcggctgatgaatcctctggtcgaccagtacctgtattatctgaacaagacacaaacaaatagtggaactcttcagcagtctcggctactgtttagccaagctggacccaccaacatgtctcttcaagctaaaaactggctgcctggaccttgctacagacagcagcgtctgtcaaagcaggcaaacgacaacaacaacagcaactttccctggactgcagctacaaagtatcatctaaatggccgggactcgttggttaatccaggaccagctatggccagtcacaaggatgacgaagaaaagtttttccccatgcatggaacccttatatttggtaaacaaggaacaaatgccaacgacgcggatttggaaaatgtcatgattacagatgaagaagaaatcaggaccaccaatcccgtggctacggagcagtacggaactgtatcaaataatttgcaaaactcaaacactggtccaactactggaactgtcaatcaccaaggagcgttacctggtatggtgtggcaggatcgagacgtgtacctgcagggacccatttgggccaagattcctcacaccgatggacactttcatccttctccactgatgggaggttttggactcaaacacccacctcctcaaatcatgatcaaaaacactcccgttccagccaatcctcccacaaacttcagttctgccaagtttgcttctttcatcacacagtattccacggggcaggtcagcgtggagatcgagtgggagctgcagaaggagaacagcaaacgctggaatcccgaaattcagtacacttccaactacaacaaatctgttaatgtggactttactgtggacactaatggtgtgtattcagagcctcgccccattggcaccagatacctgactcgtaatctgtaattgcttgttaatcaataaaccgtttaattcgtttcagttgaactttggtctctgcgaagggcgaattcgtttaaacctgcaggactagtccctttagtga

SEQ ID NO: 319 - protein, 735 aa, Artificial Sequence
  source: /note="Description of Artificial Sequence: Synthetic polypeptide"
MAADGYLPDWLEDTLSEGIRQWWKLKPGPPPPKPAERHKDDSRGLVLPGYKYLGPFNGLDKGEPVNEADAAALEHDKAYDRQLDSGDNPYLKYNHADAEFQERLKEDTSFGGNLGRAVFQAKKRVLEPLGLVEEPVKTAPGKKRPVEHPPVEPDSSSGTGKAGQQPARKRLNFGQTGDADSVPDPQPLGQPPAAPSGLGSTTMATGSGAPMADNNEGADGVGNSSGNWHCDSQWLGDRVITTSTRTWALPTYNNHLYKQISSQSGASNDNHYFGYSTPWGYFDFNRFHCHFSPRDWQRLINNNWGFRPKRLNFKLFNIQVKEVTQNDGTTTIANNLTSTVQVFTDSEYQLPYVLGSAHQGCLPPFPADVFMVPQYGYLTLNNGSQAVGRSSFYCLEYFPSQMLRTGNNFQFSYTFEDVPFHSSYAHSQSLDRLMNPLIDQYLYYLNKTQTNSGTLQQSRLLFSQAGPTNMSLQAKNRLPGPCYRQQRLSKQANDNNNSNFPWTAATKYHLNGRDSLVNPGPAMASHKDDEEKFFPMHGTLIFGKQGTNANDADLENVMITDEEEIRTTNPVATEQYGTVSNNLQNSNTGPTTGTVNHQGALPGMVWQDRDVYLQGPIWAKIPHTDGHFHPSPLVGGFGLKHPPPQIMIKNTPVPANPPTNFSSAKFASFITQYSTGQVSVEIEWELQKENSKRWNPEIQYTSNYNKSVNVDFTVDTNGVYSEPRPIGTRYLTRNL

SEQ ID NO: 320 - DNA, 3159 bp, Artificial Sequence
  source: /note="Description of Artificial Sequence: Synthetic polynucleotide"
gattgaatttagcggccgcgaattcgcccttgctgcgtcaactggaccaatgagaactttcctttcaatgattgcgtcgacaagatggtgatctggtgggaggagggaaagatgaccgccaaggtcgtggagtcggccaaagccattctcggaggaagcaaggtgcgcgtggaccagaaatgcaagtcctcggcccagatagacccgactcccgtgattgtcacctccaacaccgacatgtgcgccgtgattgacgggaactcaacgaccttcgaacaccagcagccgttgcaagaccggatgttcaaatttgaactcacccgccgtctggatcatgactttgggaaggtcaccaagcaggaagtcaaagactttttccggtgggcaaaggatcacgtggttgaggtggagcatgaattctacgtcaaaaagggtggagctaagaaaagacccgcccccagtgacgcagatataagtgagcccaaacgggcgcgcgagtcagttgcgcagccatcgacgtcagacgcggaagcttcgatcaactacgcggacaggtaccaaaacaaatgttctcgtcacgtgggcatgaatctgatgctgtttccctgcagacaatgcgagagaatgaatcagaattcaaatatctgcttcactcacggacagaaagactgtttagagtgctttcccgtgtcagaatctcaacccgtttctgtcgtcaaaaaggcgtatcagaaactttgctacattcatcatatcatgggaaaggtgccagacgcttgcactgcctgcgatctggtcaatgtggatttggatgactgcatctctgaacaataaatgatttaaatcaggtatggctgccgatggttatcttccagattggctcgaggacactctctctgaaggaataagacagtggtggaagctcaaacctggcccaccaccaccaaagcccgcagagcggcataaggacgacagcaggggtcttgtgcttcctgggtacaagtacctcggacccttcaacggactcgacaagggggagccggtcaacgaggcagacgccgcggccctcgagcacgacaaggcctacgaccggcagctcgacagcggagacaacccgtacctcaagtacaaccacgccgacgcggagtttcaggagcgccttaaagaagatacgtcttttgggggcaacctcggacgagcagtcttccaggcaaaaaagagggttcttgaacctctgggcctggttgaggaacctgttaaaacggctccgggaaaaaagaggccggtagagcaccctcctgtggagccagactcctcctcgggaaccggaaaagcgggccagcagcctgcaagaaaaagattgaatttcggtcagactggagacgcagactccgtacctgacccccagcctctcggacagccaccagcagccccctctggtctgggatctactacaatggctacaggcagtggcgcaccaatggcagacaataacgagggtgccgatggagtgggtaattcctcgggaaattggcattgcgattcccaatggctgggcgacagagtcatcaccaccagcacccgcacctgggccctgcccacctacaacaaccacctctacaagcaaatctccagccaatcaggagcctcaaacgacaaccactactttggctacagcaccccctgggggtattttgacttcaacagattccactgccacttttcaccacgtgactggcaaagactcatcaacaacaactggggattccgacccaagagactcaacttcaagctctttaacattcaagtcaaagaggtcacgcagaatgacggtacgacgacgattgccaataaccttaccagcacggttcaggtgtttactgactcggagtaccagctcccgtacgtcctcggctcggcgcatcaaggatgcctcccgccgtttccagcggacgtcttcatggtcccacagtatggatacctcaccctgaacaacgggagtcaggcagtaggacgctcttcattttactgcctggagtactttccttctcagatgctgcgtaccggaaacaactttcagttcagctacacttttgaagacgtgcctttccacagcagctacgctcacagccagagtctggatcggctgatgaatcctctgatcgaccagtacctgtattatctgaacaagacacaaacaaatagtggaactcttcagcagtctcggctactgtttagccaagctggacccaccaacatgtctcttcaagctaaaaaccggctgcctggaccttgctacagacagcagcgtctgtcaaagcaggcaaacgacaacaacaacagcaactttccctggaccgcagctacaaagtatcatctaaatggccgggactcgttggttaatccaggaccagctatggccagtcacaaggatgacgaagaaaagtttttccccatgcatggaacccttatatttggtaaacaaggaacaaatgccaacgacgcggatttggaaaatgtcatgattacagatgaagaagaaatcaggaccaccaatcccgtggctacggagcagtacggaactgtatcaaataatttgcaaaactcaaacactggtccaactactggaactgtcaatcaccaaggagcgttacctggtatggtgtggcaggatcgagacgtgtacctgcagggacccatttgggccaagattcctcacaccgatggacactttcatccttctccactggtgggaggttttggactcaaacacccacctcctcaaatcatgatcaaaaacactcccgttccagccaatcctcccacaaacttcagttctgccaagtttgcttctttcatcacacagtattccacggggcaggtcagcgtggagatcgagtgggagctgcagaaggagaacagcaaacgctggaatcccgaaattcagtacacttccaactacaacaaatctgttaatgtggactttactgtggacactaatggtgtgtattcagagcctcgccccattggcaccagatacctgactcgtaatctgtaattgcttgttaatcaataaaccgtttaattcgtttcagttgaactttggtctctgcgaagggcgaattcgtttaaacctgcaggactagtccctttagtgag

SEQ ID NO: 321 - DNA, 2208 bp, Artificial Sequence
  source: /note="Description of Artificial Sequence: Synthetic polynucleotide"
atggctgccgatggttatcttccagattggctcgaggacactctctctgaaggaataagacagtggtggaagctcaaacctggcccaccaccaccaaagcccgcagagcggcataaggacgacagcaggggtcttgtgcttcctgggtacaagtaccttggacccttcaacggactcgacaagggagagccggtcaacgaggcagacgccgcggccctcgagcacgacaaggcctacgaccggcagctcgacagcggagacaacccgtaccccaagtacaaccacgccgacgcggagttccaggagcgtcttaaagaagatacgtcttttgggggcaacctcggacgagcagtcttccaggcgaaaaagagggttcttgaacctctgggcctggttgaggaacctgttaagacggctccgggaaaaaagaggccggtagagcactctcctgcggagccagactcctcctcgggaaccggaaaagcgggccagcagcctgcaagaaagagattgaatttcggtcagactggagacgcagactccgtacctgacccccagcctctcggacagccaccagcagccccctctggtctgggaactaatacgatggctacaggcagtggcgcaccaatggcagacaataacgagggcgccgacggagtgggtaattcctcgggaaattggcattgcgattccacatggatgggcgacagagtcatcaccaccagcacccgcacctgggctctgcccacctacaacaaccacctctacaagcagatttccagccaatcaggagcctcaaacgacaaccactactttggctacagcaccccttgggggtattttgacttcaacagattccactgccacttttcgccacgtgactggcaaagactcatcaacaacaattggggattccggcccaaaagactcaacttcaagctctttaacattcaagtcaaggaggtcacgcagaatgacggtacgacgacgattgccaataaccttaccagcacggttcaggtgtttactgactcggagtaccagctcccgtacgtcctcggctcggcgcatcaaggatgcctcccgccgttcccagcagacgtcttcatggtgccacagtatggatacctcaccctgaacaacgggagtcaggcagtaggacgctcttcattttactgcctggagtactttccttctcagatgctgcgtaccggaaacaactttaccttcagctacacctttgaggacgttcctttccacagcagctacgcccacagccagagtttggaccgtctcatgaatcctctcatcgaccagtacctgtattacttgagcagaacaaacactccaagcggaaccaccacgcagtcaaggcttcagttttctcaggccggagcaagtgacattcgggaccagtctaggaactggcttcctggaccctgttaccgccagcagcgagtatcaaagacatctgcggataacaacaacagtgaatactcgtggactggagctaccaagtaccaccttaatggaagagactctctggtgaatccgggcccggccatggccagccacaaggacgatgaagaaaagttttttcctcagagcggggttctcatctttggaaaacaagactcgggaaaaactaatgtggacattgaaaaggtcatgattacagacgaagaggaaatcaggaccaccaatcccgtggctacggagcagtatggttctgtatctaccaacctccagagcggcaacacacaagcagctacctcagatgtcaacacacaaggcgttcttccaggcatggtgtggcaggacagagacgtgtacctgcaggggcccatctgggcaaagattccacacacggacggacattttcacccctctcccctcatgggcggattcggacttaaacaccctcccccgcagattctcatcaagaacaccccggtacctgcgaatccttcgactaccttcagtgcggcaaagtttgcttccttcattacacagtactccacggggcaggtcagcgtggagatcgagtgggagctgcagaaggagaacagcaaacgctggaatcccgagattcagtacacttccaactacaacaaatctgttaatgtggactttactgtggacactaatggtgtgtattcagagcctcgccccattggcaccaggtacctgactcgtaatctgtaa

SEQ ID NO: 322 - protein, 735 aa, Artificial Sequence
  source: /note="Description of Artificial Sequence: Synthetic polypeptide"
MAADGYLPDWLEDTLSEGIRQWWKLKPGPPPPKPAERHKDDSRGLVLPGYKYLGPFNGLDKGEPVNEADAAALEHDKAYDRQLDSGDNPYPKYNHADAEFQERLKEDTSFGGNLGRAVFQAKKRVLEPLGLVEEPVKTAPGKKRPVEHSPAEPDSSSGTGKAGQQPARKRLNFGQTGDADSVPDPQPLGQPPAAPSGLGTNTMATGSGAPMADNNEGADGVGNSSGNWHCDSTWMGDRVITTSTRTWALPTYNNHLYKQISSQSGASNDNHYFGYSTPWGYFDFNRFHCHFSPRDWQRLINNNWGFRPKRLNFKLFNIQVKEVTQNDGTTTIANNLTSTVQVFTDSEYQLPYVLGSAHQGCLPPFPADVFMVPQYGYLTLNNGSQAVGRSSFYCLEYFPSQMLRTGNNFTFSYTFEDVPFHSSYAHSQSLDRLMNPLIDQYLYYLSRTNTPSGTTTQSRLQFSQAGASDIRDQSRNWLPGPCYRQQRVSKTSADNNNSEYSWTGATKYHLNGRDSLVNPGPAMASHKDDEEKFFPQSGVLIFGKQDSGKTNVDIEKVMITDEEEIRTTNPVATEQYGSVSTNLQSGNTQAATSDVNTQGVLPGMVWQDRDVYLQGPIWAKIPHTDGHFHPSPLMGGFGLKHPPPQILIKNTPVPANPSTTFSAAKFASFITQYSTGQVSVEIEWELQKENSKRWNPEIQYTSNYNKSVNVDFTVDTNGVYSEPRPIGTRYLTRNL

SEQ ID NO: 323 - DNA, 2208 bp, Artificial Sequence
  source: /note="Description of Artificial Sequence: Synthetic polynucleotide"
atggctgccgatggttatcttccagattggctcgaggacactctctctgaaggaataagacagtggtggaagctcaaacctggcccaccaccaccaaagcccgcagagcggcataaggacgacagcaggggtcttgtgcttcctgggtacaagtaccttggacccttcaacggactcgacaagggagagccggtcaacgaggcagacgccgcggccctcgagcacgacaaggcctacgaccggcagctcgacggcggagacaacccgtacctcaagtacaaccacgccgacgcggagttccaggagcgtcttaaagaagatacgtcttttgggggcaacctcggacgagcagtcttccaggcgaaaaagagggttcttgaacctctgggcctggttgaggaacctgttaagacggctccgggaaaaaagaggccggtagagcactctcttgcggagccagactcctcctcgggaaccggaaaagcgggccagcagcctgcaagaaggagattgaatttcggtcagactggagacgcagactccgtacctgacccccagcctctcggacagccaccagcagccccctctggtctgggaactaatacgatggctacaggcagtggcgcaccaatggcagacaataacgagggcgccgacggagtgggtaattcctcgggaaattggcattgcgattccacatggatgggcgacagagtcatcaccaccagcacccgcacctgggctctgcccacctacaacaaccacctctacaggcagatttccagccaatcaggagcctcaaacgacaaccactactttggctacagcaccccttgggggtattttgacttcaacagattccactgccacttttcgccacgtgactggcaaagactcatcaacaacaattggggatcccggcccaaaagactcaacttcaagctctttaacattcaagtcaaggaggtcacgcagaatgacggtacgacgacgattgccaataaccttaccagcacggttcaggtgtttactgactcggagtaccagctcccgtacgtcctcggctcggcgcatcaaggatgcctcccgccgttcccagcagacgtcttcatggtgccacagtatggatacctcaccctgaacaacgggagtcaggcagtaggacgctcttcattttactgcctggagtactttccttctcagatgctgcgtaccggaaacaactttaccttcagctacacctttgaggacgttcctttccacagcagctacgcccacagccagagtttggaccgtctcatgaatcctctcgtcgaccagtacctgtattacttgagcagaacaaacactccaagcggaaccaccacgcagtcaaggcttcagttttctcaggccggagcaagtgacattcgggaccagtctaggaactggcttcctggaccctgttaccgccagcagcgagtatcaaagacatctgcggataacaacaacagtgaatactcgtggactggagctaccaagtaccaccttaatggaagagactctctggtgaatccgggcccggccatggccagccacaaggacgatgaagaaaagttttttcctcagagcggggttctcatctttggaaaacaagactcgggaaaaactaatgtggacattgaaaaggtcatgattacagacgaagaggaaatcaggaccaccaatcccgtggctacggagcagtatggttctgtatctaccaacctccagagcggcaacacacaagcagctacctcagatgtcaacacacaaggcgttcttccaggcatggtgtggcaggacagagacgtgtacctgcaggggcccatctgggcaaagattccacacacggacggacattttcacccctctcccctcatgggcggattcggacttaaacaccctcccccgcagattctcatcaagaacaccccggtacctgcgaatccttcgactaccttcagtgcggcaaagtttgcttccttcattacacagtactccacggggcaggtcagcgtggagatcgagtgggagctgcagaaggagaacagcaaacgctggaatcccgagattcagtacacttccaactacaacaaatctgttaatgtggactttactgtggacactaatggtgtgtattcagagcctcgccccattggcaccagatacctgactcgtaatctgtaa

SEQ ID NO: 324 - protein, 735 aa, Artificial Sequence
  source: /note="Description of Artificial Sequence: Synthetic polypeptide"
MAADGYLPDWLEDTLSEGIRQWWKLKPGPPPPKPAERHKDDSRGLVLPGYKYLGPFNGLDKGEPVNEADAAALEHDKAYDRQLDGGDNPYLKYNHADAEFQERLKEDTSFGGNLGRAVFQAKKRVLEPLGLVEEPVKTAPGKKRPVEHSLAEPDSSSGTGKAGQQPARRRLNFGQTGDADSVPDPQPLGQPPAAPSGLGTNTMATGSGAPMADNNEGADGVGNSSGNWHCDSTWMGDRVITTSTRTWALPTYNNHLYRQISSQSGASNDNHYFGYSTPWGYFDFNRFHCHFSPRDWQRLINNNWGSRPKRLNFKLFNIQVKEVTQNDGTTTIANNLTSTVQVFTDSEYQLPYVLGSAHQGCLPPFPADVFMVPQYGYLTLNNGSQAVGRSSFYCLEYFPSQMLRTGNNFTFSYTFEDVPFHSSYAHSQSLDRLMNPLVDQYLYYLSRTNTPSGTTTQSRLQFSQAGASDIRDQSRNWLPGPCYRQQRVSKTSADNNNSEYSWTGATKYHLNGRDSLVNPGPAMASHKDDEEKFFPQSGVLIFGKQDSGKTNVDIEKVMITDEEEIRTTNPVATEQYGSVSTNLQSGNTQAATSDVNTQGVLPGMVWQDRDVYLQGPIWAKIPHTDGHFHPSPLMGGFGLKHPPPQILIKNTPVPANPSTTFSAAKFASFITQYSTGQVSVEIEWELQKENSKRWNPEIQYTSNYNKSVNVDFTVDTNGVYSEPRPIGTRYLTRNL

SEQ ID NO: 325 - protein, 738 aa, Artificial Sequence
  source: /note="Description of Artificial Sequence: Synthetic polypeptide"
MAADGYLPDWLEDNLSEGIREWWDLKPGAPKPKANQQKQDDGRGLVLPGYKYLGPFNGLDKGEPVNAADAAALEHDKAYDQQLKAGDNPYLRYNHADAEFQERLQEDTSFGGNLGRAVFQAKKRVLEPLGLVEEAAKTAPGKKRPVEPSPQRSPDSSAGIGKKGQQPAKKRLNFGQTGDSESVPDPQPIGEPPAGPSGLGSGTMAAGGGAPMADNNEGADGVGSSSGNWHCDSTWLGDRVITTSTRTWALPTYNNHLYKQISNGTSGGSTNDNTYFGYSTPWGYFDFNRFHCHFSPRDWQRLINNNWGFRPKRLSFKLFNIQVKEVTQNEGTETIANNLTSTIQVFTDSEYQLPYVLGSAHQGCLPPFPADVFMIPQYGYLTLNNGSQAVGRSSFYCLEYFPSQMLRTGNNFEFSYTFEDVPFHSSCAHSQSSDRLMNPLIDQYLYYLSRTRSTGGTQGTQQLLFSQAGPANMSAQAKNWLPGPCYRQQRVSTTLSQNNNSNFAWTGATKYHLNGRDSLVNPGVAMATHKDDEERFFPSSGVLMFGKQGAGRDNVDYSSVMLTSEEEIKTTNPVATEQYGVVADNLQQTNTGPIVGNVNSQGALPGMVWQNRDVYLQGPIWAKIPHTDGNFHPSPLMGGFGLKHPPPQILIKNTPVPADPPTTFSQAKLASFITQYSTGQVSVEIEWELQKENSKRWNPEIQYTSNYYKSTNVDFAVNTEGTYSEPRPIGTRYLTRNL

SEQ ID NO: 326 - DNA, 2217 bp, Artificial Sequence
  source: /note="Description of Artificial Sequence: Synthetic polynucleotide"
atggctgctgacggttatcttccagattggctcgaggacaacctctctgagggcattcgcgagtggtgggacctgaaacctggagcccccaagcccaaggccaaccagcagaagcaggacgacggccggggtctggtgcttcttggctacaagtacctcggacccttcaacggactcgacaagggggagcccgtcaatgcggcggacgcagcggccctcgagcacgacaaggcctacgaccagcagctcaaagcgggtgacaatccgtacctgcggtataaccacgccgacgccgagtttcaggagcgtctgcaagaagatacgtcttttgggggcaacctcgggcgagcagtcttccaggccaagaagcgggttctcgaacctctcggtctggttgaggaagctgctaagacggctcctggaaagaagagaccggtagaaccgtcacctcagcgttcccccgactcctccacgggcatcggcaagaaaggccagcagcccgctaaaaagagactgaactttggtcagactggcgactcagagtcagtccccgaccctcaaccaatcggagaaccaccagcaggcccctctggtctgggatctggtacaatggctgcaggcggtggcgctccaatggcagacaataacgaaggcgccgacggagtgggtagttcctcaggaaattggcattgcgattccacatggctgggcgacagagtcatcaccaccagcacccgaacctgggccctgcccacctacaacaaccacctctacaagcaaatatccaatgggacatcgggaggaagcaccaacgacaacacctacttcggctacagcaccccctgggggtattttgacttcaacagattccactgccacttctcaccacgtgactggcagcgactcatcaacaacaactggggattccggccaaaaagactcagcttcaagctcttcaacatccaggtcaaggaggtcacgcagaatgaaggcaccaagaccatcgccaataaccttaccagcacgattcaggtatttacggactcggaataccagctgccgtacgtcctcggctccgcgcaccagggctgcctgcctccgttcccggcggacgtcttcatgattccccagtacggctaccttacactgaacaatggaagtcaagccgtaggccgttcctccttctactgcctggaatattttccatctcaaatgctgcgaactggaaacaattttgaattcagctacaccttcgaggacgtgcctttccacagcggctacgcacacagccagagcttggaccgactgatgaatcctctcatcgaccagtacctgtactacttatccagaactcagtccacaggaggaactcaaggtacccagcaattgttattttctcaagctgggcctgcaaacatgtcggctcaggctaagaactggctacctggaccttgctaccggcagcagcgagtctctacgacactgtcgcaaaacaacaacagcaactttgcttggactggtgccaccaaatatcacctgaacggaagagactctttggtaaatcccggtgtcgccatggcaacccacaaggacgacgaggaacgcttcttcccgtcgagtggagtcctgatgtttggaaaacagggtgctggaagagacaatgtggactacagcagcgttatgctaaccagcgaagaagaaattaaaaccactaaccctgtagccacagaacaatacggtgtggtggctgacaacttgcagcaaaccaatacagggcctattgtgggaaatgtcaacagccaaggagccttacctggcatggtctggcagaaccgagacgtgtacctgcagggtcccatctgggccaagattcctcacacggacggcaacttccacccttcaccgctaatgggaggatttggactgaagcacccacctcctcagatcctgatcaagaacacgccggtacctgcggatcctccaacgacgttcagccaggcgaaattggcttccttcattacgcagtacagcaccggacaggtcagcgtggaaatcgagtgggagctgcagaaggagaacagcaaacgctggaacccagagattcagtacacttcaaactactacaaatctacaaatgtggactttgctgtcaatacagagggaacttattctgagcctcgccccattggtactcgttacctcacccgtaatctgtaa

SEQ ID NO: 327 - protein, 738 aa, Artificial Sequence
  source: /note="Description of Artificial Sequence: Synthetic polypeptide"
MAADGYLPDWLEDNLSEGIREWWDLKPGAPKPKANQQKQDDGRGLVLLGYKYLGPFNGLDKGEPVNAADAAALEHDKAYDQQLKAGDNPYLRYNHADAEFQERLQEDTSFGGNLGRAVFQAKKRVLEPLGLVEEAAKTAPGKKRPVEPSPQRSPDSSTGIGKKGQQPAKKRLNFGQTGDSESVPDPQPIGEPPAGPSGLGSGTMAAGGGAPMADNNEGADGVGSSSGNWHCDSTWLGDRVITTSTRTWALPTYNNHLYKQISNGTSGGSTNDNTYFGYSTPWGYFDFNRFHCHFSPRDWQRLINNNWGFRPKRLSFKLFNIQVKEVTQNEGTKTIANNLTSTIQVFTDSEYQLPYVLGSAHQGCLPPFPADVFMIPQYGYLTLNNGSQAVGRSSFYCLEYFPSQMLRTGNNFEFSYTFEDVPFHSGYAHSQSLDRLMNPLIDQYLYYLSRTQSTGGTQGTQQLLFSQAGPANMSAQAKNWLPGPCYRQQRVSTTLSQNNNSNFAWTGATKYHLNGRDSLVNPGVAMATHKDDEERFFPSSGVLMFGKQGAGRDNVDYSSVMLTSEEEIKTTNPVATEQYGVVADNLQQTNTGPIVGNVNSQGALPGMVWQNRDVYLQGPIWAKIPHTDGNFHPSPLMGGFGLKHPPPQILIKNTPVPADPPTTFSQAKLASFITQYSTGQVSVEIEWELQKENSKRWNPEIQYTSNYYKSTNVDFAVNTEGTYSEPRPIGTRYLTRNL

SEQ ID NO: 328 - protein, 735 aa, Artificial Sequence
  source: /note="Description of Artificial Sequence: Synthetic polypeptide"
MAADGYLPDWLEDTLSEGIRQWWKLKPGPPPPKPAERHKDDSRGLVLPGYKYLGPFNGLDKGEPVNEADAAALEHDKAYDRQLDSGDNPYLKYNHADAEFQERLKEDTSFGGNLGRAVFQAKKRVLEPLGLVEPPVKTAPGKKRPVEHSPAEPDSSSGTGKAGQQPARKRLNFGQTGDADSVPDPQPLGQPPAAPSGLGSTTMATGSGAPMADNNEGADGVGNSSGNWHCDSQWLGDRVITTSTRTWALPTYNNHLYKQISSQSGASNDNHYFGYSTPWGYFDFNRFHCHFSPRDWQRLINNNWGFRPKRLNFKLFNIQVKEVTQNDGTTTIANNLTSTVQVFTDSEYQLPYVLGSAHQGCLPPFPADVFMVPQYGYLTLNNGSQAVGRSSFYCLEYFPSQMLRTGNNFQFSYTFEDVPFHSSYAHSQSLDRLMNPLIDQYLYYLNKTQSNSGTLQQSRLLFSQAGPTSMSLQAKNWLPGPCYRQQRLSKQANDNNNSNFPWTAATKYHLNGRDSLVNPGPAMASHKDDEEKFFPMHGTLIFGKQGTNANDADLDNVMITDEEEIRTTNPVATEQYGYVSNNLQNSNTGPTTGTVNHQGALPGMVWQDRDVYLQGPIWAKIPHTDGHFHPSPLMGGFGLKHPPPQIMIKNTPVPANPPTNFSSAKFASFITQYSTGQVSVEIEWELQKENSKRWNPEIQYTSNYNKSVNVDFTVDTNGVYSEPRPIGTRYLTRNL

SEQ ID NO: 329 - protein, 735 aa, Artificial Sequence
  source: /note="Description of Artificial Sequence: Synthetic polypeptide"
MAADGYLPDWLEDTLSEGIRQWWKLKPGPPPPKPAERHKDDSRGLVLPGYKYLGPFNGLDKGEPVNEADAAALEHDKAYDRQLDSGDNPYLKYNHADAEFQERLKEDTSFGGNLGRAVFQAKKRVLEPLGLVEGPVKTAPGKKRPVEHSPAEPDSSSGTGKAGQQPARKRLNFGQTGDADSVPDPQPLGQPPAAPSGLGSTTMATGSGAPMADNNEGADGVGNSSGNWHCDSQWLGDRVITTSTRTWALPTYNNHLYKQISSQSGASNDNHYFGYSTPWGYFDFNRFHCHFSPRDWQRLINNNWGFRPKRLNFKLFNIQVKEVTQNDGTTTIANNLTSTVQVFTDSEYQLPYVLGSAHQGCLPPFPADVFMVPQYGYLTLNNGSQAVGRSSFYCLEYFPSQMLRTGNNFQFSYTFEDVPFHSSYAHSQSLDRLMNPLIDQYLYYLNKTQSNSGTLQQSRLLFSQAGPTSMSLQAKNWLPGPCYRQQRLSKQANDNNNSNFPWTAATKYHLNGRDSLVNPGPAMASHKDDEEKFFPMHGTLIFGKQGTNANDADLDNVMITDEEEIRTTNPVATEQYGYVSNNLQNSNTGPTTGTVNHQGALPGMVWQDRDVYLQGPIWAKIPHTDGHFHPSPLMGGFGLKHPPPQIMIKNTPVPANPPTNFSSAKFASFITQYSTGQVSVEIEWELQKENSKRWNPEIQYTSNYNKSVNVDFTVDTNGVYSEPRPIGTRYLTRNL

SEQ ID NO: 330 - DNA, 2208 bp, Artificial Sequence
  source: /note="Description of Artificial Sequence: Synthetic polynucleotide"
atggctgccgatggttatcttccagattggctcgaggacactctctctgaaggaataagacagtggtggaagctcaaacctggcccaccaccaccaaagcccgcagagcggcataaggacgacagcaggggtcttgtgcttcctgggtacaagtacctcggacccttcaacggactcgacaagggggagccggtcaacgaggcagacgccgcggccctcgagcacgacaaggcctacgaccggcagctcgacagcggagacaacccgtacctcaagtacaaccacgccgacgcggagtttcaggagcgtcttaaagaagatacgtcttttgggggcaacctcggacgagcagtcttccaggcgaaaaagagggttcttgaacctctgggcctggttgagggacctgttaagacggctccgggaaaaaagaggccggtagagcactctcctgcggagccagactcctcctcgggaaccggaaaagcgggccagcagcctgcaagaaaaagattgaattttggtcagactggagacgcagactccgtacctgacccccagcctctcggacagccaccagcagccccctctggtttgggatctactacaatggctacaggcagtggcgcaccaatggcagacaataacgagggtgccgatggagtgggtaattcctcaggaaattggcattgcgattcccaatggctgggcgacagagtcatcaccaccagcacccgaacctgggccctgcccacctacaacaaccacctctacaagcaaatctcaagccaatcaggagcctcaaacgacaaccactactttggctacagcaccccttgggggtattttgacttcaacagattccactgccacttttcaccacgtgactggcaaagactcatcaacaacaactggggattccgacccaagagactcaacttcaagctctttaacattcaagtcaaagaggtcacgcagaatgacggtacgacgacgattgccaataaccttaccagcacggttcaggtgtttactgactcggagtaccagctcccgtacgtcctcgggtcggcgcatcaaggatgcctcccgccgtttccagcggacgtcttcatggtcccacagtatggatacctcaccctgaacaacgggagtcaggcggtaggacgctcttccttttactgcctggagtactttccttctcagatgcttcgtactggaaacaactttcagttcagctacacctttgaagacgttcctttccacagcagctacgctcacagccagagtctggatcggctgatgaatcctctgatcgaccagtacctgtattatctgaacaaaacacaatcaaatagtggaactcttcagcagtctcggctactgtttagtcaagctggacccaccagcatgtctcttcaagctaaaaactggctacctggaccttgctacagacagcagcgtctgtcaaagcaggcaaacgacaacaacaacagcaactttccctggactgcggctacaaagtatcacctaaatggccgggactcgttggttaatccaggaccagctatggccagtcacaaagacgatgaagaaaagtttttccccatgcatggaaccctgatatttggtaaacaaggaacaaatgctaacgacgcggatttggacaatgtcatgattacagatgaagaagaaatccgcaccaccaatcccgtggctacggagcagtacggatatgtgtcaaataatttgcaaaactcaaatactggtccaactactggaactgtcaatcaccaaggagcgttacctggcatggtgtggcaggatcgagacgtgtacctgcagggacccatttgggccaagattcctcacaccgatggacactttcatccttctccactgatgggaggttttgggctcaaacacccgcctcctcagatcatgatcaaaaacactcccgttccagccaatcctcccacaaacttcagttctgccaagtttgcttctttcatcacacagtattccacggggcaggtcagcgtggagatcgagtgggagctgcagaaagagaacagcaaacgctggaatcccgaaattcagtacacttccaactacaacaaatctgttaatgtggactttactgtggacactaatggcgtgtattcagagcctcgccccattggcaccagatacctgactcgtaatctgtaa

SEQ ID NO: 331 - DNA, 2211 bp, Artificial Sequence; identical to SEQ ID NO: 12
  source: /note="Description of Artificial Sequence: Synthetic polynucleotide"

SEQ ID NO: 332 - DNA, 2208 bp, Artificial Sequence
  source: /note="Description of Artificial Sequence: Synthetic polynucleotide"
atggctgccgatggttatcttccagattggctcgaggacactctctctgaaggaacaagacagtggtggaagctcaaacctggcccaccaccaccaaagcccgcagagcggcataaggacgacagcaggggtcttgtgcttcctgggtacaagtacctcggacccttcaacggactcgacaagggggagccggtcaacgaggcagacgccgcggccctcgagcacgacaaggcctacgaccggcagctcgacagcggagacaacccgtacctcaagtacaaccacgccgacgcggagtttcaggagcgtcttaaagaagatacgtcttttgggggcaacctcggacgagcagtcttccaggcgaaaaagagggttcttgaacctctgggcctggttgaggaacctgttaagacggctccgggaaaaaagaggccggtagagcactctcctgcggagccagactcctcctcgggaaccggaaaagcgggccagcagcctgcaagaaaaagattgaattttggtcagactggagacgcagactccgtacctgacccccagcctctcggacagccaccagcagccccctctggtttgggatctactacaatggctacaggcagtggcgcaccaatggcagacaataacgagggtgccgatggagtgggtaattcctcaggaaattggcattgcgattcccaatggctgggcgacagagtcatcaccaccagcacccgaacctgggccctgcccacctacaacaaccacctctacaagcaaatctcaagccaatcaggagcctcaaacgacaaccactactttggctacagcaccccttgggggtattttgacttcaacagattccactgccacttttcaccacgtgactggcaaagactcatcaacaacaactggggattccgacccaagagactcaacttcaagctctttaacattcaagtcaaagaggtcacgcagaatgacggtacgacgacgattgccaataaccttaccagcacggttcaggtgtttactgactcggagtaccagctcccgtacgtcctcgggtcggcgcatcaaggatgcctcccgccgtttccagcggacgtcttcatggtcccacagtatggatacctcaccctgaacaacgggagtcaggcggtaggacgctcttccttttactgcctggagtactttccttctcagatgcttcgtactggaaacaactttcagttcagctacacctttgaagacgttcctttccacagcagctacgctcacagccagagtctggatcggctgatgaatcctctgatcgaccagtacctgtattatctgaacaaaacacaatcaaatagtggaactcttcagcagtctcggctactgtttagtcaagctggacccaccagcatgtctcttcaagctaaaaactggctacctggaccttgctacagacagcagcgtctgtcaaagcaggcaaacgacaacaacaacagcaactttccctggactgcggctacaaagtaccacctaaatggccgggactcgttggttaatccaggaccagctatggccagtcacaaagacgatgaagaaaagtttttccccatgcatggaaccctgatatttggtaaacaaggaacaaatgctaacgacgcggatttggacaatgtcatgattacagatgaagaagaaatccgcaccaccaatcccgtggctacggagcagtacggatatgtgtcaaataatttgcaaaactcaaatactggtccaactactggaactgtcaatcaccaaggagcgttacctggcatggtgtggcaggatcgagacgtgtacctgcagggacccatttgggccaagattcctcacaccgatggacactttcatccttctccactgatgggaggttttgggctcaaacacccgcctcctcagatcatgatcaaaaacactcccgttccagccaatcctcccacaaacttcagttctgccaagtttgcttctttcatcacacagtattccacggggcaggtcagcgtggagatcgagtgggagctgcagaaagagaacagcaaacgctggaatcccgaaattcagtacacttccaactacaacaaatctgttaatgtggactttactgtggacactaatggcgtgtattcagagcctcgccccattggcaccagatacctgactcgtaatctgtaa

SEQ ID NO: 333 - DNA, 2217 bp, Artificial Sequence
  source: /note="Description of Artificial Sequence: Synthetic polynucleotide"
atggctgctgacggttatcttccagattggctcgaggacaacctctctgagggcattcgcgagtggtgggacctgaaacctggagcccccaagcccaaggccaaccagcagaagcaggacgacggccggggtctggtgcttcctggctacaagtacctcggacccttcaacggactcgacaagggggagcccgtcaacgcggcggacgcagcggccctcgagcacgacaaggcctacgaccagcagctcaaagcgggtgacaatccgtacctgcggtataaccacgccgacgccgagtttcaggagcgtctgcaagaagatacgtcttttgggggcaacctcgggcgagcagtcttccaggccaagaagcgggttctcgaacctctcggtctggttgaggaagctgctaagacggctcctggaaagaagagaccggtagaaccgtcacctcagcgttcccccgactcctccacgggcatcggcaagaaaggccagcagcccgctaaaaagagactgaactttggtcagactggcgactcagagtcagtccccgaccctcaaccaatcggagaaccacctgcaggcccctctggtctgggatctggtacaatggctgcaggcggtggcgctccaatggcagacaataacgaaggcgccgacggagtgggtagttcctcaggaaattggcattgcgattccacatggctgggcgacagagtcatcaccaccagcacccgaacctgggccctgcccacctacaacaaccacctctacaagcaaatatccaatgggacatcgggagggagcaccaacgacaacacctacttcggctacagcaccccctgggggtattttgacttcaacagattccactgccacttctcaccacgtgactggcagcgactcatcaacaacaactggggattccggccaaaaagactcagcttcaagctcttcaacatccaggtcaaggaggtcacgcagaatgaaggcaccaagaccatcgccaataaccttaccagcacgattcaggtatttacggactcggaataccagctgccgtacgtcctcggctccgcgcaccagggctgcctgcctccgttcccggcggacgtcttcatgattccccagtacggctaccttacactgaacaatggaagtcaagccgtaggccgttcctccttctactgcctggaatattttccatctcaaatgctgcgaactggaaacaattttgaattcagctacaccttcgaggacgtgcctttccacagcagctacgcacacagccagagcttggaccgactgatgaatcctctcatcgaccagtacctgtactacttatccagaactcagtccacaggaggaactcaaggtacccagcaattgttattttctcaagctgggcctgcaaacatgtcggctcaggctaagaactggctacctggaccttgctaccggcagcagcgagtctctacgacactgtcgcaaaacaacaacagcaactttgcttggactggtgccaccaaatatcacctgaacggaagagactctttggtaaatcccggtgtcgccatggcaacccacaaggacgacgaggaacgcttcttcccgtcgagtggagtcctgatgtttggaaaacagggtgctggaagagacaatgtggactacagcagcgttatgctaaccagcgaagaagaaattaaaaccactaaccctgtagccacagaacaatacggtgtggtggctgacaacttgcagcaaaccaatacagggcctattgtgggaaatgtcaacagccaaggagccttacctggcatggtctggcagaaccgagacgtgtacctgcagggtcccatctgggccaagattcctcacacggacggcaactgccacccttcaccgctaatgggaggatttggactgaagcacccacctcctcagatcctgatcaagaacacgccggtacctgcggatcctccaacaacgttcagccaggcgaaattggcttccttcattacgcagtacagcaccggacaggtcagcgtggaaatcgagtgggagctgcagaaggagaacagcaaacgctggaacccagagattcagtacacttcaaactactacaaatctacaaatgtggactttgctgtcaatacagagggaacttattctgagcctcgccccattggtactcgttacctcacccgtaatctgtaa

SEQ ID NO: 334 - protein, 735 aa, Artificial Sequence
  source: /note="Description of Artificial Sequence: Synthetic polypeptide"
MAADGYLPDWLEDTLSEGTRQWWKLKPGPPPPKPAERHKDDSRGLVLPGYKYLGPFNGLDKGEPVNEADAAALEHDKAYDRQLDSGDNPYLKYNHADAEFQERLKEDTSFGGNLGRAVFQAKKRVLEPLGLVEEPVKTAPGKKRPVEHSPAEPDSSSGTGKAGQQPARKRLNFGQTGDADSVPDPQPLGQPPAAPSGLGSTTMATGSGAPMADNNEGADGVGNSSGNWHCDSQWLGDRVITTSTRTWALPTYNNHLYKQISSQSGASNDNHYFGYSTPWGYFDFNRFHCHFSPRDWQRLINNNWGFRPKRLNFKLFNIQVKEVTQNDGTTTIANNLTSTVQVFTDSEYQLPYVLGSAHQGCLPPFPADVFMVPQYGYLTLNNGSQAVGRSSFYCLEYFPSQMLRTGNNFQFSYTFEDVPFHSSYAHSQSLDRLMNPLIDQYLYYLNKTQSNSGTLQQSRLLFSQAGPTSMSLQAKNWLPGPCYRQQRLSKQANDNNNSNFPWTAATKYHLNGRDSLVNPGPAMASHKDDEEKFFPMHGTLIFGKQGTNANDADLDNVMITDEEEIRTTNPVATEQYGYVSNNLQNSNTGPTTGTVNHQGALPGMVWQDRDVYLQGPIWAKIPHTDGHFHPSPLMGGFGLKHPPPQIMIKNTPVPANPPTNFSSAKFASFITQYSTGQVSVEIEWELQKENSKRWNPEIQYTSNYNKSVNVDFTVDTNGVYSEPRPIGTRYLTRNL

SEQ ID NO: 335 - DNA, 2208 bp, Artificial Sequence
  source: /note="Description of Artificial Sequence: Synthetic polynucleotide"
atggctgccgatggttatcttccagattggctcgaggacactctctctgaaggaataagacagtggtggaagctcaaacctggcccaccaccaccaaagcccgcagagcggcatcaggacaacagcaggggtcttgtgcttcctgggtacaagtacctcggaccctccaacggactcgacaaaggagagccggtcaacgaggcagacgccgcggccctcgagcacgacaaggcctacgaccggcagctcgacagcggagacaacccgtacctcaagtacaaccacgccgacgcggagtttcaggagcgtcttaaagaagatacgtcttttgggggcaacctcggacgagcagtcttccaggcgaaaaagagggttcttgaacctctgggcctggttgaggaacctgttaagacggctccgggaaaaaagaggccggtagagcactctcctgtggagccagactcctcctcgggaaccggaaaagcgggccatcagcctgcgagaaagagattgaattttggtcagactggagacgcagactccgtacctgacccccagcctctcggacagccaccagcagcccccacaagtttgggatctactacaatggctacaggcagtggcgcaccaatggcagacaataacgagggtgccgatggagtgggtaattcctcaggaaattggcattgcgattcccaatggctgggcgacagagtcatcaccaccagcacccgaacctgggccctgcccacctacaacaaccacctctacaagcaaatctccagccaatcaggagcctcgaacgacaaccactactttggctgcagcaccccctgggggtattttgacttcaacagattccactgtcacttctccccacgtgattggcaaagactcatcaacaacaactggggattccgacccaagagactcaacttcaagctctttaacattcaagtcaaagaggtcacgcagaatgacggtacgacgacgattgccaataaccttaccagcacggttcaggtgtttactgactcggagtacccgctcccgtacgtcctcggctcggcgcatcaaggatgcctcccgccgtttccagcggacgtcttcatggtcccacagtatggatacctcaccctgaacaacgggagtcaggcggtaggacgctcttccttttactgcctggagtactttccttctcagatgctgcgtaccggaaacaactttaccttcagctacacctttgaggacgttcctttccacagcagctacgctcacagccagagtttggaccggctgatgaatcctctgatcgaccagtatctatattatctgaacaggacacaatcaaatagtggaactcttcagcagtctaggctactgtttagccaagctggacccaccagcatgtctcttcaagctaaaaactggctgcctggaccttgctacagacagcagcgtctttcaaagcaggcaaacgacaacaacaacagcaactttccctggactgcggctacaaagtatcatctaaatggccgggactcgttggttaatccaggaccagctatggccagccacaaagacgatgaagaaaagtttttccccatgcatggaaccctgatatttggtaaacaaggaacaaatgctaacgacgcggatttggagcatgttatgattacagatgaagaagaaatcaggaccaccaatcctgtggctacagagcagtacggaaacgtgtcaaataatttgcaaaactcaaatactggtccaactacagaaaatgtcaatcaccagggagcgttacctggtatggtgtggcaggatcgagacgtgtacctgcagggacccatttgggccaagattcctcacaccgacggacactttcacccttctccactgatgggaggttttggactcaaacacccgcctcctcaaatcatgatcaaaaacactcccgttccagccaatcctcccacaaacttcagttctgccaagtttgcttctttcatcacacagtattccacgggccaggtcagcgtggagattgagtgggagctgcagaaggagaacagcaaacgctggaaccccgagatccagtatacttccaactacaacaaatctgttaatgtggactttactgtggacactaatggtgtgtattcagagccttgccccattggcaccagatacctgactcgtaatctgtaa

SEQ ID NO: 336 - protein, 735 aa, Artificial Sequence
  source: /note="Description of Artificial Sequence: Synthetic polypeptide"
MAADGYLPDWLEDTLSEGIRQWWKLKPGPPPPKPAERHQDNSRGLVLPGYKYLGPSNGLDKGEPVNEADAAALEHDKAYDRQLDSGDNPYLKYNHADAEFQERLKEDTSFGGNLGRAVFQAKKRVLEPLGLVEEPVKTAPGKKRPVEHSPVEPDSSSGTGKAGHQPARKRLNFGQTGDADSVPDPQPLGQPPAAPTSLGSTTMATGSGAPMADNNEGADGVGNSSGNWHCDSQWLGDRVITTSTRTWALPTYNNHLYKQISSQSGASNDNHYFGCSTPWGYFDFNRFHCHFSPRDWQRLINNNWGFRPKRLNFKLFNIQVKEVTQNDGTTTIANNLTSTVQVFTDSEYPLPYVLGSAHQGCLPPFPADVFMVPQYGYLTLNNGSQAVGRSSFYCLEYFPSQMLRTGNNFTFSYTFEDVPFHSSYAHSQSLDRLMNPLIDQYLYYLNRTQSNSGTLQQSRLLFSQAGPTSMSLQAKNWLPGPCYRQQRLSKQANDNNNSNFPWTAATKYHLNGRDSLVNPGPAMASHKDDEEKFFPMHGTLIFGKQGTNANDADLEHVMITDEEEIRTTNPVATEQYGNVSNNLQNSNTGPTTENVNHQGALPGMVWQDRDVYLQGPIWAKIPHTDGHFHPSPLMGGFGLKHPPPQIMIKNTPVPANPPTNFSSAKFASFITQYSTGQVSVEIEWELQKENSKRWNPEIQYTSNYNKSVNVDFTVDTNGVYSEPCPIGTRYLTRNL

SEQ ID NO: 337 - DNA, 2214 bp, Artificial Sequence
  source: /note="Description of Artificial Sequence: Synthetic polynucleotide"
atggctgccgatggttatcttccagattggctcgaggacaaccttagtgaaggaattcgcgagtggtgggctttgaaacctggagcccctcaacccaaggcaaatcaacaacatcaagacaacgctcgaggtcttgtgcttccgggttacaaataccttggacccggcaacggactcgacaagggggagccggtcaacgcagcagacgcggcggccctcgagcacgacaaggcctacgaccagcagctgcaggcgggtgacaatccgtacctgcggtataaccacgccgacgccgagtttcaggagcgtctgcaagaagatacgtcttttgggggcaaccttggcagagcagtcttccaggccaaaaagaggatccttgagcctcttggtctggttgaggaagcagctaaaacggctcctggaaagaagaggcctgtagatcagtctcctcaggaaccggactcatcatctggtgttggcaaatcgggcaaacagcctgccagaaaaagactaaatttcggtcagactggcgactcagagtcagtcccagaccctcaacctctcggagaaccaccagcagcccccacaagtttgggatctaatacaatggcttcaggcggtggcgcaccaatggcagacaataacgagggtgccgatggggtgggtagttcctcgggaaattggcattgcgattcccaatggctgggggacagagtcatcaccaccagcacccgaacctgggccctgcccacctacaacaatcacctctacaagcaaatctccaacgggacatcgggaggagccaccaacgacaacacctacttcggctacagcaccccctgggggtattttgactttaacagattccactgccacttttcaccacgtgactggcagcgactcatcaacaacaactggggattccggcccaagagactcagcttcaagctcttcaacatccaggtcaaggaggtcacgcagaatgaaggcaccaagaccatcgccaataacctcaccagcaccatccaggtgtttacggactcggagtaccagctgccgtacgttctcggctctgcgcaccagggctgcctccctccgttcccggcggacgtgttcatgattccgcaatacggctacctgacgctcaacaatggcagccaagccgtgggacgttcatccttttactgcctggaatatttcccttctcagatgctgagaacgggcaacaactttaccttcagctacacctttgaggaagtgcctttccacagcagctacgcgcacagccagagcttggaccggctgatgaatcctctgattgaccagtacctgtactacttgtctcggactcaaacaacaggaggcacggcaaatacgcagactctgggcttcagccaaggtgggcctaatacaatggccaatcaggcaaagaactggctgccaggaccctgttaccgccaacaacgcgtctcaacgacaaccgggcaaaacaacaatagcaactttgcctggactgctgggaccaaataccatctgaatggaagaaattcattggctaatcctggcatcgctatggcaacacacaaagacgacgaggagcgtttttttcccagtaacgggatcctgatttttggcaaacaaaatgctgccagagacaatgcggattacagcgatgtcatgctcaccagcgaggaagaaatcaaaaccactaaccctgtggctacagaggaatacggtatcgtggcagataacttgcagcagcaaaacacggctcctcaaattggaactgtcaacagccagggggccttacccggtatggtctggcagaaccgggacgtgtacctgcagggtcccatctgggccaagattcctcacacggacggcaacttccacccgtctccgctgatgggcggctttggcctgaaacatcctccgcctcagatcctgatcaagaacacgcctgtacctgcggatcctccgaccaccttcaaccagtcaaagctgaactctttcatcacgcaatacagcaccggacaggtcagcgtggagatcgagtgggagctgcagaaggaaaacagcaagcgctggaacccggagatccagtacacttccaactattacaagtctaataatgttgaatttgctgttaatactgaaggtgtatatagtgaaccccgccccattggcaccagatacctgactcgtaatctgtaa

SEQ ID NO: 338 - protein, 737 aa, Artificial Sequence
  source: /note="Description of Artificial Sequence: Synthetic polypeptide"
MAADGYLPDWLEDNLSEGIREWWALKPGAPQPKANQQHQDNARGLVLPGYKYLGPGNGLDKGEPVNAADAAALEHDKAYDQQLQAGDNPYLRYNHADAEFQERLQEDTSFGGNLGRAVFQAKKRILEPLGLVEEAAKTAPGKKRPVDQSPQEPDSSSGVGKSGKQPARKRLNFGQTGDSESVPDPQPLGEPPAAPTSLGSNTMASGGGAPMADNNEGADGVGSSSGNWHCDSQWLGDRVITTSTRTWALPTYNNHLYKQISNGTSGGATNDNTYFGYSTPWGYFDFNRFHCHFSPRDWQRLINNNWGFRPKRLSFKLFNIQVKEVTQNEGTKTIANNLTSTIQVFTDSEYQLPYVLGSAHQGCLPPFPADVFMIPQYGYLTLNNGSQAVGRSSFYCLEYFPSQMLRTGNNFTFSYTFEEVPFHSSYAHSQSLDRLMNPLIDQYLYYLSRTQTTGGTANTQTLGFSQGGPNTMANQAKNWLPGPCYRQQRVSTTTGQNNNSNFAWTAGTKYHLNGRNSLANPGIAMATHKDDEERFFPSNGILIFGKQNAARDNADYSDVMLTSEEEIKTTNPVATEEYGIVADNLQQQNTAPQIGTVNSQGALPGMVWQNRDVYLQGPIWAKIPHTDGNFHPSPLMGGFGLKHPPPQILIKNTPVPADPPTTFNQSKLNSFITQYSTGQVSVEIEWELQKENSKRWNPEIQYTSNYYKSNNVEFAVNTEGVYSEPRPIGTRYLTRNL

SEQ ID NO: 339 - DNA, 2211 bp, Artificial Sequence
  source: /note="Description of Artificial Sequence: Synthetic polynucleotide"
atggctgccgatggttatcttccagattggctcgaggacaacctctctgagggcattcgcgagtggtgggacttgaaacctggagccccgaagcccaaagccaaccagcaaaagcaggacgacggccggggtctggtgcttcctggctacaagtacctcggacccttcaacggactcgacaagggggagcccgtcaacgcggcggacgcagcggccctcgagcacgacaaggcctacgaccagcagctcaaagcgggtgacaatccgtacctgcggtataaccacgccgacgccgagtttcaggagcgtctgcaagaagatacgtcttttgggggcaacctcgggcgagcagtcttccaggccaagaagcgggttctcgaacctctcggtctggttgaggaaggcgctaagacggctcctggaaagaaacgtccggtagagcagtcgccacaagagccagactcctcctcgggcatcggcaagacaggccagcagcccgctaaaaagagactcaattttggtcagactggcgactcagagtcagtccccgacccacaacctctcggagaacctccagcaacccccgctgctgtgggacctactacaatggcttcaggcggtggcgcaccaatggcagacaataacgaaggcgccgacggagtgggtaatgcctcaggaaattggcattgcgattccacatggctgggcgacagagtcatcaccaccagcacccgaacatgggccttgcccacctataacaaccacctctacaagcaaatctccagtgcttcaacgggggccagcaacgacaaccactacttcggctacagcaccccctgggggtattttgatttcaacagattccactgccatttctcaccacgtgactggcagcgactcatcaacaacaattggggattccggcccaagagactcaacttcaagctcttcaacatccaagtcaaggaggtcacgacgaatgatggcgtcacgaccatcgctaataaccttaccagcacggttcaagtcttctcggactcggagtaccagctgccgtacgttctcggctctgcccaccagggctgcctgcctccgttcccggcggacgtgttcatgattccccagtacggctacctaacactcaacaacggtagtcaggccgtgggacgctcctccttctactgcctggaatactttccttcgcagatgctgagaaccggcaacaacttccagtttacttacaccttcgaggacgtgcctttccacagcagctacgcccacagccagagcttggaccggctgatgaatcctctgattgaccagtacctgtactacttgtctcggactcaaacaacaggaggcacggcaaatacgcagactctgggcttcagccaaggtgggcctaatacaatggccaatcaggcaaagaactggctgccaggaccctgttaccgccaacaacgcgtctcaacgacaaccgggcaaaacaacaatagcaattttacctggactggtgcttcaaaatataacctcaatgggcgtgaatccatcatcaaccctggcactgctatggcctcacacaaagacgacgaagacaagttctttcccatgagcggtgtcatgatttttggaaaagagagcgccggagcttcaaacactgcattggacaatgtcatgattacagacgaagaggaaattaaagccactaaccctgtggccaccgaaagatttgggaccgtggcagtcaatttccagagcagcagcacagaccctgcgaccggagatgtgcatgctatgggagcattacctggcatggtgtggcaagatagagacgtgtacctgcagggtcccatttgggccaaaattcctcacacagatggacactttcacccgtctcctcttatgggcggctttggactcaagaacccgcctcctcagatcctcatcaaaaacacgcctgttcctgcgaatcctccggcggagttttcagctacaaagtttgcttcattcatcacccaatactccacaggacaagtgagtgtggaaattgaatgggagctgcagaaagaaaacagcaagcgctggaatcccgaagtgcagtacacatccaattatgcaaaatctgccaacgttgattttactgtggacaacaatggactttatactgagcctcgccccattggcacccgttacctcacccgtcccctgtaa

SEQ ID NO: 340 - protein, 736 aa, Artificial Sequence
  source: /note="Description of Artificial Sequence: Synthetic polypeptide"
MAADGYLPDWLEDNLSEGIREWWDLKPGAPKPKANQQKQDDGRGLVLPGYKYLGPFNGLDKGEPVNAADAAALEHDKAYDQQLKAGDNPYLRYNHADAEFQERLQEDTSFGGNLGRAVFQAKKRVLEPLGLVEEGAKTAPGKKRPVEQSPQEPDSSSGIGKTGQQPAKKRLNFGQTGDSESVPDPQPLGEPPATPAAVGPTTMASGGGAPMADNNEGADGVGNASGNWHCDSTWLGDRVITTSTRTWALPTYNNHLYKQISSASTGASNDNHYFGYSTPWGYFDFNRFHCHFSPRDWQRLINNNWGFRPKRLNFKLFNIQVKEVTTNDGVTTIANNLTSTVQVFSDSEYQLPYVLGSAHQGCLPPFPADVFMIPQYGYLTLNNGSQAVGRSSFYCLEYFPSQMLRTGNNFQFTYTFEDVPFHSSYAHSQSLDRLMNPLIDQYLYYLSRTQTTGGTANTQTLGFSQGGPNTMANQAKNWLPGPCYRQQRVSTTTGQNNNSNFTWTGASKYNLNGRESIINPGTAMASHKDDEDKFFPMSGVMIFGKESAGASNTALDNVMITDEEEIKATNPVATERFGTVAVNFQSSSTDPATGDVHAMGALPGMVWQDRDVYLQGPIWAKIPHTDGHFHPSPLMGGFGLKNPPPQILIKNTPVPANPPAEFSATKFASFITQYSTGQVSVEIEWELQKENSKRWNPEVQYTSNYAKSANVDFTVDNNGLYTEPRPIGTRYLTRPL

SEQ ID NO: 341 - DNA, 2211 bp, Artificial Sequence
  source: /note="Description of Artificial Sequence: Synthetic polynucleotide"
atggctgctgacggttatcttccagattggctcgaggacaacctttctgaaggcattcgagagtggtgggcgctgcaacctggagcccctaaacccaaggcaaatcaacaacatcaggacaacgctcggggtcttgtgcttccgggttacaaatacctcggacccggcaacggactcgacaagggggaacccgtcaacgcagcggacgcggcagccctcgagcacgacaaggcctacgaccagcagctcaaggccggtgacaacccctacctcaagtacaaccacgccgacgccgagttccaggagcggctcaaagaagatacgtcttttgggggcaacctcgggcgagcagtcttccaggccaaaaagaggcttcttgaacctcttggtctggttgaggaagcggctaagacggctcctggaaagaagaggcctgtagatcagtctcctcaggaaccggactcatcatctggtgttggcaaatcgggcaaacagcctgccagaaaaagactaaatttcggtcagactggcgactcagagtcagtcccagaccctcaacctctcggagaaccaccagcagcccccacaagtttgggatctaatacaatggcttcaggcggtggcgcaccaatggcagacaataacgagggtgccgatggagtgggtaattcctcaggaaattggcattgcgattcccaatggctgggcgacagagtcatcaccaccagcaccagaacctgggccctgcccacttacaacaaccatctctacaagcaaatctccagccaatcaggagcttcaaacgacaaccactactttggctacagcaccccttgggggtattttgactttaacagattccactgccacttctcaccacgtgactggcagcgactcattaacaacaactggggattccggcccaagaaactcagcttcaagctcttcaacatccaagttaaagaggtcacgcagaacgatggcacgacgactattgccaataaccttaccagcacggttcaagtgtttacggactcggagtatcagctcccgtacgtgctcgggtcggcgcaccaaggctgtctcccgccgtttccagcggacgtcttcatggtccctcagtatggatacctcaccctgaacaacggaagtcaagcggtgggacgctcatccttttactgcctggagtacttcccttcgcagatgctaaggactggaaataacttccaattcagctataccttcgaggatgtaccttttcacagcagctacgctcacagccagagtttggatcgcttgatgaatcctcttattgatcagtatctgtactacctgaacagaacgcaaggaacaacctctggaacaaccaaccaatcacggctgctttttagccaggctgggcctcagtctatgtctttgcaggccagaaattggctacctgggccctgctaccggcaacagagactttcaaagactgctaacgacaacaacaacagtaactttccttggacagcggccagcaaatatcatctcaatggccgcgactcgctggtgaatccaggaccagctatggccagtcacaaggacgatgaagaaaaatttttccctatgcacggcaatctaatatttggcaaagaagggacaacggcaagtaacgcagaattagataatgtaatgattacggatgaagaagagattcgtaccaccaatcctgtggcaacagagcagtatggaactgtggcaaataacttgcagagctcaaatacagctcccacgactagaactgtcaatgatcagggggccttacctggcatggtgtggcaagatcgtgacgtgtaccttcaaggacctatctgggcaaagattcctcacacggatggacactttcatccttctcctctgatgggaggctttggactgaaacatccgcctcctcaaatcatgatcaaaaatactccggtaccggcaaatcctccgacgactttcagcccggccaagtttgcttcatttatcactcagtactccactggacaggtcagcgtggaaattgagtgggagctacagaaagaaaacagcaaacgttggaatccagagattcagtacacttccaactacaacaagtctgttaatgtggactttactgtagacactaatggtgtttatagtgaacctcgccccattggcacccgttaccttacccgtcccctgtaa

SEQ ID NO: 342 - protein, 736 aa, Artificial Sequence
  source: /note="Description of Artificial Sequence: Synthetic polypeptide"
MAADGYLPDWLEDNLSEGIREWWALQPGAPKPKANQQHQDNARGLVLPGYKYLGPGNGLDKGEPVNAADAAALEHDKAYDQQLKAGDNPYLKYNHADAEFQERLKEDTSFGGNLGRAVFQAKKRLLEPLGLVEEAAKTAPGKKRPVDQSPQEPDSSSGVGKSGKQPARKRLNFGQTGDSESVPDPQPLGEPPAAPTSLGSNTMASGGGAPMADNNEGADGVGNSSGNWHCDSQWLGDRVITTSTRTWALPTYNNHLYKQISSQSGASNDNHYFGYSTPWGYFDFNRFHCHFSPRDWQRLINNNWGFRPKKLSFKLFNIQVKEVTQNDGTTTIANNLTSTVQVFTDSEYQLPYVLGSAHQGCLPPFPADVFMVPQYGYLTLNNGSQAVGRSSFYCLEYFPSQMLRTGNNFQFSYTFEDVPFHSSYAHSQSLDRLMNPLIDQYLYYLNRTQGTTSGTTNQSRLLFSQAGPQSMSLQARNWLPGPCYRQQRLSKTANDNNNSNFPWTAASKYHLNGRDSLVNPGPAMASHKDDEEKFFPMHGNLIFGKEGTTASNAELDNVMITDEEEIRTTNPVATEQYGTVANNLQSSNTAPTTRTVNDQGALPGMVWQDRDVYLQGPIWAKIPHTDGHFHPSPLMGGFGLKHPPPQIMIKNTPVPANPPTTFSPAKFASFITQYSTGQVSVEIEWELQKENSKRWNPEIQYTSNYNKSVNVDFTVDTNGVYSEPRPIGTRYLTRPL

SEQ ID NO: 343 - DNA, 2211 bp, Artificial Sequence
  source: /note="Description of Artificial Sequence: Synthetic polynucleotide"
atggctgccgatggttatcttccagattggctcgaggacaaccttagtgaaggaattcgcgagtggtgggctttgaaacctggagcccctcaacccaaggcaaatcaacaacatcaagacaacgctcgaggtcttgtgcttccgggttacaaataccttggacccggcaacggactcgacaagggggagccggtcaacgcagcagacgcggcggccctcgagcacgacaaggcctacgaccagcagctcaaggccggagacaacccgtacctcaagtacaaccacgccgacgccgagttccaggagcggctcaaagaagatacgtcttttgggggcaacctcgggcgagcagtcttccaggccaaaaagaggcttcttgaacctcttggtctggttgaggaagcggctaagacggctcctggaaagaagagaccggtagagccatcaccccagcgttctccagactcctctacgggcatcggcaagaaaggccaacagcccgctaaaaagagactcaattttggtcagactggcgactcagagtcagtccccgacccacaacctctcggagaacctccagcaacccccgctgctgtgggacctactacaatggcttcaggcggtggcgcaccaatggcagacaataacgagggtgccgatggagtgggtaattcctcaggaaattggcattgcgattcccaatggctgggcgacagagtcatcaccaccagcaccagaacctgggccctgcccacttacaacaaccatctctacaagcaaatctccagccaatcaggagcttcaaacgacaaccactactttggctacagcaccccttgggggtattttgactttaacagattccactgccacttttcaccacgtgactggcaaagactcatcaacaacaactggggattccgacccaagagactcaacttcaagctcttcaacatccaagtcaaggaggtcacgacgaatgatggcgtcacgaccatcgctaataaccttaccagcacggttcaagtcttctcggactcggagtaccagttgccgtacgtcctcggctctgcgcaccagggctgcctccctccgttcccggcggacgtgttcatgattccgcagtacggctacctaacgctcaacaatggcagccaagccgtgggacgttcatccttttactgcctggaatatttcccttctcagatgctgagaacgggcaacaactttaccttcagctacacttttgaggacgttcctttccacagcagctacgctcacagccagagtctggaccgtctcatgaatcctctcatcgaccagtacctgtattacttgagcagaacaaacactccaagtggaaccaccacgcagtcaaggcttcagttttctcaggccggagcgagtgacattcgggaccagtctaggaactggcttcctggaccctgttaccgccagcagcgcgtttctaaaacaaaaacagacaacaacaacagcaattttacctggactggtgcttcaaaatataaccttaatgggcgtgaatctataatcaaccctggcactgctatggcctcacacaaagacgacgaagacaagttctttcccatgagcggtgtcatgatttttggaaaagagagcgccggagcttcaaacactgcattggacaatgtcatgattacagacgaagaggaaattaaagccactaaccctgtggccaccgaaagatttgggaccgtggcagtcaatttccagagcagcagcacagaccctgcgaccggagatgtgcatgttatgggagccttacctggaatggtgtggcaagacagagacgtatacctgcagggtcctatttgggccaaaattcctcacacggatggacactttcacccgtctcctcttatgggcggctttggactcaagaacccgcctcctcagatcctcatcaaaaacacgcctgttcctgcgaatcctccggcggagttttcagctacaaagtttgcttcattcatcacccaatactccacaggacaagtgagtgtggaaattgaatgggagctgcagaaagaaaacagcaagcgctggaatcccgaagtgcagtacacatccaattatgcaaaatctgccaacgttgattttactgtggacaacaatggactttatactgagcctcgccccattggcacccgttaccttacccgtcccctgtaa

SEQ ID NO: 344 - protein, 736 aa, Artificial Sequence
  source: /note="Description of Artificial Sequence: Synthetic polypeptide"
MAADGYLPDWLEDNLSEGIREWWALKPGAPQPKANQQHQDNARGLVLPGYKYLGPGNGLDKGEPVNAADAAALEHDKAYDQQLKAGDNPYLKYNHADAEFQERLKEDTSFGGNLGRAVFQAKKRLLEPLGLVEEAAKTAPGKKRPVEPSPQRSPDSSTGIGKKGQQPAKKRLNFGQTGDSESVPDPQPLGEPPATPAAVGPTTMASGGGAPMADNNEGADGVGNSSGNWHCDSQWLGDRVITTSTRTWALPTYNNHLYKQISSQSGASNDNHYFGYSTPWGYFDFNRFHCHFSPRDWQRLINNNWGFRPKRLNFKLFNIQVKEVTTNDGVTTIANNLTSTVQVFSDSEYQLPYVLGSAHQGCLPPFPADVFMIPQYGYLTLNNGSQAVGRSSFYCLEYFPSQMLRTGNNFTFSYTFEDVPFHSSYAHSQSLDRLMNPLIDQYLYYLSRTNTPSGTTTQSRLQFSQAGASDIRDQSRNWLPGPCYRQQRVSKTKTDNNNSNFTWTGASKYNLNGRESIINPGTAMASHKDDEDKFFPMSGVMIFGKESAGASNTALDNVMITDEEEIKATNPVATERFGTVAVNFQSSSTDPATGDVHVMGALPGMVWQDRDVYLQGPIWAKIPHTDGHFHPSPLMGGFGLKNPPPQILIKNTPVPANPPAEFSATKFASFITQYSTGQVSVEIEWELQKENSKRWNPEVQYTSNYAKSANVDFTVDNNGLYTEPRPIGTRYLTRPL

SEQ ID NO: 345 - DNA, 2211 bp, Artificial Sequence
  source: /note="Description of Artificial Sequence: Synthetic polynucleotide"
atggctgccgatggttatcttccagattggctcgaggacaacctctctgagggcattcgcgagtggtgggacttgaaacctggagcccctaaacccaaggcaaatcaacaacatcaggacaacgctcgaggtcttgtgcttccgggttacaaataccttggacccggcaacggactcgacaagggggagccggtcaacgcagcagacgcggcggccctcgagcacgacaaggcctacgaccagcagctcaaggccggagacaacccgtacctcaagtacaaccacgccgacgccgagttccaggagcggctcaaagaagatacgtcttttgggggcaacctcgggcgagcagtcttccaggccaaaaagaggcttcttgaacctcttggtctggttgaggaagcggctaagacggctcctggaaagaagagaccggtagagccatcaccccagcgttctccagactcctctacgggcatcggcaagaaaggccaacagcccgctaaaaagagactcaattttggtcagactggcgactcagagtcagtccccgacccacaacctctcggagaacctccagcaacccccgctgctgtgggacctactacaatggcttcaggcggtggcgcaccaatggcagacaataacgagggtgccgatggagtgggtaattcctcaggaaattggcattgcgattcccaatggctgggcgacagagtcatcaccaccagcaccagaacctgggccctgcccacttacaacaaccatctctacaagcaaatctccagccaatcaggagcttcaaacgacaaccactactttggctacagcaccccttgggggtattttgactttaacagattccactgccacttttcaccacgtgactggcaaagactcatcaacaacaactggggattccgacccaagagactcaacttcaagctcttcaacatccaagtcaaggaggtcacgacgaatgatggcgtcacgaccatcgctaataaccttaccagcacggttcaagtcttctcggactcggagtaccagttgccgtacgtcctcggctctgcgcaccagggctgcctccctccgttcccggcggacgtgttcatgattccgcagtacggctacctaacgctcaacaatggcagccaagccgtgggacgttcatccttttactgcctggaatatttcccttctcagatgctgagaacgggcaacaactttaccttcagctacacttttgaggacgttcctttccacagcagctacgctcacagccagagtctggaccgtctcatgaatcccctcatcgaccagtacctgtattacttgagcagaacaaacactccaagtggaaccaccacgcagtcaaggcttcagttttctcaggccggagcgagtgacattcgggaccagtctaggaactggcttcctggaccctgttaccggcagcagcgcgtttctaaaacaaaaacagacaacaacaacagcaactttacctggactggtgcttcaaaatataaccttaatgggcgtgaatctataatcaaccctggcactgctatggcctcacacaaagacgacgaagacaagttctttcccatgagcggtgtcatgatttttggaaaggagagcgccggagcttcaaacactgcattggacaatgtcatgatcacagacgaagaggaaatcaaagccactaaccccgtggccaccgaaagatttgggactgtggcagtcaatctccagagcagcagcacagaccctgcgaccggagatgtgcatgttatgggagccttacctggaatggtgtggcaagacagagacgtgtacctgcagggtcctatttgggccaaaattcctcacacggatggacactttcacccgtctcctctcatgggcggctttggacttaagcacccgcctcctcagatcctcatcaaaaacacgcctgttcctgcgaatcctccggcagagttttcggctacaaagtttgcttcattcatcacccagtattccacaggacaagtgagtgtggaaattgaatgggagctgcagaaagaaaacagcaagcgctggaatcccgaagtgcagtacacatccaattatgcaaaatctgccaacgttgattttactgtggacaacaatggactttatactgagcctcgccccattggcacccgttacctcacccgtcccctgtaa

SEQ ID NO: 346 - protein, 736 aa, Artificial Sequence
  source: /note="Description of Artificial Sequence: Synthetic polypeptide"
MAADGYLPDWLEDNLSEGIREWWDLKPGAPKPKANQQHQDNARGLVLPGYKYLGPGNGLDKGEPVNAADAAALEHDKAYDQQLKAGDNPYLKYNHADAEFQERLKEDTSFGGNLGRAVFQAKKRLLEPLGLVEEAAKTAPGKKRPVEPSPQRSPDSSTGIGKKGQQPAKKRLNFGQTGDSESVPDPQPLGEPPATPAAVGPTTMASGGGAPMADNNEGADGVGNSSGNWHCDSQWLGDRVITTSTRTWALPTYNNHLYKQISSQSGASNDNHYFGYSTPWGYFDFNRFHCHFSPRDWQRLINNNWGFRPKRLNFKLFNIQVKEVTTNDGVTTIANNLTSTVQVFSDSEYQLPYVLGSAHQGCLPPFPADVFMIPQYGYLTLNNGSQAVGRSSFYCLEYFPSQMLRTGNNFTFSYTFEDVPFHSSYAHSQSLDRLMNPLIDQYLYYLSRTNTPSGTTTQSRLQFSQAGASDIRDQSRNWLPGPCYRQQRVSKTKTDNNNSNFTWTGASKYNLNGRESIINPGTAMASHKDDEDKFFPMSGVMIFGKESAGASNTALDNVMITDEEEIKATNPVATERFGTVAVNLQSSSTDPATGDVHVMGALPGMVWQDRDVYLQGPIWAKIPHTDGHFHPSPLMGGFGLKHPPPQILIKNTPVPANPPAEFSATKFASFITQYSTGQVSVEIEWELQKENSKRWNPEVQYTSNYAKSANVDFTVDNNGLYTEPRPIGTRYLTRPL

SEQ ID NO: 347 - DNA, 2214 bp, Artificial Sequence
  source: /note="Description of Artificial Sequence: Synthetic polynucleotide"
atggctgccgatggttatcttccagattggctcgaggacaaccttagtgaaggaattcgcgagtggtgggctttgaaacctggagcccctcaacccaaggcaaatcaacaacatcaagacaacgctcgaggtcttgtgcttccgggttacaaataccttggacccggcaacggactcgacaagggggagccggtcaacgcagcagacgcggcggccctcgagcacgacaaggcctacgaccagcagctgcaggcgggtgacaatccgtacctgcggtataaccacgccgacgccgagtttcaggagcgtctgcaagaagatacgtcttttgggggcaaccttggcagagcagtcttccaggccaaaaagaggatccttgagcctcttggtctggttgaggaagcagctaaaacggctcctggaaagaagaggcctgtagatcagtctcctcaggaaccggactcatcatctggtgttggcaaatcgggcaaacagcctgccagaaaaagactaaatttcggtcagactggcgactcagagtcagtcccagaccctcaacctctcggagaaccaccagcagcccccacaagtttgggatctaatacaatggcttcaggcggtggcgcaccaatggcagacaataacgagggtgccgatggggtgggtagttcctcgggaaattggcattgcgattcccaatgactgggggacagagtcatcaccaccagcacccgaacctgggccctgcccacctacaacaatcacctctacaagcaaatctccaacgggacatcgggaggagccaccaacgacaacacctacttcggctacagcaccccctgggggtattttgactttaacagattccactgccacttttcaccacgtgactggcagcgactcatcaacaacaactggggattccggcccaagagactcagcttcaagctcttcaacatccaggtcaaggaggtcacgcagaatgaaggcaccaagaccatcgccaataacctcaccagcaccatccaggtgtttacggactcggagtaccagctgccgtacgttctcggctctgcgcaccagggctgcctccctccgttcccggcggacgtgttcatgattccgcaatacggctacctgacgctcaacaatggcagccaagccgtgggacgttcatccttttactgcctggaatatttcccttctcagatgctgagaacgggcaacaactttaccttcagctacacctttgaggaagtgcctttccacagcagctacgcgcacagccagagcttggaccggctgatgaatcctctgattgaccagtacctgtactacttgtctcggactcaaacaacaggaggcacggcaaatacgcagactctgggcttcagccaaggtgggcctaatacaatggccaatcaggcaaagaactggctgccaggaccctgttaccgccaacaacgcgtctcaacgacaaccgggcaaaacaacaatagcaactttgcctggactgctgggaccaaataccatctgaatggaagaaattcattggctaatcctggcatcgctatggcaacacacaaagacgacgaggagcgtttttttcccagtaacgggatcctgatttttggcaaacaaaatgctgccagagacaatgcggattacagcgatgtcatgctcaccagcgaggaagaaatcaaaaccactaaccctgtggctacagaggaatacggtatcgtggcagataacttgcagcagcaaaacacggctcctcaaattggaactgtcaacagccagggggccttacccggtatggtctggcagaaccgggacgtgtacctgcagggtcccatctgggccaagattcctcacacggacggcaacttccacccgtctccgctgatgggcggctttggcctgaaacatcctccgcctcagatcctgatcaagaacacgcctgtacctgcggatcctccgaccaccttcaaccagtcaaagctgaactctttcatcacgcaatacagcaccggacaggtcagcgtggagatcgagtgggagctgcagaaggaaaacagcaagcgctggaacccggagatccagtacacttccaactattacaagtctaataatgttgaatttgctgttaatactgaaggtgtatatagtgaaccccgccccattggcaccagatacctgactcgtaatctgtaa

SEQ ID NO: 348 - protein, 736 aa, Artificial Sequence
  source: /note="Description of Artificial Sequence: Synthetic polypeptide"
MAADGYLPDWLEDNLSEGIREWWALKPGAPQPKANQQHQDNARGLVLPGYKYLGPGNGLDKGEPVNAADAAALEHDKAYDQQLQAGDNPYLRYNHADAEFQERLQEDTSFGGNLGRAVFQAKKRILEPLGLVEEAAKTAPGKKRPVDQSPQEPDSSSGVGKSGKQPARKRLNFGQTGDSESVPDPQPLGEPPAAPTSLGSNTMASGGGAPMADNNEGADGVGSSSGNWHCDSQLGDRVITTSTRTWALPTYNNHLYKQISNGTSGGATNDNTYFGYSTPWGYFDFNRFHCHFSPRDWQRLINNNWGFRPKRLSFKLFNIQVKEVTQNEGTKTIANNLTSTIQVFTDSEYQLPYVLGSAHQGCLPPFPADVFMIPQYGYLTLNNGSQAVGRSSFYCLEYFPSQMLRTGNNFTFSYTFEEVPFHSSYAHSQSLDRLMNPLIDQYLYYLSRTQTTGGTANTQTLGFSQGGPNTMANQAKNWLPGPCYRQQRVSTTTGQNNNSNFAWTAGTKYHLNGRNSLANPGIAMATHKDDEERFFPSNGILIFGKQNAARDNADYSDVMLTSEEEIKTTNPVATEEYGIVADNLQQQNTAPQIGTVNSQGALPGMVWQNRDVYLQGPIWAKIPHTDGNFHPSPLMGGFGLKHPPPQILIKNTPVPADPPTTFNQSKLNSFITQYSTGQVSVEIEWELQKENSKRWNPEIQYTSNYYKSNNVEFAVNTEGVYSEPRPIGTRYLTRNL

SEQ ID NO: 349 - DNA, 2214 bp, Artificial Sequence
  source: /note="Description of Artificial Sequence: Synthetic polynucleotide"
atggctgccgatggttatcttccagattggctcgaggacaaccttagtgaaggaattcgcgagtggtgggctttgaaacctggagcccctcaacccaaggcaaatcaacaacatcaagacaacgctcgaggtcttgtgcttccgggttacaaataccttggacccggcaacggactcgacaagggggagccggtcaacgcagcagacgcggcggccctcgagcacgacaaggcctacgaccagcagctgcaggcgggtgacaatccgtacctgcggtataaccacgccgacgccgagtttcaggagcgtctgcaagaagatacgtcttttgggggcaaccttggcagagcagtcttccaggccaaaaagaggatccttgagcctcttggtctggttgaggaagcagctaaaacggctcctggaaagaagaggcctgtagatcagtctcctcaggaaccggactcatcatctggtgttggcaaatcgggcaaacagcctgccagaaaaagactaaatttcggtcagactggcgactcagagtcagtcccagaccctcaacctctcggagaaccaccagcagcccccacaagtttgggatctaatacaatggcttcaggcggtggcgcaccaatggcagacaataacgagggtgccgatggggtgggtagttcctcgggaaattggcattgcgattcccaatggctgggggacagagtcatcaccaccagcacccgaacctgggccctgcccacctacaacaatcacctctacaagcaaatctccaacgggacatcgggaggagccaccaacgacaacacctacttcggctacagcaccccctgggggtattttgactttaacagattccactgccacttttcaccacgtgactggcagcgactcatcaacaacaactggggattccggcccaagagactcagcttcaagctcttcaacatccaggtcaaggaggtcacgcagaatgaaggcaccaagaccatcgccaataacctcaccagcaccatccaggtgtttacggactcggagtaccagctgccgtacgttctcggctctgcgcaccagggctgcctccctccgttcccggcggacgtgttcatgattccgcaatacggctacctgacgctcaacaatggcagccaagccgtgggacgttcatccttttactgcctggaatatttcccttctcagatgctgagaacgggcaacaactttaccttcagctacacctttgaggaagtgccttttcacagcagctacgcgcacagccagagcttggaccggctgatgaatcctctgattgaccagtacctgtactacttgtctcggactcaaacaacaggaggcacggcaaatacgcagactctgggcttcagccaaggtgggcctaatacaatggccaatcaggcaaagaactggctgccaggaccctgttaccgccaacaacgcgtctcaacgacaaccgggcaaaacaacaatagcaactttgcctggactgctgggaccaaataccatctgaatggaagaaattcattggctaatcctggcatcgctatggcaacacacaaagacgacgaggagcgtttttttcccagtaacgggatcctgatttttggcaaacaaaatgctgccagagacaatgcggattacagcgatgtcatgctcaccagcgaggaagaaatcaaaaccactaaccctgtggctacagaggaatacggtatcgtggcagataacttgcagcagcaaaacacggctcctcaaattggaactgtcaacagccagggggccttacccggtatggtctggcagaaccgggacgtgtacctgcagggtcccatctgggccaagattcctcacacggacggcaacttccacccgtctccgctgatgggcggctttggcctgaaacatcctccgcctcagatcctgatcaagaacacgcctgtacctgcggatcctccgaccaccttcaaccagtcaaagctgaactctttcatcacgcaatacagcaccggacaggtcagcgtggagatcgagtgggagctgcagaaggaaaacagcaagcgctggaacccggagatccagtacacttccaactattacaagtctaataatgttgaatttgctgttaatactgaaggtgtatatagtgaaccccgccccattggcaccagatacctgactcgtaatctgtaa

SEQ ID NO: 350 - protein, 737 aa, Artificial Sequence; identical to SEQ ID NO: 338
  source: /note="Description of Artificial Sequence: Synthetic polypeptide"

SEQ ID NO: 351 - DNA, 2211 bp, Artificial Sequence
  source: /note="Description of Artificial Sequence: Synthetic polynucleotide"
atggctgccgatggttatcttccagattggctcgaggacaacctctctgagggcattcgcgagtggtgggacttgaaacctggagcccctaaacccaaggcaaatcaacaacatcaggacaacgctcgaggtcttgtgcttccgggttacaaataccttggacccggcaacggactcgacaagggggagccggtcaacgcagcagacgcggcggccctcgagcacgacaaggcctacgaccagcagctcaaggccggagacaacccgtacctcaagtacaaccacgccgacgccgagttccaggagcggctcaaagaagatacgtcttttgggggcaacctcgggcgagcagtcttccaggccaaaaagaggcttcttgaacctcttggtctggttgaggaagcggctaagacggctcctggaaagaagagaccggtagagccatcaccccagcgttctccagactcctctacgggcatcggcaagaaaggccaacagcccgctaaaaagagactcaattttggtcagactggcgactcagagtcagtccccgacccacaacctctcggagaacctccagcaacccccgctgctgtgggacctactacaatggcttcaggcggtggcgcaccaatggcagacaataacgagggtgccgatggagtgggtaattcctcaggaaattggcattgcgattcccaatggctgggcgacagagtcatcaccaccagcaccagaacctgggccctgcccacttacaacaaccatctctacaagcaaatctccagccaatcaggagcttcaaacgacaaccactactttggctacagcaccccttgggggtattttgactttaacagattccactgccacttttcaccacgtgactggcaaagactcatcaacaacaactggggattccgacccaagagactcaacttcaagctcttcaacatccaagtcaaggaggtcacgacgaatgatggcgtcacgaccatcgctaataaccttaccagcacggttcaagtcttctcggactcggagtaccagttgccgtacgtcctcggctctgcgcaccagggctgcctccctccgttcccggcggacgtgttcatgattccgcagtacggctacctaacgctcaacaatggcagccaagccgtgggacgttcatccttttactgcctggaatatttcccttctcagatgctgagaacgggcaacaactttaccttcagctacacttttgaggacgttcctttccacagcagctacgctcacagccagagtctggaccgtctcatgaatcctctcatcgaccagtacctgtattacttgagcagaacaaacactccaagtggaaccaccacgcagtcaaggcttcagttttctcaggccggagcgagtgacattcgggaccagtctaggaactggcttcctggaccctgttaccgccagcagcgcgtttctaaaacaaaaacagacaacaacaacagcaattttacctggactggtgcttcaaaatataaccttaatgggcgtgaatctataatcaaccctggcactgctatggcctcacacaaagacgacgaagacaagttctttcccatgagcggtgtcatgatttttggaaaagagagcgccggagcttcaaacactgcattggacaatgtcatgattacagacgaagaggaaattaaagccactaaccctgtggccaccgaaagatttgggaccgtggcagtcaatttccagagcagcagcacagaccctgcgaccggagatgtgcatgctatgggagcattacctggcatggtgtggcaagatagagacgtgtacctgcagggtcccatttgggccaaaattcctcacacagatggacactttcacccgtctcctcttatgggcggctttggactcaagaacccgcctcctcagatcctcatcaaaaacacgcctgttcctgcgaatcctccggcggagttttcagctacaaagtttgcttcattcatcacccaatactccacaggacaagtgagtgtggaaattgaatgggagctgcagaaagaaaacagcaagcgctggaatcccgaagtgcagtacacatccaattatgcaaaatctgccaacgttgattttactgtggacaacaatggactttatactgagcctcgccccattggcacccgttaccttacccgtcccctgtaa

SEQ ID NO: 352 - protein, 736 aa, Artificial Sequence
  source: /note="Description of Artificial Sequence: Synthetic polypeptide"
MAADGYLPDWLEDNLSEGIREWWDLKPGAPKPKANQQHQDNARGLVLPGYKYLGPGNGLDKGEPVNAADAAALEHDKAYDQQLKAGDNPYLKYNHADAEFQERLKEDTSFGGNLGRAVFQAKKRLLEPLGLVEEAAKTAPGKKRPVEPSPQRSPDSSTGIGKKGQQPAKKRLNFGQTGDSESVPDPQPLGEPPATPAAVGPTTMASGGGAPMADNNEGADGVGNSSGNWHCDSQWLGDRVITTSTRTWALPTYNNHLYKQISSQSGASNDNHYFGYSTPWGYFDFNRFHCHFSPRDWQRLINNNWGFRPKRLNFKLFNIQVKEVTTNDGVTTIANNLTSTVQVFSDSEYQLPYVLGSAHQGCLPPFPADVFMIPQYGYLTLNNGSQAVGRSSFYCLEYFPSQMLRTGNNFTFSYTFEDVPFHSSYAHSQSLDRLMNPLIDQYLYYLSRTNTPSGTTTQSRLQFSQAGASDIRDQSRNWLPGPCYRQQRVSKTKTDNNNSNFTWTGASKYNLNGRESIINPGTAMASHKDDEDKFFPMSGVMIFGKESAGASNTALDNVMITDEEEIKATNPVATERFGTVAVNFQSSSTDPATGDVHAMGALPGMVWQDRDVYLQGPIWAKIPHTDGHFHPSPLMGGFGLKNPPPQILIKNTPVPANPPAEFSATKFASFITQYSTGQVSVEIEWELQKENSKRWNPEVQYTSNYAKSANVDFTVDNNGLYTEPRPIGTRYLTRPL

SEQ ID NO: 353 - DNA, 2211 bp, Artificial Sequence
  source: /note="Description of Artificial Sequence: Synthetic polynucleotide"
atggctgccgatggttatcttccagattggctcgaggacaaccttagtgaaggaattcgcgagtggtgggcgctgaaacctggagccccgaagcccaaagccaaccagcaaaagcaggacgacggccggggtctggtgcttccgggttacaaatacctcggacccggtaacggactcgacaaaggagagccggtcaacgaggcggacgcggcagccctcgagcacgacaaggcctacgaccagcagctcaaagcgggtgacaatccgtacctgcggtataaccacgccgacgccgagtttcaggagcgtctgcaagaagatacgtcttttgggggcaacctcgggcgagcagtcttccaggccaagaagcgggttctcgaacctctcggtctggttgaggaaggcgctaagacggctcccggaaagaaacgtccggtagagcagtcgccacaagagccagactcctctacgggcatcggcaagaaaggccaacagcccgccagaaaaagactcaatttcggtcagactggcgactcagagtcagttccagaccctcaacctctcggagaacctccagcagcgccctctggtgtgggacctactacaatggcttcaggcggtggcgcaccaatggcagacaataacgaaggcgccgacggagtgggtaatgcctcaggaaattggcattgcgattccacatggctgggcgacagagtcatcaccaccagcacccgaacatgggccttgcccacctataacaaccacctctacaagcaaatctccagtgcttcaacgggggccagcaacgacaacacctacttcggctacagcaccccctgggggtattttgatttcaacagattccactgccatttctcaccacgtgactggcagcgactcatcaacaacaattggggattccggcccaagagactcaacttcaaactcttcaacatccaagtcaaggaggtcacgacgaatgatggcgtcacgaccatcgctaataaccttaccagcacggttcaagtcttctcggactcggagtaccagttgccgtacgtcctcggctctgcgcaccagggctgcctccctccgttcccggcggacgtgttcatgattccgcagtacggctacctaacgctcaacaatggcagccaggcagtgggacggtcatccttttactgcctggaatatttcccatcgcagatgctgagaacgggcaataactttaccttcagctacaccttcgaggacgtgcctttccacagcagctacgcgcacagccagagcctggaccggctgatgaatcctctcatcgaccagtacctgtattacctgaacagaactcagaatcagtccggaagtgcccaaaacaaggacttgctgtttagccgggggtctccagctggcatgtctgttcagcccaaaaactggctacctggaccctgttatcggcagcagcgcgtttctaaaacaaaaacagacaacaacaacagcaattttacctggactggtgcttcaaaatataacctcaatgggcgtgaatccatcatcaaccctggcactgctatggcctcacacaaagacgacgaagacaagttctttcccatgagcggtgtcatgatttttggaaaagagagcgccggagcttcaaacactgcattggacaatgtcatgattacagacgaagaggaaattaaagccactaaccctgtggccaccgaaagatttgggaccgtggcagtcaatttccagagcagcagcacagaccctgcgaccggagatgtgcatgttatgggagccttacctggaatggtgtggcaagacagagacgtatacctgcagggtcctatttgggccaaaattcctcacacagatggacactttcacccgtctcctcttatgggcggctttggactcaagaacccgcctcctcagatcctcatcaaaaacacgcctgttcctgcgaatcctccggcagagttttcggctacaaagtttgcttcattcatcacccagtattccacaggacaagtgagcgtggagattgaatgggagctgcagaaagaaaacagcaaacgctggaatcccgaagtgcagtatacatctaactatgcaaaatctgccaacgttgatttcactgtggacaacaatggactttatactgagcctcgccccattggcacccgttacctcacccgtcccctgtaa

SEQ ID NO: 354 - protein, 736 aa, Artificial Sequence
  source: /note="Description of Artificial Sequence: Synthetic polypeptide"
MAADGYLPDWLEDNLSEGIREWWALKPGAPKPKANQQKQDDGRGLVLPGYKYLGPGNGLDKGEPVNEADAAALEHDKAYDQQLKAGDNPYLRYNHADAEFQERLQEDTSFGGNLGRAVFQAKKRVLEPLGLVEEGAKTAPGKKRPVEQSPQEPDSSTGIGKKGQQPARKRLNFGQTGDSESVPDPQPLGEPPAAPSGVGPTTMASGGGAPMADNNEGADGVGNASGNWHCDSTWLGDRVITTSTRTWALPTYNNHLYKQISSASTGASNDNTYFGYSTPWGYFDFNRFHCHFSPRDWQRLINNNWGFRPKRLNFKLFNIQVKEVTTNDGVTTIANNLTSTVQVFSDSEYQLPYVLGSAHQGCLPPFPADVFMIPQYGYLTLNNGSQAVGRSSFYCLEYFPSQMLRTGNNFTFSYTFEDVPFHSSYAHSQSLDRLMNPLIDQYLYYLNRTQNQSGSAQNKDLLFSRGSPAGMSVQPKNWLPGPCYRQQRVSKTKTDNNNSNFTWTGASKYNLNGRESIINPGTAMASHKDDEDKFFPMSGVMIFGKESAGASNTALDNVMITDEEEIKATNPVATERFGTVAVNFQSSSTDPATGDVHVMGALPGMVWQDRDVYLQGPIWAKIPHTDGHFHPSPLMGGFGLKNPPPQILIKNTPVPANPPAEFSATKFASFITQYSTGQVSVEIEWELQKENSKRWNPEVQYTSNYAKSANVDFTVDNNGLYTEPRPIGTRYLTRPL

SEQ ID NO: 355 - DNA, 2205 bp, Artificial Sequence
  source: /note="Description of Artificial Sequence: Synthetic polynucleotide"
atggctgctgacggttatcttccagattggctcgaggacaacctttctgaaggcattcgtgagtggtgggctctgaaacctggagtccctcaacccaaagcgaaccaacaacaccaggacaaccgtcggggtcttgtgcttccgggttacaaatacctcggacccggtaacggactcgacaaaggagagccggtcaacgaggcggacgcggcagccctcgaacacgacaaggcctacgaccagcagctcaaggccggagacaacccgtacctcaagtacaaccacgccgacgccgagttccaggagcggctcaaagaagatacgtcttttgggggcaacctcgggcgagcagtcttccaggccaaaaagaggcttcttgaacctcttggtctggttgaggaagcggctaagacggctcctggaaagaagaggcctgtagagcagtctcctcaggaaccggactcctccgcgggtattggcaaatcgggtgcacagcccgctaaaaagagactcaatttcggtcagactggcgacacagagtcagtcccagaccctcaaccaatcggagaacctcccgcagccccctcaggtgtgggatctcttacaatggcttcaggtggtggcgcaccagtggcagacaataacgaaggtgccgatggagtgggtagttcctcgggaaattggcattgcgattcccaatggctgggggacagagtcatcaccaccagcacccgaacctgggccctgcccacctacaacaaccacctctacaaacaaatttccagccaatcaggagcctcgaacgacaatcactactttggctacagcaccccttgggggtattttgacttcaacagattccactgccacttttcaccacgtgactggcagcgactcatcaacaacaactggggattccggcccaagagactcagcttcaagctcttcaacatccaggtcaaagaggttacggacaacaatggagtcaagaccatcgccaataaccttaccagcacggtccaggtcttcacggactcagactatcagctcccgtacgtgctcgggtcggctcacgagggctgcctcccgccgttcccagcggacgttttcatgattcctcagtacgggtatctgacgcttaatgatggaagccaggccgtgggtcgttcgtccttttactgcctggaatatttcccgtcgcaaatgctaagaacgggtaacaacttccagttcagctacgagtttgagaacgtacctttccatagcagctacgctcacagccaaagcctggaccgactaatgaatccactcatcgaccaatacttgtactatctctcaaagactattaacggttctggacagaatcaacaaacgctaaaattcagtgtggccggacccagcaacatggctgtccagggaagaaactacatacctggacccagctaccgacaacaacgtgtctcaaccactgtgactcaaaacaacaacagcgaatttgcttggcctggagcttcttcttgggctctcaatggacgtaatagcttgatgaatcctggacctgctatggccagccacaaagaaggagaggaccgtttctttcctttgtctggatctttaatttttggcaaacaaggaactggaagagacaacgtggatgcggacaaagtcatgataaccaacgaagaagaaattaaaactactaacccggtagcaacggagtcctatggacaagtggccacaaaccaccagagtgcccaagcacaggcgcagaccggctgggttcaaaaccaaggaatacttccgggtatggtttggcaggacagagatgtgtacctgcaaggacccatctgggccaagattcctcacacggacggcaacttccacccgtctccgctgatgggcggctttggcctgaaacatcctccgcctcagatcctgatcaagaacacgcctgtacctgcggatcctccgaccaccttcaaccagtcaaagctgaactctttcatcacgcaatacagcaccggacaggtcagcgtggaaattgaatgggagctgcagaaggaaaacagcaagcgctggaatcccgaagtgcagtatacatctaactatgcaaaatctgccaacgttgatttcactgtggacaacaatggactttatactgagcctcgccccattggcacccgttacctcacccgtcccctgtaa

SEQ ID NO: 356 - protein, 734 aa, Artificial Sequence
  source: /note="Description of Artificial Sequence: Synthetic polypeptide"
MAADGYLPDWLEDNLSEGIREWWALKPGVPQPKANQQHQDNRRGLVLPGYKYLGPGNGLDKGEPVNEADAAALEHDKAYDQQLKAGDNPYLKYNHADAEFQERLKEDTSFGGNLGRAVFQAKKRLLEPLGLVEEAAKTAPGKKRPVEQSPQEPDSSAGIGKSGAQPAKKRLNFGQTGDTESVPDPQPIGEPPAAPSGVGSLTMASGGGAPVADNNEGADGVGSSSGNWHCDSQWLGDRVITTSTRTWALPTYNNHLYKQISSQSGASNDNHYFGYSTPWGYFDFNRFHCHFSPRDWQRLINNNWGFRPKRLSFKLFNIQVKEVTDNNGVKTIANNLTSTVQVFTDSDYQLPYVLGSAHEGCLPPFPADVFMIPQYGYLTLNDGSQAVGRSSFYCLEYFPSQMLRTGNNFQFSYEFENVPFHSSYAHSQSLDRLMNPLIDQYLYYLSKTINGSGQNQQTLKFSVAGPSNMAVQGRNYIPGPSYRQQRVSTTVTQNNNSEFAWPGASSWALNGRNSLMNPGPAMASHKEGEDRFFPLSGSLIFGKQGTGRDNVDADKVMITNEEEIKTTNPVATESYGQVATNHQSAQAQAQTGWVQNQGILPGMVWQDRDVYLQGPIWAKIPHTDGNFHPSPLMGGFGLKHPPPQILIKNTPVPADPPTTFNQSKLNSFITQYSTGQVSVEIEWELQKENSKRWNPEVQYTSNYAKSANVDFTVDNNGLYTEPRPIGTRYLTRPL

SEQ ID NO: 357 - DNA, 2211 bp, Artificial Sequence
  source: /note="Description of Artificial Sequence: Synthetic polynucleotide"
atggctgccgatggttatcttccagattggctcgaggacaacctctctgagggcattcgcgagtggtgggcgctgaaacctggagccccgaagcccaaagccaaccagcaaaagcaggacgacggccggggtctggtgcttcctggctacaagtacctcggacccttcaacggactcgacaagggggagcccgtcaacgcggcggacgcagcggccctcgagcacgacaaggcctacgaccagcagctgcaggcgggtgacaatccgtacctgcggtataaccacgccgacgccgagtttcaggagcgtctgcaagaagatacgtcttttgggggcaacctcgggcgagcagtcttccaggccaagaagtgggttctcgaacctctcggtctggttgaggaaggcgctaagacggctcctggaaagaaacgtccggtagagcagtcgccacaagagccagactcctcctcgggcatcggcaagacaggccagcagcccgctaaaaagagactcaattttggtcagactggcgactcagagtcagtccccgacccacaacctctcggagaacctccagcaacccccgctgctgtgggacctactacaatggcttcaggcggtggcgcaccaatggcagacaataacgaaggcgccgacggagtgggtaatgcctcaggaaattggcattgcgattccacatggctgggcgacagagtcatcaccaccagcacccgcacctgggccttgcccacctacaataaccacctctacaagcaaatctccagtgcttcaacgggggccagcaacgacaaccactacttcggctacagcaccccctgggggtattttgatttcaacagattccactgccatttctcaccacgtgactggcagcgactcatcaacaacaattggggattccggcccaagagactcaacttcaagctcttcaacatccaagtcaaggaggtcacgacgaatgatggcgtcacaaccatcgctaataaccttaccagcacggttcaagtcttctcggactcggagtaccagcttccgtacgtcctcggctctgcgcaccagggctgcctccctccgttcccggcggacgtgttcatgattccgcaatacggctacctgacgctcaacaatggcagccaagccgtgggacgttcatccttttactgcctggaatatttcccttctcagatgctgagaacgggcaacaactttaccttcagctacacctttgaggaagtgcctttccacagcagctacgcgcacagccagagcctggaccggctgatgaatcctctcatcgaccaatacctgtattacctgaacagaactcaaaatcagtccggaagtgcccaaaacaaggacttgctgtttagccgtgggtctccagctggcatgtctgttcagcccaaaaactggctacctggaccctgttatcggcagcagcgcgtttctaaaacaaaaacagacaacaacaacagcaattttacctggactggtgcttcaaaatataacctcaatgggcgtgaatccatcatcaaccctggcactgctatggcctcacacaaagacgacgaagacaagttctttcccatgagcggtgtcatgatttttggaaaggagagcgccggagcttcaaacactgcattggacaatgtcatgatcaccgacgaagaggaaatcaaagccactaaccccgtggccaccgaaagatttgggactgtggcagtcaatctccagagcagcagcacagaccctgcgaccggagatgtgcatgttatgggagccttacctggcatggtgtggcaagatagagacgtgtacctgcagggtcccatttgggccaaaattcctcacacagatggacactttcacccgtctcctcttatgggcggctttggactcaagaacccgcctcctcagatcctcatcaaaaacacgcctgttcctgcgaatcctccggcggagttttcagctacaaagtttgcttcattcatcacccaatactccacaggacaagtgagtgtggaaattgaatgggagctgcagaaagaaaacagcaagcgctggaatcccgaagtgcagtacacatccaattatgcaaaatctgccaacgttgattttactgtggacaacaatggactttatactgagcctcgccccattggcacccgttacctcacccgtcccctgtaa

SEQ ID NO: 358 - protein, 736 aa, Artificial Sequence
  source: /note="Description of Artificial Sequence: Synthetic polypeptide"
MAADGYLPDWLEDNLSEGIREWWALKPGAPKPKANQQKQDDGRGLVLPGYKYLGPFNGLDKGEPVNAADAAALEHDKAYDQQLQAGDNPYLRYNHADAEFQERLQEDTSFGGNLGRAVFQAKKWVLEPLGLVEEGAKTAPGKKRPVEQSPQEPDSSSGIGKTGQQPAKKRLNFGQTGDSESVPDPQPLGEPPATPAAVGPTTMASGGGAPMADNNEGADGVGNASGNWHCDSTWLGDRVITTSTRTWALPTYNNHLYKQISSASTGASNDNHYFGYSTPWGYFDFNRFHCHFSPRDWQRLINNNWGFRPKRLNFKLFNIQVKEVTTNDGVTTIANNLTSTVQVFSDSEYQLPYVLGSAHQGCLPPFPADVFMIPQYGYLTLNNGSQAVGRSSFYCLEYFPSQMLRTGNNFTFSYTFEEVPFHSSYAHSQSLDRLMNPLIDQYLYYLNRTQNQSGSAQNKDLLFSRGSPAGMSVQPKNWLPGPCYRQQRVSKTKTDNNNSNFTWTGASKYNLNGRESIINPGTAMASHKDDEDKFFPMSGVMIFGKESAGASNTALDNVMITDEEEIKATNPVATERFGTVAVNLQSSSTDPATGDVHVMGALPGMVWQDRDVYLQGPIWAKIPHTDGHFHPSPLMGGFGLKNPPPQILIKNTPVPANPPAEFSATKFASFITQYSTGQVSVEIEWELQKENSKRWNPEVQYTSNYAKSANVDFTVDNNGLYTEPRPIGTRYLTRPL

SEQ ID NO: 359 - DNA, 2214 bp, Artificial Sequence
  source: /note="Description of Artificial Sequence: Synthetic polynucleotide"
atggctgccgatggttatcttccagattggctcgaggacaaccttagtgaaggaattcgcgagtggtgggctttgaaacctggagcccctcaacccaaggcaaatcaacaacatcaagacaacgctcgaggtcttgtgcttccgggttacaaataccttggacccggcaacggactcgacaagggggagccggtcaacgcagcagacgcggcggccctcgagcacgacaaggcctacgaccagcagctgcaggcgggtgacaatccgtacctgcggtataaccacgccgacgccgagtttcaggagcgtctgcaagaagatacgtcttttgggggcaaccttggcagagcagtcttccaggccaaaaagaggatccttgagcctcttggtctggttgaggaagcagctaaaacggctcctggaaagaagaggcctgtagatcagtctcctcaggaaccggactcatcatctggtgttggcaaatcgggcaaacagcctgccagaaaaagactaaatttcggtcagactggcgactcagagtcagtcccagaccctcaacctctcggagaaccaccagcagcccccacaagtttgggatctaatacaatggcttcaggcggtggcgcaccaatggcagacaataacgagggtgccgatggggtgggtagttcctcgggaaattggcattgcgattcccaatggctgggggacagagtcatcaccaccagcacccgaacctgggccctgcccacctacaacaatcacctctacaagcaaatctccaacgggacatcgggaggagccaccaacgacaacacctacttcggctacagcaccccctgggggtattttgactttaacagattccactgccacttttcaccacgtgactggcagcgactcatcaacaacaactggggattccggcccaagagactcagcttcaagctcttcaacatccaggtcaaggaggtcacgcagaatgaaggcaccaagaccatcgccaataacctcaccagcaccatccaggtgtttacggactcggagtaccagctgccgtacgttctcggctcggcgcaccagggctgcctccctccgttcccggcggacgtcttcatggtgccacagtatggatacctgacgctcaacaatggcagccaagccgtgggacgttcatccttttactgcctggaatatttcccttctcagatgctgagaacgggcaacaactttaccttcagctacacctttgaggaagtgcctttccacagcagctacgcgcacagccagagcttggaccggctgatgaatcctctgattgaccagtacctgtactacttgtctcggactcaaacaacaggaggcacggcaaatacgcagactctgggcttcagccaaggtgggcctaatacaatggccaatcaggcaaagaactggctgccaggaccctgttaccgccaacaacgcgtctcaacgacaaccgggcaaaacaacaatagcaactttgcctggactgctgggaccaaataccatctgaatggaagaaattcattggctaatcctggcatcgctatggcaacacacaaagacgacgaggagcgtttttttcccagtaacgggatcctgatttttggcaaacaaaatgctgccagagacaatgcggattacagcgatgtcatgctcaccagcgaggaagaaatcaaaaccactaaccctgtggctacagaggaatacggtatcgtggcagataacttgcagcagcaaaacacggctcctcaaattggaactgtcaacagccagggggacttacccggtatggtctggcagaaccgggacgtgtacctgcagggtcccatctgggccaagattcctcacacggacggcaacttccacccgtctccgctgatgggcggctttggcctgaaacatcctccgcctcagatcctgatcaagaacacgcctgtacctgcggatcctccgaccaccttcaaccagtcaaagctgaactctttcatcacgcaatacagcaccggacaggtcagcgtggagatcgagtgggagctgcagaaggaaaacagcaagcgctggaacccggagatccagtacacttccaactattacaagtctaataatgttgaatttgctgttaatactgaaggtgtatatagtgaaccccgccccattggcaccagatacctgactcgtaatctgtaa

SEQ ID NO: 360 - protein, 737 aa, Artificial Sequence
  source: /note="Description of Artificial Sequence: Synthetic polypeptide"
MAADGYLPDWLEDNLSEGIREWWALKPGAPQPKANQQHQDNARGLVLPGYKYLGPGNGLDKGEPVNAADAAALEHDKAYDQQLQAGDNPYLRYNHADAEFQERLQEDTSFGGNLGRAVFQAKKRILEPLGLVEEAAKTAPGKKRPVDQSPQEPDSSSGVGKSGKQPARKRLNFGQTGDSESVPDPQPLGEPPAAPTSLGSNTMASGGGAPMADNNEGADGVGSSSGNWHCDSQWLGDRVITTSTRTWALPTYNNHLYKQISNGTSGGATNDNTYFGYSTPWGYFDFNRFHCHFSPRDWQRLINNNWGFRPKRLSFKLFNIQVKEVTQNEGTKTIANNLTSTIQVFTDSEYQLPYVLGSAHQGCLPPFPADVFMVPQYGYLTLNNGSQAVGRSSFYCLEYFPSQMLRTGNNFTFSYTFEEVPFHSSYAHSQSLDRLMNPLIDQYLYYLSRTQTTGGTANTQTLGFSQGGPNTMANQAKNWLPGPCYRQQRVSTTTGQNNNSNFAWTAGTKYHLNGRNSLANPGIAMATHKDDEERFFPSNGILIFGKQNAARDNADYSDVMLTSEEEIKTTNPVATEEYGIVADNLQQQNTAPQIGTVNSQGDLPGMVWQNRDVYLQGPIWAKIPHTDGNFHPSPLMGGFGLKHPPPQILIKNTPVPADPPTTFNQSKLNSFITQYSTGQVSVEIEWELQKENSKRWNPEIQYTSNYYKSNNVEFAVNTEGVYSEPRPIGTRYLTRNL

SEQ ID NO: 361 - DNA, 2205 bp, Artificial Sequence
  source: /note="Description of Artificial Sequence: Synthetic polynucleotide"
atggctgctgacggttatcttccagattggctcgaggacaacctttctgaaggcattcgtgagtggtgggctctgaaacctggagtccctcaacccaaagcgaaccaacaacaccaggacaactgtcggggtcttgtgcttccgggttacaaatacctcggacccggtaacggactcgacaaaggagagccggtcaacgaggcggacgcggcagccctcgaacacgacaaggcctacgaccagcagctcaaggccggagacaacccgtacctcaagtacaaccacgccgacgccgagttccaggagcggctcaaagaagatacgtcttttgggggcaacctcgggcgagcagtcttccagaccaaaaagaggcttcttgaacctcttggtctggttgaggaagcggctaagacggctcctggaaagaagaggcctgtagagcagtctcctcaggaaccggactcctccgcgggtattggcaaatcgggtgcacagcccgctaaaaagagactcaatttcggtcagactggcgacacagagtcagtcccagaccctcaaccaatcggagaacctcccgcagccccctcaggtgtgggatctcttacaatggcttcaggtggtggcgcaccagtggcagacaataacgaaggtgccgatggagtgggtagttcctcgggaaattggcattgcgattcccaatggctgggggacagagtcatcaccaccagcacccgaacctgggccctgcccacctacaacaaccacctctacaaacaaatttccagccaatcaggagcctcgaacgacaatcactactttggctacagcaccccttgggggtattttgacttcaacagattccactgccacttttcaccacgtgactggcagcgactcatcaacaacaactggggattccggcccaagagactcagcttcaagctcttcaacatccaggtcaaagaggttacggacaacaatggagtcaagaccatcgccaataaccttaccagcacggtccaggtcttcacggactcagactatcagctcccgtacgtgctcgggtcggctcacgagggctgcctcccgccgttcccagcggacgttttcatgattcctcagtacgggtatctgacgcttaatgatggaagccaggccgtgggtcgttcgtccttttactgcctggaatatttcccgtcgcaaatgctaagaacgggtaacaacttccagttcagctacgagtttgagaacgtacctttccatagcagctacgctcacagccaaagcctggaccgactaatgaatccactcatcgaccaatacttgtactatctctcaaagactattaacggttctggacagaatcaacaaacgctaaaattcagtgtggccggacccagcaacatggctgtccagggaagaaactacatacctggacccagctaccgacaacaacgtgtctcaaccactgtgactcaaaacaacaacagcgaatttgcttggcctggagcttcttcttgggctctcaatggacgtaatagcttgatgaatcctggacctgctatggccagccacaaagaaggagaggaccgtttctttcctttgtctggatctttaatttttggcaaacaaggaactggaagagacaacgtggatgcggacaaagtcatgataaccaacgaagaagaaattaaaactactaacccggtagcaacggagtcctatggacaagtggccacaaaccaccagagtgcccaagcacaggcgcagaccggctgggttcaaaaccaaggaatacttccgggtatggtttggcaggacagagatgtgtacctgcaaggacccatctgggccaagattcctcacacggacggcaacttccacccgtctccgctgatgggcggctttggcctgaaacatcctccgcctcagatcctgatcaagaacacgcctgttcctgcgaatcctccggcggagttttcagctacaaagtttgcttcattcatcacccagtactccacaggacaagtgagtgtggaaattgaatgggagctgcagaaagaaaacagcaagcgctggaatcccgaagtgcagtacacatccaattatgcaaaatctgccaacgttgattttactgtggacaacaatggactttatactgagcctcgccccattggcacccgttaccttaccaaacctctgtaa

SEQ ID NO: 362 - protein, 734 aa, Artificial Sequence
  source: /note="Description of Artificial Sequence: Synthetic polypeptide"
MAADGYLPDWLEDNLSEGIREWWALKPGVPQPKANQQHQDNCRGLVLPGYKYLGPGNGLDKGEPVNEADAAALEHDKAYDQQLKAGDNPYLKYNHADAEFQERLKEDTSFGGNLGRAVFQTKKRLLEPLGLVEEAAKTAPGKKRPVEQSPQEPDSSAGIGKSGAQPAKKRLNFGQTGDTESVPDPQPIGEPPAAPSGVGSLTMASGGGAPVADNNEGADGVGSSSGNWHCDSQWLGDRVITTSTRTWALPTYNNHLYKQISSQSGASNDNHYFGYSTPWGYFDFNRFHCHFSPRDWQRLINNNWGFRPKRLSFKLFNIQVKEVTDNNGVKTIANNLTSTVQVFTDSDYQLPYVLGSAHEGCLPPFPADVFMIPQYGYLTLNDGSQAVGRSSFYCLEYFPSQMLRTGNNFQFSYEFENVPFHSSYAHSQSLDRLMNPLIDQYLYYLSKTINGSGQNQQTLKFSVAGPSNMAVQGRNYIPGPSYRQQRVSTTVTQNNNSEFAWPGASSWALNGRNSLMNPGPAMASHKEGEDRFFPLSGSLIFGKQGTGRDNVDADKVMITNEEEIKTTNPVATESYGQVATNHQSAQAQAQTGWVQNQGILPGMVWQDRDVYLQGPIWAKIPHTDGNFHPSPLMGGFGLKHPPPQILIKNTPVPANPPAEFSATKFASFITQYSTGQVSVEIEWELQKENSKRWNPEVQYTSNYAKSANVDFTVDNNGLYTEPRPIGTRYLTKPL

SEQ ID NO: 363 - DNA, 2211 bp, Artificial Sequence
  source: /note="Description of Artificial Sequence: Synthetic polynucleotide"
atggctgccgatggttatcttccagattggctcgaggacaacctctctgagggcattcgcgagtggtgggacttgaaacctggagcccctaaacccaaggcaaatcaacaacatcaggacaacgctcgaggtcttgtgcttccgggttacaaataccttggacccggcaacggactcgacaagggggagccggtcaacgcagcagacgcggcggccctcgagcacgacaaggcctacgaccagcagctcaaggccggagacaacccgtacctcaagtacaaccacgccgacgccgagttccaggagcggctcaaagaagatacgtcttttgggggcaacctcgggcgagcagtcttccaggccaaaaagaggcttcttgaacctcttggtctggttgaggaagcggctaagacggctcctggaaagaagagaccggtagagccatcaccccagcgttctccagactcctctacgggcatcggcaagaaaggccaacagcccgctaaaaagagactcaattttggtcagactggcgactcagagtcagtccccgacccacaacctctcggagaacctccagcaacccccgctgctgtgggacctactacaatggcttcaggcggtggcgcaccaatggcagacaataacgagggtgccgatggagtgggtaattcctcaggaaattggcattgcgattcccaatggctgggcgacagagtcatcaccaccagcaccagaacctgggccctgcccacttacaacaaccatctctacaagcaaatctccagccaatcaggagcttcaaacgacaaccactactttggctacagcaccccttgggggtattttgactttaacagattccactgccacttttcaccacgtgactggcaaagactcatcaacaacaactggggattccgacccaagagactcaacttcaagctcttcaacatccaagtcaaggaggtcacgacgaatgatggcgtcacgaccatcgctaataaccttaccagcacggttcaagtcttctcggactcggagtaccagttgccgtacgtcctcggctctgcgcaccagggctgcctccctccgttcccggcggacgtgttcatgattccgcagtacggctacctaacgctcaacaatggcagccaagccgtgggacgttcatccttttactgcctggaatatttcccttctcagatgctgagaacgggcaacaactttaccttcagctacacttttgaggacgttcctttccacagcagctacgctcacagccagagtctggaccgtctcatgaatcctctcatcgaccagtacctgtattacttgagcagaacaaacactccaagtggaaccaccacgcagtcaaggcttcagttttctcaggccggagcgagtgacattcgggaccagtctaggaactggcttcctggaccctgttaccgccagcagcgcgtttctaaaacaaaaacagacaacaacaacagcaattttacctggactggtgcttcaaaatataaccttaatgggcgtgaatctataatcaaccctggcactgctatggcctcacacaaagacgacgaagacaagttctttcccatgagcggtgtcatgatttttggaaaagagagcgccggagcttcaaacactgcattggacaatgtcatgatcacagacgaagaggaaatcaaagccactaaccccgtggccaccgaaagatttgggactgtggcagtcaatctccagagcagcagcacagaccctgcgaccggagatgtgcatgttatgggagcattacctggcatggtgtggcaagatagagacgtgtacctgcagggtcccatttgggccaaaattcctcacacagatggacactttcacccgtctcctcttatgggcggctttggactcaagaacccgcctcctcagatcctcatcaaaaacacgcctgttcctgcgaatcctccggcggagttttcagctacaaagtttgcttcattcatcacccaatactccacaggacaagtgagtgtggaaattgaatgggagctgcagaaagaaaacagcaagcgctggaatcccgaagtgcagtacacatccaattatgcaaaatctgccaacgttgattttactgtggacaacaatggactttatactgagcctcgccccattggcacccgttaccttacccgtcccctgtaa

SEQ ID NO: 364 - protein, 736 aa, Artificial Sequence
  source: /note="Description of Artificial Sequence: Synthetic polypeptide"
MAADGYLPDWLEDNLSEGIREWWDLKPGAPKPKANQQHQDNARGLVLPGYKYLGPGNGLDKGEPVNAADAAALEHDKAYDQQLKAGDNPYLKYNHADAEFQERLKEDTSFGGNLGRAVFQAKKRLLEPLGLVEEAAKTAPGKKRPVEPSPQRSPDSSTGIGKKGQQPAKKRLNFGQTGDSESVPDPQPLGEPPATPAAVGPTTMASGGGAPMADNNEGADGVGNSSGNWHCDSQWLGDRVITTSTRTWALPTYNNHLYKQISSQSGASNDNHYFGYSTPWGYFDFNRFHCHFSPRDWQRLINNNWGFRPKRLNFKLFNIQVKEVTTNDGVTTIANNLTSTVQVFSDSEYQLPYVLGSAHQGCLPPFPADVFMIPQYGYLTLNNGSQAVGRSSFYCLEYFPSQMLRTGNNFTFSYTFEDVPFHSSYAHSQSLDRLMNPLIDQYLYYLSRTNTPSGTTTQSRLQFSQAGASDIRDQSRNWLPGPCYRQQRVSKTKTDNNNSNFTWTGASKYNLNGRESIINPGTAMASHKDDEDKFFPMSGVMIFGKESAGASNTALDNVMITDEEEIKATNPVATERFGTVAVNLQSSSTDPATGDVHVMGALPGMVWQDRDVYLQGPIWAKIPHTDGHFHPSPLMGGFGLKNPPPQILIKNTPVPANPPAEFSATKFASFITQYSTGQVSVEIEWELQKENSKRWNPEVQYTSNYAKSANVDFTVDNNGLYTEPRPIGTRYLTRPL

SEQ ID NO: 365 - DNA, 2214 bp, Artificial Sequence; identical to SEQ ID NO: 337
  source: /note="Description of Artificial Sequence: Synthetic polynucleotide"

SEQ ID NO: 366 - protein, 737 aa, Artificial Sequence; identical to SEQ ID NO: 338
  source: /note="Description of Artificial Sequence: Synthetic polypeptide"

SEQ ID NO: 367 - DNA, 2205 bp, Artificial Sequence
  source: /note="Description of Artificial Sequence: Synthetic polynucleotide"
atggctgctgacggttatcttccagattggctcgaggacaacctttctgaaggcattcgtgagtggtgggctctgaaacctggagtccctcaacccaaagcgaaccaacaacaccaggacaaccgtcggggtcttgtgcttccgggttacaaatacctcggacccggtaacggactcgacaaaggagagccggtcaacgaggcggacgcggcagccctcgaacacgacaaggcctacgaccagcagctcaaggccggagacaacccgtacctcaagtacaaccacgccgacgccgagttccaggagcggctcaaagaagatacgtcttttgggggcaacctcgggcgagcagtcttccaggccaaaaagaggcttcttgaacctcttggtctggttgaggaagcggctaagacggctcctggaaagaagaggcctgtagagcagtctcctcaggaaccggactcctccgcgggtattggcaaatcgggtgcacagcccgctaaaaagagactcaatttcggtcagactggcgacacagagtcagtcccagaccctcaaccaatcggagaacctcccgcagccccctcaggtgtgggatctcttacaatggcttcaggtggtggcgcaccagtggcagacaataacgaaggtgccgatggagtgggtagttcctcgggaaattggcattgcgattcccaatggctgggggacagagtcatcaccaccagcacccgaacctgggccctgcccacctacaacaaccacctctacaaacaaatttccagccaatcaggagcctcgaacgacaatcactactttggctacagcaccccttgggggtattttgacttcaacagattccactgccacttttcaccacgtgactggcagcgactcatcaacaacaactggggattccggcccaagagactcagcttcaagctcttcaacatccaggtcaaagaggttacggacaacaatggagtcaagaccatcgccaataaccttaccagcacggtccaggtcttcacggactcagactatcagctcccgtacgtgctcgggtcggctcacgagggctgcctcccgccgttcccagcggacgttttcatgattcctcagtacgggtatctgacgcttaatgatggaagccaggccgtgggtcgttcgtccttttactgcctggaatatttcccgtcgcaaatgctaagaacgggtaacaacttccagttcagctacgagtttgagaacgtacctttccatagcagctacgctcacagccaaagcctggaccgactaatgaatccactcatcgaccaatacttgtactatctctcaaagactattaacggttctggacagaatcaacaaacgctaaaattcagtgtggccggacccagcaacatggctgtccagggaagaaactacatacctggacccagctaccgacaacaacgtgtctcaaccactgtgactcaaaacaacaacagcgaatttgcttggcctggagcttcttcttgggctctcaatggacgtaatagcttgatgaatcctggacctgctatggccagccacaaagaaggagaggaccgtttctttcctttgtctggatctttaatttttggcaaacaaggaactggaagagacaacgtggatgcggacaaagtcatgataaccaacgaagaagaaattaaaactactaacccggtagcaacggagtcctatggacaagtggccacaaaccaccagagtgcccaagcacaggcgcagaccggctgggttcaaaaccaaggaatacttccgggtatggtttggcaggacagagatgtgtacctgcaaggacccatttgggccaaaattcctcacacggacggcaactttcacccttctccgctgatgggagggtttggaatgaaacacccgcctcctcagatcctcatcaaaaacacacctgtacctgcggatcctccaacggccttcaacaaggacaagctgaactctttcatcacccagtattctactggccaagtcagcgtggagatcgagtgggagctgcagaaggaaaacagcaagcgctggaaccccgagatccagtacacctccaactactacaaatctacaagtgtggactttgctgttaatacagaaggcgtgtactctgaaccccgccccattggcacccgttacctcacccgtaatctgtaa

SEQ ID NO: 368 - protein, 734 aa, Artificial Sequence
  source: /note="Description of Artificial Sequence: Synthetic polypeptide"
MAADGYLPDWLEDNLSEGIREWWALKPGVPQPKANQQHQDNRRGLVLPGYKYLGPGNGLDKGEPVNEADAAALEHDKAYDQQLKAGDNPYLKYNHADAEFQERLKEDTSFGGNLGRAVFQAKKRLLEPLGLVEEAAKTAPGKKRPVEQSPQEPDSSAGIGKSGAQPAKKRLNFGQTGDTESVPDPQPIGEPPAAPSGVGSLTMASGGGAPVADNNEGADGVGSSSGNWHCDSQWLGDRVITTSTRTWALPTYNNHLYKQISSQSGASNDNHYFGYSTPWGYFDFNRFHCHFSPRDWQRLINNNWGFRPKRLSFKLFNIQVKEVTDNNGVKTIANNLTSTVQVFTDSDYQLPYVLGSAHEGCLPPFPADVFMIPQYGYLTLNDGSQAVGRSSFYCLEYFPSQMLRTGNNFQFSYEFENVPFHSSYAHSQSLDRLMNPLIDQYLYYLSKTINGSGQNQQTLKFSVAGPSNMAVQGRNYIPGPSYRQQRVSTTVTQNNNSEFAWPGASSWALNGRNSLMNPGPAMASHKEGEDRFFPLSGSLIFGKQGTGRDNVDADKVMITNEEEIKTTNPVATESYGQVATNHQSAQAQAQTGWVQNQGILPGMVWQDRDVYLQGPIWAKIPHTDGNFHPSPLMGGFGMKHPPPQILIKNTPVPADPPTAFNKDKLNSFITQYSTGQVSVEIEWELQKENSKRWNPEIQYTSNYYKSTSVDFAVNTEGVYSEPRPIGTRYLTRNL

SEQ ID NO: 369 - DNA, 2217 bp, Artificial Sequence
  source: /note="Description of Artificial Sequence: Synthetic polynucleotide"
atggctgccgatggttatcttccagattggctcgaggacaacctctctgagggcattcgcgagtggtgggcgctgaaacctggagccccgaagcccaaagccaaccagcaaaagcaggacgacggccggggtctggtgcttcctggctacaagtacctcggacccttcaacggactcgacaagggggagcccgtcaacgcggcggacgcagcggccctcgagcacgacaaggcctacgaccagcagctgcaggcgggtgacaatccgtacctgcggtataaccacgccgacgccgagtttcaggagcgtctgcaagaagatacgtcttttgggggcaacctcgggcgagcagtcttccaggccaagaagcgggttctcgaacctctcggtctggttgaggaaggcgctaagacggctcctggaaagaagagaccggtagagccatcaccccagcgttctccagactcctctacgggcatcggcaagaaaggccaacagcccgccagaaaaagactcaattttggtcagactggcgactcagagtcagttccagaccctcaacctctcggagaacctccagcagcgccctctggtgtgggacctaatacaatggctgcaggcggtggcgcaccaatggcagacaataacgaaggcgccgacggagtgggtagttcctcgggaaattggcattgcgattccacatggctgggcgacagagtcatcaccaccagcacccgaacctgggccctgcccacctacaacaaccacctctacaagcaaatctccaacgggacatcgggaggagccaccaacgacaacacctacttcggctacagcaccccctgggggtattttgactttaacagattccactgccacttttcaccacgtgactggcagcgactcatcaacaacaactggggattccggcccaagagactcagcttcaagctcttcaacatccaggtcaaggaggtcacgcagaatgaaggcaccaagaccatcgccaataacctcaccagcaccatccaggtgtttacggactcggagtaccagctgccgtacgttctcggctctgcccaccagggctgcctgcctccgttcccggcggacgtgttcatgattccccagtacggctacctaacactcaacaacggtagtcaggccgtgggacgctcctccttctactgcctggaatactttccttcgcagatgctgagaaccggcaacaacttccagtttacttacaccttcgaggacgtgcctttccacagcagctacgcccacagccagagcttggaccggctgatgaatcctctgattgaccagtacctgtactacttgtctcggactcaaacaacaggaggcacggcaaatacgcagactctgggcttcagccaaggtgggcctaatacaatggccaatcaggcaaagaactggctgccaggaccctgttaccgccaacaacgcgtctcaacgacaaccgggcaaaacaacaatagcaactttgcctggactgctgggaccaaataccatctgaatggaagaaattcattggctaatcctggcatcgctatggcaacacacaaagacgacgaggagcgtttttttcccagtaacgggatcctgatttttggcaaacaaaatgctgccagagacaatgcggattacagcgatgtcatgctcaccagcgaggaagaaatcaaaaccactaaccctgtggctacagaggaatacggtatcgtggcagataacttgcagcagcaaaacacggctcctcaaattggaactgtcaacagccagggggccttacccggtatggtctggcagaaccgggacgtgtacctgcagggtcccatctgggccaagattcctcacacggacggcaacttccacccctctcccctcatgggtggattcggacttaaacatcctccgcctcagatcctgatcaagaacacgcctgtacctgcggatcctccgaccaccttcaaccagtcaaagctgaactctttcatcacgcaatacagcaccggacaggtcagcgtggaaattgaatgggagctgcagaaggaaaacagcaagcgctggaaccccgagatccagtacacctccaactactacaaatctacaagtgtggactttgctgttaatacagaaggcgtgtactctgaaccccgccccattggcacccgttacctcacccgtaatctgtaa

SEQ ID NO: 370 - protein, 738 aa, Artificial Sequence; identical to SEQ ID NO: 116
  source: /note="Description of Artificial Sequence: Synthetic polypeptide"

SEQ ID NO: 371 - DNA, 2211 bp, Artificial Sequence
  source: /note="Description of Artificial Sequence: Synthetic polynucleotide"
atggctgctgacggttatcttccagattggctcgaggacaacctttctgaaggcattcgagagtggtgggcgctgcaacctggagcccctaaacccaaggcaaatcaacaacatcaggacaacgctcggggtcttgtgcttccgggttacaaatacctcggacccggcaacggactcgacaagggggaacccgtcaacgcagcggacgcggcagccctcgagcacgacaaggcctacgaccagcagctcaaggccggtgacaacccctacctcaagtacaaccacgccgacgccgagttccaggagcggctcaaagaagatacgtcttttgggggcaacctcgggcgagcagtcttccaggccaaaaagaggcttcttgaacctcttggtctggttgaggaagcggctaagacggctcctggaaagaagaggcctgtagatcagtctcctcaggaaccggactcatcatctggtgttggcaaatcgggcaaacagcctgccagaaaaagactaaatttcggtcagactggcgactcagagtcagtcccagaccctcaacctctcggagaaccaccagcagcccccacaagtttgggatctaatacaatggcttcaggcggtggcgcaccaatggcagacaataacgagggtgccgatggagtgggtaattcctcaggaaattggcattgcgattcccaatggctgggcgacagagtcatcaccaccagcaccagaacctgggccctgcccacttacaacaaccatctctacaagcaaatctccagccaatcaggagcttcaaacgacaaccactactttggctacagcaccccttgggggtattttgactttaacagattccactgccacttctcaccacgtgactggcagcgactcattaacaacaactggggattccggcccaagaaactcagcttcaagctcttcaacatccaagttaaagaggtcacgcagaacgatggcacgacgactattgccaataaccttaccagcacggttcaggtgtttacggactcggagtatcagctcccgtacgtgctcgggtcggcgcaccaaggctgtctcccgccgtttccagcggacgtcttcatggtccctcagtatggatacctcaccctgaacaacggaagtcaagcggtgggacgctcatccttttactgcctggagtacttcccttcgcagatgctaaggactggaaataacttccaattcagctataccttcgaggatgtaccttttcacagcagctacgctcacagccagagtttggatcgcttgatgaatcctcttattgatcagtatctgtactacctgaacagaacgcaaggaacaacctctggaacaaccaaccaatcacggctgctttttagccaggctgggcctcagtctatgtctttgcaggccagaaattggctacctgggccctgctaccggcaacagagactttcaaagactgctaacgacaacaacaacagtaactttccttggacagcggccagcaaatatcatctcaatggccgcgactcgctggtgaatccaggaccagctatggccagtcacaaggacgatgaagaaaaatttttccctatgcacggcaatctaatatttggcaaagaagggacaacggcaagtaacgcagaattagataatgtaatgattacggatgaagaagagattcgtaccaccaatcctgtggcaacagagcagtatggaactgtggcaaataacttgcagagctcaaatacagctcccacgactagaactgtcaatgatcagggggccttacctggcatggtgtggcaagatcgtgacgtgtaccttcaaggacctatctgggcaaagattcctcacacggatggacactttcatccttctcctctgatgggaggctttggactgaaacatccgcctcctcaaatcatgatcaaaaatactccggtaccggcaaatcctccgacgactttcagcccggccaagtttgcttcatttatcactcagtactccactggacaggtcagcgtggaaattgagtgggagctacagaaagaaaacagcaaacgttggaatccagagattcagtacacttccaactacaacaagtctgttaatgtggactttactgtagacactaatggtgtttatagtgaacctcgccccattggcacccgttaccttacccgtcccctgtaa

SEQ ID NO: 372 - protein, 736 aa, Artificial Sequence; identical to SEQ ID NO: 342
  source: /note="Description of Artificial Sequence: Synthetic polypeptide"

SEQ ID NO: 373 - DNA, 2211 bp, Artificial Sequence; identical to SEQ ID NO: 341
  source: /note="Description of Artificial Sequence: Synthetic polynucleotide"

SEQ ID NO: 374 - protein, 736 aa, Artificial Sequence; identical to SEQ ID NO: 342
  source: /note="Description of Artificial Sequence: Synthetic polypeptide"

SEQ ID NO: 375 - DNA, 2211 bp, Artificial Sequence
  source: /note="Description of Artificial Sequence: Synthetic polynucleotide"
atggctgctgacggttatcttccagattggctcgaggacaacctttctgaaggcattcgtgagtggtgggctctgaaacctggagtccctcaacccaaagcgaaccaacaacaccaggacaaccgtcggggtcttgtgcttccgggttacaaatacctcggacccggtaacggactcgacaaaggagagcccgtcaacgcggcggatgcagcggccctcgagcacgacaaggcctacgaccagcagctcaaagcgggtgacaatccgtacctgcggtataaccacgccgacgccgagtttcaggagcgtctgcaagaagatacgtcttttgggggcaacctcgggcgagcagtcttccaggccaagaagagggttctcgaaccttttggtctggttgaggaaggtgctaagacggctcctggaaagaaacgtccggtagagcagtcgccacaagagccagactcctcctcgggcatcggcaagacaggccagcagcccgctaaaaagagactcaattttggtcagactggcgactcagagtcagtccccgacccacaacctctcggagaacctccagcaacccccgctgctgtgggacctactacaatggcttcaggcggtggcgcaccaatggcagacaataacgaaggcgccgacggagtgggtaatgcctcaggaaattggcattgcgattccacatggctgggcgacagagtcatcaccaccagcacccgcacctgggccttgcccacctacaataaccacctctacaagcaaatctccagtgcttcaacgggggccagcaacgacaaccactacttcggctacagcaccccctgggggtattttgatttcaacagattccactgccatttctcaccacgtgactggcagcgactcatcaacaacaattggggattccggcccaagagactcaacttcaagctcttcaacatccaagtcaaggaggtcacgacgaatgatggcgtcacgaccatcgctaataaccttaccagcacggttcaagtcttctcggactcggagtaccagcttccgtacgtcctcggctctgcgcaccagggctgcctccctccgttcccggcggacgtgttcatgattccgcaatacggctacctgacgctcaacaatggcagccaagccgtgggacgttcatccttttactgcctggaatatttcccttctcagatgctgagaacgggcaacaactttaccttcagctacacctttgaggaagtgcctttccacagcagctacgcgcacagccagagcctggaccggctgatgaatcctctcatcgaccaatacctgtattacctgaacagaactcaaaatcagtccggaagtgcccaaaacaaggacttgctgtttagccgtgggtctccagctggcatgtctgttcagcccaaaaactggctacctggaccctgttatcggcagcagcgcgtttctaaaacaaaaacagacaacaacaacagcaattttacctggactggtgcttcaaaatataacctcaatgggcgtgaatccatcatcaaccctggcactgctatggcctcacacaaagacgacgaagacaagttctttcccatgagcggtgtcatgatttttggaaaagagagcgccggagcttcaaacactgcattggacaatgtcatgattacagacgaagaggaaattaaagccactaaccctgtggccaccgaaagatttgggaccgtggcagtcaatttccagagcagcagcacagaccctgcgaccggagatgtgcatgttatgggagccttacctggaatggtgtggcaagacagagacgtatacctgcagggtcctatttgggccaaaattcctcacacggatggacactttcacccgtctcctctcatgggcggctttggacttaagcacccgcctcctcagatcctcatcaaaaacacgcctgttcctgcgaatcctccggcagagttttcggctacaaagtttgcttcattcatcacccagtattccacaggacaagtgagcgtggagattgaatgggagctgcagaaagaaaacagcaaacgctggaatcccgaagtgcagtatacatctaactatgcaaaatctgccaacgttgatttcactgtggacaacaatggactttatactgagcctcgccccattggcacccgttacctcacccgtcccctgtaa

SEQ ID NO: 376 - protein, 736 aa, Artificial Sequence
  source: /note="Description of Artificial Sequence: Synthetic polypeptide"
MAADGYLPDWLEDNLSEGIREWWALKPGVPQPKANQQHQDNRRGLVLPGYKYLGPGNGLDKGEPVNAADAAALEHDKAYDQQLKAGDNPYLRYNHADAEFQERLQEDTSFGGNLGRAVFQAKKRVLEPFGLVEEGAKTAPGKKRPVEQSPQEPDSSSGIGKTGQQPAKKRLNFGQTGDSESVPDPQPLGEPPATPAAVGPTTMASGGGAPMADNNEGADGVGNASGNWHCDSTWLGDRVITTSTRTWALPTYNNHLYKQISSASTGASNDNHYFGYSTPWGYFDFNRFHCHFSPRDWQRLINNNWGFRPKRLNFKLFNIQVKEVTTNDGVTTIANNLTSTVQVFSDSEYQLPYVLGSAHQGCLPPFPADVFMIPQYGYLTLNNGSQAVGRSSFYCLEYFPSQMLRTGNNFTFSYTFEEVPFHSSYAHSQSLDRLMNPLIDQYLYYLNRTQNQSGSAQNKDLLFSRGSPAGMSVQPKNWLPGPCYRQQRVSKTKTDNNNSNFTWTGASKYNLNGRESIINPGTAMASHKDDEDKFFPMSGVMIFGKESAGASNTALDNVMITDEEEIKATNPVATERFGTVAVNFQSSSTDPATGDVHVMGALPGMVWQDRDVYLQGPIWAKIPHTDGHFHPSPLMGGFGLKHPPPQILIKNTPVPANPPAEFSATKFASFITQYSTGQVSVEIEWELQKENSKRWNPEVQYTSNYAKSANVDFTVDNNGLYTEPRPIGTRYLTRPL

SEQ ID NO: 377 - DNA, 2217 bp, Artificial Sequence
  source: /note="Description of Artificial Sequence: Synthetic polynucleotide"
atggctgccgatggttatcttccagattggctcgaggacaacctctctgagggcattcgcgagtggtgggacttgaaacctggagccccgaaacccaaagccaaccagcaaaagcaggacgacggccggggtctggtgcttcctggctacaagtacctcggacccttcaacggactcgacaagggggagcccgtcaacgcggcggatgcaacggccctcgagcacgacaaggcctacgaccagcagctgcaggcgggtgacaatccgtacctgcggtataaccacgccgacgccgagtttcaggagcgtctgcaagaagatacgtcttttgggggcaacctcgggcgagcagtcttccaggccaagaagcgggttctcgaacctctcggtctggttgaggaaggcgctaagacggctcctggaaagaagagaccggtagagccatcaccccagcgttctccagactcctctacgggcatcggcaagaaaggccaacagcccgccagaaaaagactcaattttggtcagactggcgactcagagtcagttccagaccctcaacctctcggagaaccaccagcagcccccacaagtttgggatctaatacaatggcttcaggcggtggcgcaccaatggcagacaataacgagggtgccgatggagtgggtaattcctcaggaaattggcattgcgattcccaatggctgggcgacagagtcatcaccaccagcacccgcacctgggccttgcccacctacaataaccacctctacaagcaaatctccagtgcttcaacgggggccagcaacgacaaccactacttcggctacagcaccccctgggggtattttgactttaaccgcttccactgccacttctcgccaagagactggcaaagactcatcaacaacaattggggattccggcccaagagactcaacttcaaactcttcaacatccaagtcaaggaggtcacgacgaatgatggcgtcacgaccatcgccaataacctcaccagcaccatccaggtgtttacggactcggagtaccagctgccgtacgttctcggctctgcccaccagggctgcctgcctccgttcccggcggacgtgttcatgattccccagtatggatacctcaccctgaacaacggaagtcaagcggtgggacgctcatccttttactgcctggagtacttcccttcgcagatgctaaggactggaaataacttccaattcagctataccttcgaggatgtaccttttcacagcagctacgctcacagccagagtttggatcgcttgatgaatcctcttattgatcagtatctgtactacctgaacagaacgcaaggaacaacctctggaacaaccaaccaatcacggctgctttttagccaggctgggcctcagtctatgtctttgcaggccagaaattggctacctgggccctgctaccggcaacagagactttcaaagactgctaacgacaacaacaacagtaactttccttggacagcagccagcaaatatcatctcaatggccgcgactcgctggtgaatccaggaccagctatggccagtcacaaggacgatgaagaaaaatttttccctatgcacggcaatctaatatttggcaaagaagggacaacggcaagtaacgcagaattagataatgtaatgattacggatgaagaagagattcgtaccaccaatcctgtggcaacagagcagtatggaactgtggcaaataacttgcagagctcaaatacagctcccacgactagaactgtcaatgatcagggggccttacctggcatggtgtggcaagatcgtgacgtgtaccttcaggggcccatctgggcaaagattccacacacggacggacattttcacccctctcccctcatgggtggattcggacttaaacaccctcctccgcagattctcatcaagaacaccccggtacctgcgaatccttcgaccaccttcagtgcggcaaagtttgcttccttcatcacacagtactccacgggacaggtcagcgtggagatcgagtgggagctgcagaaggaaaacagcaagcgctggaacccggagatccagtacacttccaactattacaagtctaataatgttgaatttgctgttaatactgaaggtgtatatagtgaaccccgccccattggcaccagatacctgactcgtaatctgtaa

SEQ ID NO: 378 - protein, 738 aa, Artificial Sequence
  source: /note="Description of Artificial Sequence: Synthetic polypeptide"
MAADGYLPDWLEDNLSEGIREWWDLKPGAPKPKANQQKQDDGRGLVLPGYKYLGPFNGLDKGEPVNAADATALEHDKAYDQQLQAGDNPYLRYNHADAEFQERLQEDTSFGGNLGRAVFQAKKRVLEPLGLVEEGAKTAPGKKRPVEPSPQRSPDSSTGIGKKGQQPARKRLNFGQTGDSESVPDPQPLGEPPAAPTSLGSNTMASGGGAPMADNNEGADGVGNSSGNWHCDSQWLGDRVITTSTRTWALPTYNNHLYKQISSASTGASNDNHYFGYSTPWGYFDFNRFHCHFSPRDWQRLINNNWGFRPKRLNFKLFNIQVKEVTTNDGVTTIANNLTSTIQVFTDSEYQLPYVLGSAHQGCLPPFPADVFMIPQYGYLTLNNGSQAVGRSSFYCLEYFPSQMLRTGNNFQFSYTFEDVPFHSSYAHSQSLDRLMNPLIDQYLYYLNRTQGTTSGTTNQSRLLFSQAGPQSMSLQARNWLPGPCYRQQRLSKTANDNNNSNFPWTAASKYHLNGRDSLVNPGPAMASHKDDEEKFFPMHGNLIFGKEGTTASNAELDNVMITDEEEIRTTNPVATEQYGTVANNLQSSNTAPTTRTVNDQGALPGMVWQDRDVYLQGPIWAKIPHTDGHFHPSPLMGGFGLKHPPPQILIKNTPVPANPSTTFSAAKFASFITQYSTGQVSVEIEWELQKENSKRWNPEIQYTSNYYKSNNVEFAVNTEGVYSEPRPIGTRYLTRNL

SEQ ID NO: 379 - DNA, 2208 bp, Artificial Sequence
  source: /note="Description of Artificial Sequence: Synthetic polynucleotide"
atggctgccgatggttatcttccagattggctcgaggacaaccttagtgaaggaattcgcgagtggtgggacttgaaacctggagccccgaagcccaaagccaaccagcaaaagcaggacgacggccggggtctggtgcttcctggctacaagtacctcggacccttcaacggactcgacaagggggagcccgtcaacgcggcggacgcagcggccctcgagcacgacaaggcctacgaccagcagctcaaagcgggtgacaatccgtacctgcggtataaccacgccgacgccgagtttcaggagcgtctgcaagaagatacgtcttttgggggcaacctcgggcgagcagtcttccaggccaagaagcgggttctcgaacctctcggtctggttgaggaaggtgctaagacggctcctggaaagaaacgtccggtagagcagtcgccacaagagccagactcctcctcgggcattggcaagacaggccagcagcccgctaaaaagagactcaattttggtcagactggcgactcagagtcagtccccgacccacaacctctcggagaacctccagcaacccccgctgctgtgggacctactacaatggcttcaggcggtggcgcaccaatggcagacaataacgaaggcgccgacggagtgggtaatgcctcaggaaattggcattgcgattccacatggctgggcgacagagtcatcaccaccagcacccgaacctgggccctgcccacctacaacaaccacctctacaaacaaatttccagccaatcaggagcctcgaacgacaatcactactttggctacagcaccccttgggggtattttgatttcaacagattccactgccacttttcaccacgtgactggcagcgactcatcaacaacaattggggattccggcccaagagactcagcttcaagctcttcaacatccaggtcaaggaggtcacgcagaatgaaggcaccaagaccatcgccaataaccttaccagcacggttcaagtgtttacggactcggagtatcagctcccgtacgtgctcggctcggcgcatcaaggatgcctcccgccgttcccagcagacgtcttcatggtgccacagtatggatacctcaccctgaacaacgggagtcaggcagtaggacgctcttcattttactgcctggagtactttccttctcagatgctgcgtaccggaaacaactttaccttcagctacacttttgaggacgttcctttccacagcagctacgctcacagccagagtctggaccgtctcatgaatcctctgattgaccagtacctgtattacttgagcagaacaaacactccaagtggaaccaccacgcagtcaaggcttcagttttctcaggccggagcgagtgacattcgggaccagtctaggaactggcttcctggaccctgttaccgccagcagcgagtatcaaagacatctgcggataacaacaacagtgaatactcgtggactggagctaccaagtaccacctcaatggcagagactctctggtgaatccgggcccggccatggcaagccacaaggactatgaagaaaagttttttcctcagagcggggttctcatctttgggaagcaaggctcagagaaaacaaatgtggacattgaaaaggtcatgattacagacgaagaggaaatcaggacaaccaatcccgtggctacggagcagtatggttctgtatctaccaacctccagagaggcaacagacaagcagctaccgcagatgtcaacacacaaggcgttcttccaggcatggtctggcaggacagagatgtgtaccttcaggggcccatctgggcaaagattccacacacggacggacattttcacccgtctccgctgatgggcggctttggcctgaaacatcctccgcctcagatcctgatcaagaacacgcctgtacctgcggatcctccgaccaccttcaaccagtcaaagctgaactctttcatcactcagtattctactggccaagtcagcgtggagatcgagtgggagctgcagaaggaaaacagcaagcgctggaaccccgagatccagtacacctccaactactacaaatctacaagtgtggactttgctgttaatacagaaggcgtgtactctgaaccccgccccattggcacccgttacctcacccgtaatctgtaa

SEQ ID NO: 380 - protein, 735 aa, Artificial Sequence
  source: /note="Description of Artificial Sequence: Synthetic polypeptide"
MAADGYLPDWLEDNLSEGIREWWDLKPGAPKPKANQQKQDDGRGLVLPGYKYLGPFNGLDKGEPVNAADAAALEHDKAYDQQLKAGDNPYLRYNHADAEFQERLQEDTSFGGNLGRAVFQAKKRVLEPLGLVEEGAKTAPGKKRPVEQSPQEPDSSSGIGKTGQQPAKKRLNFGQTGDSESVPDPQPLGEPPATPAAVGPTTMASGGGAPMADNNEGADGVGNASGNWHCDSTWLGDRVITTSTRTWALPTYNNHLYKQISSQSGASNDNHYFGYSTPWGYFDFNRFHCHFSPRDWQRLINNNWGFRPKRLSFKLFNIQVKEVTQNEGTKTIANNLTSTVQVFTDSEYQLPYVLGSAHQGCLPPFPADVFMVPQYGYLTLNNGSQAVGRSSFYCLEYFPSQMLRTGNNFTFSYTFEDVPFHSSYAHSQSLDRLMNPLIDQYLYYLSRTNTPSGTTTQSRLQFSQAGASDIRDQSRNWLPGPCYRQQRVSKTSADNNNSEYSWTGATKYHLNGRDSLVNPGPAMASHKDYEEKFFPQSGVLIFGKQGSEKTNVDIEKVMITDEEEIRTTNPVATEQYGSVSTNLQRGNRQAATADVNTQGVLPGMVWQDRDVYLQGPIWAKIPHTDGHFHPSPLMGGFGLKHPPPQILIKNTPVPADPPTTFNQSKLNSFITQYSTGQVSVEIEWELQKENSKRWNPEIQYTSNYYKSTSVDFAVNTEGVYSEPRPIGTRYLTRNL

SEQ ID NO: 381 - DNA, 2214 bp, Artificial Sequence
  source: /note="Description of Artificial Sequence: Synthetic polynucleotide"
atggctgccgatggttatcttccagattggctcgaggacaacctctctgagggcattcgcgagtggtgggacttgaaacctggagccccgaaacccaaagccaaccagcaaaagcaggacgacggccggggtctggtgcttcctggctacaagtacctcggacccttcaacggactcgacaagggggagcccgtcaacgcggcggatgcagcggccctcgagcacgacaaggcctacgaccagcagctcaaagcgggtgacaatccgtacctgcggtataaccacgccgacgccgagtttcaggagcgtctgcaagaagatacgtcttttgggggcaacctcgggcgagcagtcttccaggccaagaagagggttctcgaaccttttggtctggttgaggaaggtgctaagacggctcctggaaagaaacgtccggtagagcagtcgccacaagagccagactcctcctcgggcattggcaagacaggccagcagcctgcaagaaaaagattgaattttggtcagactggagacgcagactcagtacctgacccccagcctctcggacagccaccagcagccccctctggtctgggaactaatacgatggctacaggcagtggcgcaccaatggcagacaataacgagggcgccgacggagtgggtaattcctcgggaaattggcattgcgattcccaatggctgggggacagagtcatcaccaccagcacccgaacctgggccctgcccacctacaacaatcacctctacaagcaaatctccaacagcacatctggaggatcttcaaatgacaacgcctacttcggctacagcaccccctgggggtattttgatttcaacagattccactgccatttctcaccacgtgactggcagcgactcatcaacaacaattggggattccggcccaagagactcaacttcaagctcttcaacatccaggtcaaggaggtcacgcagaatgaaggcaccaagaccatcgccaataacctcaccagcaccatccaggtgtttacggactcggagtaccagctgccgtacgttctcggctctgcccaccagggctgcctgcctccgttcccggcggacgtgttcatgattccccagtacggctacctaacactcaacaacggtagtcaggccgtgggacgctcctccttctactgcctggaatactttccttcgcagatgctgagaaccggcaacaacttccagtttacttacaccttcgaggacgtgcctttccacagcagctacgcccacagccagagcttggaccggctgatgaatcctctgattgaccagtacctgtactacttgtctcggactcaaacaacaggaggcacgacaaatacgcagactctgggcttcagccaaggtgggcctaatacaatggccaatcaggcaaagaactggctgccaggaccctgttaccgccagcagcgagtatcaaagacatttgcggataacaacaacagtgaatactcgtggactggagctaccaagtaccacctcaatggcagagactctctggtgaatccgggcccggccatggcaagccacaaggacgatgaagaaaagttttttcctcagagcggggttctcatctttgggaagcaaggctcagagaaaacaaatgtggacattgaaaaggtcatgattacagacgaagaggaaatcaggacaaccaatcccgtggctacggagcagtatggttctgtatctaccaacctccagagaggcaacagacaagcagctaccgcagatgtcaacacacaaggcgttcttccaggcatggtctggcaggacagagatgtgtaccttcaggggcccatctgggcaaagattccacacacggacggacattttcacccctctcccctcatgggtggattcggacttaaacaccctccgcctcagatcctgatcaagaacacgcctgtacccgcggatcctccgaccaccttcaaccagtcaaagctgaactctttcatcacccagtattctactggccaagtcagcgtggagatcgagtgggagctgcagaaggaaaacagcaagcgctggaaccccgagatccagtacacctccaactactacaaatctacaagtgtggactttgctgttaatacagaaggcgtgtactctgaaccccgccccattggcacccgttacctcacccgtaatctgtaa

SEQ ID NO: 382 - protein, 737 aa, Artificial Sequence
  source: /note="Description of Artificial Sequence: Synthetic polypeptide"
MAADGYLPDWLEDNLSEGIREWWDLKPGAPKPKANQQKQDDGRGLVLPGYKYLGPFNGLDKGEPVNAADAAALEHDKAYDQQLKAGDNPYLRYNHADAEFQERLQEDTSFGGNLGRAVFQAKKRVLEPFGLVEEGAKTAPGKKRPVEQSPQEPDSSSGIGKTGQQPARKRLNFGQTGDADSVPDPQPLGQPPAAPSGLGTNTMATGSGAPMADNNEGADGVGNSSGNWHCDSQWLGDRVITTSTRTWALPTYNNHLYKQISNSTSGGSSNDNAYFGYSTPWGYFDFNRFHCHFSPRDWQRLINNNWGFRPKRLNFKLFNIQVKEVTQNEGTKTIANNLTSTIQVFTDSEYQLPYVLGSAHQGCLPPFPADVFMIPQYGYLTLNNGSQAVGRSSFYCLEYFPSQMLRTGNNFQFTYTFEDVPFHSSYAHSQSLDRLMNPLIDQYLYYLSRTQTTGGTTNTQTLGFSQGGPNTMANQAKNWLPGPCYRQQRVSKTFADNNNSEYSWTGATKYHLNGRDSLVNPGPAMASHKDDEEKFFPQSGVLIFGKQGSEKTNVDIEKVMITDEEEIRTTNPVATEQYGSVSTNLQRGNRQAATADVNTQGVLPGMVWQDRDVYLQGPIWAKIPHTDGHFHPSPLMGGFGLKHPPPQILIKNTPVPADPPTTFNQSKLNSFITQYSTGQVSVEIEWELQKENSKRWNPEIQYTSNYYKSTSVDFAVNTEGVYSEPRPIGTRYLTRNL

SEQ ID NO: 383 - DNA, 2217 bp, Artificial Sequence
  source: /note="Description of Artificial Sequence: Synthetic polynucleotide"
atggctgccgatggttatcttccagattggctcgaggacactctctctgaaggaataagacagtggtgggcgctgaaacctggagccccgaagcccaaagccaaccagcaaaagcaggacgacggccggggtctggtgcttcctggctacaagtacctcggacccttcaacggactcgacaagggggagcccgtcaacgcggcggatgcagcggccctcgagcacgacaaggcctacgaccagcagctcaaagcgggtgacaatccgtacctgcggtataaccacgccgacgccgagtttcaggagcgtctgcaagaagatacgtcttttgggggcaacctcgggcgagcagtcttccaggccaagaagcgggttctcgaacctctcggtctggttgaggaaggcgctaagacggctcctggaaagaagagaccggtagagccatcaccccagcgttctccagactcctctacgggcatcggcaagaaaggccaacagcccgccagaaaaagactcaattttggtcagactggcgactcagagtcagttccagaccctcaacctctcggagaaccaccagcagcccccacaagtttgggatctaatacaatggcttcaggcggtggcgcaccaatggcagacaataacgagggtgccgatggagtgggtaattcctcaggaaattggcattgcgattcccaatggctgggcgacagagtcatcaccaccagcacccgcacctgggccttgcccacctacaataaccacctctacaagcaaatctccagtgcttcaacgggggccagcaacgacaaccactacttcggctacagcaccccctgggggtattttgactttaaccgcttccactgccacttctcgccaagagactggcaaagactcatcaacaacaattggggattccggcccaagagactcaacttcaaactcttcaacatccaagtcaaggaggtcacgacgaatgatggcgtcacgaccatcgccaataacctcaccagcaccatccaggtgtttacggactcggagtaccagctgccgtacgttctcggctctgcccaccagggctgcctgcctccgttcccggcggacgtgttcatgattccccagtatggatacctcaccctgaacaacggaagtcaagcggtgggacgctcatccttttactgcctggagtacttcccttcgcagatgctaaggactggaaataacttccaattcagctataccttcgaggatgtaccttttcacagcagctacgctcacagccagagtttggatcgcttgatgaatcctcttattgatcagtatctgtactacctgaacagaacgcaaggaacaacctctggaacaaccaaccaatcacggctgctttttagccaggctgggcctcagtctatgtctttgcaggccagaaattggctacctgggccctgctaccggcaacagagactttcaaagactgctaacgacaacaacaacagtaactttccttggacagcagccagcaaatatcatctcaatggccgcgactcgctggtgaatccaggaccagctatggccagtcacaaggacgatgaagaaaaatttttccctatgcacggcaatctaatatttggcaaagaagggacaacggcaagtaacgcagaattagataatgtaatgattacggatgaagaagagattcgtaccaccaatcctgtggcaacagagcagtatggaactgtggcaaataacttgcagagctcaaatacagctcccacgactagaactgtcaatgatcagggggccttacctggcatggtgtggcaagatcgtgacgtgtaccttcaggggcccatctgggcaaagattccacacacggacggacattttcacccctctcccctcatgggtggattcggacttaaacaccctcctccgcagattctcatcaagaacaccccggtacctgcgaatccttcgaccaccttcagtgcggcaaagtttgcttccttcatcacacagtactccacgggacaggtcagcgtggagatcgagtgggagctgcagaaggaaaacagcaagcgctggaacccggagatccagtacacttccaactattacaagtctaataatgttgaatttgctgttaatactgaaggtgtatatagtgaaccccgccccattggcaccagatacctgactcgtaatctgtaa

SEQ ID NO: 384 - protein, 738 aa, Artificial Sequence
  source: /note="Description of Artificial Sequence: Synthetic polypeptide"
MAADGYLPDWLEDTLSEGIRQWWALKPGAPKPKANQQKQDDGRGLVLPGYKYLGPFNGLDKGEPVNAADAAALEHDKAYDQQLKAGDNPYLRYNHADAEFQERLQEDTSFGGNLGRAVFQAKKRVLEPLGLVEEGAKTAPGKKRPVEPSPQRSPDSSTGIGKKGQQPARKRLNFGQTGDSESVPDPQPLGEPPAAPTSLGSNTMASGGGAPMADNNEGADGVGNSSGNWHCDSQWLGDRVITTSTRTWALPTYNNHLYKQISSASTGASNDNHYFGYSTPWGYFDFNRFHCHFSPRDWQRLINNNWGFRPKRLNFKLFNIQVKEVTTNDGVTTIANNLTSTIQVFTDSEYQLPYVLGSAHQGCLPPFPADVFMIPQYGYLTLNNGSQAVGRSSFYCLEYFPSQMLRTGNNFQFSYTFEDVPFHSSYAHSQSLDRLMNPLIDQYLYYLNRTQGTTSGTTNQSRLLFSQAGPQSMSLQARNWLPGPCYRQQRLSKTANDNNNSNFPWTAASKYHLNGRDSLVNPGPAMASHKDDEEKFFPMHGNLIFGKEGTTASNAELDNVMITDEEEIRTTNPVATEQYGTVANNLQSSNTAPTTRTVNDQGALPGMVWQDRDVYLQGPIWAKIPHTDGHFHPSPLMGGFGLKHPPPQILIKNTPVPANPSTTFSAAKFASFITQYSTGQVSVEIEWELQKENSKRWNPEIQYTSNYYKSNNVEFAVNTEGVYSEPRPIGTRYLTRNL

SEQ ID NO: 385 - DNA, 2208 bp, Artificial Sequence; identical to SEQ ID NO: 21
  source: /note="Description of Artificial Sequence: Synthetic polynucleotide"

SEQ ID NO: 386 - protein, 735 aa, Artificial Sequence [sequence omitted]

SEQ ID NO: 387 - DNA, 2208 bp, Artificial Sequence
  source: /note="Description of Artificial Sequence: Synthetic polynucleotide"
atggctgccgatggttatcttccagattggctcgaggacaacctctctgagggcattcgcgagtggtgggcgctgaaacctggagccccgaagcccaaagccaaccagcaaaagcaggacgacggccggggtctggtgcttcctggctacaagtacctcggacccttcaacggactcgacaagggggagcccgtcaacgcggcggacgccgcggccctcgagcacgacaaggcctacgaccagcagctgcaggcgggtgacaatccgtacctgcggtataaccacgccgacgccgagtttcaggagcgtctgcaagaagatacgtcttttgggggcaacctcgggcgagcagtcttccaggccaaaaagaggcttcttgaacctcttggtctggttgaggaagcagctaaaacggctcctggaaagaagaggcctgtagagcagtctcctcaggaaccggactcctccgcgggtattggcaaatcgggtgcacagcccgccaaaaagagactcaatttcggtcagactggcgactcagagtcagtcccagaccctcaacctctcggagaaccaccagcagcccccacaagtttgggatctaatacaatggcttcaggcggtggcgcaccaatggcagacaataacgaaggcgccgacggagtgggtaatgcctcaggaaattggcattgcgattccacatggctgggcgacagagtcatcaccaccagcacccgcacctgggccttgcccacctacagcaaccatctctacaagcaaatctccagccaatcaggagcttcaaacgacaacgactactttggctacagcaccccttgggggtattttgatttcaacagattccactgccacttttcaccacgtgactggcaaagactcatcaacaacaactggggattccgacccaagagactcaacttcaagctctttaacattcaagtcaaagaggtcacgcagaatgacggtacgacgacgattgccaataaccttaccagcacggttcaggtgtttactgactcggagtaccagctcccgtacgtcctcggctcggcgcatcaaggatgcctcccgccgttcccagcagacgtcttcatggtgccacagtatggatacctcaccctgaacaacgggagtcaggcagtaggacgctcttcattttactgcctggagtactttccttctcagatgctgcgtaccggaaacaactttaccttcagctacacttttgaggacgttcctttccacagcagctacgctcacagccagagtctggaccgtctcatgaatcctctcatcgaccagtacctgtattacttgagcagaacaaacactccaagtggaaccaccacgcagtcaaggcttcagttttctcaggccggagcgagtgacattcgggaccagtctaggaactggcttcctggaccctgttaccgccagcagcgagtatcaaagacatctgaggataacaacaacagtgaatactcgtggactggagctaccaagtaccacctcaatggcagagactctctggtgaatccgggcccggccatggcaagccacaaggacgatgaagaaaagttttttcctcagagcggggttctcatctttgggaagcaaggctcagagaaaacaaatgtggacattgaaaaggtcatgattacagacgaagaggaaatcaggacaaccaatcccgtggctacggagcagtatggttctgtatctaccaacctccagagaggcaacagacaagcagctaccgcagatgtcaacacacaaggcgttcttccaggcatggtctggcaggacagagatgtgtaccttcaggggcccatctgggcaaagattccacacacggacggacattttcacccctctcccctcatgggtggattcggacttaaacaccctcctccacagattctcatcaagaacaccccggtacctgcgaatccttcgaccaccttcagtgcggcaaagtttgcttccttcatcacacagtactccacgggacaggtcagcgtggagatcgagtgggagctgcagaaggaaaacagcaaacgctggaatcccgaaattcagtacacttccaactacaacaagtctgttaatgtggactttactgtggacactaatggcgtgtattcagagcctcgccccattggcaccagatacctgactcgtaatctgtaa

SEQ ID NO: 388 - protein, 735 aa, Artificial Sequence
  source: /note="Description of Artificial Sequence: Synthetic polypeptide"
MAADGYLPDWLEDNLSEGIREWWALKPGAPKPKANQQKQDDGRGLVLPGYKYLGPFNGLDKGEPVNAADAAALEHDKAYDQQLQAGDNPYLRYNHADAEFQERLQEDTSFGGNLGRAVFQAKKRLLEPLGLVEEAAKTAPGKKRPVEQSPQEPDSSAGIGKSGAQPAKKRLNFGQTGDSESVPDPQPLGEPPAAPTSLGSNTMASGGGAPMADNNEGADGVGNASGNWHCDSTWLGDRVITTSTRTWALPTYSNHLYKQISSQSGASNDNDYFGYSTPWGYFDFNRFHCHFSPRDWQRLINNNWGFRPKRLNFKLFNIQVKEVTQNDGTTTIANNLTSTVQVFTDSEYQLPYVLGSAHQGCLPPFPADVFMVPQYGYLTLNNGSQAVGRSSFYCLEYFPSQMLRTGNNFTFSYTFEDVPFHSSYAHSQSLDRLMNPLIDQYLYYLSRTNTPSGTTTQSRLQFSQAGASDIRDQSRNWLPGPCYRQQRVSKTSEDNNNSEYSWTGATKYHLNGRDSLVNPGPAMASHKDDEEKFFPQSGVLIFGKQGSEKTNVDIEKVMITDEEEIRTTNPVATEQYGSVSTNLQRGNRQAATADVNTQGVLPGMVWQDRDVYLQGPIWAKIPHTDGHFHPSPLMGGFGLKHPPPQILIKNTPVPANPSTTFSAAKFASFITQYSTGQVSVEIEWELQKENSKRWNPEIQYTSNYNKSVNVDFTVDTNGVYSEPRPIGTRYLTRNL

SEQ ID NO: 389 - DNA, 2208 bp, Artificial Sequence
  source: /note="Description of Artificial Sequence: Synthetic polynucleotide"
atggctgccgatggttatcttccagattggctcgaggacaacctctctgagggcattcgcgagtggtgggcgctgaaacctggagccccgaagcccaaagccaaccagcaaaagcaggacgacggccggggtctggtgcttcctggctacaagtacctcggacccttcaacggactcgacaagggggagcccgtcaacgcggcggacgcagcggccctcgagcacgacaaggcctacgaccagcagctgcaggcgggtgacaatccgtacctgcggtataaccacgccgacgccgagttccaggagcgtctgcaagaagatacgtcttttgggggcaacctcgggcgagcagtcttccaggccaagaagagggttctcgaaccttttggtctggttgaggaaggtgctaagacggctcctggaaagaaacgtccggtagagcagtcgccacaagagccagactcctcctcgggcattggcaagacaggccagcagcccgctaaaaagagactcaattttggtcagactggcgactcagagtcagtcccagaccctcaacctctcggagaaccaccagcagcccccacaagtttgggatctaatacaatggcttcaggcggtggcgcaccaatggcagacaataacgagggcgccgacggagtgggtaattcctcgggaaattggcattgcgattccacatggatgggcgacagagtcatcaccaccagcacccgaacctgggccctgcccacctacaacaaccacctctacaaacaaatttccagccaatcaggagcttcaaacgacaaccactactttggctacagcaccccttgggggtattttgactttaacagattccactgccacttttcaccacgtgactggcagcgactcattaacaacaactggggattccggcccaagaaactcaacttcaagctctttaacatccaggtcaaggaggtcacgcagaatgaaggcaccaagaccatcgccaataacctcaccagcaccatccaggtgtttacggactcggagtaccagctgccgtacgttctcggctctgcccaccagggctgcctgcctccgttcccggcggacgtgttcatgattccccagtacggctacctaacactcaacaacggtagtcaggccgtgggacgctcctccttctactgcctggaatactttccttcgcagatgctgagaaccggcaacaacttccagtttacttacaccttcgaggacgtgcctttccacagcagctacgcccacagccagagcttggaccggctgatgaatcctctgattgaccagtacctgtattacttgtctcggactcaaacaacaggaggcacgacaaatacgcagactctgggcttcagccaaggtgggcctaatacaatggccaatcaggcaaagaactggctgcctggaccctgttaccgccagcagcgagtatcaaagacatctgcggataacaacaacagtgaatactcgtggactggagctaccaagtaccacctcaatggcagagactctctggtgaatccgggcccggccatggcaagccacaaggacgatgaagaaaagttttttcctcagagcggggttctcatctttgggaagcaaggctcagagaaaacaaatgtggacattgaaaaggttatgattacagacgaagaggaaatcaggacaaccaatcccgtggctacggagcagtatggttctgtatctaccaacctccagagaggcaacagacaagcagctaccgcagatgtcaacacacagggcgttcttccaggcatggtctggcaggacagagatgtgtaccttcagggtcccatttgggccaaaattcctcacacagatggacactttcacccgtcccctcttatgggcggctttggactcaagaacccgcctcctcagatcctcatcaaaaacacgcctgttcctgcgaatcctccggcagagttttcagctacaaagtttgcttcattcatcacccaatactccacaggacaagtgagtgtggaaattgaatgggagctgcagaaagaaaacagcaagcgctggaatcccgaagtgcagtacacatccaattatgcaaaatctgccaacgttgattttactgtggacactaatggcgtgtattcagagcctcgccccattggcaccagatacctcacccgtaatctgtaa

SEQ ID NO: 390 - protein, 735 aa, Artificial Sequence
  source: /note="Description of Artificial Sequence: Synthetic polypeptide"
MAADGYLPDWLEDNLSEGIREWWALKPGAPKPKANQQKQDDGRGLVLPGYKYLGPFNGLDKGEPVNAADAAALEHDKAYDQQLQAGDNPYLRYNHADAEFQERLQEDTSFGGNLGRAVFQAKKRVLEPFGLVEEGAKTAPGKKRPVEQSPQEPDSSSGIGKTGQQPAKKRLNFGQTGDSESVPDPQPLGEPPAAPTSLGSNTMASGGGAPMADNNEGADGVGNSSGNWHCDSTWMGDRVITTSTRTWALPTYNNHLYKQISSQSGASNDNHYFGYSTPWGYFDFNRFHCHFSPRDWQRLINNNWGFRPKKLNFKLFNIQVKEVTQNEGTKTIANNLTSTIQVFTDSEYQLPYVLGSAHQGCLPPFPADVFMIPQYGYLTLNNGSQAVGRSSFYCLEYFPSQMLRTGNNFQFTYTFEDVPFHSSYAHSQSLDRLMNPLIDQYLYYLSRTQTTGGTTNTQTLGFSQGGPNTMANQAKNWLPGPCYRQQRVSKTSADNNNSEYSWTGATKYHLNGRDSLVNPGPAMASHKDDEEKFFPQSGVLIFGKQGSEKTNVDIEKVMITDEEEIRTTNPVATEQYGSVSTNLQRGNRQAATADVNTQGVLPGMVWQDRDVYLQGPIWAKIPHTDGHFHPSPLMGGFGLKNPPPQILIKNTPVPANPPAEFSATKFASFITQYSTGQVSVEIEWELQKENSKRWNPEVQYTSNYAKSANVDFTVDTNGVYSEPRPIGTRYLTRNL

SEQ ID NO: 391 - DNA, 2214 bp, Artificial Sequence; identical to SEQ ID NO: 381
  source: /note="Description of Artificial Sequence: Synthetic polynucleotide"

SEQ ID NO: 392 - protein, 737 aa, Artificial Sequence; identical to SEQ ID NO: 382
  source: /note="Description of Artificial Sequence: Synthetic polypeptide"

SEQ ID NO: 393 - DNA, 2196 bp, Artificial Sequence
  source: /note="Description of Artificial Sequence: Synthetic polynucleotide"
atggctgctgacggttatcttccagattggctcgaggacaacctctctgagggcattcgcgagtggtgggcgctgaaacctggagccccgcaacccaaagccaaccagcaaaagcaggacgacggccggggtctggtgcttcctggctacaagtacctcggacccttcaacggactcgacaagggggagcccgtcaacgaggcggacgccgcggccctcgagcacgacaaggcctacgaccagcagctcaaagcgggtgacaatccgtacctgcggtataatcacgccgacgccgagtttcaagagcgtctgcaagaagatacgtcctttgggggcaacctcgggcgagcagtcttccaggccaaaaagagggtactcgagcctctgggtctggttgaggaaggcgctaagacggctcctggaaagaagcggccagtagaaccggactccagctcgggcatcggcaagtcaggccagcagcccgcgaaaaagagactgaattttgggcagactggcgactcagagtcagtgcctgacccccaacctctctcagaaccacccgcaggtccctctggtctgggatctggtacaatggctgctggcggtggcgctccaatggcagacaataacgaaggcgccgacggagtgggtaatgtctcaggaaattggcattgcgattccacatggctgggcgaccgagtcatcaccaccagcactcggacctgggccctccccacctacaacaaccacctctacaagcaaatctccaacgggacctcgggaggcagcagcaacgacaacacctactttggctacagcaccccctgggggtattttgactttaacagattccactgccacttttcaccacgtgactggcagcgactcatcaacaacaactgggggttccggcccaagaagctcaacttcaagctcttcaacatccaggtcaaggaggtcacccagaatgaaggcaccaagaccatcgccaataacctcaccagcacggtgcaggtctttacggactcggagtaccagctcccgtacgtgctcggctctgcccaccagggctgcctgcctccgttcccggcggacgtgttcatgattccgcagtacgggtacctgacgctgaacaacgggagccaggccgtggggcgatcctccttctactgcctggagtactttccctcgcagatgctgagaacgggcaacaactttaccttcagctacaccttcgaggacgtgcccttccacagcagctacgcgcacagccagagcctggaccggctgatgaacccgctgattgaccagtacctgtactacctgtctcggactcagaccaacgggaccaatgccacgcagactctgttgtttgctcaggccgggcctcagaacatgtcggctcaggccaagaactggctgcctggtccttgctatcggcagcagcgcgtctctacgacagtgtcgcaaaacaacaacagcaactttacctggaccggggcgaccaagtaccacctgaacggccgagactccctggtgagccccggtgtcgccatggcaacgcacaaggacgacgaggagcgcttcttcccgagcagcggggtcctgatgtttggcaagcagggcgctggaaaggacaatgtcgagtacaccaacgtgatgctcaccagcgaggaggagatcaagaccaccaaccctgtggccacggagcagtacggcgtggtggctgacaatctgcagcagaccaactcagctcccattgtgggggcagtcaacagccagggggccttacccggtatggtctggcagaaccgggacgtgtacctgcagggtcccatctgggccaagatcccgcatacggacggcaactttcacccgtctcctctcatgggcggctttggactgaaacacccgcctccccagatcctgatcaaaaacacgccggtacctgcggatcccccggtgaactttacggacgctaagctggcgagtttcatcacgcagtacagcaccgggcaggtcagcgtggagattgagtgggagctgcagaaggagaacagcaagcgctggaatcccgagattcagtacacttccaattattataaatcagctaatgtggactttgccgtcaatgcagatggtgtatatagtgaaccccgccccattggcactcgttacctcacccgtaatctgtaa

SEQ ID NO: 394 - protein, 731 aa, Artificial Sequence
  source: /note="Description of Artificial Sequence: Synthetic polypeptide"
MAADGYLPDWLEDNLSEGIREWWALKPGAPQPKANQQKQDDGRGLVLPGYKYLGPFNGLDKGEPVNEADAAALEHDKAYDQQLKAGDNPYLRYNHADAEFQERLQEDTSFGGNLGRAVFQAKKRVLEPLGLVEEGAKTAPGKKRPVEPDSSSGIGKSGQQPAKKRLNFGQTGDSESVPDPQPLSEPPAGPSGLGSGTMAAGGGAPMADNNEGADGVGNVSGNWHCDSTWLGDRVITTSTRTWALPTYNNHLYKQISNGTSGGSSNDNTYFGYSTPWGYFDFNRFHCHFSPRDWQRLINNNWGFRPKKLNFKLFNIQVKEVTQNEGTKTIANNLTSTVQVFTDSEYQLPYVLGSAHQGCLPPFPADVFMIPQYGYLTLNNGSQAVGRSSFYCLEYFPSQMLRTGNNFTFSYTFEDVPFHSSYAHSQSLDRLMNPLIDQYLYYLSRTQTNGTNATQTLLFAQAGPQNMSAQAKNWLPGPCYRQQRVSTTVSQNNNSNFTWTGATKYHLNGRDSLVSPGVAMATHKDDEERFFPSSGVLMFGKQGAGKDNVEYTNVMLTSEEEIKTTNPVATEQYGVVADNLQQTNSAPIVGAVNSQGALPGMVWQNRDVYLQGPIWAKIPHTDGNFHPSPLMGGFGLKHPPPQILIKNTPVPADPPVNFTDAKLASFITQYSTGQVSVEIEWELQKENSKRWNPEIQYTSNYYKSANVDFAVNADGVYSEPRPIGTRYLTRNL

SEQ ID NO: 395 - DNA, 2196 bp, Artificial Sequence
  source: /note="Description of Artificial Sequence: Synthetic polynucleotide"
atggctgctgacggttatcttccagattggctcgaggacaacctctctgagggcattcgcgagtggtgggcgctgaaacctggagccccgcaacccaaagccaaccagcaaaagcaggacgacggccggggtctggtgcttcctggctacaagtacctcggacccttcaacggactcgacaagggggagcccgtcaacgaggcggacgccgcggccctcgagcacgacaaggcctacgaccagcagctcaaagcgggtgacaatccgtacctgcggtataatcacgccgacgccgagtttcaagagcgtctgcaagaagatacgtcctttgggggcaacctcgggcgagcagtcttccaggccaaaaagagggtactcgagcctctgggtctggttgaggaaggcgctaagacggctcctggaaagaagcggccagtagaaccggactccagctcgggcatcggcaagtcaggccggcagcccgcgaaaaagagactgaattttgggcagactggcgactcagagtcagtgcctgacccccaacctctctcagaaccacccgcaggtccctctggtctgggatctggtacaatggctgcaggcggtggcgctccaatggcagacaataacgaaggcgccgacggagtgggtaatgcctcaggaaattggcattgcgattccacatggctgggcgaccgagtcatcaccaccagcactcggacctgggccctccccacctacaacaaccacctctacaagcaaatctccaacgggacctcgggaggcagcagcaacgacaacacctactttggctacagcaccccctgggggtattttgactttaacagattccactgccacttttcaccacgtgactggcagcgactcatcaacaacaactggggattccggcccaagaggctcaacttcaagctcttcaacatccaggtcaaggaggtcacccagaatgaaggcaccaagaccatcgccaataacctcaccagcacggtgcaggtctttacggactcgaagtaccagctcccgtacgtgctcggctctgcccaccagggctgcctgcctccgttcccggcggacgtgttcatgattccgcagtacgggtacctgacgctgaacaacgggagccaggccgtggggcgatcctccttctactgcctggagtactttccctcgcagatgctgagaacgggcaacaactttaccttcagctacaccttcgaggacgtgcccttccacagcagctacgcgcacagccagagcctggaccggctgatgaacccgctgattgaccagtacctgtactacctgtctcggactcagaccaacgggaccaatgccacgcagactctgttgtttgctcaggccgggcctcagaacatgtcggctcaggccaagaactggctgcctggtccttgctatcggcagcagcgcgtctctacgacagtgtcgcaaaacaacaacagcaactttacctggaccggggcgaccaagtaccacctgaacggccgagactccctggtgaaccccggtgtcgccatggcaacgcacaaggacgacgaggagcgcttcttcccgagcagcggggtcctgatgtttggcaagcagggcgctggaaaggacaatgtcgagtacaccaacgtgatgctcaccagcgaggaggagatcaagaccaccaaccctgtggccacggagcagtacggtgtggtggctgacaatctgcagcagaccaactcggctcccattgtgggggcagtcaacagccagggggccttacccggtatggtctggcagaaccgggacgtgtacctgcagggtcccatctgggccaagatcccgcatacggacggcaactttcacccgtctcctctcatgggcggctttggactgaaacacccgcctccccagatcctgatcaaaaacacgccggtacctgcggatcccccggtgaactttacggacgctaagctggcgagtttcatcacgcagtacagcaccgggcaggtcagcgtggagattgagtgggagctgcagaaggagaacagcaagcgctggaatcccgagattcagtacacttccaattattataaatcagctaatgtggactttgccgtcaatgcagatggtgtatatagtgaaccccgccccattggcactcgttacctcacccgtaatctgtaa

SEQ ID NO: 396 - protein, 731 aa, Artificial Sequence
  source: /note="Description of Artificial Sequence: Synthetic polypeptide"
MAADGYLPDWLEDNLSEGIREWWALKPGAPQPKANQQKQDDGRGLVLPGYKYLGPFNGLDKGEPVNEADAAALEHDKAYDQQLKAGDNPYLRYNHADAEFQERLQEDTSFGGNLGRAVFQAKKRVLEPLGLVEEGAKTAPGKKRPVEPDSSSGIGKSGRQPAKKRLNFGQTGDSESVPDPQPLSEPPAGPSGLGSGTMAAGGGAPMADNNEGADGVGNASGNWHCDSTWLGDRVITTSTRTWALPTYNNHLYKQISNGTSGGSSNDNTYFGYSTPWGYFDFNRFHCHFSPRDWQRLINNNWGFRPKRLNFKLFNIQVKEVTQNEGTKTIANNLTSTVQVFTDSKYQLPYVLGSAHQGCLPPFPADVFMIPQYGYLTLNNGSQAVGRSSFYCLEYFPSQMLRTGNNFTFSYTFEDVPFHSSYAHSQSLDRLMNPLIDQYLYYLSRTQTNGTNATQTLLFAQAGPQNMSAQAKNWLPGPCYRQQRVSTTVSQNNNSNFTWTGATKYHLNGRDSLVNPGVAMATHKDDEERFFPSSGVLMFGKQGAGKDNVEYTNVMLTSEEEIKTTNPVATEQYGVVADNLQQTNSAPIVGAVNSQGALPGMVWQNRDVYLQGPIWAKIPHTDGNFHPSPLMGGFGLKHPPPQILIKNTPVPADPPVNFTDAKLASFITQYSTGQVSVEIEWELQKENSKRWNPEIQYTSNYYKSANVDFAVNADGVYSEPRPIGTRYLTRNL

SEQ ID NO: 397 - DNA, 2196 bp, Artificial Sequence
  source: /note="Description of Artificial Sequence: Synthetic polynucleotide"
atggctgctgacggttatcttccagattggctcgaggacaacctctctgagggcattcgcgagtggtgggcgctgaaacctggagccccgcaacccaaagccaaccagcaaaagcaggacgacggccggggtctggtgcttcctggctacaagtacctcggacccttcaacggactcgacaagggggagcccgtcaacgaggcggacgccgcggccctcgagcacgacaaggcctacgaccagcagctcaaagcgggtgacaatccgtacctgcggtataatcacgccgacgccgagtttcaagagcgtctgcaagaagatacgtcctttgggggcaacctcgggcgagcagtcttccaggccaaaaagagggtactcgagcctctgggtctggttgaggaaggcgctaagacggctcctggaaagaagcggccagtagaaccggactccagctcgggcatcggcaagtcaggccagcagcccgcgaaaaagagactgaattttgggccgactggcgactcagagtcagtgcctgacccccaacctctctcagaaccacctgcaggtccctctggtctgggatctggtacaatggctgcaggcggtggcgctccaatggcagacaataacgaaggcgccgacggagtgggtaatgtctcaggaaattggcattgcgattccacatggctgggcgaccgagtcatcaccaccagcactcggacctgggccctccccacctacaacaaccacctctacaagcaaatctccaacgggacctcgggaggcagcagcaacgacaacacctactttggctacagcaccccctgggggtattttgactttaacagattccactgccacttttcaccacgcgactggcagcgactcatcaacaacaactggggattccggcccaagaagctcaacttcaagctcttcaacatccaggtcaaggaggtcacccagaatgaaggcaccaagaccaccgccaataacctcaccagcacggtgcaggtctttacggactcggagtaccagctcccgtacgtgctcggctctgcccaccagggctgcctgcctccgttcccggcggacgtgttcatgattccgcagtacgggtacctgacgctgaacaacgggagccaggccgtggggcgatcctccttctactgcctggagtactttccctcgcagatgctgagaacgggcaacaactttaccttcagctacaccttcgaggacgtgcccttccacagcagctacgcgcacagccagagcctggaccggctgatgaacccgctgattgaccagtacctgtactacctgtctcggactcagaccaacgggaccaatgccacgcagactctgttgtttgctcaggccgggcctcagaacatgtcggctcaggccaagaactggctgcctggtccttgctatcggcagcagcgcgtctctacggcagtgtcgcaaaacaacaacagcaactttacctggaccggggcgaccaagtaccacctgaacggccgagactccctggtgaaccccggtgtcgccatggcaacgcacaaggacgacgaggagcgcttcttcccgagcagcggggtcctgatgtttggcaagcagggcgctggaaaggacaatgtcgagtacaccaacgtgatgctcaccagcgaggaggagatcaagaccaccaaccctgtggccacggagcagtacggtgtggtggctgacaatctgcagcagaccaactcggctcccattgtgggggcagtcaacagccagggggccttacccggtatggtctggcagaaccgggacgtgtacctgcagggtcccatctgggccaagatcccgcatacggacggcaactttcacccgtctcctctcatgggcggctttggactgaaacacccgcctccccagatcctgatcaaaaacacgccggtacctgcggatcccccggtgaactttacggacgctaagctggcgagtttcatcacgcagtacagcaccgggcaggtcagcgtggagattgagtgggagctgcagaaggagaacagcaagcgctggaatcccgagattcagtacacttccaattattataaatcagctaatgtggactttgccgtcaatgcagatggtgtatatagcgaaccccgccccattggcactcgttacctcacccgtaatctgtaa

SEQ ID NO: 398 - protein, 731 aa, Artificial Sequence
  source: /note="Description of Artificial Sequence: Synthetic polypeptide"
MAADGYLPDWLEDNLSEGIREWWALKPGAPQPKANQQKQDDGRGLVLPGYKYLGPFNGLDKGEPVNEADAAALEHDKAYDQQLKAGDNPYLRYNHADAEFQERLQEDTSFGGNLGRAVFQAKKRVLEPLGLVEEGAKTAPGKKRPVEPDSSSGIGKSGQQPAKKRLNFGPTGDSESVPDPQPLSEPPAGPSGLGSGTMAAGGGAPMADNNEGADGVGNVSGNWHCDSTWLGDRVITTSTRTWALPTYNNHLYKQISNGTSGGSSNDNTYFGYSTPWGYFDFNRFHCHFSPRDWQRLINNNWGFRPKKLNFKLFNIQVKEVTQNEGTKTTANNLTSTVQVFTDSEYQLPYVLGSAHQGCLPPFPADVFMIPQYGYLTLNNGSQAVGRSSFYCLEYFPSQMLRTGNNFTFSYTFEDVPFHSSYAHSQSLDRLMNPLIDQYLYYLSRTQTNGTNATQTLLFAQAGPQNMSAQAKNWLPGPCYRQQRVSTAVSQNNNSNFTWTGATKYHLNGRDSLVNPGVAMATHKDDEERFFPSSGVLMFGKQGAGKDNVEYTNVMLTSEEEIKTTNPVATEQYGVVADNLQQTNSAPIVGAVNSQGALPGMVWQNRDVYLQGPIWAKIPHTDGNFHPSPLMGGFGLKHPPPQILIKNTPVPADPPVNFTDAKLASFITQYSTGQVSVEIEWELQKENSKRWNPEIQYTSNYYKSANVDFAVNADGVYSEPRPIGTRYLTRNL

SEQ ID NO: 399 - DNA, 4404 bp, Artificial Sequence
  source: /note="Description of Artificial Sequence: Synthetic polynucleotide"
atggctgccgatggttatcttccagattggctcgagggcaacctctctgagggcattcgcgagtggtgggacttgaaacctggagccccgaaacccaaagccaaccagcaaaagcaggacgacggccggggtctggtgcttcctggctacaggtacctcggacccttcaacggactcgacaagggagagccggtcaacgaggcagacgccgcggccctcgagcacgacaaggcctacgacaagcagctcgagcagggggacaacccgtacctcaagtacaaccacgccgacgccgagtttcaggagcgtcttcaagaagatacgtcttttgggggcaacctcgggcgagcagtcttccaggccaagaagcgggttctcgaacctctcggtctggttgaggaaggcgctaagacggctcctggaaagaagagacccatagaatcccccgactcctccacgggcatcggcaagaacggccagccgcccgctaaaaagaagctcaactttgggcagactggcgactcagagtcagtgcccgacccccaacctctcggagaacctcccgccgcgccctcaggtctgggatctggtacaatggctgcaggcggtggcgcaccaatggcagacaataacgaaggcgccgacggagtgggtaatgcctccggaaattggcattgcgattccacatggctgggcgacagagtcatcaccaccagcacccgcacctgggccctgcccacctacaacaaccacctctacaagcagatatcaagtcagagcggggctaccaacgacaaccacttcttcggctacagcaccccctggggctattttgacttcaacagattccactgccacttctcaccacgtgactggcagcgactcatcaacaacaactggggattccggcccagaaagctgcggttcaagttgttcaacatccaggtcaaggaggtcacgacgaacgacggcgttacgaccatcgctaataaccttaccagcacgattcaggtcttctcggactcggagtaccaactgccgtacgtcctcggctctgcgcaccagggctgcctccctccgttccctgcggacgtgttcatgattcctcagtacggatatctgactctaaacaacggcagtcagtctgtgggacgttcctccttctactgcctggagtactttccttctcagatgctgagaacgggcgataactttgaattcagctacacctttgaggaagtgcctttccacagcagctatgcgcacagccagagcctggaccggctgatgaatcccctcatcgaccagtacctgtactacctggcccggacccagagcactacggggtccacaagggagctgcagttccatcaggctgggcccaacaccatggccgagcaatcaaagaactggctgcccggaccctgttatcggcagcagagactgtcaaaaaacatagacagcaacaacaacagtaactttgcctggaccggggccactaaataccatctgaatggtagaaattcattaaccaacccgggcgtagccatggccaccaacaaggacgacgaggaccagttctttcccatcaacggagtgctggtttttggcaaaacgggggctgccaacaagacaacgctggaaaacgtgctaatgaccagcgaggaggagatcaaaaccaccaatcccgtggctacagaagaatacggtgtggtctccagcaacctgcaatcgtctacggccggaccccagacacagactgtcaacagccagggggctctgcccggcatggtctggcagaaccgggacgtgtacctgcagggtcccatctgggccaaaattcctcacacggacggcaactttcacccgtctcccctgatgggcggatttggactcaaacacccgcctcctcaaattctcatcaaaaacaccccggtacctgctaatcctccagaggtgtttactcctgccaagtttgcctcatttatcacgcagtacagcaccggccaggtcagcgtggagatcgagtgggaactgcagaaagaaaacagcaaacgctggaatccagagattcagtacacctcaaattatgccaagtctaataatgtggaatttgctgtcaacaacgaaggggtttatactgagcctcgccccattggcacccgttacctcacccgtaacctgtaaatggctgccgatggttatcttccagattggctcgaggacaacctctctgagggcattcgcgagtggtgggacttgaaacctggagccccgaaacccaaagccaaccagcaaaagcaggacgacggccggggtctggtgcttcctggctacaagtacctcggacccttcaacggactcgacaagggggagcccgtcaacgcggcggacgcagcggccctcgagcacgacaaggcctacgaccagcagctcaaagcgggtgacaatccgtacctgcggtataaccacgccgacgccgagtttcaggagcgtctgcaagaagatacgtcttttgggggcaacctcgggcgagcagtcttccaggccaagaagcgggttctcgaacctctcggtctggttgaggaaggcgctaagacggctcctggaaagaagagaccggtagagccatcaccccagcgttctccagactcctctacgggcatcggcaagaaaggccagcagcccgcgaaaaagagactcaactttgggcagactggcgactcagagtcagtgcccgaccctcaaccaatcggagaaccccccgcaggcccctctggtctgggatctggtacaatggctgcaggcggtggcgctccaatggcagacaataacgaaggcgccgacggagtgggtagttcctcaggaaattggcattgcgattccacatggctgggcgacagagtcatcaccaccagcacccgaacctgggccctccccacctacaacaaccacctctacaagcaaatctccaacgggacttcgggaggaagcaccaacgacaacacctacttcggctacagcaccccctgggggtattttgactttaacagattccactgccacttctcaccacgtgactggcagcgactcatcaacaacaactggggattccggcccaagagactcaacttcaagctcttcaacatccaggtcaaggaggtcacgcagaatgaaggcaccaagaccatcgccaataaccttaccagcacgattcaggtctttacggactcggaataccagctcccgtacgtcctcggctctgcgcaccagggctgcctgcctccgttcccggcggacgtcttcatgattcctcagtacgggtacctgactctgaacaatggcagtcaggccgtgggccgttcctccttctactgcctggagtactttccttctcaaatgctgagaacgggcaacaactttgagttcagctaccagtttgaggacgtgccttttcacagcagctacgcgcacagccaaagcctggaccggctgatgaaccccctcatcgaccagtacctgtactacctgtctcggactcagtccacgggaggtaccgcaggaactcagcagttgctattttctcaggccgggcctaataacatgtcggctcaggccaaaaactggctacccgggccctgctaccggcagcaacgcgtctccacgacactgtcgcaaaataacaacagcaactttgcctggaccggtgccaccaagtatcatctgaatggcagagactctctggtaaatcccggtgtcgctatggcaacccacaaggacgacgaagagcgattttttccgtccagcggagtcttaatgtttgggaaacagggagctggaaaagacaacgtggactatagcagcgttatgctaaccagtgaggaagaaattaaaaccaccaacccagtggccacagaacagtacggcgtggtggccgataacctgcaacagcaaaacgccgctcctattgtaggggccgtcaacagtcaaggagccttacctggcatggtctggcagaaccgggacgtgtacctgcagggtcctatctgggccaagattcctcacacggacggaaactttcatccctcgccgctgatgggaggctttggactgaaacacccgcctcctcagatcctgattaagaatacacctgttcccgcggatcctccaactaccttcagtcaagctaagctggcgtcgttcatcacgcagtacagcaccggacaggtcagcgtggaaattgaatgggagctgcagaaagaaaacagcaaacgctggaacccagagattcaatacacttccaactactacaaatctacaaatgtggactttgctgttaacacagatggcacttattctgagcctcgccccatcggcacccgttacctcacccgtaatctgtaa

SEQ ID NO: 400 - protein, 738 aa, Artificial Sequence; identical to SEQ ID NO: 18
  source: /note="Description of Artificial Sequence: Synthetic polypeptide"

SEQ ID NO: 401 - DNA, 3129 bp, Artificial Sequence
  source: /note="Description of Artificial Sequence: Synthetic polynucleotide"
gaattcgccctttctacggctgcgtcaactggaccaatgagaactttcccttcaacgattgcgtcgacaagatggtgatctggtgggaggagggcaagatgacggccaaggtcgtggagtccgccaaggccattctcggcggcagcaaagtgcgcgtggaccaaaagtgcaagtcgtccgcccagatcgaccccacccccgtgatcgtcacctccaacaccaacatgtgcgccgtgattgacgggaacagcaccaccttcgagcaccagcagccgttgcaggaccggatgttcaagtttgaactcacccgccgtctggagcacgactttggcaaggtgacaaagcaggaagtcagagagttcttccgctgggcgcaggatcacgtgaccgaggtggcgcacgagttctacgtcagaaagggtggagccaacaagagacccgcccccgatgacgcggataaaagcgagcccaagcgggcctgcccctcagtcgcggatccatcgacgtcagacgcggaaggagctccggtggactttgccgacaggtaccaaaacaaatgttctcgtcacgcgggcatgcttcagatgctgtttccctgcaaaacatgcgagagaatgaatcagaatttcaacatttgcttcacgcacgggaccagagactgttcagaatgtttccccggcgtgtcagaatctcaaccggtcgtcagaaaaaagacgtatcggaaactctgtgcgattcatcatctgctgggggcgggcacccgagattgcttgctcggcctgcgatctggtcaacgtggacctagatgactgtgtttctgagcaataaatgacttaaaccaggtatggctgccgatggttatcttccagattggctcgaggacaacctctctgagggcattcgcgagtggtgggacttgaaacctggagccccgaaacccaaagccaaccagcaaaagcaggacgacggccggggtctggtgcttcctggctacaagtacctcggacccttcaacggactcgacaagggggagcccgtcaacgcggcggacgcagcggccctcgagcacgacaaggcctacgaccagcagctcaaagcgggtgacaatccgtacctgcggtataaccacgccgacgccgagtttcaggagcgtctgcaagaagatacgtcttttgggggcaacctcgggcgagcagtcttccaggccaagaagcgggttctcgaacctctcggtctggttgaggaaggcgctaagacggctcctggaaagaagagaccggtagagccatcaccccagcgttctccagactcctctacgggcatcggcaagaaaggccagcagcccgcgaaaaagagactcaactttgggcagactggcgactcagagtcagtgcccgaccctcaaccaatcggagaaccccccgcaggcccctctggtctgggatctggtacaatggctgcaggcggtggcgctccaatggcagacaataacgaaggcgccgacggagtgggtagttcctcaggaaattggcattgcgattccacatggctgggcgacagagtcatcaccaccagcacccgaacctgggccctccccacctacaacaaccacctctacaagcaaatctccaacgggacttcgggaggaagcaccaacgacaacacctacttcggctacagcaccccctgggggtattttgactttaacagattccactgccacttctcaccacgtgactggcagcgactcatcaacaacaactggggattccggcccaagagactcaacttcaagctcttcaacatccaggtcaaggaggtcacgcagaatgaaggcaccaagaccatcgccaataaccttaccagcacgattcaggtctttacggactcggaataccagctcccgtacgtcctcggctctgcgcaccagggctgcctgcctccgttcccggcggacgtcttcatgattcctcagtacgggtacctgactctgaacaatggcagtcaggccgtgggccgttcctccttctactgcctggagtactttccttctcaaatgctgagaacgggcaacaactttgagttcagctaccagtttgaggacgtgccttttcacagcagctacgcgcacagccaaagcctggaccggctgatgaaccccctcatcgaccagtacctgtactacctgtctcggactcagtccacgggaggtaccgcaggaactcagcagttgctattttctcaggccgggcctaataacatgtcggctcaggccaaaaactggctacccgggccctgctaccggcagcaacgcgtctccacgacactgtcgcaaaataacaacagcaactttgcctggaccggtgccaccaagtatcatctgaatggcagagactctctggtaaatcccggtgtcgctatggcaacccacaaggacgacgaagagcgattttttccgtccagcggagtcttaatgtttgggaaacagggagctggaaaagacaacgtggactatagcagcgttatgctaaccagtgaggaagaaattaaaaccaccaacccagtggccacagaacagtacggcgtggtggccgataacctgcaacagcaaaacgccgctcctattgtaggggccgtcaacagtcaaggagccttacctggcatggtctggcagaaccgggacgtgtacctgcagggtcctatctgggccaagattcctcacacggacggaaactttcatccctcgccgctgatgggaggctttggactgaaacacccgcctcctcagatcctgattaagaatacacctgttcccgcggatcctccaactaccttcagtcaagctaagctggcgtcgttcatcacgcagtacagcaccggacaggtcagcgtggaaattgaatgggagctgcagaaagaaaacagcaaacgctggaacccagagattcaatacacttccaactactacaaatctacaaatgtggactttgctgttaacacagatggcacttattctgagcctcgccccatcggcacccgttacctcacccgtaatctgtaattgcttgttaatcaataaaccggttgattcgtttcagttgaactttggtctctgcgaagggcgaattc

SEQ ID NO: 402 - protein, 738 aa, Artificial Sequence; identical to SEQ ID NO: 18
  source: /note="Description of Artificial Sequence: Synthetic polypeptide"

SEQ ID NO: 403 - protein, 733 aa, Artificial Sequence
  source: /note="Description of Artificial Sequence: Synthetic polypeptide"
MAADGYLPDWLEDNLSEGIREWWDLRPGAPKPKANQQKQDDGRGLVLPGYKYLGPFNGLDKGEPVNEADAAALEHDKAYDKQLEQGDNPYLKYNHADAEFQERLQEDTSFGGNLGRAVFQAKKRVLEPLGLVEEGAKTAPGKKRPIESPDSSTGIGKKGQQPAKKRLNFGQTGDSESVPDPQPIGEPPAGPSGLGSGTMAAGGGAPMADNNEGADGVGSSSGNWHCDSTWLGDRVITTSTRTWALPTYNNHLYKQISNGTSGGSTNDNTYFGYSTPWGYFDFNRFHCHFSPRDWQRLINNNWGFRPKRLNFKLFNIQVKEVTQNEGTKTIANNLTSTIQVFTDSEYQLPYVLGSAHQGCLPPFPADVFMIPQYGYLTLNNGSQAVGRSSFYCLEYFPSQMLRTGNNFEFSYQFEDVPFHSSYAHSQSLDRLMNPLIDQYLYYLSRTQSTGGTAGTQQLLFSQAGPNNMSAQAKNWLPGPCYRQQRVSTTVSQNNNSNFAWTGATKYHLNGRDSLVNPGVAMATHKGDEERFFPSSGVLMFGKQGAGKDNVDYSSVMLTSEEEIKTTNPVATEQYGVVADNLQQQNAAPIVGAVNSQGALPGMVWQNRDVYLQGPIWAKIPHTDGNFHPSPLMGGFGLKHPPPQILIKNTPVPADPPTTFSQAKLASFITQYSTGQVSVEIEWELQKENSKRWNPEIQYTSNYYKSTNVDFAVNTEGTYSEPRPIGTRYLTRNL

SEQ ID NO: 404 - DNA, 2501 bp, Artificial Sequence
  source: /note="Description of Artificial Sequence: Synthetic polynucleotide"
gaattcgcccttggctgcgtcaactggaccaatgagaactttcccttcaacgattgcgtcgacaagatggtgatctggtgggaggagggcaagatgacggccaaggtcgtggagtccgccaaggccattcatcatctgctggggcgggctcccgagattgcttgctcggcctgcgatctggtcaacgtggacctggatgactgtgtttctgagcaataaatgacttaaaccaggtatggctgccgatggttatcttccagattggctcgaggacaacctctctgagggcattcgcgagtggtgggacttgagacctggagccccgaaacccaaagccaaccagcaaaagcaggacgacggccggggtctggtgcttcctggctacaagtacctcggacccttcaacggactcgacaagggagagccggtcaacgaggcagacgccgcggccctcgagcacgacaaggcctacgacaagcagctcgagcagggggacaacccgtacctcaagtacaaccacgccgacgccgagtttcaggagcgtcttcaagaagatacgtcttttgggggcaacctcgggcgagcagtcttccaggccaagaagcgggttctcgaacctctcggtctggttgaggaaggcgctaagacggctcctggaaagaagagacccatagaatcccccgactcctccacgggcatcggcaagaaaggccagcagcccgctaaaaagagactcaactttgggcagactggcgactcagagtcagtgcccgaccctcaaccaatcggagaaccccccgcaggcccctctggtctgggatctggcacaatggctgcaggcggtggcgctccaatggcagacaataacgaaggcgccgacggagtgggtagttcctcaggaaattggcattgcgattccacatggctgggcgacagagtcatcaccaccagcacccgaacctgggccctccccacctacaacaaccacctctacaagcaaatctccaacgggacatcgggaggaagcaccaacgacaacacctacttcggctacagcaccccctgggggtattttgactttaacagattccactgccacttctcaccacgtgactggcagcgactcatcaacaacaactggggattccggcccaagagactcaacttcaagctcttcaacatccaggtcaaggaggtcacgcagaatgaaggcaccaagaccatcgccaataaccttaccagcacgattcaggtctttacggactcggaataccagctcccgtacgtcctcggctctgcgcaccagggctgcctgcctccgttcccggcggacgtcttcatgattcctcagtacgggtacctgactctgaacaacggcagtcaggccgtgggccgttcctccttctactgcctggagtactttccttctcaaatgctgagaacgggcaacaactttgagttcagctaccagtttgaggacgtgccttttcacagcagctatgcgcacagccaaagcctggaccggctgatgaaccccctcatcgaccagtacctgtactacctgtctcggactcagtccacgggaggtaccgcaggaactcagcagttgctattttctcaggccgggcctaataacatgtcggctcaggccaaaaactggctacccgggccctgctaccggcagcaacgcgtctccacgacagtgtcgcaaaataacaacagcaactttgcttggaccggtgccaccaagtatcatctgaatggcagagactctctggtaaatcccggtgtcgctatggcaacgcacaagggcgacgaagagcgattttttccatccagcggagtcttgatgtttgggaaacagggagctggaaaagacaacgtagactatagcagcgttatgctaaccagtgaggaagaaatcaaaaccaccaacccagtggccacagaacagtacggcgtggtggccgataacctgcaacagcaaaacgccgctcctattgtaggggccgtcaacagtcaaggagccttacctggcatggtctggcagaaccgggacgtgtacctgcagggtcctatctgggccaagattcctcacacggacggcaactttcatccttcgccgctgatgggaggctttggactgaaacacccgcctcctcagatcctgattaagaatacacctgttcccgcggatcctccaactaccttcagtcaagccaagctggcgtcgttcatcacgcagtacagcaccggacaggtcagcgtggaaattgaatgggagctgcagaaagagaacagcaagcgctggaacccagagattcagtatacttccaactactacaaatctacaaatgtggactttgctgtcaatactgagggtacttattcagagcctcgccccattggcacccgttacctcacccgtaacctgtaattgcctgttaatcaataaaccggttgattcgtttcagttgaactttggtctcaagggcgaattc

SEQ ID NO: 405 - DNA, 2187 bp, Artificial Sequence
  source: /note="Description of Artificial Sequence: Synthetic polynucleotide"
atggctgccgatggttatcttccagattggctcgaggacaacctctctgagggcattcgcgagtggtgggacttgaaacctggagccccgaaacccaaagccaaccagcaaaagcaggacgacggccggggtctggtgcttcctggctacaagtacctcggacccttcaacggactcgacaagggagagccggtcaacgaggcagacgccgcggccctcgagcacgacaaggcctacgacaagcagctcgagcagggggacaacccgtacctcaagtacaaccacgccgacgccgagtttcaggagcgtcttcaagaagatacgtcttttgggggcaacctcgggcgagcagtcttccaggccaagaagcgggttctcgaacctctcggtctggttgaggaaggcgctaagacggctcctggaaagaagagacccatagaatcccccgactcctccacgggcatcggcaagaaaggccagcagcccgctaaaaagaagctcaactttgggcagactggcgactcagagtcagtgcccgacccccaacctctcggagaacctcccgccgcgccctcaggtctgggatctggtacaatggctgcaggcggtggcgcaccaatggcagacaataacgaaggcgccgacggagtgggtaatgcctccggaaattggcattgcgattccacatggctgggcgacagagtcatcaccaccagcacccgcacctgggccctgcccacctacaacaaccacctctacaagcagatatcaagtcagagcggggctaccaacgacaaccacttcttcggctacagcaccccctggggctattttgacttcaacagattccactgccacttctcaccacgtgactggcagcgactcatcaacaacaactggggattccggcccagaaagctgcggttcaagttgttcaacatccaggtcaaggaggtcacgacgaacgacggcgttacgaccatcgctaataaccttaccagcacgattcaggtcttctcggactcggagtaccaactgccgtacgtcctcggctctgcgcaccagggctgcctccctccgttccctgcggacgtgttcatgattcctcagtacggatatctgactctaaacaacggcagtcagtctgtgggacgttcctccttctactgcctggagtactttccttctcagatgctgagaacgggcaataactttgaattcagctacacctttgaggaagtgcctttccacagcagctatgcgcacagccagagcctggaccggctgatgaatcccctcatcgaccagtacctgtactacctggcccggacccagagcactacggggtccacaagggagctgcagttccatcaggctgggcccaacaccatggccgagcaatcaaagaactggctgcccggaccctgttatcggcagcagagactgtcaaaaaacatagacagcaacaacaacagtaactttgcctggaccggggccactaaataccatctgaatggtagaaattcattaaccaacccgggcgtagccatggccaccaacaaggacgacgaggaccagttctttcccatcaacggagtgctggtttttggcgaaacgggggctgccaacaagacaacgctggaaaacgtgctaatgaccagcgaggaggagatcaaaaccaccaatcccgtggctacagaagaatacggtgtggtctccagcaacctgcaatcgtctacggccggaccccagacacagactgtcaacagccagggggctctgcccggcatggtctggcagaaccgggacgtgtacctgcagggtcccatctgggccaaaattcctcacacggacggcaactttcacccgtctcccctgatgggcggatttggactcaaacacccgcctcctcaaattctcatcaaaaacaccccggtacctgctaatcctccagaggtgtttactcctgccaagtttgcctcatttatcacgcagtacagcaccggccaggtcagcgtggagatcgagtgggaactgcagaaagaaaacagcaaacgctggaatccagagattcagtacacctcaaattatgccaagtctaataatgtggaatttgctgtcaacaacgaaggggtttatactgagcctcgccccattggcacccgttacctcacccgtaacctgtaa

SEQ ID NO: 406 - protein, 728 aa, Artificial Sequence; identical to SEQ ID NO: 74
  source: /note="Description of Artificial Sequence: Synthetic polypeptide"

SEQ ID NO: 407 - protein, 728 aa, Artificial Sequence; identical to SEQ ID NO: 166
  source: /note="Description of Artificial Sequence: Synthetic polypeptide"

SEQ ID NO: 408 - protein, 728 aa, Artificial Sequence; identical to SEQ ID NO: 166
  source: /note="Description of Artificial Sequence: Synthetic polypeptide"

SEQ ID NO: 409 - protein, 733 aa, Artificial Sequence
  source: /note="Description of Artificial Sequence: Synthetic polypeptide"
MAADGHLPDWLEDNLSEGIREWWDLKPGAPKPKANQQKQDDGRGLVLPGYKYLGPFNGLDKGEPVNAADAAALEHDKAYDQQLKAGDNPYLRYNHADAEFQERLQEDTSFGGNLGRAVFQAKKRVLEPLGLVEEGAKTAPGKKRPIESPDSSTGIGKKGQQPAKKKLNFGQTGDSESVPDPQPIGEPPAGPSGLGSGTMAAGGGAPMADNNEGADGVGSSSGNWHCDSTWLGDRVITTSTRTWALPTYNNHLYKQISNGTSGGSTNDNTYFGYSTPWGYFDFNRFHCHFSPRDWQRLINNSWGFRPKRLNFKLFNIQVKEVTQNEGTKTIANNLTSTIQVFTDSEYQLPYVLGSAHQGCLPPFPADVFMIPQYGYLTLNNGSQAVGRSSFYCLEYFPSQMLRTGNNFEFSYQFEDVPFHSSYAHSQSLDRLMNPLIDQYLYYLSRTQSTGGTAGTQQLLFSQAGPNNMSAQAKNWLPGPCYRQQRVSTTLSQNNNSNFAWTGATKYHLNGRDSLVNPGVAMATHKDDEERFFPSSGVLMFGKQGAGKDNVDYSSVMLTSEEEIKTTNPVATEQYGVVADNLQQQNAAPIVGAVNSQGALPGMVWQNRDVYLQGPIWAKIPHTDGNFHPSPLMGGFGLKHPPPQILIKNTPVPADPPTTFSQAKLASFITQYSTGQVSVEIEWELQKENSKRWNPEIQYTSNYYKSTNVDFAVNTEGTYSEPRPIGTRYLTRNL

SEQ ID NO: 410 - DNA, 3113 bp, Artificial Sequence
  source: /note="Description of Artificial Sequence: Synthetic polynucleotide"
gaattcgccctttctacggctgcgtcaactggaccaatgagaactttcccttcaacgattgcgtcgacaagatggtgatctggtgggaggagggcaagatgacggccaaggtcgtggagtccgccaaggccattctcggcggcagcaaggtgcgcgtggaccaaaagtgcaagtcgtccgcccagatcgatcccacccccgtgatcgtcacttccaacaccaacatgtgcgccgtgattgacgggaacagcaccaccttcgagcaccagcagccgttacaagaccggatgttcaaatttgaactcacccgccgtctggagcatgactttggcaaggtgacaaagcaggaagtcaaagagttcttccgctgggcgcaggatcacgtgaccgaggtggcgcatgagttctacgtcagaaagggtggagccaacaagagacccgcccccgatgacgcggataaaagcgagcccaagcgggcctgcccctcagtcgcggatccatcgacgtcagacgcggaaggagctccggtggactttgccgacaggtaccaaaacaaatgttctcgtcacgcgggcatgcttcagatgctgcttccctgcaagacatgcgagagaatgaatcagaatttcagcatttgcttcacgcacgggaccagagactgttcagaatgtttccccggcgtgtcagaatctcaaccggtcgtcagaaagaggacgtatcggaaactctgtgccattcatcatctgctggggcgggctcccgagattgcttgctcggcctgcgatctggtcaacgtggacctggatgactgtgtttctgagcaataaatgacttaaaccaggtatggctgccgatggtcatcttccagattggctcgaggacaacctctctgagggcattcgcgagtggtgggacttgaaacctggagccccgaaacccaaagccaaccagcaaaagcaggacgacggccggggtctggtgcttcctggctacaagtacctcggacccttcaacggactcgacaagggggagcccgtcaacgcggcggacgcagcggccctcgagcacgacaaggcctacgaccagcagctcaaagcgggtgacaatccgtacctgcggtataaccacgccgacgccgagtttcaggagcgtcttcaagaagatacgtcttttgggggcaacctcgggcgagcagtcttccaggccaagaagcgggttctcgaacctctcggtctggttgaggaaggcgctaagacggctcctggaaagaagagacccatagaatcccccgactcctccacgggcatcggcaagaaaggccagcagcccgctaaaaagaagctcaactttgggcagactggcgactcagagtcagtgcccgaccctcaaccaatcggagaaccccccgcaggcccctctggtctgggatctggtacaatggctgcaggcggtggcgctccaatggcagacaataacgaaggcgccgacggagtgggtagttcctcaggaaattggcattgcgattccacatagctgggcgacagagtcatcaccaccagcacccgaacctgggccctccccacctacaacaaccacctctacaagcaaatctccaacgggacatcgggaggaagcaccaacgacaacacctacttcggctacagcaccccctgggggtattttgactttaacagattccactgccacttctcaccacgtgactggcagcgactcatcaacaacagctggggattccggcccaagagactcaacttcaagctcttcaacatccaggtcaaggaggtcacgcagaatgaaggcaccaagaccatcgccaataaccttaccagcacgattcaggtctttacggactcggaataccagctcccgtacgtcctcggctctgcgcaccagggctgcctgcctccgttcccggcggacgtcttcatgattcctcagtacgggtacctgactctgaacaacggcagtcaggccgtgggccgttcctccttctactgcctggagtactttccttctcaaatgctgagaacgggcaacaactttgagttcagctaccagtttgaggacgtgccttttcacagcagctacgcgcacagccaaagcctggaccggctgatgaaccccctcatcgaccagtacctgtactacctgtctcggactcagtccacgggaggtaccgcaggaactcagcagttgctattttctcaggccgggcctaataacatgtcggctcaggccaaaaactggctacccgggccctgctaccggcagcaacgcgtctccacgacactgtcgcaaaataacaacagcaactttgcttggaccggtgccaccaagtatcatctgaatggcagagactctctggtaaatcccggtgtcgctatggcaacgcacaaggacgacgaagagcgattttttccatccagcggagtcttgatgtttgggaaacagggagctggaaaagacaacgtggactatagcagcgttatgctaaccagtgaggaagaaatcaaaaccaccaacccagtggccacagaacagtacggcgtggtggccgataacctgcaacagcaaaacgccgctcctattgtaggggccgtcaacagtcaaggagccttacctggcatggtctggcagaaccgggacgtgtacctgcagggtcctatctgggccaagattcctcacacggacggcaactttcatccttcgccgctgatgggaggctttggactgaaacacccgcctcctcagatcctgattaagaatacacctgttcccgcggatcctccaactaccttcagtcaagccaagctggcgtcgttcatcacgcagtacagcaccggacaggtcagcgtggaaattgaatgggagctgcagaaagagaacagcaagcgctggaacccagagattcagtatacttccaactactacaaatctacaaatgtggactttgctgtcaatactgagggtacttattcagagcctcgccccattggcacccgttacctcacccgtaacctgtaattgcctgttaatcaataaaccggttaattcgtttcagttgaactttggtctctgcgaagggcgaattc

SEQ ID NO: 411 - protein, 731 aa, Artificial Sequence
  source: /note="Description of Artificial Sequence: Synthetic polypeptide"
MAADGYLPDWLEDNLSEGIREWWDLKPGAPKPKANQQKQDDGRGLVLPGYKYLGPFNGLDKGEPVNEADAAALEHDKAYDKQLEQGDNPYLKYNHADAEFQERLQEDTSFGGNLGRAVFRAKKRVLEPLGLVEEGAKTAPGKKRPIESPDSSTGIGKKGQQPAKKKLNFGQTGDSESVPDPQPLGEPPAAPSGLGSGTMAAGGGAPMADNNEGADGVGNASGNWHCDSTWLGDRVITTSTRTWALPTYNNHLYKQISSQSGATNDNHFFGYSTPWGYFDFNRFHCHFSPRDWQRLINNNRGFRPRKLRFKLFNIQVKEVTTNDGVTTIANNLTSTIQVFSDSEYQLPYVLGSAHQGCLPPFPADVFMIPQYGYLTLNNGSQSVGRSSFYCLEYFPSQMLRTGNNFEFSYQFEDVPFHSSYAHSQSLDRLMNPLIDQYLYYLSRTQSTGGTAGTQQLLFSQAGPNNMSAQAKNWLPGPCYRQQRVSTTLSQNNNSNFAWTGATKYHLNGRDSLVNPGVAMATHKDDEERFFPSSGVLMFGKQGAGKDNVDYSSVMLTSEEEIKTTNPVATEQYGVVADNLQQQNAAPIVGAVNSQGALPGMAWQNRDVYLQGPIWAKIPHTDGNFHPSPLMGGFGLKHPPPQILIKNTPVPADPPTTFSQAKLASFITQYSTGQVSVEIEWELQKENSKRWNPEIQYTSNYYKSTNVDFAVNTEGTYSEPRPIGTRYLTRNL

SEQ ID NO: 412 - DNA, 3106 bp, Artificial Sequence
  source: /note="Description of Artificial Sequence: Synthetic polynucleotide"
gaattcgcccttctacggctgcgtcaactggaccaatgagaactttcccttcaacgattgcgtcgacaagatggtgatctggtgggaggagggcaagatgacggccaaggtcgtggagtccgccaaggccattctcggcggcagcaaggtgcgcgtggaccaaaagtgcaagtcgtccgcccagatcgaccccacccccgtgatcgtcacctccaacaccaacatgtgcgccgtgattgacgggaacagcaccaccttcgagcaccagcagccgttgcaggaccggatgttcaaatttgaactcacccgccgtctggagcatgactttggcaaggcgacaaagcaggaagtcaaagagttcttccgctgggcgcaggatcacgtgaccgaggtggcgcatgagttctacgtcagaaagggtggagccaacaagagacccgcccccgatgacgcggataaaagcgagcccaagcgggcccgcccctcagtcgcggatccatcgacgtcagacgcggaaggagctccggtggactttgccgacaggtaccaaaacaaatgttctcgtcacgcgggcatgcttcagatgctgtttccctgcaaaacatgcgagagaatgaatcagaatttcaacatttgcttcacgcacgggaccagagactgttcagaatgtttccccggcgtgtcagaatctcaaccggtcgtcagaaagaggacgtatcggaaactctgtgccattcatcatctgctggggcgggctcccgagattgcttgctcggcctgcgatctggtcaacgtggacctggatgactgtgtttctgagcaataaatgacttaaaccaggtatggctgccgatggttatcttccagattggctcgaggacaacctctctgagggcattcgcgagtggtgggacttgaaacctggagccccgaaacccaaagccaaccagcaaaagcaggacgacggccggggtctggtgcttcctggctacaagtacctcggacccttcaacggactcgacaagggagagccggtcaacgaggcagacgccgcggccctcgagcacgacaaggcctacgacaagcagctcgagcagggggacaacccgtacctcaagtacaaccacgccgacgccgagtttcaggagcgtcttcaagaagatacgtcttttgggggcaacctcgggcgagcagtcttccgggccaagaagcgggttctcgaacctctcggtctggttgaggaaggcgctaagacggctcctggaaagaagagacccatagaatcccccgactcctccacgggcatcggcaagaaaggccagcagcccgctaaaaagaagctcaactttgggcagactggcgactcagagtcagtgcccgacccccaacctctcggagaacctcccgccgcgccctcaggtctgggatctggtacaatggctgcaggcggtggcgcaccaatggcagacaataacgaaggcgccgacggagtgggtaatgcctccggaaattggcattgcgattccacatggctgggcgacagagtcatcaccaccagcacccgcacctgggccctgcccacctacaacaaccacctctacaagcagatatcaagtcagagcggggctaccaacgacaaccacttcttcggctacagcaccccctggggctattttgacttcaacagattccactgccacttctcaccacgtgactggcagcgactcatcaacaacaaccggggattccggcccagaaagctgcggttcaagttgttcaacatccaggtcaaggaggtcacgacgaacgacggcgttacgaccatcgctaataaccttaccagcacgattcaggtcttctcggactcggagtaccaactgccgtacgtcctcggctctgcgcaccagggctgcctccctccgttccctgcggacgtgttcatgattcctcagtacggatatctgactctaaacaacggcagtcagtctgtgggacgttcctccttctactgcctggagtactttccttctcagatgctgagaacgggcaataactttgaattcagctaccagtttgaggacgtgccctttcacagcagctacgcgcacagccaaagcctggaccggctgatgaaccccctcatcgaccagtacctgtactacctgtctcggactcagtccacgggaggtaccgcaggaactcagcagttgctattttctcaggccgggcctaataacatgtcggctcaggccaaaaactggctacccgggccctgctaccggcagcaacgcgtctccacgacactgtcgcaaaataacaacagcaactttgcttggaccggtgccaccaagtatcatctgaatggcagagactctctggtaaatcccggtgtcgctatggcaacgcacaaggacgacgaagagcgattttttccatccagcggagtcttgatgtttgggaaacagggagctggaaaagacaacgtggactatagcagcgttatgctaaccagtgaggaagaaatcaaaaccaccaacccagtggccacagaacagtacggcgtggtggccgataacctgcaacagcaaaacgccgctcctattgtaggggccgtcaacagtcaaggagccttacctggcatggcctggcagaaccgggacgtgtacctgcagggtcctatctgggccaagattcctcacacggacggcaactttcatccttcgccgctgatgggaggctttggactgaaacacccgcctcctcagatcctgattaagaatacacctgttcccgcggatcctccaactaccttcagtcaagccaagctggcgtcgttcatcacgcagtacagcaccggacaggtcagcgtggaaattgaatgggagctgcagaaagagaacagcaagcgctggaacccagagattcagtatacttccaactactacaaatctacaaatgtggactttgctgtcaatactgagggtacttattcagagcctcgccccattggcacccgttacctcacccgtaacctgtaattgcctgttaatcaataaaccggttaattcgtttcagttgaactttggtctctgcgaagggcgaattc

SEQ ID NO: 413 - protein, 738 aa, Artificial Sequence
  source: /note="Description of Artificial Sequence: Synthetic polypeptide"
MAADGYLPDWLEDNLSEGIREWWDLKPGAPKPKANQQKQDDGRGLVLPGYKYLGPFNGLDKGEPVNEADAAALEHDKAYDKQLEQGDNPYLKYNHADAEFQERLQEDTSFGGNLGRAVFQAKKRVLEPLGLVEEGAKTAPGKKRPVEPSPQRSPDSSTGIGKTGQQPAKKRLNFGQTGDSESVPDPQPIGEPPAGPSGLGSGTMAAGGGAPMADNNEGADGVGSSSGNWHCDSTWLGDRVITTSTRTWALPTYNNHLYKQISNGTSGGSTNDNTYFGYSTPWGYFDFNRFHCHFSPRDWQRLINNNWGFRPKRLNFKLFNIQVKEVTQNEGTKTIANNLTSTIQVFTDSEYQLPYVLGSAHQGCLPPFPADVFMIPQYGYLTLNNGSQAVGRSSFYCLEYFPSQMLRTGNNFEFSYQFEDVPFHSSYAHSQSLDRLMNPLIDQYLYYLSRTQSTGGTAGTQQLLFSQAGPNNMSAQAKNWLPGPCYRQQRVSTTLSQNNNSNFAWTGATKYHLNGRDSLVNPGVAMATHKDDEERFFPSSGVLMFGKQGAGKDNVDYSSVMLTSEEEIKTTNPVATEQYGVVADNLQQQNAAPIVGAVNSQGALPGMVWQNRDVYLQGPIWAKIPHTDGNFHPSPLMGGFGLKHPPPQILIKNTPVPADPPTTFSQAKLASFITQYSTGQVSVEIEWELQKENSKRWNPEIQYTSNYYKSTNVDFAVNTEGTYSEPRPIGTRYLTRNL

SEQ ID NO: 414 - DNA, 3197 bp, Artificial Sequence
  source: /note="Description of Artificial Sequence: Synthetic polynucleotide"
gaattcgccctttctacggctgcgtcaactggaccaatgagaactttcccttcaacgattgcgtcgacaagatggtgatctggtgggaggagggcaagatgacggccaaggtcgtggagtccgccaaggccattctcggcggcagcaaggtgcgcgtggaccaaaagtgcaagtcgtccgcccagatcgaccccacccccgtgatcgtcacctccaacaccaacatgtgcgccgtgattgacgggaacagcaccaccttcgagcaccagcagccgttacaagaccggatgttcaaatttgaactcacccgccgtctggagcacgactttggcaaggtgacaaagcaggaagtcaaagagttcttccgctgggcgcaggatcacgtgaccgaggtggcgcatgagttctacgtcagaaagggtggagccaacaagagacccgcccccgatgacgcggataaaagcgagcccaagcgggcctgcccctcagtcgcggatccatcgacgtcagacgcggaaggagctccggtggactttgccgacaggtaccaaaacaaatgttctcgtcacgcgggcatgcttcagatgctgtttccctgcaagacatgcgagagaatgaatcagaatttcaacatttgcttcacgcacgggaccagagactgttcagaatgtttccccggcgtgtcagaatctcaaccggtcgtcagaaagaggacgtatcggaaactctgtgccattcatcatctgctggggcgggctcccgagattgcttgctcggcctgcgatctggtcaacgtggacctggatgactgtgtttctgagcaataaatgacttaaaccaggtatggctgccgatggttatcttccagattggctcgaggacaacctctctgagggcattcgcgagtggtgggacttgaaacctggagccccgaaacccaaagccaaccagcaaaagcaggacgacggccggggtctggtgcttcctggctacaagtacctcggacccttcaacggactcgacaagggagagccggtcaacgaggcagacgccgcggccctcgagcacgacaaggcctacgacaagcagctcgagcagggggacaacccgtacctcaagtacaaccacgccgacgccgagtttcaggagcgtcttcaagaagatacgtcttttgggggcaacctcgggcgagcagtcttccaggccaagaagcgggttctcgaacctctcggtctggttgaggaaggcgctaagacggctcctggaaagaagagaccggtagagccatcaccccagcgttctccagactcctctacgggcatcggcaagacaggccagcagcccgcgaaaaagagactcaactttgggcagactggcgactcagagtcagtgcccgaccctcaaccaatcggagaaccccccgcaggcccctctggtctgggatctggtacaatggctgcaggcggtggcgctccaatggcagacaataacgaaggcgccgacggagtgggtagttcctcaggaaattggcattgcgattccacatggctgggcgacagagtcatcaccaccagcacccgaacctgggccctccccacctacaacaaccacctctacaagcaaatctccaacgggacatcgggaggaagcaccaacgacaacacctacttcggctacagcaccccctgggggtattttgactttaacagattccactgccacttctcaccacgtgactggcagcgactcatcaacaacaactggggattccggcccaagagactcaacttcaagctcttcaacatccaggtcaaggaggtcacgcagaatgaaggcaccaagaccatcgccaataaccttaccagcacgattcaggtctttacggactcggaataccagctcccgtacgtcctcggctctgcgcaccagggctgcctgcctccgttcccggcggacgtcttcatgattcctcagtacgggtacctgactctgaacaacggcagtcaggccgtgggccgttcctccttctactgcctggagtactttccttctcaaatgctgagaacgggcaacaactttgagttcagctaccagtttgaggacgtgccttttcacagcagctacgcgcacagccaaagcctggaccggctgatgaaccccctcatcgaccagtacctgtactacctgtctcggactcagtccacgggaggtaccgcaggaactcagcagttgctattttctcaggccgggcctaataacatgtcggctcaggccaaaaactggctacccgggccctgctaccggcagcaacgcgtctccacgacactgtcgcaaaataacaacagcaactttgcttggaccggtgccaccaagtatcatctgaatggcagagactctctggtaaatcccggtgtcgctatggcaacgcacaaggacgacgaagagcgattttttccatccagcggagtcttgatgtttgggaaacagggagctggaaaagacaacgtggactatagcagcgttatgctaaccagtgaggaagaaatcaaaaccaccaacccagtggccacagaacagtacggcgtggtggccgataacctgcaacagcaaaacgccgctcctattgtaggggccgtcaacagtcaaggagccttacctggcatggtctggcagaaccgggacgtgtacctgcagggtcctatctgggccaagattcctcacacggacggcaactttcatccttcgccgctgatgggaggctttggactgaaacacccgcctcctcagatcctgattaagaatacacctgttcccgcggatcctccaactaccttcagtcaagccaagctggcgtcgttcatcacgcagtacagcaccggacaggtcagcgtggaaattgaatgggagctgcagaaagagaacagcaagcgctggaacccagagattcagtatacttccaactactacaaatctacaaatgtggactttgctgtcaatactgagggtacttattcagagcctcgccccattggcacccgttacctcacccgtaacctgtaattgcctgttaatcaataaaccggttaattcgtttcagttgaactttggtctctgcgaagggcgaattcgtttaaacctgcaggactagtccctttagtgagggttaattctgagcttggcgtaatcatgggtcatag

SEQ ID NO: 415 - protein, 735 aa, Artificial Sequence
  source: /note="Description of Artificial Sequence: Synthetic polypeptide"
MAADGYLPDWLEDNLSEGIREWWDLKPGAPKPKANQQKQDDGRGLVLPGYKYLGPFNGLDKGEPVNEADAAALEHDKAYDKQLEQGDNPYLKYNHADAEFQERLQEDTSFGGNLGRAVFQAKKRVLEPLGLVEEGAKTAPGKKRPVEPSPQRSPDSSTGIGKTGQQPAKKRLNFGQTGDSESVPDPQPIGEPPAGPSGLGSGTMAAGGGAPMADNNEGADGVGSSSGNWHCDSTWLGDRVITTSTRTWALPTYNNHLYKQISNGTSGGSTNDNTYFGYSTPWGYFDFNRFHCHFSPRDWQRLINNNWGFRPRKLRFKLFNIQVKEVTTDDGVTTIANNLTSTIQVFSDSEYQLPYVLGSAHQGCLPPFPADVFMIPQYGYLTLNNGSQSVGRSSFYCLEYFPSQMLRTGNNFEFSYTFEEVPFHSSYAHSQSLDRLMNPLIDQYLYYLARTQSTTGSTRELQFHQAGPNTMAEQSKNWLPGPCYRQQRLSKNIDSNNNSNFAWTGATKYHLNGRNSLTNPGVAMATNKDDEDQFFPINGVLVFGKTGAANKTTLENVLMTSEEEIKTTNPVATEEYGVVSSNLQSSTAGPQTQTVNSQGALPGMVWQNRDVYLQGPIWAKIPHTDGNFHPSPLMDGFGLKHPPPQILIKNTPVPANPPEVFTPAKFASFITQYSTGQVSVEIEWELQKENSKRWNPEIQYTSNYAKSNNVEFAVNNEGVYTEPRPIGTRYLTRNL

SEQ ID NO: 416 - DNA, 3276 bp, Artificial Sequence
  source: /note="Description of Artificial Sequence: Synthetic polynucleotide"
gaattcgcccttcgcagagaccaaagttcaactgaaacgaattaaccggtttattgattaacaggcaattacaggttacgggtgaggtaacgggtgccaatggggcgaggctcagtataaaccccttcgttgttgacagcaaattccacattattagacttggcataatttgaggtgtactgaatctctggattccagcgtttgctgttttctttctgcagttcccactcgatctccacgctgacctggccggtgctgtactgcgtgataaatgaggcaaacttggcaggagtaaacacctctggaggattagcaggtaccggggtgtttttgatgagaatttgaggaggcgggtgtttgagtccaaatccgtccatcaggggagacgggtgaaagttgccgtccgtgtgaggaattttggcccagatgggaccctgcaggtacacgtcccggttctgccagaccatgccgggcagagccccctggctgttgacagtctgtgtctggggtccggccgtagacgattgcaggttgctggagaccacaccgtattcttctgtagccacgggattggtggttttgatctcctcctcgctggtcattagcacgttttccagcgttgtcttgttggcagcccccgttttgccaaaaaccagcactccgttgatgggaaagaactggtcctcgtcgtccttgttggtggccatggctacgcccgggttggttaatgaatttctaccattcagatggtatttagtggccccggtccaggcaaagttactgttgttgttgctgtctatgttttttgacagtctctgctgccgataacagggtccgggcagccagttctttgattgctcggccatggtgttgggcccagcctgatggaactgcagctcccttgtggaccccgtagtgctctgggtccgggccaggtagtacaggtactggtcgatgaggggattcatcagccggtccaggctctggctatgcgcatagctgctgtggaaaggcacttcctcaaaggtgtagctgaattcaaagttattgcccgttctcagcatctgagaaggaaagtactccaggcagtagaaggaggaacgtcccacagactgactgccgttgtttagagtcagatatccgtactgaggaatcatgaacacgtccgcagggaacggagggaggcagccctggtgcgcagagccgaggacgtacggcagttggtactccgagtccgagaagacctgaatcgtgctggtaaggttattagcgatggtcgtaacgccgtcgtccgtcgtgacctccttgacctggatgttgaacaacttgaaccgcagctttctgggccggaatccccagttgttgttgatgagtcgctgccagtcacgtggtgagaagtggcagtggaatctgttaaagtcaaaatacccccagggggtgctgtagccgaagtaggtgttgtcgttggtgcttcctcccgatgtcccgttggagatttgcttgtagaggtggttgttgtaggtggggagggcccaggttcgggtgctggtggtgatgactctgtcgcccagccatgtggaatcgcaatgccaatttcctgaggaactacccactccgtcggcgccttcgttattgtctgccattggagcgccaccgcctgcagccattgtaccagatcccagaccagaggggcctgcggggggttctccgattggttgagggtcgggcactgactctgagtcgccagtctgcccaaagttgagtctctttttcgcgggctgctggcctgtcttgccgatgcccgtagaggagtctggagaacgctggggtgatggctctaccggtctcttctttccaggagccgtcttagcgccttcctcaaccagaccgagaggttcgagaacccgcttcttggcctggaagactgctcgcccgaggttgcccccaaaagacgtatcttcttgaagacgctcctgaaactcggcgtcggcgtggttgtacttgaggtacgggttgtccccctgctcgagctgcttgtcgtaggccttgtcgtgctcgagggccgcggcgtctgcctcgttgaccggctctcccttgtcgagtccgttgaagggtccgaggtacttgtagccaggaagcaccagaccccggccgtcgtcctgcttttgctggttggctttgggtttcggggctccaggtttcaagtcccaccactcgcgaatgccctcagagaggttgtcctcgagccaatctggaagataaccatcggcagccatacctggtttaagtcatttattgctcagaaacacagtcatccaggtccacgttgaccagatcgcaggccgagcaagcaatctcgggagcccgccccagcagatgatgaatggcacagagtttccgatacgtcctctttctgacgaccggttgagattctgacacgccggggaaacattctgaacagtctctggtcccgtgcgtgaagcaaatgttgaaattctgattcattctctcgcatgtcttgcagggaaacagcatctgaagcatgcccgcgtgacgagaacacttgttttggtacctgtcggcaaagtccaccggagctccttccgcgtctgacgtcgatggatgcaaaatgtcgcaaaagcactcacgtgacagctaatacaggaccactcccctatgacgtgatttacgtcagcgctatgcccgcgtgacgagaacatttgttttggtacctgtcggcaaagtccaccggagctccttccgcgtctgacgtcgatggatccgcgactgaggggcaggcccgcttgggctcgcttttatccgcgtcatcgggggcgggtctcttgttggctccaccctttctgacgtagaactcatgcgccacctcggtcacgtgatcctgcgcccagcggaagaactctttgacttcctgctttgtcaccttgccaaagtcatgctccagacggcgggtgagttcaaatttgaacatccggtcctgcaacggctgctggtgctcgaaggtggtgctgttcccgtcaatcacggcgcacatgttggtgttggaagtgacgatcacgggggtgggatcgatctgggcggaagacttgcacttttggtccacgcgcaccttgctgccgccgagaatggccttggcggactccacgaccttggccgtcatcttgccctcctcccaccagatcaccatcttgtcgacgcaatcgttgaagggaaagttctcattggtccagttgacgcagccgtagaaagggcgaattc

SEQ ID NO: 417 - protein, 738 aa, Artificial Sequence; identical to SEQ ID NO: 82
  source: /note="Description of Artificial Sequence: Synthetic polypeptide"

SEQ ID NO: 418 - protein, 738 aa, Artificial Sequence
  source: /note="Description of Artificial Sequence: Synthetic polypeptide"
MAADGYLPDWLEDNLSEGIREWWDLKPGAPKPKANQQKQDDGRGLVLPGYKYLGPFNGLDKGEPVNAADAAALEHDKAYDQQLKAGDNPYLRYNHADAEFQERLQEDTSFGGNLGRAVFQAKKRVLEPLGLVEEGAKTAPGKKRPVEPSPQRSPDSSTGIGKKGHQPARKRLNFGQTGDSESVPDPQPIGEPPAGPSGLGSGTMAAGGGAPMADNNEGADGVGSSSGNWHCDSTWLGDRVITTSTRTWALPTYNNHLYKQISNGTSGGSTNDNTYFGYSTPWGYFDFNRFHCHFSPRDWQRLINNNWGFRPKRLNFKLFNIQVKEVTQNEGTKTIANNLTSTIQVFTDSEYQLPYVPGSAHQGCLPPFPADVFMIPQYGYLTLNNGSQAVGRSSFYCLEYFPSQMLRTGNNFEFSYTFEDVPFHSSYAHSQSLDRLMNPLIDQYLYYLSRTQSTGGTQGTQQLLFSQAGPANMSAQAKNWLPGPCYRQQRVSTTLSQNNNSNFAWTGATKYHLNGRDSLVNPGVAMATHKDDEERFFPSSGVLMFGKQGAGKDNVDYSSVMLTSEEEIKTTNPVATEQYGVVADNLQQTNGAPIVGTVNSQGALPGMVWQNRDVYLQGPIWAKIPHTDGNFHPSPLMGGFGLKHPPPQILIKNTPVPADPPTTFSQAKLASFITQYSTGQVSVEIEWELQKENSKRWNPEIQYTSNYYKSTNVDFAVNTEGTYSEPRPIGTRYLTRNL

SEQ ID NO: 419 - protein, 738 aa, Artificial Sequence; identical to SEQ ID NO: 80
  source: /note="Description of Artificial Sequence: Synthetic polypeptide"

SEQ ID NO: 420 - protein, 728 aa, Artificial Sequence
  source: /note="Description of Artificial Sequence: Synthetic polypeptide"
MAADGYLPDWLEDNLSEGIREWWDLKPGAPKPKANQQKQDDGRGLVLPGYKYLGPFNGLDKGEPVNEADAAALEHDKAYDKQLEQGDNPYLKYNHADAEFQERLQEDTSFGGNLGRAVFQAKKRVLEPLGLVEEGAKTAPGKKRPIESPDSSTGIGRKGQQPAKKKLNFGQTGDSESVPDPQPIGEPPAGPSGLGSGTMAAGGGAPMADNNEGADGVGNASGNWHCDSTWLGDRVITTSTRTWALPTYNNHLYKQISSQSGATNDNHFFGYSTPWGYFDFNRFHCHFSPRDWQRLINNNWGFRPRKLRFKLFNIQVKEVTTNDGVTTIANNLTSTIQVFSDSEYQLPYVLGSAHQGCLPPFPADVFMIPQYGYLTLNNGSQSVGRSSFYCLEYFPSQMLRTGNNFEFSYTFEEVPFHSSYAHSQSLDRLMNPLIDQYLYYLARTQSTTGSTRELQFHQAGPNTMAEQSKNWLPGPCYRQQRLSKNIDSNNNSNFAWTGATKYHLNGRNSLTNPGVAMATNKDDEDQFFPINGVLVFGKTGAANKTTLENVLMTSEEEIKTTNPVATEEYGVVSSNLQSSTAGPQTQTVNSQGALPGMVWQNRDVYLQGPIWAKIPHTDGNFHPSPLMGGFGLKHPPPQILIKNTPVPANPPEVFTPAKFASFITQYSTGQVSVEIEWELQKENSKRWNPEIQYTSNYAKSNNVEFAVNNEGVYTEPRPIGTRYLTRNL

SEQ ID NO: 421 - DNA, 2489 bp, Artificial Sequence
  source: /note="Description of Artificial Sequence: Synthetic polynucleotide"
gaattcgccctttctacggctgcgtcaactggaccaatgagaactttcccttcaacgattgcgtcgacaagatggtgatctggtgggaggagggcaagatgacggccaaggtcgtgaagtccgccaaggccattcatcatctgctggggcgggctcccgagattgcttgctcggcctgcgatctggtcaacgtggacctggatgactgtgtttctgagcaataaatgacttaaaccaggtatggctgccgatggttatcttccagattggctcgaggacaacctctctgagggcattcgcgagtggtgggacttgaaacctggagccccgaaacccaaagccaaccagcaaaagcaggacgacggccggggtctggtgcttcctggctacaagtacctcggacccttcaacggactcgacaagggagagccggtcaacgaggcagacgccgcggccctcgagcacgacaaggcctacgacaagcagctcgagcagggggacaacccgtacctcaagtacaaccacgccgacgccgagtttcaggagcgtcttcaagaagatacgtcttttgggggcaacctcgggcgagcagtcttccaggccaagaagcgggttctcgaacctctcggtctggttgaggaaggcgctaagacggctcctggaaagaagagacccatagaatcccccgactcctccacgggcatcggcaggaaaggccagcagcccgctaaaaagaagctcaactttgggcagactggcgactcagagtcagtgcccgaccctcaaccaatcggagaaccccccgcaggcccctctggtctgggatctggtacaatggctgcaggcggtggcgctccaatggcagacaataacgaaggcgccgacggagtgggtaatgcctccggaaattggcattgcgattccacatggctgggcgacagagtcatcaccaccagcacccgcacctgggccctgcccacctacaacaaccacctctacaagcagatatcaagtcagagcggggctaccaacgacaaccacttcttcggctacagcaccccctggggctattttgacttcaacagattccactgccacttctcaccacgtgactggcagcgactcatcaacaacaactggggattccggcccagaaagctgcggttcaagttgttcaacatccaggtcaaggaggtcacgacgaacgacggcgttacgaccatcgccaataaccttaccagcacgattcaggtcttctcggactcggagtaccaactgccgtacgtcctcggctctgcgcaccagggctgcctccctccgttccctgcggacgtgttcatgattcctcagtacggatatctgactctaaacaacggcagtcagtctgtgggacgttcctccttctactgcctggagtactttccttctcagatgctgagaacgggcaataactttgaattcagctacacctttgaggaagtgcctttccacagcagctatgcgcacagccagagcctggaccggctgatgaatcccctcatcgaccagtacctgtactacctggcccggacccagagcactacggggtccacaagggagctgcagttccatcaggctgggcccaacaccatggccgagcaatcaaagaactggctgcccggaccctgttatcggcagcagagactgtcaaaaaacatagacagcaacaacaacagtaactttgcctggaccggggccactaaataccatctgaatggtagaaattcattaaccaacccgggcgtagccatggccaccaacaaggacgacgaggaccagttctttcccatcaacggagtgctggtttttggcaaaacgggggctgccaacaagacaacgctggaaaacgtgctaatgaccagcgaggaggagatcaaaaccaccaatcccgtggctacagaagaatacggtgtggtctccagcaacctgcaatcgtctacggccggaccccagacacagactgtcaacagccagggggctctgcccggcatggtctggcagaaccgggacgtgtacctgcagggtcccatctgggccaaaattcctcacacggacggcaactttcacccgtctcccctgatgggcggatttggactcaaacacccgcctcctcaaattctcatcaaaaacaccccggtacctgctaatcctccagaggtgtttactcctgccaagtttgcctcatttatcacgcagtacagcaccggccaggtcagcgtggagatcgagtgggaactgcagaaagaaaacagcaaacgctggaatccagagattcagtacacctcaaattatgccaagtctaataatgtggaatttgctgtcaacaacgaaggggtttatactgagcctcgccccattggcacccgttacctcacccgtaacctgtaattgcctgttaatcaataaaccggttaattcgtttcagttgaactttggtcaagggcgaattc

SEQ ID NO: 422 - protein, 728 aa, Artificial Sequence
  source: /note="Description of Artificial Sequence: Synthetic polypeptide"
MAADGYLPDWLEDNLSEGIREWWDLKPGAPKPKANQQKQDDGRGLVLPGYKYLGPFNGLDKGEPVNAADAAALEHDKAYDQQLKAGDNPYLRYNHADAEFQERLQEDTSFGGNLGRAVFQAKKRVLEPLGLVEEGAKTAPGKKRPIESPDSSTGIGKKGQQPAKKKLNFGQTGDSESVPDPQPIGEPPAGPSGLGSGTMAAGGGAPMADNNEGADGVGNASGNWHCDSTWLGDRVITTSTRTWALPTYNNHLYKQISSQSGATNDNHFFGYSTPWGYFDFNRFHCHFSPRDWQRLINNNWGFRPRKLRFKLFNIQVKEVTTNDGVTTIANNLTSTIQVFSDSEYQLPYVLGSAHQGCLPPFPADVFMIPQYGYLTLNNGSQSVGRSSFYCLEYFPSQMLRTGNNFEFSYTFEEVPFHSSYAHSQSLDRLMNPLIDQYLYYLARTQSTTGSTRELQFHQAGPNTMAEQSKNWLPGPCYRRQRLSKDIDSNNNSNFAWTGATKYHLNGRNSLTNPGVAMATNKDDEDQFFPINGVLVFGKTGAANKTTLENVLMTSEEEIKTTNPVATEEYGVVSSNLQSSTAGPQTQTVNSQGALPGMVWQNRDVYLQGPIWAKIPHTDGNFHPSPLMGGFGLKHPPPQILIKNTPVPANPPEVFTPAKFASFITQYSTGQVSVEIEWELQKENSKRWNPEIQYTSNYAKSNNVEFAVNNEGVYTEPRPIGTRYLTRNL

SEQ ID NO: 423 - DNA, 3098 bp, Artificial Sequence
  source: /note="Description of Artificial Sequence: Synthetic polynucleotide"
gaattcgccctttctacggctgcgtcaactggaccaatgagaactttcccttcaacgattgcgtcgacaagatggtgatctggtgggaggagggcaagatgacggccaaggtcgtggagtccgccaaggccattctcggcggcagcaaggtgcgcgtggaccaaaagtgcaagtcttccgcccagatcgatcccacccccgtgatcgtcacttccaacaccaacatgtgcgccgtgattgacgggaacagcaccaccttcgagcaccagcagccgttacaagaccggatgttcaaatttgaactcacccgccgtctggagcacgactttggcaaggtgacaaagcaggaagtcaaagagttcttccgctgggcgcaggatcacgtgaccgaggtggcgcatgagttctacgtcagaaagggtggagccaacaagagacccgcccccgatgacgcggataaaagcgagcccaagcgggcctgcccctcagtcgcggatccatcgacgtcagacgcggaaggagctccggtggactttgccgacaggtaccaaaacaaatgttctcgtcacgcgggcatgcttcagatgctgtttccctgcaagacatgcgagagaatgaatcagaatttcaacatttgcttcacgcacgggaccggagactgttcagaatgtttccccggcgtgtcagaatctcaaccggtcgtcagaaagaggacgtatcggaaactctgtgccattcatcatctgctggggcgggctcccgagattgcttgctcggcctgcgatctggtcaacgtggacctggatgactgtgtttctgagcaataaatgacttaaaccaggtatggctgccgatggttatcttccagattggctcgaggacaacctctctgagggcattcgcgagtggtgggacttgaaacctggagccccgaaacccaaagccaaccagcaaaagcaggacgacggccggggtctggtgcttcctggctacaagtacctcggacccttcaacggactcgacaagggagagccggtcaacgcggcggacgcagcggccctcgagcacgacaaggcctacgaccagcagctcaaagcgggtgacaatccgtacctgcggtataaccacgccgacgccgagtttcaggagcgtcttcaagaagatacgtcttttgggggcaacctcgggcgagcagtcttccaggccaagaagcgggttctcgaacctctcggtctggttgaggaaggcgctaagacggctcctggaaagaagagacccatagaatcccccgactcctccacgggcatcggcaagaaaggccagcagcccgctaaaaagaagctcaactttgggcagactggcgactcagagtcagtgcccgaccctcaaccaatcggagaaccccccgcaggcccctctggtctgggatctggtacaatggctgcaggcggtggcgctccaatggcagacaataacgaaggcgccgacggagtgggtaatgcctccggaaattggcattgcgattccacatggctgggcgacagagtcatcaccaccagcacccgcacctgggccctgcccacctacaacaaccacctctacaagcagatatcaagtcagagcggggctaccaacgacaaccacttcttcggctacagcaccccctggggctattttgacttcaacagattccactgccacttctcaccacgtgactggcagcgactcatcaacaacaactggggattccggcccagaaagctgcggttcaagttgttcaacatccaggtcaaggaggtcacgacgaacgacggcgttacgaccatcgctaataaccttaccagcacgattcaggtcttctcggactcggagtaccaactgccgtacgtcctcggctctgcgcaccagggctgcctccctccgttccctgcggacgtgttcatgattcctcagtacggatatctgactctaaacaacggcagtcagtctgtgggacgttcctccttctactgcctggagtactttccttctcagatgctgagaacgggcaataactttgaattcagctacacctttgaggaagtgcctttccacagcagctatgcgcacagccagagcctggaccggctgatgaatcccctcatcgaccagtacctgtactacctggcccggacccagagcactacggggtccacaagggagctgcagttccatcaggctgggcccaacaccatggccgagcaatcaaagaactggctgcccggaccctgttatcggcggcagagactgtcaaaagacatagacagcaacaacaacagtaactttgcctggaccggggccactaaataccatctgaatggtagaaattcattaaccaacccgggcgtagccatggccaccaacaaggacgacgaggaccagttctttcccatcaacggagtgctggtttttggcaaaacgggggctgccaacaagacaacgctggaaaacgtgctaatgaccagcgaggaggagatcaaaaccaccaatcccgtggctacagaagaatacggtgtggtctccagcaacctgcaatcgtctacggccggaccccagacacagactgtcaacagccagggggctctgcccggcatggtctggcagaaccgggacgtgtacctgcagggtcccatctgggccaaaattcctcacacggacggcaactttcacccgtctcccctgatgggcggatttggactcaaacacccgcctcctcaaattctcatcaaaaacaccccggtacctgctaatcctccagaggtgtttactcctgccaagtttgcctcatttatcacgcagtacagcaccggccaggtcagcgtggagatcgagtgggaactgcagaaagagaacagcaaacgctggaatccagagattcagtacacctcaaattatgccaagtctaataatgtggaatttgctgtcaacaacgaaggggtttatactgagcctcgccccattggcacccgttacctcacccgtaacctgtaattacttgttaatcaataaaccggttgattcgtttcagttgaactttggtctctgcgaagggcgaattc

SEQ ID NO: 424 - protein, 685 aa, Artificial Sequence
  source: /note="Description of Artificial Sequence: Synthetic polypeptide"
MAADGYLPDWLEDNLSEGIREWWDLKPGAPKPKANQQKQDDGRGLVLPGYKYLGPFNGLDKGEPVNEADAAALEHDKAYDKQLEQGDNPYLKYNHADAEFQERLQEDTSFGGNLGRAVFQAKKRVLEPLGLVEEGAKTAPGKKRPVEPSPQRSPDSSTGIGKTGQQPAKKRLNFGQTGDSESVPDPQPIGEPPAGPSGLGSGTMAAGGGAPMADNNEGADGVGSSSGNWHCDSTWLGDRVITTSTRTWALPTYNNHLYKQISNGTSGGSTNDNTYFGYSTPWGYFDFNRFHCHFSPRDWQRLINNNWGFRPKRLNFKLFNIQVKEVTQNEGTKTIANNLTSTIQVFTDSEYQLPYVLGSAHQGCLPPFPADVFMIPQYGYLTLNNGSQAVGRSSFYCLEYFPSQMLRTGNNFEFSYQFEDVPFHSSYAHSQSLDRLTNPLIDQYLYYLARTQSTTGSTRGLQFHQAGPNTMAEQSKNWLPGPCYRQQRLSKNIDSNNNSNFAWTGATKYHLNGRNSLTNPGVAMATNKDDEDQFFPINGVLVFGKTGAANKTTLENVLMTSEEEIKTTNPVATEEYGVVSSNLQSSTAGPQTQTVNSQGALPGMVWQNRDVYLQGPIWAKIPHTDGNFHPSPLMGGFGLKHPPPQILIKYTSNYYKSTNVDFAVNTEGTYSEPRPIGTRYLTRNL

SEQ ID NO: 425 - DNA, 2969 bp, Artificial Sequence
  source: /note="Description of Artificial Sequence: Synthetic polynucleotide"
gaattcgccctttctacggctgcgtcaactggaccaatgagaactttcccttcaacgattgcgtcgacaagatggtgatctggtgggaggagggcaagatgacggccaaggtcgtggagtccgccaaggccattctcggcggcagcaaggtgcgcgtggaccaaaagtgcaagtcgtccgcccagatcgaccccacccccgtgatcgtcacctccaacaccaacatgtgcgccgtgattgacgggaacagcaccaccttcgagcaccagcagccgttacaagaccggatgttcaaatttgaactcacccgccgtctggagcacgactttggcaaggtgacaaagcaggaagtcaaagagttcttccgctgggcgcaggatcacgtgaccgaggtggcgcatgagttctacgtcagaaagggtggagccaacaagagacccgcccccgatgacgcggataaaagcgagcccaagcgggcctgcccctcagtcgcggatccatcgacgtcagacgcggaaggagctccggtggactttgccgacaggtaccaaaacaaatgttctcgtcacgcgggcatgcttcagatgctgtttccctgcaagacatgcgagagaatgaatcagaatttcaacatttgcttcacgcacgggaccagagactgttcagaatgtttccccggcgtgtcagaatctcaaccggtcgtcagaaagaggacgtatcggaaactctgtgccattcatcatctgctggggcgggctcccgagattgcttgctcggcctgcgatctggtcaacgtggacctggatgactgtgtttctgagcaataaatgacttaaaccaggtatggctgccgatggttatcttccagattggctcgaggacaacctctctgagggcatccgcgagtggtgggacttgaaacctggagccccgaaacccaaagccaaccagcaaaagcaggacgacggccggggtctggtgcttcctggctacaagtacctcggacccttcaacggactcgacaagggagagccggtcaacgaggcagacgccgcggccctcgagcacgacaaggcctacgacaagcagctcgagcagggggacaacccgtacctcaagtacaaccacgccgacgccgagtttcaggagcgtcttcaagaagatacgtcttttgggggcaacctcgggcgagcagtcttccaggccaagaagcgggttctcgaacctctcggtctggttgaggaaggcgctaagacggctcctggaaagaagagaccggtagagccatcaccccagcgttctccagactcctctacgggcatcggcaagacaggccagcagcccgcgaaaaagagactcaactttgggcagactggcgactcagagtcagtgcccgaccctcaaccaatcggagaaccccccgcaggcccctctggtctgggatctggtacaatggctgcaggcggtggcgctccaatggcagacaataacgaaggcgccgacggagtgggtagttcctcaggaaattggcattgcgattccacatggctgggcgacagagtcatcaccaccagcacccgaacctgggccctccccacctacaacaaccacctctacaagcaaatctccaacgggacatcgggaggaagcaccaacgacaacacctacttcggctacagcaccccctgggggtattttgactttaacagattccactgccacttctcaccacgtgactggcagcgactcatcaacaacaactggggattccggcccaagagactcaacttcaagctcttcaacatccaggtcaaggaggtcacgcagaatgaaggcaccaagaccatcgccaataaccttaccagcacgattcaggtctttacggactcggaataccagctcccgtacgtcctcggctctgcgcaccagggctgcctgcctccgttcccggcggacgtcttcatgattcctcagtacgggtacctgactctgaacaacggcagtcaggccgtgggccgttcctccttctactgcctggagtactttccttctcaaatgctgagaacgggcaacaactttgagttcagctaccagtttgaggacgtgccttttcacagcagctacgcgcacagccaaagcctggaccggctgacgaaccccctcatcgaccagtacctgtactacctggcccggacccagagcactacggggtccacaagggggctgcagttccatcaggctgggcccaacaccatggccgagcaatcaaagaactggctgcccggaccctgttatcggcagcagagactgtcaaaaaacatagacagcaacaacaacagtaactttgcctggaccggggccactaaataccatctgaatggtagaaattcattaaccaacccgggcgtagccatggccaccaacaaggacgacgaggaccagttctttcccatcaacggagtgctggtttttggcaaaacgggggctgccaacaagacaacgctggaaaacgtgctaatgaccagcgaggaggagatcaaaaccaccaatcccgtggctacagaagaatacggtgtggtctccagcaacctgcaatcgtctacggccggaccccagacacagactgtcaacagccagggggctctgcccggcatggtctggcagaaccgggacgtgtacctgcagggtcccatctgggccaaaattcctcacacggacggcaactttcacccgtctcccctgatgggcggatttggactcaaacacccgcctcctcaaattctcatcaagtatacttccaactactacaaatctacaaatgtggactttgctgtcaatactgagggtacttattcagagcctcgccccattggcacccgttacctcacccgtaacctgtaattgcctgttaatcaataaaccggttaattcgtttcagttgaactttggtctctgcgaagggcgaattc

SEQ ID NO: 426 - protein, 733 aa, Artificial Sequence
  source: /note="Description of Artificial Sequence: Synthetic polypeptide"
MAADGYLPDWLEDNLSEGIREWWDLKPGAPKPKANQQKQDDGRGLVLPGYKYLGPFNGLDKGEPVNAADAAALEHDKAYDQQLKAGDNPYLRYNHADAEFQERLQEDTSFGGNLGRAVFQAKKRVLEPLGLVEEGAKTAPGKKRPIESPDSSTGIGKKGQQPAKKKLNFGQTGDSESVPDPQPIGEPPAGPSGLGSGTMAAGGGAPMADNNEGADGVGSSSGNWHCDSTWLGDRVITTSTRTWALPTYNNHLYKQISNGTSGGSTNDNTYFGYSTPWGYFDFNRFHCHFSPRDWQRLINNNWGFRPKRLNFKLFNIQVKEVTQNEGTKTIANNLTSTIQVFTDSEYQLPYVLGSAHQGCLPPFPADVFMIPQYGYLTLNNGSQAVGRSSFYCLEYFPSQMLRTGNNFEFSYQFEDVPFHSSYAHSQSLDRLMNPLIDQYLYYLSRTQSTGGTAGTQQLLFSQAGPNNMSAQAKNWLPGPCYRQQRVSTTVSQNNNSNFAWTGATKYHLNGRDSLVNPGVAMATHKGDEERFFPSSGVLMFGKQGAGKDNVDYSSVMLTSEEEIKTTNPVATEQYGVVADNLQQQNAAPIVGAVNSQGALPGMVWQNRDVYLQGPIWAKIPHTDGNFHPSPLMGGFGLKHPPPQILIKNTPVPADPPTTFSQAKLASFITQYSTGQVSVEIEWELQKENSKRWNPEIQYTSNYYKSTNVDFAVNTEGTYSEPRPIGTRYLTRSL

SEQ ID NO: 427 - DNA, 3113 bp, Artificial Sequence
  source: /note="Description of Artificial Sequence: Synthetic polynucleotide"
gaattcgccctttctacggctgcgtcaactggaccaatgagaactttcccttcaacgattgcgtcgacaagatggtgatctggtgggaggagggcaagatgacggccaaggtcgtggagtccgccaaggccattctcggcggcagcaaggtgcgcgtggaccaaaagtgcaagtcgtccgcccagatcgatcccacccccgtgatcgtcacttccaacaccaacatgtgcgccgtgattgacgggaacagcaccaccttcgagcaccagcagccgttacaagaccggatgttcaaatttgaactcacccgccgtctggagcatgactttggcaaggtgacaaagcaggaagtcaaagagttcttccgctgggcgcaggatcacgtgaccgaggtggcgcatgagttctacgtcagaaagggtggagccaacaagagacccgcccccgatgacgcggataaaagcgagcccaagcgggcctgcccctcagtcgcggatccatcgacgtcagacgcggaaggagctccggtggactttgccgacaggtaccaaaacaaatgttctcgtcacgcgggcatgcttcagatgctgtttccctgcaagacatgcgagagaatgaatcagaatttcaacatttgcttcacgcacgggaccagagactgttcagaatgtttccccggcgtgtcagaatctcaaccggtcgtcagaaagaggacgtatcggaaactctgtgccattcatcatctgctggggcgggctcccgagattgcttgctcggcctgcgatctggtcaacgtggacctggatgactgtgtttctgagcaataaatgacttaaaccaggtatggctgccgatggttatcttccagattggctcgaggacaacctctctgagggcattcgcgagtggtgggacttgaaacctggagccccgaaacccaaagccaaccagcaaaagcaggacgacggccggggtctggtgcttcctggctacaagtacctcggacccttcaacggactcgacaagggggagcccgtcaacgcggcggacgcagcggccctcgagcacgacaaggcctacgaccagcagctcaaagcgggtgacaatccgtacctgcggtataaccacgccgacgccgagtttcaggagcgtcttcaagaagatacgtcttttgggggcaacctcgggcgagcagtcttccaggccaagaagcgggttctcgaacctctcggtctggttgaggaaggcgctaagacggctcctggaaagaagagacccatagaatcccccgactcctccacgggcatcggcaagaaaggccagcagcccgctaaaaagaagctcaactttgggcagactggcgactcagagtcagtgcccgaccctcaaccaatcggagaaccccccgcaggcccctctggtctgggatctggtacaatggctgcaggcggtggcgctccaatggcagacaataacgaaggcgccgacggagtgggtagttcctcaggaaattggcattgcgattccacatggctgggcgacagagtcatcaccaccagcacccgaacctgggccctccccacctacaacaaccacctctacaagcaaatctccaacgggacatcgggaggaagcaccaacgacaacacctacttcggctacagcaccccctgggggtattttgactttaacagattccactgccacttctcaccacgtgactggcagcgactcatcaacaacaactggggattccggcccaagagactcaacttcaagctcttcaacatccaggtcaaggaggtcacgcagaatgaaggcaccaagaccatcgccaataaccttaccagcacgattcaggtctttacggactcggaataccagctcccgtacgtcctcggctctgcgcaccagggctgcctgcctccgttcccggcggacgtcttcatgattcctcagtacgggtacctgactctgaacaacggcagtcaggccgtgggccgttcctccttctactgcctggagtactttccttctcaaatgctgagaacgggcaacaactttgagttcagctaccagtttgaggacgtgccttttcacagcagctatgcgcacagccaaagcctggaccggctgatgaaccccctcatcgaccagtacctgtactacctgtctcggactcagtccacgggaggtaccgcaggaactcagcagttgctattttctcaggccgggcctaataacatgtcggctcaggccaaaaactggctacccgggccctgctaccggcagcaacgcgtctccacgacagtgtcgcaaaataacaacagcaactttgcttggaccggtgccaccaagtatcatctgaatggcagagactctctggtaaatcccggtgtcgctatggcaacgcacaagggcgacgaagagcgattttttccatccagcggagtcttgatgtttgggaaacagggagctggaaaagacaacgtggactatagcagcgttatgctaaccagtgaggaagaaatcaaaaccaccaacccagtggccacagaacagtacggcgtggtggccgataacctgcaacagcaaaacgccgctcctattgtaggggccgtcaacagtcaaggagccttacctggcatggtctggcagaaccgggacgtgtacctgcagggtcctatctgggccaagattcctcacacggacggcaactttcatccttcgccgctgatgggaggctttggactgaaacacccgcctcctcagatcctgattaagaatacacctgttcccgcggatcctccaactaccttcagtcaagccaagctggcgtcgttcatcacgcagtacagcaccggacaggtcagcgtggaaattgaatgggagctgcagaaagagaacagcaagcgctggaacccagagattcagtatacttccaactactacaaatctacaaatgtggactttgctgtcaatactgagggtacttattcagagcctcgccccattggcacccgttacctcacccgtagcctgtaattgcctgttaatcaataaaccggttgattcgtttcagttgaactttggtctctgcgaagggcgaattc

SEQ ID NO: 428 - protein, 738 aa, Artificial Sequence
  source: /note="Description of Artificial Sequence: Synthetic polypeptide"
MAADGYLPDWLEDNLSEGIREWWDLKPGAPKPKANQQKQDDGRGLVLPGYKYLGPFNGLDKGEPVNAADAAALEHDKAYDQQLKAGDNPYLRYNHADAEFQERLQEDTSFGGNLGRAVFQAKKRVLEPLGLVEEGAKTAPGKKRPVEPSPQRSPDSSTGIGKTGQQPAKKRLNFGQTGDSESVPDPQPIGEPPAGPSGLGSGTMAAGGGAPMADNNEGADGVGSSSGNWHCDSTWLGDRVITTSTRTWALPTYNNHLYKQISNGTSGGSTNDNTYFGYSTPWGYFDFNRFHCHFSPRDWQRLINNNWGFRPKRLNFKLFNIQVKEVTQNEGTKTIANNLTSTIQVFTDSEYQLPYVLGSAHQGCPPPFPADVFMIPQYGYLTLNNGSQAVGRSSFYCLEYFPSQMRRTGNNFEFSYQFEDVPFHSSYAHSQSLDRLMNPLIDQYLYYLSRTQSTGGTAGTQQLLFSQAGPNNMSAQAKNWLPGPCYRQQRVSTTLSQNNNSNFAWTGATKYHLNGRDSLVNPGVAMATHKDDEERFFPSSGVLMFGKQGAGKDNVDYSSVMLTSEEEIKTTNPVATEQYGVVADNLQQQNAAPIVGAVNSQGALPGMVWQNRDVYLQGPIWAKIPHTDGNFHPSPLMGGFGLKHPPPQILIKNTPVPADPPTTFSQAKLASFITQYSTGQVSVEIEWELQKENSKRWNPEIQYTSNYYKSTNVDFAVNTEGTYSEPRPIGTRYLTRNL

SEQ ID NO: 429 - DNA, 3128 bp, Artificial Sequence
  source: /note="Description of Artificial Sequence: Synthetic polynucleotide"
gaattcgccctttctacggctgcgtcaactggaccaatgagaactttcccttcaacgattgcgtcgacaagatggtgatctggtgggaggagggcaagatgacggccaaggtcgtggagtccgccaaggccattctcggcggcagcaaggtgcgcgtggaccaaaagtgcaagtcgtccgcccagatcgaccccacccccgtgatcgtcacctccaacaccaacatgtgcgccgtgattgacgggaacagcaccaccttcgagcaccagcagccgttgcaggaccggatgttcaaatttgaactcacccgccgtctggagcatgactttggcaaggtgacaaagcaggaagtcaaagagttcttccgctgggcgcaggatcacgtgaccgaggtggcgcatgagttctacgtcagaaagggtggagccaacaagagacccgcccccgatgacgcggataaaagcgagcccaagcgggcctgcccctcagtcgcggatccatcgacgtcagacgcggaaggagctccggtggactttgccgacaggtaccaaaacaaatgttctcgtcacgcgggcatgcttcagatgctgtttccctgcaagacatgcgagagaatgaatcagaatttcaacatttgcttcacgcgcgggaccagagactgttcagaatgtttcccgggcgtgtcagaatctcaaccggtcgtcagaaagaggacgtatcggaaactctgtgccattcatcatctgctggggcgggctcccgagattgcttgctcggcctgcgatctggtcaacgtggacctggatgactgtgtttctgagcaataaatgacttaaaccaggtatggctgccgatggttatcttccagattggctcgaggacaacctctctgagggcattcgcgagtggtgggacttgaaacctggagccccgaaacccaaagccaaccagcaaaagcaggacgacggccggggtctggtgcttcctggctacaagtacctcggacccttcaacggactcgacaagggggagcccgtcaacgcggcggacgcagcggccctcgagcacgacaaggcctacgaccagcagctcaaagcgggtgacaatccgtacctgcggtataaccacgccgacgccgagtttcaggagcgtctgcaagaagatacgtcttttgggggcaacctcgggcgagcagtcttccaggccaagaagcgggttctcgaacctctcggtctggttgaggaaggcgctaagacggctcctggaaagaagagaccggtagagccatcaccccagcgttctccagactcctctacgggcatcggcaagacaggccagcagcccgcgaaaaagagactcaactttgggcagactggcgactcagagtcagtgcccgaccctcaaccaatcggagaaccccccgcaggcccctctggtctgggatctggtacaatggctgcaggcggtggcgctccaatggcagacaataacgaaggcgccgacggagtgggtagttcctcaggaaattggcattgcgattccacatggctgggcgacagagtcatcaccaccagcacccgaacctgggccctccccacctacaacaaccacctctacaagcaaatctccaacgggacatcgggaggaagcaccaacgacaacacctacttcggctacagcaccccctgggggtattttgactttaacagattccactgccacttctcaccacgtgactggcagcgactcatcaacaacaactggggattccggcccaagagactcaacttcaagctcttcaacatccaggtcaaggaggtcacgcagaatgaaggcaccaagaccatcgccaataaccttaccagcacgattcaggtctttacggactcggaataccagctcccgtacgtcctcggctctgcgcaccagggctgcccgcctccgttcccggcggacgtcttcatgattcctcagtacgggtacctgactctgaacaacggcagtcaggccgtgggccgttcctccttctactgcctggagtactttccttctcaaatgcggagaacgggcaacaactttgagttcagctaccagtttgaggacgtgccttttcacagcagctacgcgcatagccaaagcctggaccggctgatgaaccccctcatcgaccagtacctgtactacctgtctcggactcagtccacgggaggtaccgcaggaactcagcagttgctattttctcaggccgggcctaataacatgtcggctcaggccaaaaactggctacccgggccctgctaccggcagcaacgcgtctccacgacactgtcgcaaaataacaacagcaactttgcttggaccggtgccaccaagtatcatctgaatggcagagactctctggtaaatcccggtgtcgctatggcaacgcacaaggacgacgaagagcgattttttccatccagcggagtcttgatgtttgggaaacagggagctggaaaagacaacgtggactatagcagcgttatgctaaccagtgaggaagaaatcaaaaccaccaacccagtggccacagaacagtacggcgtggtggccgataacctgcaacagcaaaacgccgctcctattgtaggggccgtcaacagtcaaggagccttacctggcatggtctggcagaaccgggacgtgtacctgcagggtcctatctgggccaagattcctcacacggacggcaactttcatccttcgccgctgatgggaggctttggactgaaacacccgcctcctcagatcctgattaagaatacacctgttcccgcggatcctccaactaccttcagtcaagccaagctggcgtcgttcatcacgcagtacagcaccggacaggtcagcgtggaaattgaatgggagctgcagaaagagaacagcaagcgctggaacccagagattcagtatacttccaactactacaaatctacaaatgtggactttgctgtcaatactgagggtacttattcagagcctcgccccattggcacccgttacctcacccgtaacctgtaattgcctgttaatcaataaaccggttaattcgtttcagttgaactttggtctctgcgaagggcgaattc

SEQ ID NO: 430 - protein, 738 aa, Artificial Sequence; identical to SEQ ID NO: 418
  source: /note="Description of Artificial Sequence: Synthetic polypeptide"

SEQ ID NO: 431 - DNA, 1933 bp, Artificial Sequence
  source: /note="Description of Artificial Sequence: Synthetic polynucleotide"
  modified_base (1302)..(1302): a, c, g or t
caaggcctacgaccagcagctcaaagcgggtgacaatccgtacctgcggtataaccacgccgacgccgagtttcaggagcgtcttcaagaagatacgtcttttgggggcaacctcgggcgagcagtcttccaggccaaaaagcgggttctcgaacctcttggtctggttgagacgccagctaagacggcacctggaaagaagcgaccggtagactcgccagactccacctcgggcatcggcaagaaaggccagcagcccgcgaaaaagagactcaactttgggcagactggcgactcagagtcagtccccgaccctcaaccaatcggagaaccaccagcaggcccctctggtctgggatctggtacaatggctgcaggcggtggcgcaccaatggctgacaataacgagggcgccgacggagtgggtaatgcctcaggaaattggcattgcgattccacatggctgggcgacagagtcatcaccaccagcacccgaacctgggccctgcccacctacaacaaccacctctacaagcaaatctccagtcagtcagcagggagcaccaacgataacgtctatttcggctacagcaccccctgggggtattttgacttcaacagattccattgccacttctcaccacgtgactggcagcgacttatcaacaacaactggggattccggcccaagaagctcaacttcaagctcttcaacatccaggtcaaggaggtcacgacgaatgacggtgtcacaaccatcgctaataaccttaccagcacggttcaggtcttttcggactcggaatatcaactgccgtacgtcctcggctccgcgcaccagggctgcctgcctccgttcccggcagacgtgttcatgattccgcagtacggatacctgactctgaacaatggcagccaatcggtaggccgttcctccttctactgcctggagtactttccttctcagatgctgagaacgggcaacaacttcacctttagctacaccttcgaggacgtgcctttccacagcagctacgcgcacagccagagtctggaccggctgatgaatcccctcatcgaccagtacctgtactacttggccagaacacagagcaacgcaggaggtactgctggcaatcgggaactgcagttttatcagggcggacctaccaccatggccgaacaagcaaagaactggctgcccggaccttgcttccggcaacagagagtatccaagacgctggatcaaaataacaacagcaactttgcctggactggtgccacaaaataccatttaaatgnaagaaattcattggttaatcccggtgtcgccatggcaacccacaaggacgacgaggaacgcttcttcccttcgagcggagttctaatttttggcaaaactggagcagctaataaaactacattagaaaacgtgctcatgacaaatgaagaagaaattcgtcctaccaacccggtagctaccgaggaatacgggattgtaagcagcaacttgcaggcggctagcaccgcagcccagacacaagttgttaacaaccagggagccttacctggcatggtctggcagaaccgggacgtgtacctgcaaggtcccatttgggccaagattcctcacacggacggcaactttcacccgtctcctctaatgggtggctttggactgaaacacccgcctccccagatcctgatcaaaaacacaccggtacctgctaatcctccagaagtgtttactcctgccaagtttgcttccttcatcacgcagtacagcaccgggcaagtcagcgttgagatcgagtgggagctgcagaaagagaacagcaagcgctggaacccagagattcagtacacctccaactttgacaaacagactggagtggactttgctgttgacagccagggtgtttactctgagcct

SEQ ID NO: 432 - protein, 733 aa, Artificial Sequence
  source: /note="Description of Artificial Sequence: Synthetic polypeptide"
MAADGYLPDWLEDNLSEGIREWWDLKPGAPKPKANQQKQDDGRGLVLPGYKYLGPFNGLDKGEPVNAADAAALEHDKAYDQQLKAGDNPYLRYNHADAEFQERLQEDTSFGGNLGRAVFQAKKRVLEPLGLVEEGAKTAPGKKRPLESPQEPDSSSGIGKKGKQPAKKRLNFEEDTGAGDGPPEGSDTSAMSSDIEMRAAPGGNAVDAGQGSDGVGNASGDWHCDSTWSEGKVTTTSTRTWVLPTYNNHLYLRLGTTSNSNTYNGFSTPWGYFDFNRFHCHFSPRDWQRLINNNWGLRPKAMRVKIFNIQVKEVTTSNGETTVANNLTSTVQIFADSSYELPYVMDAGQEGSLSPFPNDVFMVPQYGYCGIVTGENQNQTDRNAFYCLEYFPSQMLRTGNNFEMAYNFGKVPFHSMYAYSQSPDRLMNPLLDQYLWHLQSTTSGETLNQGNAATTFGKIRSGDFAFYRKNWLPGPCVKQQRLSKTASQNYKIPASGGNALLKYDTHYTLNNRWSNIAPGPPMATAGPSDGDFSNAQLIFPGPSVTGNTTTSANNLLFTSEEEIAATNPRDTDMFGQIADNNQNATTAPITGNVTAMGVLPGMVWQNRDIYYQGPIWAKIPHADGHFHPSPLIGGFGLKHPPPQIFIKNTPVPANPATTFTAARVDSFITQYSTGQVAVQIEWEIEKERSKRWNPEVQFTSNYGNQSSMLWAPDTTGKYTEPRVIGSRYLTNHL

SEQ ID NO: 433 - DNA, 3105 bp, Artificial Sequence
  source: /note="Description of Artificial Sequence: Synthetic polynucleotide"
gaattcgcccttgctgcgtcaactggaccaatgagaactttcccttcaacgattgcgtcgacaagatggtgatctggtgggaggagggcaagatgaccgccaaggtcgtggagtccgccaaggccattctgggcggaagcaaggtgcgcgtggaccaaaagtgcaagtcatcggcccagatcgaccccacgcccgtgatcgtcacctccaacaccaacatgtgcgccgtgatcgacgggaacagcaccaccttcgagcaccagcagccgctgcaggaccgcatgttcaagttcgagctcacccgccgtctggagcacgactttggcaaggtgaccaagcaggaagtcaaagagttcttccgctgggctcaggatcacgtgactgaggtggcgcatgagttctacgtcagaaagggcggagccaccaaaagacccgcccccagtgacgcggatataagcgagcccaagcgggcctgcccctcagttgcggagccatcgacgtcagacgcggaagcaccggtggactttgcggacaggtaccaaaacaaatgttctcgtcacgcgggcatgcttcagatgctgtttccctgcaagacatgcgagagaatgaatcagaatttcaacgtctgcttcacgcacggggtcagagactgctcagagtgcttccccggcgcgtcagaatctcaacccgtcgtcagaaaaaagacgtatcagaaactgtgcgcgattcatcatctgctggggcgggcacccgagattgcgtgttcggcccgcgatctcgtcaacgtggacttggatgactgtgtttctgagcaataaatgacttaaaccaggtatggctgctgacggttatcttccagattggctcgaggacaacctctctgagggcattcgcgagtggtgggacctgaaacctggagcccccaagcccaaggccaaccagcagaagcaggacgacggccggggtctggtgcttcctggctacaagtacctcggacccttcaacggactcgacaagggggagcccgtcaacgcggcggacgcagcggccctcgagcacgacaaggcctacgaccagcagctcaaagcgggtgacaatccgtacctgcggtataaccacgccgacgccgagtttcaggagcgtctgcaagaagatacgtcttttgggggcaacctcgggcgagcagtcttccaggccaagaagagggtactcgaacctctgggcctggttgaagaaggtgctaagacggctcctggaaagaagagaccgttagagtcaccacaagagcccgactcctcctcaggaatcggcaaaaaaggcaaacaaccagccaaaaagagactcaactttgaagaggacactggagccggagacggaccccctgaaggatcagataccagcgccatgtcttcagacattgaaatgcgtgcagcaccgggcggaaatgctgtcgatgcgggacaaggttccgatggagtgggtaatgcctcgggtgattggcattgcgattccacctggtctgagggcaaggtcacaacaacctcgaccagaacctgggtcttgcccacctacaacaaccacttgtacctgcggctcggaacaacatcaaacagcaacacctacaacggattctccaccccctggggatactttgactttaacagattccactgtcacttctcaccacgtgactggcaaagactcatcaacaacaactggggactacgaccaaaagccatgcgcgttaaaatcttcaatatccaagttaaggaggtcacaacgtcgaacggcgagactacggtcgctaataaccttaccagcacggttcagatatttgcggactcgtcgtatgagctcccgtacgtgatggacgctggacaagagggaagtctgtctcctttccccaatgacgtcttcatggtgcctcaatatggctactgtggcattgtgactggcgaaaatcagaaccagacggacagaaatgctttctactgcctggagtattttccttcacaaatgctgagaactggcaataactttgaaatggcttacaactttgggaaggtgccgttccactcaatgtatgcttacagccagagcccggacagactgatgaatcccctcctggaccagtacctgtggcacttacagtcgaccacctctggagagactctgaatcaaggcaatgcagcaaccacatttggaaaaatcaggagtggagactttgccttttacagaaagaactggctgcctgggccttgtgttaaacagcagagactctcaaaaactgccagtcaaaattacaagattcctgccagcgggggcaacgctctgttaaagtatgacacccactataccttaaacaaccgctggagcaacatagcgcctggacctccaatggcaacagctggaccttcagatggggacttcagcaacgcccagctcatcttccctggaccatcagtcaccggaaacacaacaacctcagcaaacaatctgttgtttacatcagaagaagaaattgctgccaccaacccaagagacacggacatgtttggtcagattgctgacaataatcagaatgctacaactgctcccataaccggcaacgtgactgctatgggagtgcttcctggcatggtgtggcaaaacagagacatttactaccaagggccaatttgggccaagatcccacacgcggacggacattttcatccttcaccgctaattggcggttttggactgaaacatccgcctccccagatatttatcaaaaacacccccgtacctgccaatcctgcgacaaccttcactgcagccagagtggactctttcatcacacaatacagcaccggccaggtcgctgttcagattgaatgggaaatcgaaaaggaacgctccaaacgctggaatcctgaagtgcagtttacttcaaactatgggaaccagtcttctatgttgtgggctcccgatacaactgggaagtatacagagccgcgggttattggctctcgttatttgactaatcatttgtaactgcctagttaatcaataaaccgtgtgattcgtttcagttgaactttggtctctgcgaagggcgaattc

SEQ ID NO: 434 - protein, 733 aa, Artificial Sequence
  source: /note="Description of Artificial Sequence: Synthetic polypeptide"
MAADGYLPDWLEDNLSEGIREWWDLKPGAPKPKANQQKQDDGRGLVLPGYKYLGPFNGLDKGEPVNAADAAALEHDKAYDQQLKAGDNPYLRYNHADAEFQERLQEDTSFGGNLGRAVFQAKKRVLEPLGLVEEGAKTAPGKKRPLESPQEPDSSSGIGKKGKQPAKKRLNFEEDTGAGDGPPEGSDTSAMSSDIEMRAAPGGNAVDAGQGSDGVGNASGDWHCDSTWSEGKVTTTSTRTWVLPTYNNHLYLRLGTTSNSNTYNGFSTPWGYFDFNRFHCHFSPRDWQRLINNNWGLRPKAMRVKIFNIQVKEVTTSNGETTVANNLTSTVQIFADSSYELPYVMDAGQEGSLPPFPNDVFMVPQYGYCGIVTGENQNQTDRNAFYCLEYFPSQMLRTGNNFEMAYNFEKVPFHSMYAHSQSLDRLMNPLLDQYLWHLQSTTSGETLNQGNAATTFGKIRSGDFAFYRKNWLPGPCVKQQRFSKTASQNYKIPASGGNALLKYDTHYTLNNRWSNIAPGPPMATAGPSDGDFSNAQLIFPGPSVTGNTTTSANNLLFTSEEEIAATNPRDTDMFGQIADNNQNATTAPITGNVTAMGVLPGMVWQNRDIYYQGPIWAKIPHADGHFHPSPLIGGFGLKHPPPQIFIKNTPVPANPATTFTAARVDSFITQYSTGQVAVQIEWEIEKERSKRWNPEVQFTSNYGNQSSMLWAPDTTGKYTEPRVIGSRYLTNHL

SEQ ID NO: 435 - DNA, 3105 bp, Artificial Sequence
  source: /note="Description of Artificial Sequence: Synthetic polynucleotide"
gaattcgcccttgctgcgtcaactggaccaatgagaactttcccttcaacgattgcgtcgacaagatggtgatctggtgggaggagggcaagatgaccgccaaggtcgtggagtccgccaaggccattctgggcggaagcaaggtgcgcgtggaccaaaagtgcaagtcatcggcccagatcgaccccacgcccgtgatcgtcacctccaacaccaacatgtgcgccgtgatcgacgggaacagcaccaccttcgagcaccagcagccgctgcaggaccgcatgttcaagttcgagctcacccgccgtctggagcacgactttggcaaggtgaccaagcaggaagtcaaagagttcttccgctgggctcaggatcacgtgactgaggtggcgcatgagttctacgtcagaaagggcggagccaccaaaagacccgcccccagtgacgcggatataagcgagcccaagcgggcctgcccctcagttgcggagccatcgacgtcagacgcggaagcaccggtggactttgcggacaggtaccaaaacaaatgttctcgtcacgcgggcatgcttcagatgctgtttccctgcaagacatgcgagagaatgaatcagaatttcaacgtctgcttcacgcacggggtcagagactgctcagagtgcttccccggcgcgtcagaatctcaacccgtcgtcagaaaaaagacgtatcagaaactgtgcgcgattcatcatctgctggggcgggcacccgagattgcgtgttcggcctgcgatctcgtcaacgtggacttggatgactgtgtttctgagcaataaatgacttaaaccaggtatggctgctgacggttatcttccagattggctcgaggacaacctctctgagggcattcgcgagtggtgggacctgaaacctggagcccccaagctcaaggccaaccagcagaagcaggacgacggccggggtctggtgcttcctggctacaagtacctcggacccttccacggactcgacaagggggagcccgtcaacgcggcggacgcagcggccctcgagcacgacaaggcctacgaccagcagctcaaagcgggtgacaatccgtacctgcggtataaccacgccgacgccgagtttcaggagcgtctgcaagaagatacgtcttttgggggcaacctcgggcgagcagtcttccaggccaagaagagggtactcgaaccactgggcctggttgaagaaggtgctaagacggctcctggaaagaagagaccgttagagtcaccacaagagcccgactcctcctcaggaatcggcaaaaaaggcaaacaaccagccaaaaagagactcaactttgaagaggacactggagccggagacggaccccctgaaggatcagataccagcgccatgtcttcagacattgaaatgcgtgcagcaccgggcggaaatgctgtcgatgcgggacaaggttccgatggagtgggtaatgcctcgggtgattggcattgcgattccacctggtctgagggcaaggtcacaacaacctcgaccagaacctgggtcttgcccacctacaacaaccacttgtacctgcggctcggaacaacatcaaacagcaacacctacaacggattctccaccccctggggatactttgactttaacagattccactgtcacttctcaccacgtgactggcaaagactcatcaacaacaactggggactacgaccaaaagccatgcgcgttaaaatcttcaatatccaagttaaggaggtcacaacgtcgaacggcgagactacggtcgctaataaccttaccagcacggttcagatatttgcggactcgtcgtatgagctcccgtacgtgatggacgctggacaagagggaagtctgcctcctttccccaatgacgtcttcatggtgcctcaatatggctactgtggcattgtgactggcgaaaatcagaaccagacggacagaaatgctttctactgcctggagtattttccttcacaaatgctgagaactggcaataactttgaaatggcttacaactttgagaaggtgccgttccactcaatgtatgctcacagccagagcctggacagactgatgaatcccctcctggaccagtacctgtggcacttacagtcgaccacctctggagagactctgaatcaaggcaatgcagcaaccacatttggaaaaatcaggagtggagactttgccttttacagaaagaactggctgcctgggccttgtgttaaacagcagagattctcaaaaactgccagtcaaaattacaagattcctgccagcgggggcaacgctctgttaaagtatgacacccactataccttaaacaaccgctggagcaacatagcgcctggacctccaatggcaacagctggaccttcagatggggacttcagcaacgcccagctcatcttccctggaccatcagtcaccggaaacacaacaacctcagcaaacaatctgttgtttacatcagaaggagaaattgctgccaccaacccaagagacacggacatgtttggtcagattgctgacaataatcagaatgctacaactgctcccataaccggcaacgtgactgctatgggagtgcttcctggcatggtgtggcaaaacagagacatttactaccaagggccaatttgggccaagatcccacacgcggacggacattttcatccttcaccgctaattggcggttttggactgaaacatccgcctccccagatatttatcaaaaacacccccgtacctgccaatcctgcgacaaccttcactgcagccagagtggactctttcatcacacaatacagcaccggccaggtcgctgttcagattgaatgggaaatcgaaaaggaacgctccaaacgccggaatcctgaagtgcagtttacttcaaactatgggaaccagtcttctatgttgtgggctcccgatacaactgggaagtatacagagccgcgggttattggctctcgttatttgactaatcatttgtaactgcctagttaatcaataaaccgtgtgattcgtttcagttgaactttggtctctgcgaagggcgaattc

SEQ ID NO: 436 - protein, 733 aa, Artificial Sequence
  source: /note="Description of Artificial Sequence: Synthetic polypeptide"
MAADGYLPDWLEDNLSEGIREWWDLKPGAPKPKANQQKQDDGRGLVLPGYEYLGPFNGLDKGEPVNAADAAALEHDKAYDQQLKAGDNPYLRYNHADAEFQERLQEDTSFGGNLGRAVFQAKKRVLEPLGLVEEGAKTAPGKKRPLESPQEPDSSSGIGKKGKQPAKKRLNFEEDTGAGDGPPEGSDTSAMSSDIEMRAAPGGNAVDAGQGSDGVGNASGDWHCDSTWSEGKVTTTSTRTWVLPTYNNHLYLRLGTTSNSNTYNGFSTPWGYFDFNRFHCHFSPRDWQRLINNNWGLRPKAMRVKIFNIQVKEVTTSNGETTVANNLTSTVQIFADSSYELPYVMDAGQEGSLPPFPNDVFMVPQYGYCGIVTGENQNQTDRNAFYCLEYFPSQMLRTGNNFETAYNFEKVPFHSMYAHSQSLDGLMNPLLDQYLWHLQSTTSGETLNQGNAATTFGKIRSGDFAFYRKNWLPGPCVKQQRFSKTASQNYKIPASGGNALLKYDTHYTLNNRWSNIAPGPPMATAGPSDGDFSNAQLIFPGPSVTGNTTTSANNLLFTSEEEIAATNPRDTDMFGQIADNNQNATTAPITGNVTAMGVLPGMVWQNRDIYYQGPIWAKIPHADGHFHPSPLIGGFGLKHPPPQIFIKNTPVPAYPATTFTAARVDSFITQYSTGQVAVQIEWEIEKERSKRWNPEVQFTSNCGNQSSMLWAPDTTGKYTEPRVIGSRYLTNHL

SEQ ID NO: 437 - DNA, 3105 bp, Artificial Sequence
  source: /note="Description of Artificial Sequence: Synthetic polynucleotide"
gaattcgcccttcgcagagaccaaagttcaactgaaacgaatcacacggtttattgattaactaggcagttacaaatgattagtcaaataacgagagccaataacccgcggctctgtatacttcccagttgtatcgggagcccacaacatagaagactggttcccacagtttgaagtaaactgcacttcaggattccagcgtttggagcgttccttttcgatttcccattcaatctgaacagcgacctggccggtgctgtattgtgtgatgaaagagtccactctggctgcagtgaaggttgtcgcaggataggcaggtacgggggtgtttttgataaatatctggggaggcggatgtttcagtccaaaaccgccaattagcggtgaaggatgaaaatgtccgtccgcgtgtgggatcttggcccaaattggcccttggtagtaaatgtctctgttttgccacaccatgccaggaagcactcccatagcagtcacgttgccggttatgggagcagttgtagcattctgattattgtcagcaatctgaccaaacatgtccgtgtctcttgggttggtggcagcaatttcttcttctgatgtaaacaacagattgtttgctgaggttgttgtgtttccggtgactgatggtccagggaagatgagctgggcgttgctgaagtccccatctgaaggtccagctgttgccattggaggtccaggcgctatgttgctccagcggttgtttaaggtatagtgggtgtcatactttaacagagcgttgcccccgctggcaggaatcttgtaattttgactggcagtttttgagaatctctgctgtttaacacaaggcccaggcagccagttctttctgtaaaaggcaaagtctccactcctgatttttccaaatgtggttgctgcattgccttgattcagagtctctccagaggtggtcgactgtaagtgccacaggtactggtccaggaggggattcatcagtccgtccaggctctggctgtgagcatacattgagtggaacggcaccttctcaaagttgtaagccgtttcaaagttattgccagttctcagcatttgtgaaggaaaatactccaggcagtagaaagcatttctgtccgtctggttctgattttcgccagtcacaatgccacagtagccatattgaggcaccatgaagacgtcattggggaaaggaggcagacttccctcttgtccagcgtccatcacgtacgggagctcatacgacgagtccgcaaatatctgaaccgtgctggtaaggttattagcgaccgtagtctcgccgttcgacgttgtgacctccttaacttggatattgaagattttaacgcgcatggcttttggtcgtagtccccagttgttgttgatgagtctttgccagtcacgtggtgagaagtgacagtggaatctgttaaagtcaaagtatccccagggggtggagaatccgttgtaggtgttgctgtttgatgttgttccgagccgcaggtacaagtggttgttgtaggtgggcaagacccaggttctggtcgaggttgttgtgaccttgccctcagaccaggtggaatcgcaatgccaatcacccgaggcattacccactccatcggaaccttgtcccgcatcgacagcatttccgcccggtgctgcacgcatttcaatgtctgaagacatggcgctggtatctgatccttcagggggtccgtctccggctccagtgtcctcttcaaagttgagtctctttttggctggttgtttgccttttttgccgattcctgaggaggagtcgggctcttgtggtgactctaacggtctcttctttccaggagccgtcttagcaccttcttcaaccaggcccagaggttcgagtaccctcttcttggcctggaagactgctcgcccgaggttgcccccaaaagacgtatcttcttgcagacgctcctgaaactcggcgtcggcgtggttataccgcaggtacggattgtcacccgctttgagctgctggtcgtaggccttgtcgtgctcgagggccgctgcgtccgccgcgttgacgggctcccccttgtcgagtccgttgaagggtccgaggtactcgtagccaggaagcaccagaccccggccgtcgtcctgcttctgctggttggccttgggcttgggggctccaggtttcaggtcccaccactcgcgaatgccctcagagaggttgtcctcgagccaatctggaagataaccgtcagcagccatacctggtttaagtcatttattgctcagaaacacagtcatccaagtccacgttgacgagatcgcaggccgaacacgcaatctcgggtgcccgccccagcagatgatgaatcgcgcacagtttctgatacgtcttttttctgacgacgggttgagattctgacgcgccggggaagcactctgagcagtctctgaccccgtgcgtgaagcagacgttgaaattctgattcattctctcgcatgtcttgcagggaaacagcatctgaagcatgcccgcgtgacgagaacatttgttttggtacctgtccgcaaggtccaccggtgcttccgcgtctgacgtcgatggctccgcaactgaggggcaggcccgcttgggctcgcttatatccgcgtcactgggggcgggtcttttggtggctccgccctttctgacgtagaactcatgcgccacctcagtcacgtgatcctgagcccagcggaagaactctttgacttcctgcttggtcaccttgccaaagtcgtgctccagacggcgggtgagctcgaacttgaacatgcggtcctgcagcggctgctggtgctcgaaggtggtgctgttcccgtcgatcacggcgcacatgttggtgttggaggtgacgatcacgggcgtggggtcgatctgggccgatgacttgcacttttggtccacgcgcaccttgcttccgcccagaatggccttggcggactccacgaccttggcggtcatcttgccctcctcccaccagatcaccatcttgtcgacgcaatcgttgaagggaaagttctcattggtccagttgacgcagcaagggcgaattc

SEQ ID NO: 438 - protein, 729 aa, Artificial Sequence
  source: /note="Description of Artificial Sequence: Synthetic polypeptide"
MAADGYLPDWLEDNLSEGIREWWDLKPGAPKPKANQQKQDDGRGLVLPGYKYLGPFNGLDKGEPVNAADAAALEHDKAYDQQLKAGDNPYLRYNHADAEFQERLQEDTSFGGNLGRAVFQAKKRVLEPLGLVEEGAKTAPGKKRPIDSPDSSTGIGKKGQQPAKKKLNFGQTGDSESVPDPQPLGEPPAAPSSVGSGTMAAGGGAPMADNNEGADGVGNASGNWHCDSTWLGDRVITTSTRTWALPTYNNHLYKQISSSSSGATNDNHYFGYSTPWGYFDFNRFHCHFSPRDWQRLINNNWGFRPKKLRFKLFNIQVKEVTTNDGVTTIANNLTSTVQVFSDSEYQLPYVLGSAHQGCLPPFPADVFMIPQYGYLTLNNGSQSVGRSSFYCLEYFPSQMLRTGNNFEFSYSFEDVPFHSSYAHSQSLDRLMNPLIDQYLYYLARTQSTTGSTRELQFHQAGPNTMAEQSKNWLPGPCYRQQGLSKNLDFNNNSNFAWTAATKYHLNGRNSLTNPGIPMATNKDDEDQFFPINGVLVFGKTGAANKTTLENVLMTSEEEIKTTNPVATEEYGVVSSNLQPSTAGPQSQTINSQGALPGMVWQNRDVYLQGPIWAKIPHTDGNFHPSPLMGGFGLKHPPPQILIKNTPVPANPPEVFTPAKFASFITQYSTGQVSVEIEWELQKENSKRWNPEIQYTSNYAKSNNVEFAVNPDGVYTEPRPIGTRYLPRNL

SEQ ID NO: 439 - DNA, 3094 bp, Artificial Sequence
  source: /note="Description of Artificial Sequence: Synthetic polynucleotide"
gaattcgcccttgctgcgtcaactggaccaagagaactttcccttcaacgattgcgtcgacaagatggtgatctggtgggaggagggcaagatgacggccaaggtcgtggagtccgccaaagccattctgggcggaagcaaggtgcgcgtcgaccaaaagtgcaagtcctcggcccagatcgatcccacccccgtgatcgtcacctccaacaccaacatgtgcgccgtgatcgacgggaacagcaccaccttcgagcaccagcagccgttgcaggaccggatgttcaaatttgaactcacccgccgtctggaacacgactttggcaaggtgaccaagcaggaagtcaaagagttcttccgctgggctagtgatcacgtgactgaggtgacgcatgagttctacgtcagaaagggcggagccagcaaaagacccgcccccgatgacgcggatataagcgagcccaagcgggcctgtccctcagtcacggacccatcgacgtcagacgcggaaggagctccggtggactttgccgacaggtaccaaaacaaatgttctcgtcacgcgggcatgcttcagatgctgtttccctgcaaaacgtgcgagagaatgaatcagaatttcaacatttgcttcacgcacggggtcagagactgtttagaatgtttccccggcgtgtcagaatctcaaccggtcgtcagaaaaaagacgtatcggaagctgtgtgcgattcatcatctgctggggcgggcacccgagattgcttgctcggcctgcgacctggtcaacgtggacctggacgactgtgtttctgagcaataaatgacttaaaccgggtatggctgccgatggttatcttccagattggctcgaggacaacctctctgagggcattcgcgagtggtgggacctgaaacctggagccccgaaacccaaagccaaccagcaaaagcaggacgacggccggggtctggtgcttcctggctacaagtacctcggacccttcaacggactcgacaagggggagcccgtcaacgcggcggacgcagcggccctcgagcacgacaaggcctacgaccagcagctcaaagcgggtgacaatccgtacctgcggtataaccacgccgacgccgagtttcaggagcgtctgcaagaagatacgtcatttgggggcaacctcgggcgagcagtcttccaggccaagaagcgggttctcgaacctctcggtctggttgaggaaggcgctaagacggctcctggaaagaagagacccatagactctccagactcctccacgggcatcggcaaaaaaggccagcagcccgctaaaaagaagctcaattttggtcagactggcgactcagagtcagtccccgaccctcaacctcttggagaacctccagcagcgccctctagtgtgggatctggtacaatggctgcaggcggtggcgcaccaatggcagacaataacgaaggtgccgacggagtgggtaatgcctcaggaaattggcattgcgattccacatggctgggcgacagagtcatcaccaccagcaccagaacctgggccctccccacctacaacaaccacctctacaagcaaatctccagcagcagctcaggagccaccaatgacaaccactacttcggctacagcaccccctgggggtattttgactttaacagattccactgccacttctcaccacgtgactggcagcgactcatcaacaacaactggggattccggcccaagaagctgcggttcaagctcttcaacatccaggtcaaggaggtcacaacgaatgacggcgtcacgaccatcgctaataaccttaccagcacggttcaggtcttctcggactcggaataccagctgccgtacgtcctcggctctgcgcaccagggctgcctgcctccgttcccggcggacgtcttcatgattcctcagtacggctacctgactctgaacaacggcagccaatcggtgggccgttcctccttctactgcctggaatatttcccctctcaaatgctgagaacgggcaacaactttgagttcagttacagcttcgaggacgtgcctttccacagcagctacgcgcacagccagagcctagaccggctgatgaaccctctcatcgaccagtacctgtactacctggcccggacccagagcaccacgggttccaccagggaactgcaatttcatcaagctgggcccaatactatggccgagcagtcaaagaactggctgcctggaccctgctataggcaacagggactgtcaaagaacttggactttaacaacaacagcaattttgcctggactgctgccactaaatatcatctgaatggcagaaactctttgaccaatcctggcattcccatggcaaccaacaaggatgatgaggaccagttctttcccatcaacggggtactggtttttggcaagacgggagctgccaacaaaactacgctggaaaacgttctgatgaccagcgaggaggagatcaagaccactaaccctgtggctacagaagaatacggtgtggtctccagcaacctgcagccgtctacagccgggcctcaatcacagactatcaacagccagggagcactgcctggcatggtctggcagaaccgggacgtgtatctgcagggtcccatctgggccaaaattcctcacacggatggcaactttcacccgtctcctctgatgggcggttttggactcaaacacccgcctccacagatcctgatcaaaaacacacctgtacctgctaatcctccggaggtgtttactcctgccaagtttgcctccttcatcacgcagtacagcaccggacaagtcagcgtggaaatcgagtgggagctgcagaaagaaaacagcaagcgctggaacccagaaattcagtatacttccaattatgccaagtctaataatgttgaatttgctgtgaaccctgatggtgtttatactgagcctcgccccattggcactcgttacctcccccgtaatctgtaattgcttgttaatcaataaaccggttgattcgtttcagttgaactttggtctctgcgaagggcgaattc

SEQ ID NO: 440 - protein, 1458 aa, Artificial Sequence
  source: /note="Description of Artificial Sequence: Synthetic polypeptide"
MAADGYLPDWLEDNLSEGIREWWDLKPGAPKPKANQQKQDDGRGLVLPGYKYLGPFNGLDKGEPVNAADAAALEHDKAYDQQLKAGDNPYLRYNHADAEFQERLQEDTSFGGNLGRAVFQAKKRVLEPLGLVEEGAKTAPGKKRPIDSPDSSTGIGKKGQQPAKKKLNFGQTGDSESVPDPQPLGEPPAAPSSVGSGTMAAGGGAPTADNNEGADGVGNASGNWHCDSTWLGDRVITTSTRTWALPTYNNHLYKQISSSSSGATNDNHYFGYSTPWGYFDFNRFHCHFSPRDWQRLINNNWGFRPKKLRFKLFNIQVKEVTTNDGVTTIANNLTSTVQVFSDSEYQLPYVLGSAHQGCLPPFPADVFMIPQYGYLTLNNGSQSVGRSSFYCLEYFPSQMLRTGNNFEFSYSFEDVPFHSSYAHSQSLDRLMNPLIDQYLYYLARTQSTTGSTRELQFHQAGPNTMAEQSKNWLPGPCYRQQRLSKNLDFNNNSNFAWTAATKYHLNGRNSLTNPGIPMATNKDDEDQFFPINGVLVFGKTGAANKTTLENVLMTSEEEIKTTNPVATEEYGVVSSNLQSSTAGPQSQTINSQGALPGMVWQNRDVYLQGPIWAKIPHTDGNFHPSPLMGGFGLEHPPPQILIKNTPVPANPPEVFTPAKFASFITQYSTGQVSVEIEWELQKENSKRWNPEIQYTSNYAKSNNVEFAVNPDGVYTEPRPIGTRYLTRNLMAADGYLPDWLEDNLSEGIREWWDLKPGAPKPKANQQKQDDGRGLVLPGYKYLGPFNGLDKGEPVNAADAAALEHDKAYDQQLKAGDNPYLRYNHADAEFQERLQEDTSFGGNLGRAVFQAKKRVLEPLGLVEEGAKTAPGKKRPIGSPDSSTGIGKKGQQPAKKKLNFGQTGDSESVPDPQPLGEPPAAPSSVGSGTMAAGGGAPMADNNEGADGVGNASGNWHCDSTWLGDRVITTSTRTWALPTYNNHLYKQISSSSSGATNDNHYFGYSTPWGYFDFNRFHCHFSPRDWQRLINNNWGFRPKKLRFKLLNIQVKEVTTNDGVTTIANNLTSTVQVFSDSEYQLPYVLGSAHQGCLPPFPADVFMIPQYGYLTLDNGSQSVGRSSFYCLEYFPSQMLRTGNNFEFSYSFEDVPFHSSYAHSQSLDRLMNPLIDQYLYYLARTQSTTGSTRELQFHQAGPNTMAEQSKNWLPGPCYRQQRLSKNLDFNNNSNFAWTAATKYHLNGRNSLTNPGIPMATNKDDEDQFFPINGVLVFGKTGAANKTTLENVLMTSEEEIKTTNPVATEEYGVVSSNLQSSTAGPQSQTINSQGALPGMVWQNRDVYLQGPIWAKIPHTDGNFHPSPLMGGFGLKHPPPQILIKNTPVPANPPEVFTPAKFASFITQYSTGQVSVEIEWELQKENSKRWNPEIQYTSNYAKSNNVEFAVNPDGVYTEPRPIGTRYLTRNL

SEQ ID NO: 441 - DNA, 3095 bp, Artificial Sequence
  source: /note="Description of Artificial Sequence: Synthetic polynucleotide"
gaattcgcccttcgcagagaccaaagttcaactgaaacgaatcaaccggtttattgattaacaagcaattacagattacgggtgaggtaacgagtgccaatggggcgaggctcagtataaacaccatcagggttcacagcaaattcaacattattagacttggcataattggaagtatactgaatttctgggttccagcgcttgctgttttctttctgcagctcccactcgatttccacgctgacttgtccggtgctgtactgcgtgatgaaggaggcaaacttggcaggagtaaacacctccggaggattagcaggtacaggtgtgtttttgatcaggatctgtggaggcgggtgtttgagtccaaaaccgcccatcagaggagacgggtgaaagttgccatccgtgtgaggaattttggcccagatgggaccctgcagatacacgtcccggttctgccagaccatgccaggcagtgctccctggctgttgatagtctgtgattgaggcccggctgtagacgactgcaggttgctggagaccacaccgtattcttctgtagccacagggttagtggtcttgatctcctcctcgctggtcatcagaacgttttccagcgtagttttgttggcagctcccgtcttgccaaaaaccagtaccccgttgatgggaaagaactggtcctcatcatccttgttggttgccatgggaatgccaggattggtcaaagagtttctgccattcagatgatatttagtggcagcagtccaggcaaaattgctgttgttgttaaagtccaagttctttgacagtctctgttgcctatagcagggtccaggcagccagttctttgactgctcggccatagtattgggcccagcttgatgaaattgcagttccctggtggaacccgtggtgctctgggtccgggccaggtagtacaggtactggtcgatgagagggttcatcagccggtctaggctctggctgtgcgcgtagctgctgtggaaaggcacgtcctcgaagctgtaactgaactcaaagttgttgcccgttctcagcatttgagaggggaaatattccaggcagtagaaggaggaacggcccaccgattggctgccgttgtccagagtcaggtagccgtactgaggaatcatgaagacgtccgccgggaacggaggcaggcagccctggtgcgcagagccgaggacgtacggcagctggtattccgagtccgagaagacctgaaccgtgctggtaaggttattagcgatggtcgtgacgccgtcattcgttgtgacctccttgacctggatgttgaggagcttgaaccgcagcttcttgggccggaatccccagttgttgttgatgagtcgctgccagtcacgtggtgagaagtggcagtggaatctgttaaagtcaaaatacccccagggggtgctgtagccgaagtagtggttgtcattggtggctcctgagctgctgctggagatttgcttgtagaggtggttgttgtaggtggggagggcccaggttctggtgctggtggtgatgactctgtcgcccagccatgtggaatcgcaatgccaatttcctgaggcattacccactccgtcggcaccttcgttattgtctgccattggtgcgccaccgcctgcagccattgtaccagatcccacactagagggcgctgctggaggttctccaagaggttgagggtcggggactgactctgagtcgccagtctgaccaaaattgagcttctttttagcgggctgctggccttttttgccgatgcccgtggaggagtctggagagcctatgggtctcttctttccaggagccgtcttagcgccttcctcaaccagaccgagaggttcgagaacccgcttcttggcctggaagactgctcgcccgaggttgcccccaaatgacgtatcttcttgcagacgctcctgaaactcggcgtcggcgtggttataccgcaggtacggattgtcacccgctttgagctgctggtcgtaggccttgtcgtgctcgagggccgctgcgtccgccgcgttgacgggctcccccttgtcgagtccgttgaagggtccgaggtacttgtagccaggaagcaccagaccccggccgtcgtcctgcttttgctggttggctttgggtttcggggctccaggtttcaggtcccaccactcgcgaatgccctcagagaggttgtcctcgagccaatctggaagataaccatcggcagccatacctggtttaagtcatttattgctcagaaacacagtcgtccaggtccacgttgaccaggtcgcaggccgagcaagcaatctcgggtgcccgccccagcagatgatgaatcgcacacagcttccgatacgtcttttttctgacgaccggttgagattctgacacgccggggaaacattctaaacagtctctgaccccgtgcgtgaagcaaatgttgaaattctgattcattctctcgcacgttttgcagggaaacagcacctgaagcatgcccgcgtgacgagaacatttgttttggtacctgtcggcaaagtccaccggagctccttccgcgtctgacgtcgatgggtccgtgactgagggacgggcccgcttgggctcgcttatatccgcgtcatcgggggcgggtcttttgctggctccgccctttctgacgtagaactcatgcgtcacctcagtcacgtgatcactagcccagcggaagaactctttgacttcctgctttgtcaccttgccaaagtcgtgttccagacggcgggtgagttcaaatttgaacatccggtcctgcaacggttgctggtgctcgaaggtggtgctgttcccgtcgatcacggcgcacatgttggtgttggaggtgacgatcacgggggtgggatcgatctgggcggacgacttgcacttttggtccacgcgcaccttgctgccgccgagaatggccttggcggactccacgaccttggccgtcatcttgccctcctcccaccagatcaccatcttgtcgacgcaatcgttgaagggaaagttctcattggtccagttgacgcagcaagggcgaattc

SEQ ID NO: 442 - DNA, 3095 bp, Artificial Sequence
  source: /note="Description of Artificial Sequence: Synthetic polynucleotide"
gaattcgcccttcgcagagaccaaagttcaactgaaacgaatcaaccggtttattgattaacaagcaattacagattacgggtgaggtaacgagtgccaatggggcgaggctcagtataaacaccatcagggttcacagcaaattcaacattattagacttggcataattggaagtatactgaatttctgggttccagcgcttgctgttttctttctgcagctcccactcgatttccacgctgacttgtccggtgctgtactgcgtgatgaaggaggcaaacttggcaggagtaaacacctccggaggattagcaggtacaggtgtgtttttgatcaggatctgtggaggcgggtgttcgagtccaaaaccgcccatcagaggagacgggtgaaagttgccatccgtgtgaggaattttggcccagatgggaccctgcagatacacgtcccggttctgccagaccatgccaggcagtgctccctggctgttgatagtctgtgattgaggcccggctgtagacgactgcaggttgctggagaccacaccgtattcttctgtagccacagggttagtggtcttgatctcctcctcgctggtcatcagaacgttttccagcgtagttttgttggcagctcccgtcttgccaaaaaccagtaccccgttgatgggaaagaactggtcctcatcatccttgttggttgccatgggaatgccaggattggtcaaagagtttctgccattcagatgatatttagtggcagcagtccaggcaaaattgctgttgttgttaaagtccaagttctttgacagtctctgttgcctatagcagggtccaggcagccagttctttgactgctcggccatagtattgggcccagcttgatgaaattgcagttccctggtggaacccgtggtgctctgggtccgggccaggtagtacaggtactggtcgatgagagggttcatcagccggtctaggctctggctgtgcgcgtagctgctgtggaaaggcacgtcctcgaagctgtaactgaactcaaagttgttgcccgttctcagcatttgagaggggaaatattccaggcagtagaaggaggaacggcccaccgattggctgccgttgttcagagtcaggtagccgtactgaggaatcatgaagacgtccgccgggaacggaggcaggcagccctggtgcgcagagccgaggacgtacggcagctggtattccgagtccgagaagacctgaaccgtgctggtaaggttattagcgatggtcgtgacgccgtcattcgttgtgacctccttgacctggatgttgaagagcttgaaccgcagcttcttgggccggaatccccagttgttgttgatgagtcgctgccagtcacgtggtgagaagtggcagtggaatctgttaaagtcaaaatacccccagggggtgctgtagccgaagtagtggttgtcattggtggctcctgagctgctgctggagatttgcttgtagaggtggttgttgtaggtggggagggcccaggttctggtgctggtggtgatgactctgtcgcccagccatgtggaatcgcaatgccaatttcctgaggcattacccactccgtcggcaccttcgttattgtctgccgttggtgcgccaccgcctgcagccattgtaccagatcccacactagagggcgctgctggaggttctccaagaggttgagggtcggggactgactctgagtcgccagtctgaccaaaattgagcttctttttagcgggctgctggccttttttgccgatgcccgtggaggagtctggagagtctatgggtctcttctttccaggagccgtcttagcgccttcctcaaccagaccgagaggttcgagaacccgcttcttggcctggaagactgctcgcccgaggttgcccccaaatgacgtatcttcttgcaggcgctcctgaaactcggcgtcggcgtggttataccgcaggtacggattgtcacccgctttgagctgctggtcgtaggccttgtcgtgctcgagggccgctgcgtccgccgcgttgacgggctcccccttgtcgagtccgttgaagggtccgaggtacttgtagccaggaagcaccagaccccggccgtcgtcctgcttttgctggttggctttgggtttcggggctccaggtttcaggtcccaccactcgcgaatgccctcagagaggttgtcctcgagccaatctggaagataaccatcggcagccatacctggtttaagccatttattgctcagaaacacagtcgtccaggtccacgttgaccaggtcgcaggccgagcaggcaatctcgggtgcccgccccagcagatgatgaatcgcacacagcttccgatacgtcttttttctgacgaccggttgagattctgacacgccggggaaacattctaaacagtctctgaccccgtgcgtgaagcaaatgttgaaattctgattcattctctcgcacgttttgcagggaaacagcatctgaagcatgcccgcgtggcgagaacatttgttttggtacctgtcggcaaagtccaccggagctccttccgcgtctgacgtcgatgggtccgtgactgagggacaggcccgcttgggctcgcttatatccgcgtcatcgggggcgggtcttttgctggctccgccctttctgacgtagaactcatgcgtcacctcagtcacgtgatcactagcccagcggaagaactctttgacttcctgctttgtcaccttgccaaagtcgtgttccagacggcgggtgagttcaaatttgaacatccggtcctgcaacggctgctggtgctcgaaggtggtgctgttcccgtcgatcacggcgcgcatgttggtgttggaggtgacgatcacgggggtgggatcgatctgggcggacgacttgcacttttggtccacgcgcaccttgctgccgccgagaatggccttggcggactccacgaccttggccgtcatcttgccctcctcccaccagatcaccatcttgtcgacgcaatcgttgaagggaaagttctcattggtccagttgacgcagcaagggcgaattc

SEQ ID NO: 443 - protein, 729 aa, Artificial Sequence; identical to SEQ ID NO: 171
  source: /note="Description of Artificial Sequence: Synthetic polypeptide"

SEQ ID NO: 444 - protein, 729 aa, Artificial Sequence
  source: /note="Description of Artificial Sequence: Synthetic polypeptide"
MAADGYLPDWLEDNLSEGIREWWDLKPGAPKPKANQQKQDDGRGLVLPGYKYLGPFNGLDKGEPVNAADAAALEHDKAYDQQLKAGDNPYLRYNHADAEFQERLQEDTSFGGNLGRAVFQAKKRVLEPLGLVEEGAKTAPGKKRPIDSPDSSTGIGKKGQQPAKKKLNFGQTGDSESVPDPQPLGEPPAAPSSVGSGTMAAGGGAPTADNNEGADGVGNASGNWHCDSTWLGDRVITTSTRTWALPTYNNHLYKQISSSSSGATNDNHYFGYSTPWGYFDFNRFHCHFSPRDWQRLINNNWGFRPKKLRFKLFNIQVKEVTTNDGVTTIANNLTSTVQVFSDSEYQLPYVLGSAHQGCLPPFPADVFMIPQYGYLTLNNGSQSVGRSSFYCLEYFPSQMLRTGNNFEFSYSFEDVPFHSSYAHSQSLDRLMNPLIDQYLYYLARTQSTTGSTRELQFHQAGPNTMAEQSKNWLPGPCYRQQRLSKNLDFNNNSNFAWTAATKYHLNGRNSLTNPGIPMATNKDDEDQFFPINGVLVFGKTGAANKTTLENVLMTSEEEIKTTNPVATEEYGVVSSNLQSSTAGPQSQTINSQGALPGMVWQNRDVYLQGPIWAKIPHTDGNFHPSPLMGGFGLKHPPPQILIKNTPVPANPPEVFTPAKFASFITQYSTGQVSVEIEWELQKENSKRWNPEIQYTSNYAKSNNVEFAVNPDGVYTEPRPIGTRYLTRNL

SEQ ID NO: 445 - protein, 729 aa, Artificial Sequence
  source: /note="Description of Artificial Sequence: Synthetic polypeptide"
MAADGYLPDWLEDNLSEGIREWWDLKPGAPKPKANQQKQDDGRGLVLPGYKYLGPFNGLDKGEPVNAADAAALEHDKAYDQQLKAGDNPYLRYNHADAEFQERLQEDTSFGGNLGRAVFQAKKRVLEPLGLVEEGAKTAPGKKRPIDSPDSSTGIGKKGQQPAKKKLNFGQTGDSESVPDPQPLGEPPAAPSSVGSGTMAAGGGAPMADNNEGADGVGNASGNWHCDSTWLGDRVITTSTRTWALPTYNNHLYKQISSSSSGATNDNHYFGYSTPWGYFDFNRFHCHFSPRDWQRLINNNWGFRPKKLRFKLFNIQVKEVTTNDGVTTIANNLTSTVQVFSDSEYQLPYVLGSAHQGCLPPFPADVFMIPQYGYLTLNNGSQSVGRSSFYCLEYFPSQMLRTGNNFEFSYSFEDVPFHSSYAHSQSLDRLMNPLIDQYLYYLARTQSTTGSTRELQFHQAGPNTMAEQSKNWLPGPCYRQQRLSKNLDFNNNSNFAWTAATKYHLNGRNSLTNPGIPMATNKDDEDQFFPINGVLVFGKTGAANKTTLENVLMTSEEEIKTTNPVATEEYGVVSSNLQSSTAGPQSQTINSQGALPGMVWQNRDVYLQGPIWAKIPHTDGNFHPSPLMGGFGLKHPPPQILIKNTPVPANPPEVFTPAKFASFITQYSTGQVSVEIEWELQKENSKRWNPEIQYTSNYAKSNNVEFAVNPDGVYTEPRPIGTRYLTRNL

SEQ ID NO: 446 - DNA, 2217 bp, Artificial Sequence
  source: /note="Description of Artificial Sequence: Synthetic polynucleotide"
atggctgctgacggttatcttccagattggctcgaggacaacctctctgagggcattcgcgagtggtgggacctgaaacctggagcccccaagcccaaggccaaccagcagaagcaggacgacggccggggtctggtgcttcctggctacaagtacctcggacccttcaacggactcgacaagggggagcccgtcaacgcggcggacgcagcggccctcgagcacgacaaggcctacgaccagcagctcaaagcgggtgacaatccgtacctgcggtataaccacgccgacgccgagtttcaggagcgtctacaagaagatacgtcttttgggggcaacctcgggcgagcagtcttccaggccaagaagcgggttctcgaacctctcggtctggttgaggaagctgctaagacggctcctggaaagaagagaccggtagaaccgtcacctcagcgttcccccgactcctccacgggcatcggcaagaaaggccagcggcccgctaaaaagagactgaactttggtcagactggcgactcagagtcagtccccgaccctcaaccaatcggagaaccaccagcaggcccctctggtctgggatctggtacaatggctgcaggcggtggcgctccaatggcagacaataacgaaggcgccgacggagtgggtagttcctcaggaaattggcattgcgattccacatggctgggcgacagagtcatcaccaccagcacccgaacctgggccctgcccacctacaacaaccacctctacaagcaaatatccaatgggacatcgggaggaagcaccaacgacaacacctacttcggctacagcaccccctgggggtattttgacttcaacagattccactgccacttctcaccacgtgactggcagcgactcatcaacaacaactggggattccggccaaaaagactcagcttcaagcccttcaacatccaggtcaaggaggtcacgcagaatgaaggcaccaagaccatcgccaataaccttaccagcacgattcaggtatttacggactcggaataccagctgccgtacgtcctcggctccgcgcaccagggctgcctgcctccgttcccggcggacgtcttcatgattccccagtacggctaccttacactgaacaatggaagtcaagccgtaggccgttcctccttctactgcctggaatattttccatctcaaatgctgcgaactggaaacaattttgaattcagctacaccttcgaggacgtgcctttccacagcagctacgcacacagccagagcttggaccgactgatgaatcctctcatcgaccagtacctgcactacttatccagaactcagtccacaggaggaactcaaggtacccagcaattgttattttctcaagctgggcctgcaaacatgtcggctcaggctaagaactggctacctggaccttgctaccggcagcagcgagtctctacgacactgtcgcaaaacaacaacagcaactttgcttggactggtgccaccaaatatcacctgaacggaagagactctttggtaaatcccggtgtcgccatggcaacccacaaggacgacgaggaacgcttcttcccgtcgagtggagtcctgatgtttggaaaacagggtgctggaagagacaatgtggactacagcagcgttatgctaaccagcgaagaagaaattaaaaccactaaccctgtagccacagaacaatacggtgtggtggctgacaacttgcagcaaaccaatacagggcctattgtgggaaatgtcaacagccaaggagccttacctggcatggtctggcagaaccgagacgtgtacctgcagggtcccatctgggccaagattcctcacacggacggcaacttccacccttcaccgctaatgggaggatttggactgaagcacccacctcctcagatcctgatcaagaacacgccggtacctgcggatcctccaacaacgttcagccaggcgaaattggcttccttcattacgcagtacagcaccggacaggtcagcgtggaaatcgagtgggagctgcagaaggagaacagcaaacgctggaacccagagattcagtacacttcaaactactacaaatctacaaatgtggactttgctgtcaatacagagggaacttattctgagcctcgccccattggtactcgctacctcacccgtaatctgtaa

SEQ ID NO: 447 - protein, 738 aa, Artificial Sequence
  source: /note="Description of Artificial Sequence: Synthetic polypeptide"
MAADGYLPDWLEDNLSEGIREWWDLKPGAPKPKANQQKQDDGRGLVLPGYKYLGPFNGLDKGEPVNAADAAALEHDKAYDQQLKAGDNPYLRYNHADAEFQERLQEDTSFGGNLGRAVFQAKKRVLEPLGLVEEAAKTAPGKKRPVEPSPQRSPDSSTGIGKKGQRPAKKRLNFGQTGDSESVPDPQPIGEPPAGPSGLGSGTMAAGGGAPMADNNEGADGVGSSSGNWHCDSTWLGDRVITTSTRTWALPTYNNHLYKQISNGTSGGSTNDNTYFGYSTPWGYFDFNRFHCHFSPRDWQRLINNNWGFRPKRLSFKPFNIQVKEVTQNEGTKTIANNLTSTIQVFTDSEYQLPYVLGSAHQGCLPPFPADVFMIPQYGYLTLNNGSQAVGRSSFYCLEYFPSQMLRTGNNFEFSYTFEDVPFHSSYAHSQSLDRLMNPLIDQYLHYLSRTQSTGGTQGTQQLLFSQAGPANMSAQAKNWLPGPCYRQQRVSTTLSQNNNSNFAWTGATKYHLNGRDSLVNPGVAMATHKDDEERFFPSSGVLMFGKQGAGRDNVDYSSVMLTSEEEIKTTNPVATEQYGVVADNLQQTNTGPIVGNVNSQGALPGMVWQNRDVYLQGPIWAKIPHTDGNFHPSPLMGGFGLKHPPPQILIKNTPVPADPPTTFSQAKLASFITQYSTGQVSVEIEWELQKENSKRWNPEIQYTSNYYKSTNVDFAVNTEGTYSEPRPIGTRYLTRNL

SEQ ID NO: 448 - DNA, 2217 bp, Artificial Sequence
  source: /note="Description of Artificial Sequence: Synthetic polynucleotide"
atggctgctgacggttatcttccagattggctcgaggacaacctctctgagggcattcgcgagtggtgggacctgaaacctggagcccccaagcccaaggccaaccagcagaagcaggacgacggccggggtctggtgcttcctggctacaagtacctcggacccttcaacggactcgacaagggggagcccgtcaacgcggcggacgcagcggccctcgagcacgacaaggcctacgaccagcagctcaaagcgggtgacaatccgtacctgcggtataaccacgccgacgccgagtttcaggagcgtctgcaagaagatacgtcttttgggggcaacctcgggcgagcagtcttccaggccaagaagcgggttctcgaacctctcggtctggttgaggaagctgctaagacggctcctggaaagaagagaccggtagaaccgtcacctcagcgttcccccgactcctccacgggcatcggcaagaaaggccagcagcccgctaaaaagagactgaactttggtcagactggcgactcagagtcagtccccgaccctcaaccaatcggagaaccaccagcaggcccctctggtctgggatctggtacaatggctgcaggcggtggcgctccaatggcagacaataacgaaggcgccgacggagtgggtagttcctcaggaaattggcattgcgattccacatggctgggcgacagagtcatcaccaccagcacccgaacctgggccctgcccacctacaacaaccacctctacaagcaaatatccaatgggacatcgggaggaagcaccaacgacaacacctacttcggctacagcaccccctgggggtattttgacttcaacagattccactgccacttctcaccacgtgactggcagcgactcatcaacaacaactggggattccggccaaaaagactcagcttcaagctcttcaacatccaggtcaaggaggtcacgcagaatgaaggcaccaagaccatcgccaataaccttaccagcacgattcaggtatttacggactcggaataccagctgccgtacgtcctcggctccgcgcaccagggctgcctgcctccgttcccggcggacgtcttcatgattccccagtacggctaccttacactgaacaatggaagtcaagccgtaggccgttcctccttctactgcctggaatattttccatctcaaatgctgcgaactggaaacaattttgaattcagctacaccttcgaggacgtgcctttccacagcagctacgcacacagccagagcttggaccgactgatgaatcctctcatcgaccagtacctgtactacttatccagaactcagtccacaggaggaactcaaggtacccagcaattgttattttctcaagctgggcctgcaaacatgtcggctcaggctaagaactggctacctggaccttgctaccggcagcagcgagtctctacgacactgtcgcaaaacaacaacagcaactttgcttggactggtgccaccaaatatcacctgaacggaagagactctttggtaaatcccggtgtcgccatggcaacccacaaggacgacgaggaacgcttcttcccgtcgagtggagtcctgatgtttggaaaacagggtgctggaagagacaatgtggactacagcagcgttatgctaaccagcgaagaagaaattaaaaccactaaccctgtagccacagaacaatacggtgtggtggctgataacttgcagcaaaccaatacggggcctattgtgggaaatgtcaacagccaaggagccttacctggcatggtctggcagaaccgagacgtgtacctgcagggtcccatctgggccaagattcctcacacggacggcaacttccacccttcaccgctaatgggaggatttggactgaagcacccacctcctcagatcctgatcaagaacacgccggtacctgcggatcctccaacaacgttcagccaggcgaaattggcttccttcattacgcagtacagcaccggacaggtcagcgtggaaatcgagtgggagctgcagaaggagaacagcaaacgctggaacccagagattcagtacacttcaaactactacaaatctacaaatgtggactttgctgtcaatacagagggaacttattctgagcctcgccccattggtactcgttacctcacccgtaatctgtaa

SEQ ID NO: 449 - protein, 738 aa, Artificial Sequence; identical to SEQ ID NO: 101
  source: /note="Description of Artificial Sequence: Synthetic polypeptide"

SEQ ID NO: 450 - protein, 738 aa, Artificial Sequence
  source: /note="Description of Artificial Sequence: Synthetic polypeptide"
MAADGYLPDWLEDNLSEGIREWWDLKPGAPKPKANQQKQDDGRGLVLPGYKYLGPFNGLDKGEPVNAADAAALEHDKAYDQQLKAGDNPYLRYNHADAEFQERLQEDTSFGGNLGRAVFQAKKRVLEPLGLVEEAAKTAPGKKRPVEPSPQRSPDSSTGIGKKGQQPAKKRLNFGQTGDSESVPDPQPIGEPPAGPSGLGSGTMAAGGGAPMADNNEGADGVGSSSGNWHCDSTWLGDRVITTSTRTWALPTYNNHLYKQISNGTSGGSTNDNTYFGYSTPWGYFDFNRFHCHFSPRDWQRLINNNWGFRPKRLSFKLFNIQVKEVTQDEGTKTIANNLTSTIQVFTDSEYQLPYVLGSAHQGCLPPFPADVFMIPQYGYLTLNNGSQAVGRSSFYCLEYFPSQMLRTGNNFEFSYTFEDVPFHSSYAHSQSLDRLMNPLIDQYLYYLSRTQSTGGTQGTQQLLFSQAGPANMSARAKNWLPGPCYRQQRVSTTLSQNNNSNFAWTGATKYHLNGRDSLVNPGVAMATHKDDEERFFPSSGVLMFGKQGAGRDNVDYSSVMLTSEEEIKTTNPVATEQYGVVADNLQQANTGPIVGNVNSQGALPGMVWQNRDVYLQGPIWAKIPHTDGNFHPSPLMGGFGLKHPPPQILIKNTPVPADPPTTFSQAKLASFITQYSTGQVSVEIEWELQKENSKRWNPEIQYTSNYYKSTNVDFAVNSEGTYSEPRPIGTRYLTRNL

SEQ ID NO: 451 - DNA, 2217 bp, Artificial Sequence
  source: /note="Description of Artificial Sequence: Synthetic polynucleotide"
atggctgctgacggttatcttccagattggctcgaggacaacctctctgagggcattcgcgagtggtgggacctgaaacctggagcccccaagcccaaggccaaccagcagaagcaggacgacggccggggtctggtgcttcctggctacaagtacctcggacccttcaacggactcgacaagggggagcccgtcaacgcggcggacgcagcggccctcgagcacgacaaggcctacgaccagcagctcaaagcgggtgacaatccgtacctgcggtataaccacgccgacgccgagtttcaggagcgtctgcaagaagatacgtcttttgggggcaacctcgggcgagcagtcttccaggccaagaagcgggttctcgaacctctcggtctggttgaggaagctgctaagacggctcctggaaagaagagaccggtagaaccgtcacctcagcgttcccccgactcctccacgggcatcggcaagaaaggccagcagcccgctaaaaagagactgaactttggtcagactggcgactcagagtcagtccccgaccctcaaccaatcggagaaccaccagcaggcccctctggtctgggatctggtacaatggctgcaggcggtggcgctccaatggcagacaataacgaaggcgccgacggagtgggtagttcctcaggaaattggcattgcgattccacatggctgggcgacagagtcatcaccaccagcacccgaacctgggccctgcccacctacaacaaccacctctacaagcaaatatccaatgggacatcgggaggaagcaccaacgacaacacctacttcggctacagcaccccctgggggtattttgacttcaacagattccactgccacttctcaccacgtgactggcagcgactcatcaacaacaactggggattccggccaaaaagactcagcttcaagctcttcaacatccaggtcaaggaggtcacgcaggatgaaggcaccaagaccatcgccaataaccttaccagcacgattcaggtatttacggactcggaataccagctgccgtacgtcctcggctccgcgcaccagggctgcctgcctccgttcccggcggacgtcttcatgattccccagtacggctaccttacactgaacaatggaagtcaagccgtaggccgttcctccttctactgcctggaatattttccatctcaaatgctgcgaactggaaacaattttgaattcagctacaccttcgaggacgtgcctttccacagcagctacgcacacagccagagcttggaccgactgatgaatcctctcatcgaccagtacctgtactacttatccagaactcagtccacaggaggaactcaaggtacccagcaattgttattttctcaagctgggcctgcaaacatgtcggctcgggctaagaactggctacctggaccttgctaccggcagcagcgagtctctacgacactgtcgcaaaacaacaacagcaactttgcttggactggtgccaccaaatatcacctgaacggaagagactctttggtaaatcccggtgttgctatggcaacgcataaggacgacgaggaacgtttctttccatcgagcggagtcctgatgtttggaaaacagggtgctggaagagacaatgtggactatagcagcgttatgctaaccagcgaggaagaaattaaaaccactaaccctgtagccacagaacaatacggtgtggtggctgacaacttgcagcaagccaatacagggcctattgtgggaaatgtcaacagccaaggagccttacctggcatggtctggcagaaccgagacgtgtacctgcagggtcccatctgggccaaaattcctcacacggacggcaattttcacccgtctcctctgatgggcggctttggactgaagcacccacctccccagatcctgatcaagaatacgccggtacctgcggatcctccaacgacgttcagccaggcaaaattggcttccttcatcacgcagtacagcaccggccaggtcagcgtggagatcgagtgggagctgcagaaggagaacagcaagcgatggaacccagaaattcagtacacttccaactactacaaatctacaaatgtggactttgctgtcaattctgagggtacatattcagagcctcgccccattggtactcgttatctgacacgtaatctgtaa

SEQ ID NO: 452 - DNA, 2211 bp, Artificial Sequence
  source: /note="Description of Artificial Sequence: Synthetic polynucleotide"
atggctgccgatggttatcttccagattggctcgaggacaacctctctgagggcattcgcgagtggtgggacttgaaacctggagccccgaaacccaaagccaaccagcaaaagcaggacgacggccggggcctggtgcttcctggctacaagtacctcggacccttcaacggactcgacaagggggagcccgtcaacgcggcggacgcagcggccctcgagcacgacaaggcctacgaccagcagctcgaagcgggtgacaatccgtacctgcggtataaccacgccgacgccgagtttcaggagcgtctgcaagaagatacgtcttttgggggcaacctcgggcgagcagtcttccaggccaagaagcgggttctcgaacctctcggtctggttgaggaaggcgctaagacggctcctggaaagaagagaccagtagagcagtcaccccaagaaccagactcctcctcgggcatcggcaagaaaggccaacagcccgccagaaaaagactcaattttggccagactggcgactcagagtcagttccagaccctcaacctctcggagaacctccagcagcgccctctggtgtgggacctaatacaatggctgcaggcggtggcgcaccaatggcagacaataacgaaggcgccgacggagtgggtagttcctcgggaaattggcattgcgattccacatggctgggcgacagagtcatcaccaccagcacccgaacctgggccctgcccacctacaacaaccacctctacaagcaaatctccaacgggacatcgggaggagccaccaacgacaacacctacttcggctacagcaccccctgggggtattttgactttaacagattccactgccacttttcaccacgtgactggcagcgactcatcaacaacaactggggattccggcccaagagactcagcttcaagctcttcaacatccaggtcaaggaggtcacgcagaatgaaggcaccaagaccatcgccaataacctcaccagcaccatccaggtgtttacggactcggagtaccagctgccgtacgttctcggctctgcccaccagggctgcctgcctccgttcccggcggacgtgttcatgattccccagtacggctacctaacactcaacaacggtagtcaggccgtgggacgctcctccttctactgcctggaatactttccttcgcagatgctgagaaccggcaacaacttccagtttacttacaccttcgaggacgtgcctttccacagcagctacgcccacagccagagcttggaccggctgatgaatcctctgattgaccagtacctgtactacttgtctcggactcaaacaacaggaggcacggcaaatacgcagactctgggcttcagccaaggtgggcctaatacaatggccaatcaggcaaagaactggctgccaggaccctgttaccgccaacaacgcgtctcaacgacaaccgggcaaaacaacaatagcaactttgcctggactgctgggaccaaataccatctgaatggaagaaattcattggctaatcctggcatcgctatggcaacacacaaagacgacgaggagcgttttttcccagtaacgggatcctgtttttggcaacaaaatgctgccagagacaatgcggattacagcgatgtcatgctcaccagcgaggaagaaatcaaaaccactaaccctgtggctacagaggaatacggtatcgtggcagataacttgcagcagcaaaacacggctcctcaaattggaactgtcaacagccagggggccttacccggtatggtctggcagaaccgggacgtgtacctgcagggtcccatctgggccaagattcctcacacggacggcaacttccacccgtctccgctgatgggcggctttggcctgaaacatcctccgcctcagatcctgatcaagaacacgcctgtacctgcggatcctccgaccaccttcaaccagtcaaagctgaactctttcatcacgcaatacagcaccggacaggtcagcgtggaaattgaatgggagctacagaaggaaaacagcaagcgctggaaccccgagatccagtacacctccaactactacaaatctacaagtgtggactttgctgttaatacagaaggcgtgtactctgaaccccgccccattggcacccgttacctcacccgtaatctgtaa

SEQ ID NO: 453 - protein, 736 aa, Artificial Sequence
  source: /note="Description of Artificial Sequence: Synthetic polypeptide"
MAADGYLPDWLEDNLSEGIREWWDLKPGAPKPKANQQKQDDGRGLVLPGYKYLGPFNGLDKGEPVNAADAAALEHDKAYDQQLEAGDNPYLRYNHADAEFQERLQEDTSFGGNLGRAVFQAKKRVLEPLGLVEEGAKTAPGKKRPVEQSPQEPDSSSGIGKKGQQPARKRLNFGQTGDSESVPDPQPLGEPPAAPSGVGPNTMAAGGGAPMADNNEGADGVGSSSGNWHCDSTWLGDRVITTSTRTWALPTYNNHLYKQISNGTSGGATNDNTYFGYSTPWGYFDFNRFHCHFSPRDWQRLINNNWGFRPKRLSFKLFNIQVKEVTQNEGTKTIANNLTSTIQVFTDSEYQLPYVLGSAHQGCLPPFPADVFMIPQYGYLTLNNGSQAVGRSSFYCLEYFPSQMLRTGNNFQFTYTFEDVPFHSSYAHSQSLDRLMNPLIDQYLYYLSRTQTTGGTANTQTLGFSQGGPNTMANQAKNWLPGPCYRQQRVSTTTGQNNNSNFAWTAGTKYHLNGRNSLANPGIAMATHKDDEERFFPVTGSCFWQQNAARDNADYSDVMLTSEEEIKTTNPVATEEYGIVADNLQQQNTAPQIGTVNSQGALPGMVWQNRDVYLQGPIWAKIPHTDGNFHPSPLMGGFGLKHPPPQILIKNTPVPADPPTTFNQSKLNSFITQYSTGQVSVEIEWELQKENSKRWNPEIQYTSNYYKSTSVDFAVNTEGVYSEPRPIGTRYLTRNL

SEQ ID NO: 454 - DNA, 2214 bp, Artificial Sequence
  source: /note="Description of Artificial Sequence: Synthetic polynucleotide"
atggctgctgacggttatcttccagattggctcgaggacaacctctctgagggcattcgcgagtggtgggacctgaaacctggagcccccaagcccaaggccaaccagcagaagcaggacgacggccggggtctggtgcttcctggctacaagtacctcggacccttcaacggactcgacaagggggagcccgtcagcgcggcggacgcagcggccctcgagcacgacaaggcctgcgaccagcggctcaaagcgggtgacaatccgtacctgcggtataaccacgccgacgccgagtttcaggagcgtctgcaagaagatacgtcttttgggggcaacctcgggcgagcagtcttccaggccaagaagcgggttctcgaacctctcggtctggttgaggaagctgctaagacggctcctggaaagaagggaccggtagaaccgtcacctcagcgttcccccgactcctccacgggcatcggcaagaaaggccagcagcccgctagaaagagactgaactttgggcagactggcgactcagagtcagtccccgaccctcaaccaatcggagaaccaccagcaggcccctctggtctgggatctggtacaatggctgcaggcggtggcgcaccaatggctgacaataacgagggcgccgacggagtgggtaatgcctcaggaaattggcattgcgattccacatggctgggcgacagagtcatcaccaccagcacccgaacctgggctttgcccacctacaacaatcacctctacaagcaaatctccagtcagtcagcaggtagcaccaacgacaacgtctacttcggctacagcaccccctgggggtattttgacttcaacagattccactgtcacttctcaccacgtgactggcagcggctcatcaacaacaactggggattccggcccaagaagctcaacttcaagctgttcaacatccaggtcaaggaggtcacaacgaatgacggcgtcacgaccatcgccaataaccttaccagcacggttcaggtcttttcggactcggaataccagctgccctacgtcctcggctccgcacaccagggctgcctgcctccgttcccggcggacgtcttcatgattccccagtacggctacctgactctgaacaatggcagccaatcggtgggtcgttcctctttctactgcctggaatatttcccttctcaaatgctgagaacgggcaacaacttcaccttcagctacaccttcgaggacgttcccttccacagcagctacgcacacagccagagcctggaccggctgatgaatcctcttatcgaccagtacctgtattacctggccagaacacagagcaacgcaggaggcacagctggcaatcgggaactgcagttttatcagggcgggcctaccaccatggccgaacaagccaaaaactggctgcctggaccttgcttccggcaacaaagagtctccaagacgctggatcaaaacaacaacagcaactttgcttggactggtgccaccaaataccatctaaatggaagaaattcattggttaatcccggtgtcgccatggcaacccacaaggacgacgaggaacgcttcttcccttcgagcggagtcctgatttttggaaaaactggagcagctaataagactacactggaaaatgtgttaatgacaaatgaagaggaaattcgtcctaccaacccggtagccaccgaggaatacgggactgttagcagcaacctgcaggcggctaacactgcagcccagacacaagttgtcaacaaccagggagccttacctggtatggtctggcagaaccgggacgtgtacctgcagggtcccatctgggccaagattcctcacacggacggcaactttcacccgtctccgctgatgggcggctttggactgaagcatccgcctcctcagatcctgatcaaaaacactcctgttcctgctaatcccccggaggtgtttacgcctgccaagtttgcttctttcatcacacagtacagcaccggccaggtcagcgtggagatcgagtgggagctgcagaaggagaacagcaagcgctggaacccagagattcagtatacctccaattttgacgaacagactggtgtggactttgccgttgacagccagggtgtttattctgagcctcgccccattggtactcgttacctcacccgtaatctgtaa

SEQ ID NO: 455 - protein, 737 aa, Artificial Sequence
  source: /note="Description of Artificial Sequence: Synthetic polypeptide"
MAADGYLPDWLEDNLSEGIREWWDLKPGAPKPKANQQKQDDGRGLVLPGYKYLGPFNGLDKGEPVSAADAAALEHDKACDQRLKAGDNPYLRYNHADAEFQERLQEDTSFGGNLGRAVFQAKKRVLEPLGLVEEAAKTAPGKKGPVEPSPQRSPDSSTGIGKKGQQPARKRLNFGQTGDSESVPDPQPIGEPPAGPSGLGSGTMAAGGGAPMADNNEGADGVGNASGNWHCDSTWLGDRVITTSTRTWALPTYNNHLYKQISSQSAGSTNDNVYFGYSTPWGYFDFNRFHCHFSPRDWQRLINNNWGFRPKKLNFKLFNIQVKEVTTNDGVTTIANNLTSTVQVFSDSEYQLPYVLGSAHQGCLPPFPADVFMIPQYGYLTLNNGSQSVGRSSFYCLEYFPSQMLRTGNNFTFSYTFEDVPFHSSYAHSQSLDRLMNPLIDQYLYYLARTQSNAGGTAGNRELQFYQGGPTTMAEQAKNWLPGPCFRQQRVSKTLDQNNNSNFAWTGATKYHLNGRNSLVNPGVAMATHKDDEERFFPSSGVLIFGKTGAANKTTLENVLMTNEEEIRPTNPVATEEYGTVSSNLQAANTAAQTQVVNNQGALPGMVWQNRDVYLQGPIWAKIPHTDGNFHPSPLMGGFGLKHPPPQILIKNTPVPANPPEVFTPAKFASFITQYSTGQVSVEIEWELQKENSKRWNPEIQYTSNFDEQTGVDFAVDSQGVYSEPRPIGTRYLTRNL

SEQ ID NO: 456 - DNA, 2214 bp, Artificial Sequence
  source: /note="Description of Artificial Sequence: Synthetic polynucleotide"
atggctgccgatggttatcttccagattggctcgaggacaacctctctgagggcattcgcgagtggtgggacctgaaacctggagccccgaaacccaaagccaaccagcaaaagcaggacgacggccggggtctggtgcttcctggctacaagtacctcggacccttcaacggactcgacaagggggagcccgtcaacgcggcggacgcagcggccctcgagcacgacaaggcctacgaccagcagctcaaagcgggtgacaatccgtacctgcggtataaccacgccgacgccgagtttcaggagcgtctgcaagaagatacgtcttttgggggcaacctcgggcgagcagtcttccaggccaagaagcgggttctcgaacctctcggtctggttgaggaagctgctaagacggctcctggaaagaagagaccggtagaaccgtcacctcagcgttcccccgactcctccacgggcatcggcaagaaaggccagcagcccgctagaaagagactgaactttgggcagactggcgactcagagtcagtccccgaccctcaaccaatcggagaaccaccagcaggcccctctggtctgggatctggtacaatggctgcaggcggtggcgctccaatggcagacaataacgaaggcgccgacggagtgggtaatgcctcaggaaattggcattgcgattccacatggctgggcgacagagtcatcaccaccagcacccgaacctgggctttgcccacctacaacaaccacctctacaagcaaatctccagtcagtcagcaggtagcaccaacgacaacgtctacttcggctacagcaccccctgggggtattttgacttcaacagattccactgtcacttctcaccacgtgactggcagcggctcatcaacaacaactggggattccggcccaagaagctcaacttcaagctgttcaacatccaggtcaaggaggtcacaacgaatgacggcgtcacgaccatcgccaataaccttaccagcacggttcaggtcttttcggactcggaataccagctgccctacgtcctcggctccgcacaccagggctgcctgcctccgttcccggcggacgtcttcatgattcctcagtacggctacctgactctcaacaacggtagtcaggccgtgggacgttcctccttctactgcctggagtacttcccctctcagatgctgagaacgggcaacaacttttccttcagctacactttcgaggacgtgcctttccacagcagctacgcgcacagccagagtttggacaggctgatgaatcctctcatcgaccagtacctgtactacctgtcaagaacccagtctacgggaggcacagcgggaacccagcagttgctgttttctcaggccgggcctagcaacatgtcgactcaggccagaaactggctgcctggaccctgctacagacagcagcgcgtctccacgacactgtcgcaaaacaacaacagcaactttgcctggactggtgccaccaagtatcatctgaacggcagagactctctggtgaatccgggcgtcgccatggcaaccaacaaggacgacgaggaccgcttcttcccatccagcggcatcctcatgtttggcaagcagggagctggaaaagacaacgtggactatagcaacgtgatgctaaccagcgaggaagaaatcaagaccaccaaccccgtggccacagaacagtatggcgtggtggctgataacctacagcagcaaaacaccgctcctattgtgggggccgtcaacagccagggagccttacctggcatggtctggcagaaccgggacgtgtacctgcagggtcctatttgggccaagattcctcacacagatggcaactttcacccgtctcctttaatgggcggctttggacttaaacatccgcctcctcagatccttatcaaaaacactcctgttcctgcggatcctccaacagcgttcaaccaggccaagctgaattctttcatcacgcagtacagcaccggacaagtcagcgtggagatcgagtgggagctgcagaaggagaacagcaagcgctggaacccagagattcagtatacttccaactactacaaatctacaaatgtggactttgctgttaatactgagggtgcttactctgagcctcgccccattggcactcgttacctcacccgtaatctgtaa

SEQ ID NO: 457 - protein, 737 aa, Artificial Sequence
  source: /note="Description of Artificial Sequence: Synthetic polypeptide"
MAADGYLPDWLEDNLSEGIREWWDLKPGAPKPKANQQKQDDGRGLVLPGYKYLGPFNGLDKGEPVNAADAAALEHDKAYDQQLKAGDNPYLRYNHADAEFQERLQEDTSFGGNLGRAVFQAKKRVLEPLGLVEEAAKTAPGKKRPVEPSPQRSPDSSTGIGKKGQQPARKRLNFGQTGDSESVPDPQPIGEPPAGPSGLGSGTMAAGGGAPMADNNEGADGVGNASGNWHCDSTWLGDRVITTSTRTWALPTYNNHLYKQISSQSAGSTNDNVYFGYSTPWGYFDFNRFHCHFSPRDWQRLINNNWGFRPKKLNFKLFNIQVKEVTTNDGVTTIANNLTSTVQVFSDSEYQLPYVLGSAHQGCLPPFPADVFMIPQYGYLTLNNGSQAVGRSSFYCLEYFPSQMLRTGNNFSFSYTFEDVPFHSSYAHSQSLDRLMNPLIDQYLYYLSRTQSTGGTAGTQQLLFSQAGPSNMSTQARNWLPGPCYRQQRVSTTLSQNNNSNFAWTGATKYHLNGRDSLVNPGVAMATNKDDEDRFFPSSGILMFGKQGAGKDNVDYSNVMLTSEEEIKTTNPVATEQYGVVADNLQQQNTAPIVGAVNSQGALPGMVWQNRDVYLQGPIWAKIPHTDGNFHPSPLMGGFGLKHPPPQILIKNTPVPADPPTAFNQAKLNSFITQYSTGQVSVEIEWELQKENSKRWNPEIQYTSNYYKSTNVDFAVNTEGAYSEPRPIGTRYLTRNL

SEQ ID NO: 458 - DNA, 2217 bp, Artificial Sequence
  source: /note="Description of Artificial Sequence: Synthetic polynucleotide"
atggctgccgatggttatcttccagattggctcgaggacaacctctctgagggcattcgcgagtggtgggacctgaaacctggagccccgaaacccaaagccaaccagcaaaagcaggacgacggccggggtctggtgcttcctggctacaagtacctcggacccttcaacggactcgacaagggggagcccgtcaacgcggcggacgcagcggccctcgagcacgacaaggcctacgaccagcagctcaaagcgggtgacaatccgtacctgcggtataatcacgccgacgccgagtttcaggagcgtctgcaagaagatacgtcttttgggggcaacctcgggcgagcagtcttccaggccaagaagcgggttctcgaacctctcggtctggttgaggaaggcgctaagacggctcctggaaagaagagaccggtagagccgtcaccacagcgttcccccgactcctccacgggcatcggcaagaaaggccagcagcccgccagaaagagactcaatttcggtcagactggcgactcagagtcagtccccgaccctcaacctatcggagaacctccagcagcgccctctagtgtgggatctggtacaatggctgcaggcggtggcgcaccaatggcagacaataacgaaggtgccgacggagtgggtagttcctcgggaaattggcattgcgattccacatggctgggcgacagagtcatcaccaccagcacccgaacctgggccctgcccacctacaacaaccacctctacaagcaaatctccaacgggacctcgggaggcagcaccaacgacaacacctactttggctacagcaccccctgggggtattttgactttaacagattccactgccacttctcaccacgtgactggcagcgactcatcaacaacaactggggattccggcccaagagactcagcttcaagctcttcaacatccaggtcaaagaggtcacgcagaatgaaggcaccaagaccatcgccaataacctcaccagcaccatccaggtgtttacggactcggaataccagctgccgtacgtcctcggctctgcccaccagggctgcctgcctccgttcccggcggacgtcttcatgattcctcagtacggctacctgactctcaacaacggtagtcaggccgtgggacgttcctccttctactgcctggagtacttcccctctcagatgctgagaacgggcaacaacttttccttcagctacactttcgaggacgtgcctttccacagcagctacgcgcacagccagagtttggacaggctgatgaatcctctcatcgaccagtacctgtactacctgtcaagaacccagtctacgggaggcacagcgggaacccagcagttgctgttttctcaggccgggcctagcaacatgtcggctcaggccagaaactggctgcctggaccctgctacagacagcagcgcgtctccacgacactgtcgcaaaacaacaacagcaactttgcctggactggtgccaccaagtatcatctgaacggcagagactctctggtgaatccgggcgtcgccatggcaaccaacaaggacgacgaggaccgcttcttcccatccagcggcatcctcatgtttggcaagcagggagctggaaaagacaacgtggactatagcaacgtgatgctaaccagcgaggaagaaatcaaggccaccaaccccgtggccacagaacagtatggcgtggtggctgataacctacagcagcaaaacaccgctcctattgtgggggccgtcaacagccagggagccttacctggcatggtctggcagaaccgggacgtgtacctgcagggtcctatttgggccaagattcctcacacagatggcaactttcacccgtctcctttaatgggcggctttggacttaaacatccgcctcctcagatcctcatcaaaaacactcctgttcctgcggatcctccaacagcgttcaaccaggccaagctgaattctttcatcacgcagtacagcaccggacaagtcagcgtggagatcgagtgggagctgcagaaggagaacagcaagcgctggaacccagagattcagtatacttccaactactacaaatctacaaatgtggactttgctgttaatactgagggtgtttactctgagcctcgccccattggcactcgttacctcacccgtaatctgtaa

SEQ ID NO: 459 - protein, 738 aa, Artificial Sequence
  source: /note="Description of Artificial Sequence: Synthetic polypeptide"
MAADGYLPDWLEDNLSEGIREWWDLKPGAPKPKANQQKQDDGRGLVLPGYKYLGPFNGLDKGEPVNAADAAALEHDKAYDQQLKAGDNPYLRYNHADAEFQERLQEDTSFGGNLGRAVFQAKKRVLEPLGLVEEGAKTAPGKKRPVEPSPQRSPDSSTGIGKKGQQPARKRLNFGQTGDSESVPDPQPIGEPPAAPSSVGSGTMAAGGGAPMADNNEGADGVGSSSGNWHCDSTWLGDRVITTSTRTWALPTYNNHLYKQISNGTSGGSTNDNTYFGYSTPWGYFDFNRFHCHFSPRDWQRLINNNWGFRPKRLSFKLFNIQVKEVTQNEGTKTIANNLTSTIQVFTDSEYQLPYVLGSAHQGCLPPFPADVFMIPQYGYLTLNNGSQAVGRSSFYCLEYFPSQMLRTGNNFSFSYTFEDVPFHSSYAHSQSLDRLMNPLIDQYLYYLSRTQSTGGTAGTQQLLFSQAGPSNMSAQARNWLPGPCYRQQRVSTTLSQNNNSNFAWTGATKYHLNGRDSLVNPGVAMATNKDDEDRFFPSSGILMFGKQGAGKDNVDYSNVMLTSEEEIKATNPVATEQYGVVADNLQQQNTAPIVGAVNSQGALPGMVWQNRDVYLQGPIWAKIPHTDGNFHPSPLMGGFGLKHPPPQILIKNTPVPADPPTAFNQAKLNSFITQYSTGQVSVEIEWELQKENSKRWNPEIQYTSNYYKSTNVDFAVNTEGVYSEPRPIGTRYLTRNL

SEQ ID NO: 460 - DNA, 2217 bp, Artificial Sequence
  source: /note="Description of Artificial Sequence: Synthetic polynucleotide"
atggctgccgatggttatcttccagattggctcgaggacaacctctctgagggcattcgcgagtggtgggacctgaaacctggagccccgaaacccaaagccaaccagcaaaagcaggacgacggccggggtctggtgcttcctggctacaagcacctcggacccttcaacggactcgacaagggggagcccgtcaacgcggcggacgcagcggccctcgagcacgacaaggcctacgaccagcagctcaaagcgggtgacaatccgtacctgcggtataatcacgctgacgccgagtttcaggagcgtctgcaagaagatacgtcttttgggggcaacctcgggcgagcagtcttccaggccaagaagcgggttctcgaacctctcggtctggttgaggaaggcgctaagacggctcctggaaagaagagaccggtagagccgtcaccacagcgttcccccgactcctccacgggcatcggcaagaaaggccagcagcccgccagaaagagactcaatttcggtcagactggcgactcagagtcagtccccgaccctcaacctatcggagaacctccagcagcgccctctagtgtgggatctggtacaatggctgcaggcggtggcgcaccaatggcagacaataacgaaggtgccgacggagtgggtagttcctcgggaaattggcattgcgattccacatggctgggcgacagagtcatcaccaccagcacccgaacctgggccctgcccacctacaacaaccacctctacaagcaaatctccaacgggacctcgggaggcagcaccaacgacaacacctactttggctacagcaccccctgggggtattttgactttaacagattccactgccacttctcaccacgtgactggcagcgactcatcaacaacaactggggattccggcccaagagactcagcttcaagctcttcaacatccaggtcaaagaggtcacgcagaatgaaggcaccaagaccatcgccaataaccttaccagcacggttcaggtcttttcggactcggaataccagctgccctacgtcctcggctccgcacaccagggctgcctgcctccgttcccggcggacgtcttcatgattccccagtacggctacctgactctgaacaatggcagccaatcggtgggtcgttcctctttctactgcctggaatatttcccttctcaaatgctgagaacgggcaacaacttcaccttcagctacaccttcgaggacgttcccttccacagcagctacgcacacagccagagcctggaccggctgatgaatcctcttatcgaccagtacctgtattacctggccagaacacagagcaacgcaggaggcacagctggcaatcgggaactgcagttttatcagggcgggcctaccaccatggccgaacaagccaaaaactggctgcctggaccttgcttccggcaacaaagagtctccaagacgctggatcaaaacaacaacagcaactttgcttggactggtgccaccaaataccatctaaatggaagaaattcattggttaatcccggtgtcgccatggcaacccacaaggacgacgaggaacgcttcttcccttcgagcggagtcctgatttttggaaaaactggagcagctaataagactacactggaaaatgtgttaatgacaaatgaagaggaaattcgtcctaccaacccggtagccaccgaggaatacgggactgttagcagcaacctgcaggcggctaacactgcagcccagacacaagttgtcaacaaccagggagccttacctggtatggtctggcagaaccgggacgtgtacctgcagggtcccatctgggccaagattcctcacacggacggcaactttcacccgtctccgctgatgggcggctttggactgaagcatccgcctcctcagatcctgatcaaaaacactcctgttcctgctaatcccccggaggtgtttacgcctgccaagtttgcttctttcatcacacagtacagcaccggccaggtcagcgtggagatcgagtgggagctgcagaaggagaacagcaagcgctggaacccagagattcagtatacctccaattttgacaaacagactggtgtggactttgccgttgacagccagggtgtttattctgagcctcgccccattggtactcgttacctcacccgtaatctgtaa

SEQ ID NO: 461 - protein, 738 aa, Artificial Sequence
  source: /note="Description of Artificial Sequence: Synthetic polypeptide"
MAADGYLPDWLEDNLSEGIREWWDLKPGAPKPKANQQKQDDGRGLVLPGYKHLGPFNGLDKGEPVNAADAAALEHDKAYDQQLKAGDNPYLRYNHADAEFQERLQEDTSFGGNLGRAVFQAKKRVLEPLGLVEEGAKTAPGKKRPVEPSPQRSPDSSTGIGKKGQQPARKRLNFGQTGDSESVPDPQPIGEPPAAPSSVGSGTMAAGGGAPMADNNEGADGVGSSSGNWHCDSTWLGDRVITTSTRTWALPTYNNHLYKQISNGTSGGSTNDNTYFGYSTPWGYFDFNRFHCHFSPRDWQRLINNNWGFRPKRLSFKLFNIQVKEVTQNEGTKTIANNLTSTVQVFSDSEYQLPYVLGSAHQGCLPPFPADVFMIPQYGYLTLNNGSQSVGRSSFYCLEYFPSQMLRTGNNFTFSYTFEDVPFHSSYAHSQSLDRLMNPLIDQYLYYLARTQSNAGGTAGNRELQFYQGGPTTMAEQAKNWLPGPCFRQQRVSKTLDQNNNSNFAWTGATKYHLNGRNSLVNPGVAMATHKDDEERFFPSSGVLIFGKTGAANKTTLENVLMTNEEEIRPTNPVATEEYGTVSSNLQAANTAAQTQVVNNQGALPGMVWQNRDVYLQGPIWAKIPHTDGNFHPSPLMGGFGLKHPPPQILIKNTPVPANPPEVFTPAKFASFITQYSTGQVSVEIEWELQKENSKRWNPEIQYTSNFDKQTGVDFAVDSQGVYSEPRPIGTRYLTRNL

SEQ ID NO: 462 - protein, 737 aa, Artificial Sequence
  source: /note="Description of Artificial Sequence: Synthetic polypeptide"
MAADGYLPDWLEDNLSEGIREWWDLKPGAPKPKANQQKQDDGRGLVLPGYKYLGPFNGLDKGEPVNAADAAALEHDKAYDQQLKAGDNPYLRYNHADAEFQERLQEDTSFGGNLGRAVFQAKKRVLEPLGLVEEAAKTAPGKKRPVEPSPQRSPDSSTGIGKKGQQPARKRLNFGQTGDSESVPDPQPIGEPPAGPSGLGSGTMAAGGGAPMADNNKGADGVGNASGNWHCDSTWLGDRVITTSTRTWALPTYNNHLYKQISSQSAGSTNDNVYFGYSTPWGYFDFNRFHCHFSPRDWQRLINSNWGFRPKKLNFKLFNIQVKEVTTNDGVTTIANNLTSTVQVFSDSEYQLPYVLGSAHQGCLPPFPADVFMIPQYGYLTLNNGSQSVGRSSFYCLEYFPSQMLRTGNNFTFSYTFEDVPFHSSYAHSQSLDRLMNPLIDQYLYYLARTQSNAGGTAGNRELQFYQGGPTTMAEQAKNWLPGPCFRQQRVSKTLDQNNNSNFAWTGATKYHLNGRNSLVNPGVAMATHKDDEERFFPSSGVLIFGKTGAANKTTLENVLMTNEEEIRPTNPVATEEYGTVSSNLQAANTAAQTQVVNNQGALPGMVWQNRDVYLQGPIWAKIPHTDGNFHPSPLMGGFGLKHPPPQILIKNTPVPANPPEVFTPAKFASFITQYSTGQVSVEIEWELQKENSKRWNPEIQYTSNFDKQTGVDFAVDSQGVYSEPRPIGTRYLTRNL

SEQ ID NO: 463 - protein, 737 aa, Artificial Sequence
  source: /note="Description of Artificial Sequence: Synthetic polypeptide"
MAADGYLPDWLEDNLSEGIREWWDLKPGAPKPKANQQKQDDGRGLVLPGYKYLGPFNGLDKGEPVNAADAAALEHDKAYDQQLKAGDNPYLRYNHADAEFQERLQEDTSFGGNLGRAVFQAKKRVLEPLGLVEEAAKTAPGKKRPVEPSPQRSPDSSTGIGKKGQQPARKRLNFGQTGDSESVPDPQPIGEPPAGPSGLGSGTMAAGGGAPMADNNEGADGVGNASGNWHCDSTWLGDRVITTSTRTWALPTYNNHLYKQISSQSAGSTNDNVYFGYSTPWGYFDFNRFHCHFSPRDWQRLINSNWGFRPKKLNFKLFNIQVKEVTTNDGVTTIANNLTSTVQVFSDSEYQLPYVLGSAHQGCLPPFPADVFMIPQYGYLTLNNGSQSVGRSSFYCLEYFPSQMLRTGNNFTFSYTFEDVPFHSSYAHSQSLDRLMNPLIDQYLYYLARTQSNAGGTAGNRELQFYQGGPTTMAEQAKNWLPGPCFRQQRVSKTLDQNNNSNFAWTGATKYHLNGRNSLVNPGVAMATHKDDEERFFPSSGVLIFGKTGAANKTTLENVLMTNEEEIRPTNPVATEEYGTVSSNLQAANTAAQTQVVNNQGALPGMVWQNRDVYLQGPIWAKIPHTDGNFHPSPLMGGFGLKHPPPQILIKNTPVPANPPEVFTPAKFASFITQYSTGQVSVEIEWELQKENSKRWNPEIQYTSNFDKQTGVDFAVDSQGVYSEPRPIGTRYLTRNL

SEQ ID NO: 464 - protein, 737 aa, Artificial Sequence
  source: /note="Description of Artificial Sequence: Synthetic polypeptide"
MAADGYLPDWLEDNLSEGIREWWDLKPGAPKPKANQQKQDDGRGLVLPGYKYLGPFNGLDKGEPVNAADAAALEHDKAYDQQLKAGDNPYLRYNHADAEFQERLQEDTSFGGNLGRAVFQAKKRVLEPLGLVEEAAKTAPGKKRPVEPSPQRSPDSSTGIGKKGQQPARKRLNFGQTGDSESVPDPQPIGEPPAGPSGLGSGTMAAGGGAPMADNNEGADGVGNASGNWHCDSTWLGDRVITTSTRTWALPTYNNHLYKQISSQSAGSTNDNVYFGYSTPWGYFDFNRFHCHFSPRDWQRLINNNWGFRPKKLNFKLFNIQVKEVTTNDGVTTIANNLTSTVQVFSDSEYQLPYVLGSAHQGCLPPFPADVFMIPQYGYLTLNNGSQSVGRSSFYCLEYFPSQMLRTGNNFTFSYTFEDVPFHSSYAHSQSLDRLMNPLIDQYLYYLARTQSNAGGTAGNRELQFYQGGPTTMAEQAKNWLPGPCFRQQRVSKTLDQNNNSNFAWTGATKYHLNGRNSLVNPGVAMATHKDDEERFFPSSGVLIFGKTGAANKTTLENVLMTNEEEIRPTNPVATEEYGTVSSNLQAANTAAQTQVVNNQGALPGMVWQNRDVYLQGPIWAKIPHTDGNFHPSPLMGGFGLKHPPPQILIKNTPVPANPPEVFTPAKFASFITQYSTGQVSVEIEWELQKENSKRWNPEIQYTSNFDKQTGVDFAVDSQGVYSEPRPIGTRYLTRNL

SEQ ID NO: 465 - protein, 737 aa, Artificial Sequence
  source: /note="Description of Artificial Sequence: Synthetic polypeptide"
MAADGYLPDWLEDNLSEGIREWWDLKPGAPKPKANQQKQDDGRGLVLPGYKYLGPFNGLDKGEPVNAADAAALEHDKAYDQQLKAGDNPYLRYNHADAEFQERLQEDTSFGGNLGRAVFQAKKRVLEPLGLVEEAAKTAPGKKRPVEPSPQRSPDSSTGIGKKGQQPARKRLNFGQTGDSESVPDPQPIGEPPAGPSGLGSGTMAAGGGAPMADNNKGADGVGNASGNWHCDSTWLGDRVITTSTRTWALPTYNNHLYKQISSQSAGSTNDNVYFGYSTPWGYFDFNRFHCHFSPRDWQRLINNNWGFRPKKLNFKLFNIQVKEVTTNDGVTTIANNLTSTVQVFSDSEYQLPYVLGSAHQGCLPPFPADVFMIPQYGYLTLNNGSQSVGRSSFYCLEYFPSQMLRTGNNFTFSYTFEDVPFHSSYAHSQSLDRLMNPLIDQYLYYLARTQSNAGGTAGNRELQFYQGGPTTMAEQAKNWLPGPCFRQQRVSKTLDQNNNSNFAWTGATKYHLNGRNSLVNPGVAMATHKDDEERFFPSSGVLIFGKTGAANKTTLENVLMTNEEEIRPTNPVATEEYGTVSSNLQAANTAAQTQVVNNQGALPGMVWQNRDVYLQGPIWAKIPHTDGNFHPSPLMGGFGLKHPPPQILIKNTPVPANPPEVFTPAKFASFITQYSTGQVSVEIEWELQKENSKRWNPEIQYTSNFDKQTGVDFAVDSQGVYSEPRPIGTRYLTRNL

SEQ ID NO: 466 - DNA, 2214 bp, Artificial Sequence
  source: /note="Description of Artificial Sequence: Synthetic polynucleotide"
atggctgctgacggttatcttccagattggctcgaggacaacctctctgagggcattcgcgagtggtgggacctgaaacctggagcccccaagcccaaggccaaccagcagaagcaggacgacggccggggtctggtgcttcctggctacaagtacctcggacccttcaacggactcgacaagggggagcccgtcaacgcggcggacgcagcggccctcgagcacgacaaggcctacgaccagcagctcaaagcgggtgacaatccgtacctgcggtataaccacgccgacgccgagtttcaggagcgtctgcaagaagatacgtcttttgggggcaacctcgggcgagcagtcttccaggccaagaagcgggttctcgaacctctcggtctggttgaggaagctgctaagacggctcctggaaagaagagaccggtagaaccgtcacctcagcgttcccccgactcctccacgggcatcggcaagaaaggccagcagcccgctagaaagagactgaactttgggcagactggcgactcagagtcagtccccgaccctcaaccaatcggagaaccaccagcaggcccctctggtctgggatctggtacaatggctgcaggcggtggcgcaccaatggctgacaataacaagggcgccgacggagtgggtaatgcctcaggaaattggcattgcgattccacatggctgggcgacagagtcatcaccaccagcacccgaacctgggctttgcccacctacaacaaccacctctacaagcaaatctccagtcagtcagcaggtagcaccaacgacaacgtctacttcggctacagcaccccctgggggtattttgacttcaacagattccactgtcacttctcaccacgtgactggcagcggctcatcaacagcaactggggattccggcccaagaagctcaacttcaagctgttcaacatccaggtcaaggaggtcacaacgaatgacggcgtcacgaccatcgccaataaccttaccagcacggttcaggtcttttcggactcggaataccagctgccctacgtcctcggctccgcacaccagggctgcctgcctccgttcccggcggacgtcttcatgattccccagtacggctacctgactctgaacaatggcagccaatcggtgggtcgttcctctttctactgcctggaatatttcccttctcaaatgctgagaacgggcaacaacttcaccttcagctacaccttcgaggacgttcccttccacagcagctacgcacacagccagagcctggaccggctgatgaatcctcttatcgaccagtacctgtattacctggccagaacacagagcaacgcaggaggcacagctggcaatcgggaactgcagttttatcagggcgggcctaccaccatggccgaacaagccaaaaactggctgcctggaccttgcttccggcaacaaagagtctccaagacgctggatcaaaacaacaacagcaactttgcttggactggtgccaccaaataccatctaaatggaagaaattcattggttaatcccggtgtcgccatggcaacccacaaggacgacgaggaacgcttcttcccttcgagcggagtcctgatttttggaaaaactggagcagctaataagactacactggaaaatgtgttaatgacaaatgaagaggaaattcgtcctaccaacccggtagccaccgaggaatacgggactgttagcagcaacctgcaggcggctaacactgcagcccagacacaagttgtcaacaaccagggagccttacctggtatggtctggcagaaccgggacgtgtacctgcagggtcccatctgggccaagattcctcacacggacggcaactttcacccgtctccgctgatgggcggctttggactgaagcatccgcctcctcagatcctgatcaaaaacactcctgttcctgctaatcccccggaggtgtttacgcctgccaagtttgcttctttcatcacacagtacagcaccggccaggtcagcgtggagatcgagtgggagctgcagaaggagaacagcaagcgctggaacccagagattcagtatacctccaattttgacaaacagactggtgtggactttgccgttgacagccagggtgtttattctgagcctcgccccattggtactcgttacctcacccgtaatctgtaa

SEQ ID NO: 467 - DNA, 2217 bp, Artificial Sequence
  source: /note="Description of Artificial Sequence: Synthetic polynucleotide"
atggctgccgatggttatcttccagattggctcgaggacaacctctctgagggcattcgcgagtggtgggacctgaaacctggagccccgaaacccaaagccaaccagcaaaagcaggacgacggccggggtctggtgcttcctggctacaagtacctcggacccttcaacggactcgacaagggggagcccgtcaacgcggcggacgcagcggccctcgagcacgacaaggcctacgaccagcagctcaaagcgggtgacaatccgcacctgcggtataatcacgccgacgccgagtttcaggagcgtctgcaagaagatacgtcttttgggggcaacctcgggcgagcagtcttccaggccaagaagcgggttctcgaacctctcggtctggttgaggaaggcgctaagacggctcctggaaagaagagaccggtagagccgtcaccacagcgttcccccgactcctccacgggcatcggcaagaaaggccagcagcccgccagaaagagactcaatttcggtcagactggcgactcagagtcagtccccgaccctcaacttatcggagaacctccagcagcgccctctagtgtgggatctggtacaatggctgcaggcggtggcgcaccaatggcagacaataacgaaggtgccgacggagtgggtagttcctcgggaaattggcattgcgattccacatggctgggcgacagagtcatcaccaccagcacccgaacctgggccctgcccacctacaacaaccacctctacaagcaaatctccaacgggacctcgggaggcagcaccaacgacaacacctactttggctacagcaccccctgggggtattttgactttaacagattccactgccacttctcaccacgtgactggcagcgactcatcaacaacaactggggattccggcccaagagactcagcttcaagctcttcaacatccaggtcaaagaggtcacgcagaatgaaggcaccaagaccatcgccaataacctcaccagcaccatccaggtgtttacggactcggagtaccagctgccgtacgtcctcggctctgcccaccagggctgcctgcctccgttcccggcggacgtcttcatgattcctcagtacggcaacctgactctcaacaacggtagtcaggccgtgggacgttcctccttctactgcctggagtacttcccctctcagatgctgagaacgggcaacaacttttccttcagctacactttcgaggacgtgcctttccacagcagctacgcgcacagccagagtttggacaggctgatgaatcctctcatcgaccagtacctgtactacctgtcaagaacccagtctacgggaggcacagcgggaacccagcagttgctgttttctcaggccgggcctagcaacatgtcggctcaggccagaaactggctgcctggaccctgctacagacagcagcgcgtctccacgacactgtcgcaaaacaacaacagcaactttgcctggactggtgccaccaagtatcatctgaacggcagagactctctggtgaatccgggcgtcgccatggcaaccaacaaggacgacgaggaccgcttcttcccatccagcggcatcctcatgtttggcaagcagggagctggaaaagacaacatgggctatagcaacgtgatgctaaccagcgaggaagaaatcaagaccaccaaccccgtggccacagaacagtatggcgtggtggctgataacctacagcagcaaaacaccgctcctattgtgggggccgtcaacagccagggagccttacctggcatggtctggcagaaccgggacgtgtacctgcagggtcctatttgggccaagattcctcacacagatggcaactttcacccgtctcctttaatgggcggctttggacttaaacatccgcctcctcagatcctcatcaaaaacactcctgttcctgcggatcctccaacagcgttcaaccaggccaagctgaattctttcatcacgcagtacggcaccggacaagtcagcgtggagatcgagtgggagctgcagaaggagaacagcaagcgctggaacccagagattcagtatacttccaactactacaaatctacaaatgtggactttgctgttaatactgagggtgtttactctgagcctcgccccattggcactcgttacctcacccgtaatctgtaa

SEQ ID NO: 468 - protein, 738 aa, Artificial Sequence
  source: /note="Description of Artificial Sequence: Synthetic polypeptide"
MAADGYLPDWLEDNLSEGIREWWDLKPGAPKPKANQQKQDDGRGLVLPGYKYLGPFNGLDKGEPVNAADAAALEHDKAYDQQLKAGDNPHLRYNHADAEFQERLQEDTSFGGNLGRAVFQAKKRVLEPLGLVEEGAKTAPGKKRPVEPSPQRSPDSSTGIGKKGQQPARKRLNFGQTGDSESVPDPQLIGEPPAAPSSVGSGTMAAGGGAPMADNNEGADGVGSSSGNWHCDSTWLGDRVITTSTRTWALPTYNNHLYKQISNGTSGGSTNDNTYFGYSTPWGYFDFNRFHCHFSPRDWQRLINNNWGFRPKRLSFKLFNIQVKEVTQNEGTKTIANNLTSTIQVFTDSEYQLPYVLGSAHQGCLPPFPADVFMIPQYGNLTLNNGSQAVGRSSFYCLEYFPSQMLRTGNNFSFSYTFEDVPFHSSYAHSQSLDRLMNPLIDQYLYYLSRTQSTGGTAGTQQLLFSQAGPSNMSAQARNWLPGPCYRQQRVSTTLSQNNNSNFAWTGATKYHLNGRDSLVNPGVAMATNKDDEDRFFPSSGILMFGKQGAGKDNMGYSNVMLTSEEEIKTTNPVATEQYGVVADNLQQQNTAPIVGAVNSQGALPGMVWQNRDVYLQGPIWAKIPHTDGNFHPSPLMGGFGLKHPPPQILIKNTPVPADPPTAFNQAKLNSFITQYGTGQVSVEIEWELQKENSKRWNPEIQYTSNYYKSTNVDFAVNTEGVYSEPRPIGTRYLTRNL

SEQ ID NO: 469 - DNA, 2217 bp, Artificial Sequence
  source: /note="Description of Artificial Sequence: Synthetic polynucleotide"
atggctgccgatggttatcttccagattggctcgaggacaacctctctgagggcattcgcgagtggtgggacctgaaacctggagccccgaaacccaaagccaaccagcaaaagcaggacgacggccggggtctggtgcttcctggctacaagtacctcggacccttcaacggactcgacaagggggagcccgtcaacgcggcggacgcagcggccctcgagcacgacaaggcctacgaccagcagctcaaagcgggtgacaatccgtacctgcggtataatcacgccgacgccgagtttcaggagcgtctgcaagaagatacgtcttttgggggcaacctcgggcgagcagtcttccaggccaagaagcgggttctcgaacctctcggtctggttgaggaaggcgctaagacggctcctggaaagaagagaccggtagagccgtcaccacagcgttcccccgactcctccacgggcatcggcaagaaaggccagcagcccgccggaaagagactcaatttcggtcagactggcgactcagagtcagtccccgaccctcaacctatcggagaacctccagcagcgccctctagtgtgggatctggtacaatggctgcaggcggtggcgcaccaatggcagacaataacgaaggtgccgacggagtgggtagttcctcgggaaattggcattgcgattccacatggctgggcgacagagtcatcaccaccagcacccgaacctgggccctgcccacctacaacaaccacctctacaagcaaatctccaacgggacctcgggaggcagcaccaacgacaacacctactttggctacagcaccccctgggggtattttgactttaacagattccactgccacttctcaccacgtgactggcagcgactcatcaacaacaactggggattccggcccaagagactcagcttcaagctcttcaacatccaggtcaaagaggtcacgcagaatgaaggcaccaagaccatcgccaataacctcaccagcaccatccaggtgtttacggactcggaataccagctgccgtacgtcctcggctctgcccaccagggctgcctgcctccgttcccggcggacgtcttcatgattcctcagtacggctacctgactctcaacaacggtagtcaggccgtgggacgttcctccttctactgcctggagtacttcccctctcagatgctgagaacgggcaacaacttttccttcagctacactttcgaggacgtgcctttccacagcagctacgcgcacagccagagtttggacaggctgatgaatcctctcgtcgaccagtacctgtactacctgtcaagaacccagtctacgggaggcacagcgggaacccagcagttgctgttttctcaggccgggcctagcaacatgtcggctcaggccagaaactggctgcctggaccctgctacagacagcagcgcgtctccacgacactgtcgcaaaacaacaacagcaactttgcctggactggtgccaccaagtatcatctgaacggcagagactctctggtgaatccgggcgtcgccatggcaaccaacaaggacgacgaggaccgcttcttcccatccagcggcatcctcatgtttggcaagcagggagctggaaaagacaacgtggactatagcaacgtgatgctaaccagcgaggaagaaatcaagaccaccaaccccgtggccacagaacagtatggcgtggtggctgataacctacagcagcaaaacaccgctcctattgtgggggccgtcaacagccagggagccttacctggcatggtctggcagaaccgggacgtgtacctgcagggtcctatttgggccaagattcctcacacagatggcaactttcacccgtctcctttaatgggcggctttggacttaaacatccgcctcctcagatcctcatcaaaaacactcctgttcctgcggatcctccaacagcgttcaaccaggccaagctgaattctttcatcacgcagtacagcaccggacaagtcagcgtggagatcgagtgggagctgcagaaggagaacagcaagcgctggagcccagagattcagtatacttccaactactacaaatctacaaatgtggactttgctgttaatactgagggtgtttactctgagcctcgccccattggcactcgttacctcacccgtaatctgtaa

SEQ ID NO: 470 - protein, 738 aa, Artificial Sequence
  source: /note="Description of Artificial Sequence: Synthetic polypeptide"
MAADGYLPDWLEDNLSEGIREWWDLKPGAPKPKANQQKQDDGRGLVLPGYKYLGPFNGLDKGEPVNAADAAALEHDKAYDQQLKAGDNPYLRYNHADAEFQERLQEDTSFGGNLGRAVFQAKKRVLEPLGLVEEGAKTAPGKKRPVEPSPQRSPDSSTGIGKKGQQPAGKRLNFGQTGDSESVPDPQPIGEPPAAPSSVGSGTMAAGGGAPMADNNEGADGVGSSSGNWHCDSTWLGDRVITTSTRTWALPTYNNHLYKQISNGTSGGSTNDNTYFGYSTPWGYFDFNRFHCHFSPRDWQRLINNNWGFRPKRLSFKLFNIQVKEVTQNEGTKTIANNLTSTIQVFTDSEYQLPYVLGSAHQGCLPPFPADVFMIPQYGYLTLNNGSQAVGRSSFYCLEYFPSQMLRTGNNFSFSYTFEDVPFHSSYAHSQSLDRLMNPLVDQYLYYLSRTQSTGGTAGTQQLLFSQAGPSNMSAQARNWLPGPCYRQQRVSTTLSQNNNSNFAWTGATKYHLNGRDSLVNPGVAMATNKDDEDRFFPSSGILMFGKQGAGKDNVDYSNVMLTSEEEIKTTNPVATEQYGVVADNLQQQNTAPIVGAVNSQGALPGMVWQNRDVYLQGPIWAKIPHTDGNFHPSPLMGGFGLKHPPPQILIKNTPVPADPPTAFNQAKLNSFITQYSTGQVSVEIEWELQKENSKRWSPEIQYTSNYYKSTNVDFAVNTEGVYSEPRPIGTRYLTRNL

SEQ ID NO: 471 - DNA, 2217 bp, Artificial Sequence
  source: /note="Description of Artificial Sequence: Synthetic polynucleotide"
atggttgccgatggttatcttccagattggctcgaggacaacctctctgagggcattcgcgagtggtgggacctgaaacctggagccccgaaacccaaagccaaccagcaaaagcagggcgacggccggggtctggtgcttcctggctacaagtacctcggacccttcaacggactcgacaagggggagcccgtcaacgcggcggacgcagcggccctcgagcacgacaaggcctacgaccagcagcttaaagcgggtgacaatccgtacctgcggtataatcacgccgacgccgagcttcaggagcgtctgcaagaagatacgtcttttgggggcaacctcgggcgagcagtcttccaggccaagaagcgggttctcgaacctctcggtctggttgaggaaggcgctaagacggctcctggaaagaagagaccggtagagccgtcaccacagcgttcccccgactcctccacgggcatcggcaagaaaggccagcagcccgccagaaagagactcaatttcggtcagactggcgactcagagtcagtccccgaccctcaacctatcggagaacctccagcagcgccctctagtgtgggatctggtacaatggctgcaggcggtggcgcgccaatggcagacaataacgaaggtgccgacggagtgggtagttcctcgggaaattggcattgcgattccacatggctgggcgacagagtcatcaccaccagcacccgaacctgggccctgcccacctacaacaaccacctctacaagcaaatctccaacgggacctcgggaggcagcaccaacgacaacacctactttggctacagcaccccctgggggtattttgactttaacagattccactgccacttctcaccacgtgactggcagcgactcatcaacaacaactggggattccggcccaagagactcagcttcaagctcttcaacatccaggtcaaagaggtcacgcagaatgaaggcaccaagaccatcgccaataacctcaccagcaccatccaggtgtttacggactcggaataccagctgccgtacgtcctcggctctgcccaccagggctgccagcctccgttcccggcggacgtcttcatgattcctcagtacggctacctgactctcaacaacggtagtcaggccgtgggacgttcctccttctactgcctggagtacttcccctctcagatgctgagaacgggcaacaacttttccttcagctacactttcgaggacgtgcctttccacagcagctacgcgcacagccagagtttggacaggctgatgaatcctctcatcgaccagtacctgtactacctgtcaagaacccagtctacgggaggcacagcgggaacccagcagttgctgttttctcaggccgggcctagcaacatgtcggctcaggccagaaactggctgcctggaccctgctacagacagcagcgcgtctccacgacactgtcgcaaaacaacaacagcaactttgcctggactggtgccaccaagtatcatctgaacggcagagactctctggtgaatccgggcgtcgccatggcaaccaacaaggacgacgaggaccgcttcttcccatccagcggcatcctcatgtttggcaagcagggagctggaaaagacaacgtggactatagcaacgtgatgctaaccagcgaggaagaaatcaagaccaccaaccccgtggccacagaacagtatggcgtggtggctgataacctacagcagcaaaacaccgctcctattgtgggggccgtcaacagccagggagccttacctggcatggtctggcagaaccgggacgtgtacctgcagggtcctatttgggccaagattcctcacacagatggcaactttcacccgtctcctttaatgggcggctttggacttaaacatccgcctcctcagatcctcatcaaaaacactcctgttcctgcggatcctccaacagcgttcaaccaggccaagctgaattctttcatcacgcagtacagcaccggacaagtcagcgtggagatcgagtgggagccgcagaaggagaacagcaagcgctggaacccagagattcagtatacttccaactactacaaatctacaaatgtggactttgctgttaatactgagggtgtttactctgagcctcgccccattggcactcgttacctcacccgtaatctgtaa

SEQ ID NO: 472 - protein, 738 aa, Artificial Sequence
  source: /note="Description of Artificial Sequence: Synthetic polypeptide"
MVADGYLPDWLEDNLSEGIREWWDLKPGAPKPKANQQKQGDGRGLVLPGYKYLGPFNGLDKGEPVNAADAAALEHDKAYDQQLKAGDNPYLRYNHADAELQERLQEDTSFGGNLGRAVFQAKKRVLEPLGLVEEGAKTAPGKKRPVEPSPQRSPDSSTGIGKKGQQPARKRLNFGQTGDSESVPDPQPIGEPPAAPSSVGSGTMAAGGGAPMADNNEGADGVGSSSGNWHCDSTWLGDRVITTSTRTWALPTYNNHLYKQISNGTSGGSTNDNTYFGYSTPWGYFDFNRFHCHFSPRDWQRLINNNWGFRPKRLSFKLFNIQVKEVTQNEGTKTIANNLTSTIQVFTDSEYQLPYVLGSAHQGCQPPFPADVFMIPQYGYLTLNNGSQAVGRSSFYCLEYFPSQMLRTGNNFSFSYTFEDVPFHSSYAHSQSLDRLMNPLIDQYLYYLSRTQSTGGTAGTQQLLFSQAGPSNMSAQARNWLPGPCYRQQRVSTTLSQNNNSNFAWTGATKYHLNGRDSLVNPGVAMATNKDDEDRFFPSSGILMFGKQGAGKDNVDYSNVMLTSEEEIKTTNPVATEQYGVVADNLQQQNTAPIVGAVNSQGALPGMVWQNRDVYLQGPIWAKIPHTDGNFHPSPLMGGFGLKHPPPQILIKNTPVPADPPTAFNQAKLNSFITQYSTGQVSVEIEWEPQKENSKRWNPEIQYTSNYYKSTNVDFAVNTEGVYSEPRPIGTRYLTRNL

SEQ ID NO: 473 - DNA, 2217 bp, Artificial Sequence
  source: /note="Description of Artificial Sequence: Synthetic polynucleotide"
atggctgccgatggttatcttccagattggctcgaggacaacctctctgagggcattcgcgagtggtgggacctgaaacctggagccccgaaacccaaagccaaccagcaaaagcaggacgacggccggggtctggtgcttcctggctacaagtacctcggacccttcaacggactcgacaagggggagcccgtcaacgcggcggacgcagcggccctcgagcacgacaaggcctacgaccagcagctcaaagcgggtgacaatccgtacctgcggtataatcacgccgacgccgagtttcaggagcgtctgcaagaagatacgtcttttgggggcaacctcgggcgagcagtcttccaggccaagaagcgggttctcgaacctctcggtctggttgaggaaggcgctaagacggctcctggaaagaagagaccggtagagccgtcaccacagcgttcccccgactcctccacgggcatcggcaagaaaggccagcagcccgccagaaagagactcaatttcggtcagactggcgactcagagtcagtccccgaccctcaacctatcggagaacctccagcagcgccctctagtgtgggatctggtacaatggctgcaggcggtggcgcaccaatggcagacaataacgaaggtgccgacggagtgggtagttcctcgggaaattggcattgcgattccacatggctgggcgacagagtcatcaccaccagcacccgaacctgggccctgcccacctacaacaaccacctctacaagcaaatctccaacgggacctcgggaggcagcaccaacgacaacacctactttggctacagcaccccctgggggtattttgactttaacagattccactgccacttctcaccacgtgactggcagcgactcatcaacaacaactggggattccggcccaagagactcagcttcaagctcttcaacatccaggtcaaagaggtcacgcagaatgaaggcaccaagaccatcgccaatagcctcaccagcaccatccaggtgtttacggactcggaataccagctgccgtacgtcctcggctctgcccaccagggctgcctgcctccgttcccggcggacgtcttcatgattcctcagtacggctacctgactcccaacaacggtagtcaggccgtgggacgttcctccttctactgcctggagtacttcccctctcagatgctgagaacgggcaacaacttttccttcagctacactttcgaggacgtgcctttccacagcagctacgcgcacagccagagtttggacaggctgatgaatcctctcatcgaccagtacctgtactacctgtcaagaacccagtctacgggaggcacagcgggaacccagcagttgctgtcttctcaggccgggcctagcaacatgtcggctcaggccagaaactggctgcctggaccctgctacagacagcagcgcgtctccacgacactgtcgcaaaacaacaacagcaactttgcctggactggtgccaccaagtatcatctgaacggcagagactctctggtgaatccgggcgtcgccatggcaaccaacaaggacgacgaggaccgcttcttcccatccagcggcatcctcatgtttggcaagcagggagctggaaaagacaacgtggactatagcaacgtgatgctaaccagcgaggaagaaatcaagaccaccaaccccgtggccacagaacagtatggcgtggtggctgataacctacagcagcaaaacaccgctcctattgtgggggccgtcaacagccagggagccttacctggcatggtctggcagaaccgggacgtgtacttgcagggtcctatttgggccaagattcctcacacagatggcaactttcacccgtctcctttaatgggcggctttggacttaaacatccgcctcctcagatcctcatcaaaaacactcctgttcctgcggatcctccaacagcgttcaaccaggccaagctgaattctttcatcacgcagtacagcaccggacaagtcagcgtggagatcgagtgggagctgcagaaggagaacagcaagcgctggaacccagagattcagtatacttccaactactacaaatctacaaatgtggactttgctgttaatactgagggtgtttactctgagcctcgccccattggcactcgttacctcacccgtaatctgtaa

SEQ ID NO: 474 - protein, 738 aa, Artificial Sequence
  source: /note="Description of Artificial Sequence: Synthetic polypeptide"
MAADGYLPDWLEDNLSEGIREWWDLKPGAPKPKANQQKQDDGRGLVLPGYKYLGPFNGLDKGEPVNAADAAALEHDKAYDQQLKAGDNPYLRYNHADAEFQERLQEDTSFGGNLGRAVFQAKKRVLEPLGLVEEGAKTAPGKKRPVEPSPQRSPDSSTGIGKKGQQPARKRLNFGQTGDSESVPDPQPIGEPPAAPSSVGSGTMAAGGGAPMADNNEGADGVGSSSGNWHCDSTWLGDRVITTSTRTWALPTYNNHLYKQISNGTSGGSTNDNTYFGYSTPWGYFDFNRFHCHFSPRDWQRLINNNWGFRPKRLSFKLFNIQVKEVTQNEGTKTIANSLTSTIQVFTDSEYQLPYVLGSAHQGCLPPFPADVFMIPQYGYLTPNNGSQAVGRSSFYCLEYFPSQMLRTGNNFSFSYTFEDVPFHSSYAHSQSLDRLMNPLIDQYLYYLSRTQSTGGTAGTQQLLSSQAGPSNMSAQARNWLPGPCYRQQRVSTTLSQNNNSNFAWTGATKYHLNGRDSLVNPGVAMATNKDDEDRFFPSSGILMFGKQGAGKDNVDYSNVMLTSEEEIKTTNPVATEQYGVVADNLQQQNTAPIVGAVNSQGALPGMVWQNRDVYLQGPIWAKIPHTDGNFHPSPLMGGFGLKHPPPQILIKNTPVPADPPTAFNQAKLNSFITQYSTGQVSVEIEWELQKENSKRWNPEIQYTSNYYKSTNVDFAVNTEGVYSEPRPIGTRYLTRNL

SEQ ID NO: 475 - protein, 738 aa, Artificial Sequence
  source: /note="Description of Artificial Sequence: Synthetic polypeptide"
MAADGYLPDWLEDNLSEGIREWWDLKPGAPKPKANQQKQDDGRGLVLPGYKYLGPFNGLDKGEPVNAADAAALEHDKAYDQQLKAGDNPYLRYNHADAEFQERLQEDTSFGGNLGRAVFQAKKRVLEPLGLVEEGAKTAPGKKRPVEPSPQRSPDSSTGIGKKGQQPARKRLNFGQTGDSESVPDPQPIGEPPAAPSSVGSGTMAAGGGAPMADNNEGADGVGSSSGNWHCDSTWLGDRVITTSTRTWALPTYNNHLYKQISNGTSGGSTNDNTYFGYSTPWGYFDFNRFHCHFSPRDWQRLINNNWGFRPKRLSFKLFNIQVKEVTQNEGTKTIANNLTSTIQVFTDSEYQLPYVLGSAHQGCLPPFPADVFMIPQYGYLTLNNGSQAVGRSSFYCLEYFPSQMLRTGNNFSFSYTFEDVPFHSSYVHSQSLDRLMNPLIDQYLYYLSRTQSTGGTAGTQQLLFSQAGPSNMSAQARNWLPGPCYRQQRVSTTLSQNNNSNFAWTGATKYHLNGRDSLVNSGVAMATNKDDEDRFFPSSGILMFGKQGAGKDNVDYSNVMLTSEEEIKTTNPVATEQYGVVADNLQQQNTAPIVGAVNSQGALPGMVWQNRDVYLQGPIWAKIPHTDGNFHPSPLMGGFGLKHPPPQILIKNTPVPADPPTAFNQAKLNSFITQYSTGQVSVEIEWELQKENSKRWNPEIQYTSNYYKSTNVDFAVNTEGVYSEPRPIGTRYPTRNL

SEQ ID NO: 476 - DNA, 2217 bp, Artificial Sequence
  source: /note="Description of Artificial Sequence: Synthetic polynucleotide"
atggctgccgatggttatcttccagattggctcgaggacaacctctctgagggcattcgcgagtggtgggacctgaaacctggagccccgaaacccaaagccaaccagcaaaagcaggacgacggccggggtctggtgcttcctggctacaagtacctcggacccttcaacggactcgacaagggggagcccgtcaacgcggcggacgcagcggccctcgagcacgacaaggcctacgaccagcagctcaaagcgggtgacaatccgtacctgcggtataatcacgccgacgccgagtttcaggagcgtctgcaagaagatacgtcttttgggggcaacctcgggcgagcagtcttccaggccaagaagcgggttctcgaacctctcggtctggttgaggaaggcgctaagacggctcctggaaagaagagaccggtagagccgtcaccacagcgttcccccgactcctccacgggcatcggcaagaaaggccagcagcccgccagaaagagactcaatttcggtcagactggcgactcagagtcagtccccgaccctcaacctatcggagaacctccagcagcgccctctagtgtgggatctggtacaatggctgcaggcggtggcgcaccaatggcagacaataacgaaggtgccgacggagtgggtagttcctcgggaaattggcattgcgattccacatggctgggcgacagagtcatcaccaccagcacccgaacctgggccctgcccacctacaacaaccacctctacaagcaaatctccaacgggacctcgggaggcagcaccaacgacaacacctactttggctacagcaccccctgggggtattttgactttaacagattccactgccacttctcaccacgtgactggcagcgactcatcaacaacaactggggattccggcccaagagactcagcttcaagctcttcaacatccaggtcaaagaggtcacgcagaatgaaggcaccaagaccatcgccaataacctcaccagcaccatccaggtgtttacggactcggaataccagctgccgtacgtcctcggctctgcccaccagggctgcctgcctccgttcccggcggacgtcttcatgattcctcagtacggctacctgactctcaacaacggtagtcaggccgtgggacgttcctccttctactgcctggagtacttcccctctcagatgctgagaacgggcaacaacttttccttcagctacactttcgaggacgtgcctttccacagcagctacgtgcacagccagagtttggacaggctgatgaatcctctcatcgaccagtacctgtactacctgtcaagaacccagtctacgggaggcacagcgggaacccagcagttgctgttttctcaggccgggcctagcaacatgtcggctcaggccagaaactggctgcctggaccctgctacagacagcagcgcgtctccacgacactgtcgcaaaacaacaacagcaactttgcctggactggtgccaccaagtatcatctgaacggcagagactctctggtgaattcgggcgtcgccatggcaaccaacaaggacgacgaggaccgcttcttcccatccagcggcatcctcatgtttggcaagcagggagctggaaaagacaacgtggactatagcaacgtgatgctaaccagcgaggaagaaatcaagaccaccaaccccgtggccacagaacagtatggcgtggtggctgataacctacagcagcaaaacaccgctcctattgtgggggccgtcaacagccagggagccttacctggcatggtctggcagaaccgggacgtgtacctgcagggtcctatttgggccaagattcctcacacagatggcaactttcacccgtctcctttaatgggcggctttggacttaaacatccgcctcctcagatcctcatcaaaaacactcctgttcctgcggatcctccaacagcgttcaaccaggccaagctgaattctttcatcacgcagtacagcaccggacaagtcagcgtggagatcgagtgggagctgcagaaggagaacagcaagcgctggaacccagagattcagtatacttccaactactacaaatctacaaatgtggactttgctgttaatactgagggtgtttactctgagcctcgccccattggcactcgttaccccacccgtaatctgtaa

SEQ ID NO: 477 - protein, 734 aa, Artificial Sequence; identical to SEQ ID NO: 302
  source: /note="Description of Artificial Sequence: Synthetic polypeptide"

SEQ ID NO: 478 - DNA, 2214 bp, Artificial Sequence
  source: /note="Description of Artificial Sequence: Synthetic polynucleotide"
atggctgctgacggttatcttccagattggctcgaggacaacctctctgagggcattcgcgagtggtgggacctgaaacctggagccccgaaacccaaagccaaccagcagaagcaggacgacggccggggtctggtgcttcctggctacaagtacctcggacccttcaacggactcgacaagggggagcccgtcaacgcggcggacgcagcggccctcgagcacgacaaggcctacgaccagcagctcaaagcgggtgacaatccgtacctgcggtataaccacgccgacgccgagtttcaggagcgtctgcaagaagatacgtcttttgggggcaacctcgggcgagcagtcttccaggccaagaagcgggttctcgaacctctcggtctggttgaggaagctgctaagacggctcctggaaagaagagaccggtagaaccgtcacctcagcgttcccccgactcctccacgggcatcggcaagaaaggccagcagcccgctagaaagagactgaactttgggcagactggcgactcagagtcagtccccgaccctcaacctctcggagaaccaccagcaggcccctctggtctgggatctggtacaatggctgcaggcggtggcgctccaatggcagacaataacgaaggcgccgacggagtgggtaatgcctcaggaaattggcattgcgattccacatggctgggcgacagagtcatcaccaccagcacccgaacctgggctttgcccacctacaacaaccacctctacaagcaaatctccagtcagtcagcaggtagcaccaacgacaacgtctacttcggctacagcaccccctgggggtattttgacttcaacagattccactgtcacttctcaccacgtgactggcagcgactcatcaacaacaactggggattccggcccaagaagctcaacttcaagctcttcaacatccaagtcaaggaggtcacgacgaatgacggcgtcacgaccatcgctaataaccttaccagcacggttcaggtcttttcggactcggagtaccagctgccgtacgtcctcggctctgcccaccagggctgcctgcctccgttcccggcggacgtcttcatgattcctcagtacggctacctgactctgaacaatggcagccaatcggtgggacgttcatccttctactgcctggaatacttcccttctcaggtgctgagaacgggtaacaacttcaccttcagttacaccttcgaggacgtgcctttccacagcagctacgcgcacagccagagcctagaccggctgatgaatcccctcatcgaccagtacctgtattacctggctagaacacagagtaacccaggaggcacatctggcaatcgggaactgcagttttaccagggcgggccttccaccatggccgaacaagccaagaactggttacctggaccttgcttccggcaacaaagagtttccaaaacactggatcaaaacaacaacagcaactttgcttggactggtgccaccaaatatcacctgaacggcagaaactcattggtgaatcctggtgtcgccatggcaactcacaaggacgacgaggaccgctttttcccatccagcggagtcctgatttttggaaaaactggagcaaccaacaagactacattggaaaacgtgttaatgacaaatgaagaagaaattcgtcctactaatcctgtggccacagaagaatacgggatagtcagcagcaatttacaagcggccaatactgcagcccagacacaagttgtcaacaaccagggagccttacctggcatggtctggcagaaccgggacgtgtacctgcagggtcccatctgggccaaaattcctcacacagacggcaactttcacccgtctccgctgatgggcggctttggactgaagcatccgcctcctcagatcctgatcaaaaacactcctgttcctgctaatcccccggaggtgtttacgcctgccaagtttgcttctttcatcacacagtacagcaccggccaggtcagcgtggagatcgagtgggagctgcagaaggagaacagcaagcgctggaacccagagattcagtatacctccaattttgacaaacagactggtgtggactttgccgttgacagccagggtgtttattctgagcctcgccccattggtactcgttacctcacccgtaatctgtaa

SEQ ID NO: 479 - protein, 737 aa, Artificial Sequence
  source: /note="Description of Artificial Sequence: Synthetic polypeptide"
MAADGYLPDWLEDNLSEGIREWWDLKPGAPKPKANQQKQDDGRGLVLPGYKYLGPFNGLDKGEPVNAADAAALEHDKAYDQQLKAGDNPYLRYNHADAEFQERLQEDTSFGGNLGRAVFQAKKRVLEPLGLVEEAAKTAPGKKRPVEPSPQRSPDSSTGIGKKGQQPARKRLNFGQTGDSESVPDPQPLGEPPAGPSGLGSGTMAAGGGAPMADNNEGADGVGNASGNWHCDSTWLGDRVITTSTRTWALPTYNNHLYKQISSQSAGSTNDNVYFGYSTPWGYFDFNRFHCHFSPRDWQRLINNNWGFRPKKLNFKLFNIQVKEVTTNDGVTTIANNLTSTVQVFSDSEYQLPYVLGSAHQGCLPPFPADVFMIPQYGYLTLNNGSQSVGRSSFYCLEYFPSQVLRTGNNFTFSYTFEDVPFHSSYAHSQSLDRLMNPLIDQYLYYLARTQSNPGGTSGNRELQFYQGGPSTMAEQAKNWLPGPCFRQQRVSKTLDQNNNSNFAWTGATKYHLNGRNSLVNPGVAMATHKDDEDRFFPSSGVLIFGKTGATNKTTLENVLMTNEEEIRPTNPVATEEYGIVSSNLQAANTAAQTQVVNNQGALPGMVWQNRDVYLQGPIWAKIPHTDGNFHPSPLMGGFGLKHPPPQILIKNTPVPANPPEVFTPAKFASFITQYSTGQVSVEIEWELQKENSKRWNPEIQYTSNFDKQTGVDFAVDSQGVYSEPRPIGTRYLTRNL

SEQ ID NO: 480 - DNA, 2214 bp, Artificial Sequence
  source: /note="Description of Artificial Sequence: Synthetic polynucleotide"
atggctgccgatggttatcttccagattggctcgaggacaacctctctgagggcattcgcgagtggtgggacctgaaacctggagccccgaaacccaaagccaaccagcaaaagcaggacgacggccggggtctggtgcttcctggctacaagtacctcggacccttcaacggactcgacaagggggagcccgtcaacgcggcggacgcagcggccctcgagcacgacaaggcctacgaccagcagctcaaagcgggtgacaatccgtacctgcggtataatcacgccgacgccgagtttcaggagcgtctgcaagaagatacgtcttttgggggcaacctcgggcgagcagtcttccaggccaagaagcgggttctcgaacctctcggtctggttgaggaaggcgctaagacggctcctggaaagaagagaccggtagagccgtcaccacagcgttcccccgactcctccacgggcatcggcaagaaaggccagcagcccgccagaaagagactcaatttcggtcagactggcgactcagagtcagtccccgaccctcaacctatcggagaacctccagcagcgccctctagtgtgggatctggtacaatggctgcaggcggtggcgcaccaatggcagacaataacgaaggtgccgacggagtgggtagttcctcgggaaattggcattgcgattccacacggctgggcgacagagtcatcaccaccagcacccggacctgggctttgcccacctacaacaaccacctctacaagcaaatctccagtcagtcagcaggtagcaccaacgacaacgtctacttcggctacagcaccccctgggggtattttgacttcaacagattccactgtcacttctcaccacgtgactggcagcggctcatcaacaacaactggggattccggcccaagaagctcaacttcaagctgttcaacatccaggtcaaggaggtcacaacgaatgacggcgtcacgaccatcgccaataaccttaccagcacggttcaggtcttttcggactcggaataccagctgccctacgtcctcggctccgcacaccagggctgcctgcctccgttcccggcggacgtcttcatgattccccagtacggctacctgactctgaacaatggcagccaatcggtgggtcgttcctctttctactgcctggaatatttcccttctcaaatgctgagaacgggcaacaacttcaccttcagctacaccttcgaggacgttcccttccacagcagctacgcacacagccagagcctggaccggctgatgaatcctcttatcgaccagtacctgtattacctggccagaacacagagcaacgcaggaggcacagctggcaatcgggaactgcagttttatcagggcgggcctaccaccatggccgaacaagccaaaaactggctgcctggaccttgcttccggcaacgaagagtctccaagacgctggatcaaaacaacaacagcaactttgcttggactggtgccaccaaataccatctaaatggaagaaattcattggttaatcccggtgtcgccatggcaacccacaaggacgacgaggaacgcttcttcccttcgagcggagtcctgatttttggaaaaactggagcagctaataagactacactggaaaatgtgttaatgacaaatgaagaggaaattcgtcctaccaacccggtagccaccgaggaatacgggactgttagcagcaacctgcaggcggctaacactgcagcccagacacaagttgtcaacaaccagggagccttacctggtatggtctggcagaaccgggacgtgtacctgcagggtcccatctgggccaagattcctcacacggacggcaactttcacccgtctccgctgatgggcggctttggactgaagcatccgcctcctcagatcctgatcaaaaacactcctgttcctgctaatcccccggaggtgtttacgcctgccaagtttgcttctttcatcacacagtacagcaccggccaggtcagcgtggagatcgagtgggagctgcagaaggagaacagcaagcgctggaacccagagattcagtatacctccaattttgacaaacagactggtgtggactttgccgttgacagccagggtgtttattctgagcctcgccccattggtactcgttacctcacccgtaatctgtaa

SEQ ID NO: 481 - protein, 737 aa, Artificial Sequence
  source: /note="Description of Artificial Sequence: Synthetic polypeptide"
MAADGYLPDWLEDNLSEGIREWWDLKPGAPKPKANQQKQDDGRGLVLPGYKYLGPFNGLDKGEPVNAADAAALEHDKAYDQQLKAGDNPYLRYNHADAEFQERLQEDTSFGGNLGRAVFQAKKRVLEPLGLVEEGAKTAPGKKRPVEPSPQRSPDSSTGIGKKGQQPARKRLNFGQTGDSESVPDPQPIGEPPAAPSSVGSGTMAAGGGAPMADNNEGADGVGSSSGNWHCDSTRLGDRVITTSTRTWALPTYNNHLYKQISSQSAGSTNDNVYFGYSTPWGYFDFNRFHCHFSPRDWQRLINNNWGFRPKKLNFKLFNIQVKEVTTNDGVTTIANNLTSTVQVFSDSEYQLPYVLGSAHQGCLPPFPADVFMIPQYGYLTLNNGSQSVGRSSFYCLEYFPSQMLRTGNNFTFSYTFEDVPFHSSYAHSQSLDRLMNPLIDQYLYYLARTQSNAGGTAGNRELQFYQGGPTTMAEQAKNWLPGPCFRQRRVSKTLDQNNNSNFAWTGATKYHLNGRNSLVNPGVAMATHKDDEERFFPSSGVLIFGKTGAANKTTLENVLMTNEEEIRPTNPVATEEYGTVSSNLQAANTAAQTQVVNNQGALPGMVWQNRDVYLQGPIWAKIPHTDGNFHPSPLMGGFGLKHPPPQILIKNTPVPANPPEVFTPAKFASFITQYSTGQVSVEIEWELQKENSKRWNPEIQYTSNFDKQTGVDFAVDSQGVYSEPRPIGTRYLTRNL

SEQ ID NO: 482 - DNA, 2208 bp, Artificial Sequence
  source: /note="Description of Artificial Sequence: Synthetic polynucleotide"
atggctgccgatggttatcttccagattggctcgaggacactctctctgaaggaataagacagtggtggaagctcaaacctggcccaccaccaccaaagcccgcagagcggcataaggacgacagcaggggtcttgtgcttcctgggtacaagtacctcggacccttcaacggactcgacaagggggagccggtcaacgaggcagacgccgcggccctcgagcacgacaaggcctacgaccggcagctcgacagcggagacaacccgtacctcaagtacaaccacgccgacgcggagtttcaggagcgtcttaaagaagatacgtcttttgggggcaacctcggacgagcagtcttccaggcgaaaaagagggttcttgaacctctgggcctggttgaggaacctgttaagacggctccgggaaaaaagaggccggtagagcactctcctgcggagccagactcctcctcgggaaccggaaaagcgggccagcagcctgcaagaaaaagattgaattttggtcagactggagacgcagactccgtacctgacccccagcctctcggacagccaccagcagccccctctggtttgggatctactacaatggctacaggcagtggcgcaccaatggcagacaataacgagggtgccgatggagtgggtaattcttcaggaaattggcattgcgattcccaatggctgggcgacagagtcatcaccaccagcacccgaacctgggcccagcccacctacaacaaccacctctacaagcaaatctcaagccaatcaggagcctcaaacgacaaccactactttggctacagcaccccttgggggtattttgacttcaacagattccactgccacttttcaccacgtgactggcaaagactcatcaacaacaactggggattccgacccaagagactcaacttcaagctctttaacattcaagtcaaagaggtcacgcagaatgacggtacgacgacgattgccaataaccttaccagcacggttcaggtgtttactgactcggagtaccagctcccgtacgtcctcgggtcggcgcatcaaggatgcctcccgccgtttccagcggacgtcttcatggtcccacagtatggatacctcaccctgaacaacgggagtcaggcggtaggacgctcttccttttactgcctggagtactttccttctcagatgcttcgtactggaaacaactttcagttcagctacacctttgaagacgttcctttccacagcagctacgctcacagccagagtctggatcggctgatgaatcctctgatcgaccagtacctgtattatctgaacaaaacacaatcaaatagtggagctcttcagcagtctcggctactgtttagtcaagctggacccaccagcatgtctcttcaagctaaaaactggctacctggaccttgctacagacagcagcgtctgtcaaagcaggcaaacgacaacaacaacagcaactttccctggactgcggctacaaagtaccacctaaatggccgggactcgttggttaatccaggaccagctatggccagtcacaaagacgatgaagaaaagtttttccccatgcatggaaccctgatatttggtaaacaaggaacaaatgctaacgacgcggatttggacaatgtcatgattacagatgaagaagaaatccgcaccaccaatcccgtggctacggagcagtacggatatgtgtcaaataatttgcaaaactcaaatactggtccaactactggaactgtcaatcaccgaggagcgttacctggcatggtgtggcaggatcgagacgtgtacctgcagggacccatttgggccaagattcctcacaccgatggacactttcatccttctccactgatgggaggttttgggctcaaacacccgcctcctcagatcatgatcaaaaacactcccgttccagccaatcctcccacaaacttcagttctgccaagtttgcttctttcatcacacagtattccacggggcaggtcagcgtggagatcgagtgggagctgcagaaagagaacagcaaacgctggaatcccgaaattcagtacacttccaactacaacaaatctgttaatgtggactttactgtggacactaatggcgtgtattcagagcctcgccccattggcaccagatacctgactcgtaatctgtaa

SEQ ID NO: 483 - protein, 735 aa, Artificial Sequence
  source: /note="Description of Artificial Sequence: Synthetic polypeptide"
MAADGYLPDWLEDTLSEGIRQWWKLKPGPPPPKPAERHKDDSRGLVLPGYKYLGPFNGLDKGEPVNEADAAALEHDKAYDRQLDSGDNPYLKYNHADAEFQERLKEDTSFGGNLGRAVFQAKKRVLEPLGLVEEPVKTAPGKKRPVEHSPAEPDSSSGTGKAGQQPARKRLNFGQTGDADSVPDPQPLGQPPAAPSGLGSTTMATGSGAPMADNNEGADGVGNSSGNWHCDSQWLGDRVITTSTRTWAQPTYNNHLYKQISSQSGASNDNHYFGYSTPWGYFDFNRFHCHFSPRDWQRLINNNWGFRPKRLNFKLFNIQVKEVTQNDGTTTIANNLTSTVQVFTDSEYQLPYVLGSAHQGCLPPFPADVFMVPQYGYLTLNNGSQAVGRSSFYCLEYFPSQMLRTGNNFQFSYTFEDVPFHSSYAHSQSLDRLMNPLIDQYLYYLNKTQSNSGALQQSRLLFSQAGPTSMSLQAKNWLPGPCYRQQRLSKQANDNNNSNFPWTAATKYHLNGRDSLVNPGPAMASHKDDEEKFFPMHGTLIFGKQGTNANDADLDNVMITDEEEIRTTNPVATEQYGYVSNNLQNSNTGPTTGTVNHRGALPGMVWQDRDVYLQGPIWAKIPHTDGHFHPSPLMGGFGLKHPPPQIMIKNTPVPANPPTNFSSAKFASFITQYSTGQVSVEIEWELQKENSKRWNPEIQYTSNYNKSVNVDFTVDTNGVYSEPRPIGTRYLTRNL

SEQ ID NO: 484 - DNA, 2217 bp, Artificial Sequence
  source: /note="Description of Artificial Sequence: Synthetic polynucleotide"
atggctgccgatggttatcttccagattggctcgaggacaacctctctgagggcattcgcgagtggtgggcgctgaaacctggagccccgaagcccaaagccaaccagcaaaagcaggacgacggccggggtctggtgcttcctggctacaagtacctcggacccttcaacggactcgacaagggggagcccgtcaacgcggcggacgcagcggccctcgagcacgacaaggcctacgaccagcagctgcaggcgggtgacaatccgtacctgcggtataatcacgccgacgccgagtttcaggagcgtctgcaagaagatacgtcttttgggggcaacctcgggcgagcagtcttccaggccaagaagcgggttctcgaacctctcggtctggttgaggaaggcgctaagacggctcctggaaagaagagaccggtagagccgtcaccacagcgttcccccgactcctccacgggcatcggcaagaaaggccagcagcccgccagaaagagactcaatttcggtcagactggcgactcagagtcagtccccgaccctcaacctatcggagaacctccagcagcgccctctagtgtgggatctggtacaatggctgcaggcggtggcgcgccaatggcagacaataacgaaggtgccgacggagtgggtagttcctcgggaaattggcattgcgattccacatggctgggcgacagagtcatcaccaccagcacccgaacctgggccctgcccacctacaacaaccacctctacaagcaaacctccaacgggacctcgggaggcagcaccaacgacaacacctactttggctacagcaccccctgggggtattttgactttaacagattccactgccacttctcaccacgtgactggcagcgactcatcaacaacaactggggattccggcccaagagactcagcttcaagctcttcaacatccaggtcaaagaggtcacgcagaatgaaggcaccaagaccatcgccaataacctcaccagcaccatccaggtgtttacggactcggaataccagctgccgtacgtcctcggctctgcccaccagggctgcctgcctccgttcccggcggacgtcttcatgattcctcagtacggctacctgactctcaacaacggtagtcaggccgtgggacgttcctccttctactgcctggagtacttcccctctcagatgctgagaacgggcaacaacttttccttcagctacactttcgaggacgtgcctttccacagcagctacgcgcacagccagagtttggacaggctgatgaatcctctcatcgaccagtacctgtactacctgtcaagaacccagtctacgggaggcacagcgggaacccagcagttgctgttttctcaggccgggcctagcaacatgtcggctcaggccagaaactggctgcctggaccctgctacagacagcagcgcgtctccacgacactgtcgcaaaacaacaacagcaactttgcctggactggtgccaccaagtatcatctgaacggcagagactctctggtgaatccgggcgtcgccatggcaaccaacaaggacgacgaggaccgcttcttcccatccagcggcatcctcatgtttggcaagcagggagctggaaaagacaacgtggactatagcaacgtgatgctaaccagcgaggaagaaatcaagaccaccaaccccgtggccacagaacagtatggcgtggtggctgataacctacagcagcaaaacaccgctcctattgtgggggccgtcaacagccagggagccttacctggcatggtctggcagaaccgggacgtgtacctgcagggtcctatttgggccaagattcctcacacagatggcaactttcacccgtctcctttaatgggcggctttggacttaaacatccgcctcctcagatcctcatcaaaaacactcctgttcctgcggatcctccaacagcgttcaaccaggccaagctgaattctttcatcacgcagtacagcaccggacaagtcagcgcggagatcgagtgggagctgcagaaggagaacagcaagcgctggaacccagagattcagtatacttccaactactacaaatctacaaatgtggactttgctgttaatactgagggtgtttactctgagcctcgccccattggcactcgttacctcacccgtaatctgtaa

SEQ ID NO: 485 - protein, 738 aa, Artificial Sequence
  source: /note="Description of Artificial Sequence: Synthetic polypeptide"
MAADGYLPDWLEDNLSEGIREWWALKPGAPKPKANQQKQDDGRGLVLPGYKYLGPFNGLDKGEPVNAADAAALEHDKAYDQQLQAGDNPYLRYNHADAEFQERLQEDTSFGGNLGRAVFQAKKRVLEPLGLVEEGAKTAPGKKRPVEPSPQRSPDSSTGIGKKGQQPARKRLNFGQTGDSESVPDPQPIGEPPAAPSSVGSGTMAAGGGAPMADNNEGADGVGSSSGNWHCDSTWLGDRVITTSTRTWALPTYNNHLYKQTSNGTSGGSTNDNTYFGYSTPWGYFDFNRFHCHFSPRDWQRLINNNWGFRPKRLSFKLFNIQVKEVTQNEGTKTIANNLTSTIQVFTDSEYQLPYVLGSAHQGCLPPFPADVFMIPQYGYLTLNNGSQAVGRSSFYCLEYFPSQMLRTGNNFSFSYTFEDVPFHSSYAHSQSLDRLMNPLIDQYLYYLSRTQSTGGTAGTQQLLFSQAGPSNMSAQARNWLPGPCYRQQRVSTTLSQNNNSNFAWTGATKYHLNGRDSLVNPGVAMATNKDDEDRFFPSSGILMFGKQGAGKDNVDYSNVMLTSEEEIKTTNPVATEQYGVVADNLQQQNTAPIVGAVNSQGALPGMVWQNRDVYLQGPIWAKIPHTDGNFHPSPLMGGFGLKHPPPQILIKNTPVPADPPTAFNQAKLNSFITQYSTGQVSAEIEWELQKENSKRWNPEIQYTSNYYKSTNVDFAVNTEGVYSEPRPIGTRYLTRNL

SEQ ID NO: 486 - DNA, 2217 bp, Artificial Sequence
  source: /note="Description of Artificial Sequence: Synthetic polynucleotide"
atggctgctgacggttatcttccagattggctcgaggacaacctctctgagggcattcgcgagtggtgggacctgaaacctggagcccccaagcccaaggccaaccagcagaagcaggacgacggccggggtctggtgcttcctggctacaagtacctcggacccttcaacggactcgacaagggggagcccgtcaacgcggcggacgcagcggccctcgagcacgacaaggcctacgaccagcagctcaaagcgggtgacaatccgtacctgcggtataatcacgccgacgccgagtttcaggagcgtctgcaagaagatacgtcttttgggggcaacctcgggcgagcagtcttccaggccaagaagcgggttctcgaacctctcggtctggttgaggaagctgctaagacggctcctggaaagaagagaccggtagaaccgtcacctcagcgttcccccgactcctccacgggcatcggcaagaaaggccagcagcccgctagaaagagactgaactttgggcagactggcgactcagagtcagtccccgaccctcaaccaatcggagaacctccagcagcgccctctagtgtgggatctggtacaatggccgcaggcggtggcgcaccaatggcagacaataacgaaggtgccgacggagtgggtagttcctcgggaaattggcattgcgattccacatggctgggcgacagagtcatcaccaccagcacccgaacctgggccctgcccacctacaacaaccacctctacaagcaaatctccaacgggacctcgggaggcagcaccaacgacaacacctactttggctacagcaccccctgggggtattttgactttaacagattccactgccacttctcaccacgtgactggcagcgactcatcaacaacaactggggattccggcccaagagactcagcttcaagctcttcaacatccaggtcaaagaggtcacgcagaatgaaggcaccaagaccatcgccaataacctcaccagcaccatccaggtgtttacggactcggaataccagctgccgtacgtcctcggctctgcccaccagggctgcctgcctccgttcccggcggacgtcttcatgattcctcagtacggctacctgactctcaacaacggtagtcaggccgtgggacgttcctccttctactgcctggagtacttcccctctcagatgctgagaacgggcaacaacttttccttcagctacactttcgaggacgtgcctttccacagcagctacgcgcacagccagagtttggacaggctgatgaatcctctcatcgaccagtacctgtactacctgtcaagaacccagtctacgggaggcacagcgggaacccagcagctgctgttttctcaggccgggcctagcaacatgtcggctcaggccagaaactggctgcctggaccctgctacagacagcagcgcgtctccacgacactgtcgcaaaacaacaacagcaactttgcctggactggtgccaccaagtatcatctgaacggcagagactctctggtgaatccgggcgtcgccatggcaaccaacaaggacgacgaggaccgcttcttcccatccagcggcatcctcatgtttggcaagcagggagctggaaaagacaacgtggactatagcaacgtgatgctaaccagcgaggaagaaatcaagaccaccaaccccgtggccacagaacagtatggcgtggtggctgataacctacagcagcaaaacaccgctcctattgtgggggccgtcaacagccagggagccttacctggcatggtctggcagaaccgggacgtgtacctgcagggtcctatttgggccaagattcctcacacagatggcaactttcacccgtctcctttaatgggcggctttggacttaaacatccgcctcctcagatcctcatcaaaagcactcctgttcctgcggatcctccaacagcgttcaaccaggccaagctgaattctttcatcacgcagtacagcaccggacaagtcagcgtggagatcgagtgggagctgcagaaggagaacagcaagtgctggaacccagagattcagtatacttccaactactacaaatctacaaatgtggactttgctgttaatactgagggtgtttactctgagcctcgccccattggcactcgttacctcacccgtaatctgtaa

SEQ ID NO: 487 - protein, 738 aa, Artificial Sequence
  source: /note="Description of Artificial Sequence: Synthetic polypeptide"
MAADGYLPDWLEDNLSEGIREWWDLKPGAPKPKANQQKQDDGRGLVLPGYKYLGPFNGLDKGEPVNAADAAALEHDKAYDQQLKAGDNPYLRYNHADAEFQERLQEDTSFGGNLGRAVFQAKKRVLEPLGLVEEAAKTAPGKKRPVEPSPQRSPDSSTGIGKKGQQPARKRLNFGQTGDSESVPDPQPIGEPPAAPSSVGSGTMAAGGGAPMADNNEGADGVGSSSGNWHCDSTWLGDRVITTSTRTWALPTYNNHLYKQISNGTSGGSTNDNTYFGYSTPWGYFDFNRFHCHFSPRDWQRLINNNWGFRPKRLSFKLFNIQVKEVTQNEGTKTIANNLTSTIQVFTDSEYQLPYVLGSAHQGCLPPFPADVFMIPQYGYLTLNNGSQAVGRSSFYCLEYFPSQMLRTGNNFSFSYTFEDVPFHSSYAHSQSLDRLMNPLIDQYLYYLSRTQSTGGTAGTQQLLFSQAGPSNMSAQARNWLPGPCYRQQRVSTTLSQNNNSNFAWTGATKYHLNGRDSLVNPGVAMATNKDDEDRFFPSSGILMFGKQGAGKDNVDYSNVMLTSEEEIKTTNPVATEQYGVVADNLQQQNTAPIVGAVNSQGALPGMVWQNRDVYLQGPIWAKIPHTDGNFHPSPLMGGFGLKHPPPQILIKSTPVPADPPTAFNQAKLNSFITQYSTGQVSVEIEWELQKENSKCWNPEIQYTSNYYKSTNVDFAVNTEGVYSEPRPIGTRYLTRNL

SEQ ID NO: 488 - protein, 738 aa, Artificial Sequence
  source: /note="Description of Artificial Sequence: Synthetic polypeptide"
MAADGYLPDWLEDNLSEGIREWWDLKPGAPKPKANQQKQDDGRGLVLPGYKYLGPFNGLDKGEPVNAADAAALEHDKAYDQQLKAGDNPYLRYNHADAEFQERLQEDTSFGGNLGRAVFQAKKRVLEPLGLVEEAAKTAPGKKRPVEPSPQRSPDSSTGIGKKGQQPARKRLNFGQTGDSESVPDPQPIGEPPAAPSSVGSGTMAAGGGAPMADNNEGADGVGSSSGNWHCDSTWLGDRVITTSTRTWALPTYNNHLYKQISNGTSGGSTNDNTYFGYSTPWGYFDFNRFHCHFSPRDWQRLINNNWGFRPKRLSFKLFNIQVKEVTQNEGTKTIANNLTSTIQVFTDSEYQLPYVLGSAHQGCLPPFPADVFMIPQYGYLTLNNGSQAVGRSSFYCLEYFPSQMLRTGNNFSFSYTFEDVPFHSSYAHSQSLDRLMNPLIDQYLYYLSRTQSTGGTAGTQQLLFSQAGPSNMSAQARNWLPGPCYRQQRVSTTLSQNNNSNFAWTGATKYHLNGRDSLVNPGVAMATNKDDEDRFFPSSGILMFGKQGAGKDNVDYSNVMLTSEEEIKTTNPVATEQYGVVADNLQQQNTAPIVGAVNSQGALPGMVWQNRDVYLQGPIWAKIPHTDGNFHPSPLMGGFGLKHPPPQILIKSTPVPADPPTAFNQAKLNSFITQYSTGQVSVEIEWELQKENSKRWNPEIQYTSNYYKSTNVDFAVNTEGVYSEPRPIGTRYLTRNL

SEQ ID NO: 489 - DNA, 2217 bp, Artificial Sequence
  source: /note="Description of Artificial Sequence: Synthetic polynucleotide"
atggctgctgacggttatcttccagattggctcgaggacaacctctctgagggcattcgcgagtggtgggacctgaaacctggagcccccaagcccaaggccaaccagcagaagcaggacgacggccggggtctggtgcttcctggctacaagtacctcggacccttcaacggactcgacaagggggagcccgtcaacgcggcggacgcagcggccctcgagcacgacaaggcctacgaccagcagctcaaagcgggtgacaatccgtacctgcggtataaccacgccgacgccgagtttcaggagcgtctgcaagaagatacgtcttttgggggcaacctcgggcgagcagtcttccaggccaagaagcgggttctcgaacctctcggtctggttgaggaagctgctaagacggctcctggaaagaagagaccggtagaaccgtcacctcagcgttcccccgactcctccacgggcatcggcaagaaaggccagcagcccgctagaaagagactgaactttgggcagactggcgactcagagtcagtccccgaccctcaaccaatcggagaaccaccagcaggcccctctggtctgggatctggtacaatggctgcaggcggtggcgcaccaatggctgacaataacgagggcgccgacggagtgggtaatgcctcaggaaattggcattgcgattccacatggctgggcgacagagtcatcaccaccagcacccgaacctgggctttgcccacctacaacaaccacctctacaagcaaatctccagtcagtcagcaggtagcaccaacgacaacgtctacttcggctacagcaccccctgggggtattttgacttcaacagattccactgtcacttctcaccacgtgactggcagcggctcatcaacaacaactggggattccggcccaagaagctcaacttcaagctgttcaacatccaggtcaaggaggtcacaacgaatgacggcgtcacgaccatcgccaataaccctaccagcacggttcaggtcttttcggactcggaataccagctgccctacgtcctcggctccgcacaccagggctgcctgcctccgttcccggcggacgtcttcatgattccccagtacggctacctgactctgaacaatggcagccaatcggtgggtcgttcctctttctactgcctggaatatttcccttctcaaatgctgagaacgggcaacaacttcaccttcagctacaccttcgaggacgttcccttccacagcagctacgcacacagccagagcctggaccggctgatgaatcctcttatcgaccagtacctgtattacctggccagaacacagagcaacgcaggaggcacagctggcaatcgggaactgcagttttatcagggcgggcctaccaccatggccgaacaagccaaaaactggctgcctggaccctgctacagacagcagcgcgtctccacgacactgtcgcaaaacaacaacagcaactttgcctggactggtgccaccaagtatcatctgaacggcagagactctctggtgaatccgggcgtcgccatggcaaccaacaaggacgacgaggaccgcttcttcccatccagcggcatcctcatgtttggcaagcagggagctggaaaagacaacgtggactatagcaacgtgatgctaaccagcgaggaagaaatcaagaccaccaaccccgtggccacagaacagtatggcgtggtggctgataacctacagcagcaaaacaccgctcctattgtgggggccgtcaacagccagggagccttacctggcatggtctggcagaaccgggacgtgtacctgcagggtcctatttgggccaagattcctcacacagatggcaactttcacccgtctcctttaatgggcggctttggacttaaacatccgcctcctcagatcctcatcaaaaacactcctgttcctgcggatcctccaacagcgttcaaccaggccaagctgaattctttcatcacgcagtacagcaccggacaagtcagcgtggagatcgagtgggagctgcagaaggagaacagcaagcgctggaacccagagattcagtatacttccaactactacaaatctacaaatgtggactttgctgttaatactgagggtgtttactctgagcctcgccccattggcactcgttacctcacccgtaatctgtaa

SEQ ID NO: 490 - protein, 738 aa, Artificial Sequence
  source: /note="Description of Artificial Sequence: Synthetic polypeptide"
MAADGYLPDWLEDNLSEGIREWWDLKPGAPKPKANQQKQDDGRGLVLPGYKYLGPFNGLDKGEPVNAADAAALEHDKAYDQQLKAGDNPYLRYNHADAEFQERLQEDTSFGGNLGRAVFQAKKRVLEPLGLVEEAAKTAPGKKRPVEPSPQRSPDSSTGIGKKGQQPARKRLNFGQTGDSESVPDPQPIGEPPAGPSGLGSGTMAAGGGAPMADNNEGADGVGNASGNWHCDSTWLGDRVITTSTRTWALPTYNNHLYKQISSQSAGSTNDNVYFGYSTPWGYFDFNRFHCHFSPRDWQRLINNNWGFRPKKLNFKLFNIQVKEVTTNDGVTTIANNPTSTVQVFSDSEYQLPYVLGSAHQGCLPPFPADVFMIPQYGYLTLNNGSQSVGRSSFYCLEYFPSQMLRTGNNFTFSYTFEDVPFHSSYAHSQSLDRLMNPLIDQYLYYLARTQSNAGGTAGNRELQFYQGGPTTMAEQAKNWLPGPCYRQQRVSTTLSQNNNSNFAWTGATKYHLNGRDSLVNPGVAMATNKDDEDRFFPSSGILMFGKQGAGKDNVDYSNVMLTSEEEIKTTNPVATEQYGVVADNLQQQNTAPIVGAVNSQGALPGMVWQNRDVYLQGPIWAKIPHTDGNFHPSPLMGGFGLKHPPPQILIKNTPVPADPPTAFNQAKLNSFITQYSTGQVSVEIEWELQKENSKRWNPEIQYTSNYYKSTNVDFAVNTEGVYSEPRPIGTRYLTRNL

SEQ ID NO: 491 - DNA, 2208 bp, Artificial Sequence
  source: /note="Description of Artificial Sequence: Synthetic polynucleotide"
atggctgccgatggttatcttccagattggctcgaggacaacctctctgagggcattcacgagtggtgggacccgaaacctggagccccgaaacccaaagccaaccagcaaaagcaggacgacggccggggtctggtgcttcctggctacaagtacctcggacccttcaacggactcgacaagggggagcccgtcaacgcggcggacgcagcggccctcgagcacgacaaggcctacgaccagcagctcaaagcgggtgacaatccgtacctgcggtataatcacgccgacgccgagtttcaggagcgtctgcaagaagatacgtcttttgggggcaacctcgggcgagcagtcttccaggccaagaagcgggttctcgaacctctcggtctggttgaggaaggcgctaagacggctcctggaaagaagagaccggtagagccgtcaccacagcgttcccccgactcctccacgggcatcggcaagaaaggccagcagcccgccagaaagagactcaatttcggtcagactggcgactcagagtcagtccccgaccctcaacctatcggagaacctccagcagcgccctctagtgtgggatctggtacaatggctgcaggcggtggcgcaccaatggcagacaataacgaaggtgccgacggagtgggtagttcctcgggaaattggcattgcgattccacatggctgggcgacagagtcatcaccaccagcacccgaacctgggccctgcccacccacaacaaccacctctacaagcaaatctccaacgggacctcgggaggcagcaccaacgacaacgtctacttcggctacagcaccccctgggggtattttgacttcaacagattccactgtcacttctcaccacgtgaccggcagcgactcatcaacaacaactggggattccggcccaagagactcagcttcaagctcttcaacatccaggtcaaagaggtcacgcagaatgaaggcaccaagaccatcgccaataacctcaccagcaccatccaggtgtttacggactcggaataccagctgccgtacgtcctcggctctgcccaccagggctgcctgcctccgttcccggcggacgtcttcatgattcctcagtacggctacctgactctcaacaacggtagtcaggccgtgggacgttcctccttctactgcctggagtacttcccctctcagatgctgagaacgggcaacaacttttccttcagctacactttcgaggacgtgcctttccacagcagctacgcgcacagccagagtttggacaggctgatgaatcctctcatcgaccagtacctgtactacctgtcaagaacccagtctacggaaggcacagcgggaacccagcagttgctgttttctcaggccgggcctagcaacatgtcggctcaggccagaaactggctgcctggaccctgctacagacagcagcgcgtctccacgacactgtcgcaaaacaacaacagcaactttgcctggactggtgccaccaagtatcatctgaacggcagagactctctggtgaatccgggcgtcgccatggcaacccacaaggacgacgaggaacgcttcttcccttcgagcggagtcctgatttttggaaaaactggagcagctaataagactacactggaaaatgtgttaatgacaaatgaagaggaaattcgtcctaccaacccggtagccaccgaggaatacgggactgttagcagcaacctgcaggcggctaacactgcagcccagacacaagttgtcaacaaccagggagccttacctggtatggtctggcagaaccgggacgtgtacctgcagggtcccatctgggccaagattcctcacacggacggcaactttcacccgtctccgctgatgggcggctttggactgaagcatcctcagatcctgatcaaaaacactcctgttcctgctaatcccccggaggtgtttacgcctgccaagtttgcttctttcatcacacagtacagcaccggccaggtcagcgtggagatcgagtgggagctgcagaaggagaacagcaagcgctggaacccagagattcagtatacctccaattttgacaaacagactggtgtggactttgccgttgacagccagggtgtttattctgagcctcgccccattggtactcgttacctcacccgtaatctgtaa

SEQ ID NO: 492 - protein, 735 aa, Artificial Sequence
  source: /note="Description of Artificial Sequence: Synthetic polypeptide"
MAADGYLPDWLEDNLSEGIHEWWDPKPGAPKPKANQQKQDDGRGLVLPGYKYLGPFNGLDKGEPVNAADAAALEHDKAYDQQLKAGDNPYLRYNHADAEFQERLQEDTSFGGNLGRAVFQAKKRVLEPLGLVEEGAKTAPGKKRPVEPSPQRSPDSSTGIGKKGQQPARKRLNFGQTGDSESVPDPQPIGEPPAAPSSVGSGTMAAGGGAPMADNNEGADGVGSSSGNWHCDSTWLGDRVITTSTRTWALPTHNNHLYKQISNGTSGGSTNDNVYFGYSTPWGYFDFNRFHCHFSPRDRQRLINNNWGFRPKRLSFKLFNIQVKEVTQNEGTKTIANNLTSTIQVFTDSEYQLPYVLGSAHQGCLPPFPADVFMIPQYGYLTLNNGSQAVGRSSFYCLEYFPSQMLRTGNNFSFSYTFEDVPFHSSYAHSQSLDRLMNPLIDQYLYYLSRTQSTEGTAGTQQLLFSQAGPSNMSAQARNWLPGPCYRQQRVSTTLSQNNNSNFAWTGATKYHLNGRDSLVNPGVAMATHKDDEERFFPSSGVLIFGKTGAANKTTLENVLMTNEEEIRPTNPVATEEYGTVSSNLQAANTAAQTQVVNNQGALPGMVWQNRDVYLQGPIWAKIPHTDGNFHPSPLMGGFGLKHPQILIKNTPVPANPPEVFTPAKFASFITQYSTGQVSVEIEWELQKENSKRWNPEIQYTSNFDKQTGVDFAVDSQGVYSEPRPIGTRYLTRNL

SEQ ID NO: 493 - protein, 738 aa, Artificial Sequence
  source: /note="Description of Artificial Sequence: Synthetic polypeptide"
MAADGYLPDWLEDNLSEGIREWWDLKPGAPKPKANQQKQDDGRGLVLPGYKYLGPFNGLDKGEPVNAADAAALEHDKAYDQQLKAGDNPYLRYNHADAEFQERLQEDTSFGGNLGRAVFQAKKRVLEPLGLVEEGAKTAPGKKRPVEPSPQRSPDSSTGIGKKGQQPARKRLNFGQTGDSESVPDPQPIGEPPAAPSSVGSGTMAAGGGAPMADNNEGADGVGSSSGNWHCDSTWLGDRVITTSTRTWALPTYNNHLYKQISNGTSGGSTNDNTYFGYSTPWGYFDFNRFHCHFSPRDWQRPINNNWGFRPKRLSFKLFNIQVKEVTQNEGTKTIANNLTSTIQVFTDSEYQLPYVLGSAHQGCLPPFPADVFMIPQYGYLTLNNGSQAVGRSSFYCLEYFPSQMLRTGNNFSFSYPFEDVPFHSSYAHSQSLDRLMNPLIDQYLYYLSRTQSTGGTAGTQQLLFSQAGPSNMSAQARNWLPGPCYRQQRVSTTLSQNNNSNFAWTGATKYHLNGRDSLVNPGVAMATNKDDEDRFFPSSGILMFGKQGAGKDNVDYSNVMLTSEEEIKTTNPVATEQYGVVADNLQQQDTAPIVGAVNSQGALPGMVWQNRDVYLQGPIWAKIPHTDGNFHPSPLMGGFGLKHPPPQVLIKNTPVPADPPTAFNQAKLNSFITQYSTGQVSVEIEWELQKENSKRWNPEIQYTSNYYKSTNVDFAVNTEGVYSEPRPIGTRYLTRNL

SEQ ID NO: 494 - DNA, 2217 bp, Artificial Sequence
  source: /note="Description of Artificial Sequence: Synthetic polynucleotide"
atggctgccgatggttatcttccagattggctcgaggacaacctctctgagggcattcgcgagtggtgggacctgaaacctggagccccgaaacccaaggccaaccagcaaaagcaggacgacggccggggtctggtgcttcctggctacaagtacctcggacccttcaacggactcgacaagggggagcccgtcaacgcggcggacgcagcggccctcgagcacgacaaggcctacgaccagcagctcaaagcgggtgacaatccgtacctgcggtataatcacgccgacgccgagtttcaggagcgtctgcaagaagatacgtcttttgggggcaacctcgggcgagcagtcttccaggccaagaagcgggttctcgaacctctcggtctggttgaggaaggcgctaagacggctcctggaaagaagagaccggtagagccgtcaccacagcgttcccccgactcctccacgggcatcggcaagaaaggccagcagcccgccagaaagagactcaatttcggtcagactggcgactcagagtcagtccccgaccctcaacctatcggagaacctccagcagcgccctctagtgtgggatctggtacaatggctgcaggcggtggcgcaccaatggcagacaataacgaaggtgccgacggagtgggtagttcctcgggaaattggcattgcgattccacatggctgggcgacagagtcatcaccaccagcacccgaacctgggccctgcccacctacaacaaccacctctacaagcaaatctccaacgggacctcgggaggcagcaccaacgacaacacctactttggctacagcaccccctgggggtattttgactttaacagattccactgccacttctcaccacgtgactggcagcgacccatcaacaacaactggggattccggcccaagagactcagcttcaagctcttcaacatccaggtcaaagaggtcacgcagaatgaaggcaccaagaccatcgccaataacctcaccagcaccatccaggtgtttacggactcggaataccagctgccgtacgtcctcggctctgcccaccagggctgcctgcctccgttcccggcggacgtcttcatgattcctcagtacggctacctgactctcaacaacggtagtcaggccgtgggacgttcctccttctactgcctggagtacttcccctctcagatgctgagaacgggcaacaacttttccttcagctaccctttcgaggacgtgcctttccacagcagctacgcgcacagccagagtttggacaggctgatgaatcctctcatcgaccagtacctgtactacctgtcaagaacccagtctacgggaggcacagcgggaacccagcagttgctgttttctcaggccgggcctagcaacatgtcggctcaggccagaaactggctgcctggaccctgctacagacagcagcgcgtctccacgacactgtcgcaaaacaacaacagcaactttgcctggactggtgccaccaagtatcatctgaacggcagagactctctggtgaatccgggcgtcgccatggcaaccaacaaggacgacgaggaccgcttcttcccatccagcggcatcctcatgtttggcaagcagggagctggaaaagacaacgtggactatagcaacgtgatgctaaccagcgaggaagaaatcaagaccaccaaccccgtggccacagaacagtatggcgtggtggctgataacctacagcagcaagacaccgctcctattgtgggggccgtcaacagccagggagccttacctggcatggtctggcagaaccgggacgtgtacctgcagggtcctatttgggccaagattcctcacacagatggcaactttcacccgtctcctttaatgggcggctttggacttaaacatccgcctcctcaggtcctcatcaaaaacactcctgttcctgcggatcctccaacagcgttcaaccaggccaagctgaattctttcatcacgcagtacagcaccggacaagtcagcgtggagatcgagtgggagctgcagaaggagaacagcaagcgctggaacccagagattcagtatacttccaactactacaaatctacaaatgtggactttgctgttaatactgagggtgtttactctgagcctcgccccattggcactcgttacctcacccgtaatctgtaa

SEQ ID NO: 495 - DNA, 2214 bp, Artificial Sequence
  source: /note="Description of Artificial Sequence: Synthetic polynucleotide"
atggctgctgacggttatcttccagattggctcgaggacaacctctctgagggcattcgcgagtggtgggacctgaaacctggagcccccaagcccaaggccaaccagcagaagcaggacgacggccggggtctggtgcttcctggctacaagtacctcggacccttcaacggactcgacaagggggagcccgtcaacgcggcggacgcagcggccctcgagcacgacaaggcctacgaccagcagctcaaagcgggtgacaatccgtacctgcggtataaccacgccgacgccgagttccaggagcgtctgcaagaagatacgtcttttgggggcaacctcgggcgagcagtcttccaggccaagaagcgggttctcgaacctctcggtctggctgaggaagctgctaagacggctcctggaaagaagagaccggtagaaccgtcacctcagcgttcccccgactcctccacgggcatcggcaagaaaggccagcagcccgctagaaagagactgaactttgggcagactggcgactcagagtcagtccccgaccctcaaccaatcggagagccaccagcaggcccctctggtctgggatctggtacaatggctgcaggcggtggcgcaccaatggctgacaataacaagggcgccgacggagtgggtaatgcctcaggaaattggcattgcgattccacatggctgggcgacagagtcatcaccaccagcacccgaacctgggctttgcccacctacaacaaccacctctacaagcaaatctccagtcagtcagcaggtagcaccaacgacaacgtctacttcggctacagcaccccctgggggtattttgacttcaacagattccactgtcacttctcaccacgtgactggcagcggctcatcaacaacaactggggattccggcccaagaagctcaacttcaagctgttcaacatccaggtcaaggaggtcacaacgggtgacggcgtcacgaccatcgccaataaccttaccagcacggttcaggtcttttcggactcggaataccagctgccctacgtcctcggctccgcacaccagggctgcctgcctccgttcccggcggacgtcttcatgattccccagtacggctacctgactctgaacaatgacagccaatcggtgggtcgttcctctttctactgcctggaatatttcccttctcaaatgctgagaacgggcaacaacttcaccttcagctacaccttcgaggacgttcccttccacagcagctacgcacacagccagagcctggaccggctgatgaatcctcttatcgaccagtacctgtattacctggccagaacacagagcaacgcaggaggcacagctggcaatcgggaactgcagttttatcagggcgggcctaccaccatggccgaacaagccaaaaactggctgcctggaccttgcttccggcaacaaagagtctccaagacgctggatcaaaacaacaacagcaactttgcttggactggtgccaccaaataccatctaaatggaagaaattcattggttaatcccggtgtcgccatggcaacccacaaggacgacgaggaacgcttcttcccttcgagcggagtcctgatttttggaaaaactggagcagctaataagactacactggaaaatgtgttaatgacaaatgaagaggaaattcgtcctaccaacccggtagccaccgaggaatacgggactgttagcagcaacctgcaggcggctaacactgcagcccagacacaagttgtcaacaaccagggagccttacctggtatggtctggcagaaccgggacgtgtacctgcagggtcccatctgggccaagattcctcacacggacggcaactttcacccgtctccgctgatgggcggctttggactgaagcatccgcctcctcagatcctgatcaaaaacactcctgttcctgctaatcccccggaggtgtttacgcctgccaagtttgcttctttcatcacacagtacagcaccggccaggtcagcgtggagatcgagtgggagctgcagaaggagaacagcaagcgctggaacccagagattcagtatacctccaattttgacaaacagactggtgtggactttgccgttgacagccagggtgtttattctgagcctcgccccattggtactcgttacctcacccgtaatctgtaa

SEQ ID NO: 496 - protein, 737 aa, Artificial Sequence
  source: /note="Description of Artificial Sequence: Synthetic polypeptide"
MAADGYLPDWLEDNLSEGIREWWDLKPGAPKPKANQQKQDDGRGLVLPGYKYLGPFNGLDKGEPVNAADAAALEHDKAYDQQLKAGDNPYLRYNHADAEFQERLQEDTSFGGNLGRAVFQAKKRVLEPLGLAEEAAKTAPGKKRPVEPSPQRSPDSSTGIGKKGQQPARKRLNFGQTGDSESVPDPQPIGEPPAGPSGLGSGTMAAGGGAPMADNNKGADGVGNASGNWHCDSTWLGDRVITTSTRTWALPTYNNHLYKQISSQSAGSTNDNVYFGYSTPWGYFDFNRFHCHFSPRDWQRLINNNWGFRPKKLNFKLFNIQVKEVTTGDGVTTIANNLTSTVQVFSDSEYQLPYVLGSAHQGCLPPFPADVFMIPQYGYLTLNNDSQSVGRSSFYCLEYFPSQMLRTGNNFTFSYTFEDVPFHSSYAHSQSLDRLMNPLIDQYLYYLARTQSNAGGTAGNRELQFYQGGPTTMAEQAKNWLPGPCFRQQRVSKTLDQNNNSNFAWTGATKYHLNGRNSLVNPGVAMATHKDDEERFFPSSGVLIFGKTGAANKTTLENVLMTNEEEIRPTNPVATEEYGTVSSNLQAANTAAQTQVVNNQGALPGMVWQNRDVYLQGPIWAKIPHTDGNFHPSPLMGGFGLKHPPPQILIKNTPVPANPPEVFTPAKFASFITQYSTGQVSVEIEWELQKENSKRWNPEIQYTSNFDKQTGVDFAVDSQGVYSEPRPIGTRYLTRNL

SEQ ID NO: 497 - DNA, 2217 bp, Artificial Sequence
  source: /note="Description of Artificial Sequence: Synthetic polynucleotide"
atggctgccgatggttatcttccagattggctcgaggacaacctctctgagggcattcgcgagtggtgggacctgaaacctggagccccgaaacccaaagccaaccagcaaaagcaggacgacggccggggtctggtgcttcctggctacaagtacctcggacccttcaacggactcgacaagggggagcccgtcaacgcggcggacgcagcggccctcgagcacgacaaggcctacgaccagcagctcaaagcgggtgacaatccgtacctgcggtataatcacgccgacgccgagtttcaggagcgtctgcaagaagatacgtcttttgggggcaacctcgggcgagcagtcttccaggccaagaagcgggttctcgaacctctcggtctggttgaggaaggcgctaagacggctcctggaaagaagagaccggtagagccgtcaccacagcgttcccccgactcctccacgggcatcggcaagaaaggccagcagcccgccagaaagagactcaatttcggtcagactggcgactcagagtcagtccccgaccctcaacctatcggagaacctccagcagcgccctctagtgtgggatctggtacaatggctgcaggcggtggcgcaccaatggcagacaataacgaaggtgccgacggagtgggtagttcctcgggaaattggcattgcgattccacatggctgggcgacagagtcatcaccaccagcacccgaacctgggccctgcccacctacaacaaccacctctacaagcaaatctccaacgggacctcgggaggcagcaccaacgacaacacctactttggctacagcaccccctgggggtattttgactttaacagattccactgccacttctcaccacgtgactggcagcgactcatcaacaacaactggggattccggcccaagagactcagcttcaagctcttcaacatccaggtcaaagaggtcacgcagaatgaaggcaccaagaccatcgccaataacctcaccagcaccatccaggtgtttacggactcggaataccagctgccgtacgtcctcggctctgcccaccagggctgcctgcctccgttcccggcggacgtcttcatgattcctcagtacggctacctgactctcaacaacggtagtcaggccgtgggacgttcctccttctactgcctggagtacttcccctctcagatgctgagaacgggcaacaacttttccttcagctacactttcgaggacgtgcctttccacagcagctacgcgcacagccagagtttggacaggctgatgaatcctctcatcgaccagtacctgtactacctgtcaagaacccagtctacgggaggcacagcgggaacccagcagttgctgttttctcaggccgggcctagcaacatgtcggctcaggccagaaactggctgcctggaccctgctacagacagcagcgcgtctccacgacactgtcgcaaaacaacaacagcaactttgcctggactggtgccaccaagtatcatctgaacggcagagactctctggtgaatccgggcgtcgccatggcaaccaacaaggacgacgaggaccgcttcttcccatccagcggcatcctcatgtttggcaagcagggagctggaaaagacaacgtggactatagcaacgtgatgctaaccagcgaggaagaaatcaagaccaccaaccccgtggccacagaacagtatggcgtggtggctgataacctacagcagcaaaacaccgctcctattgtgggggccgtcaacagccagggagccttacctggcatggtctggcagaaccgggacgtgtacctgcagggtcctatttgggccaagattcctcacacagatggcaactttcacccgtctcctttaatgggcggctttggacttaaacatccgcctcctcagatcctcatcaaaaacactcctgttcctgcggatcctccaacagcgttcaaccaggccaagctgaattctttcatcacgcagtacagcaccggacaagtcagcgtggagatcgtgtgggagctgcagaaggagaacagcaagcgcaggaacccagagattcagtatacttccaactactacaaatctacaaatgtggactttgctgttaatactgagggtgtttactctgagcctcgccccattggcactcgttacctcacccgtaatctgtaa

SEQ ID NO: 498 - protein, 738 aa, Artificial Sequence
  source: /note="Description of Artificial Sequence: Synthetic polypeptide"
MAADGYLPDWLEDNLSEGIREWWDLKPGAPKPKANQQKQDDGRGLVLPGYKYLGPFNGLDKGEPVNAADAAALEHDKAYDQQLKAGDNPYLRYNHADAEFQERLQEDTSFGGNLGRAVFQAKKRVLEPLGLVEEGAKTAPGKKRPVEPSPQRSPDSSTGIGKKGQQPARKRLNFGQTGDSESVPDPQPIGEPPAAPSSVGSGTMAAGGGAPMADNNEGADGVGSSSGNWHCDSTWLGDRVITTSTRTWALPTYNNHLYKQISNGTSGGSTNDNTYFGYSTPWGYFDFNRFHCHFSPRDWQRLINNNWGFRPKRLSFKLFNIQVKEVTQNEGTKTIANNLTSTIQVFTDSEYQLPYVLGSAHQGCLPPFPADVFMIPQYGYLTLNNGSQAVGRSSFYCLEYFPSQMLRTGNNFSFSYTFEDVPFHSSYAHSQSLDRLMNPLIDQYLYYLSRTQSTGGTAGTQQLLFSQAGPSNMSAQARNWLPGPCYRQQRVSTTLSQNNNSNFAWTGATKYHLNGRDSLVNPGVAMATNKDDEDRFFPSSGILMFGKQGAGKDNVDYSNVMLTSEEEIKTTNPVATEQYGVVADNLQQQNTAPIVGAVNSQGALPGMVWQNRDVYLQGPIWAKIPHTDGNFHPSPLMGGFGLKHPPPQILIKNTPVPADPPTAFNQAKLNSFITQYSTGQVSVEIVWELQKENSKRRNPEIQYTSNYYKSTNVDFAVNTEGVYSEPRPIGTRYLTRNL

SEQ ID NO: 499 - protein, 738 aa, Artificial Sequence
  source: /note="Description of Artificial Sequence: Synthetic polypeptide"
MAADGYLPDWLEDNLSEGIREWWDLKPGAPKPKANQQKQDDGRGLVLPGYKYLGPFNGLDKGEPVNAADAAALEHDKAYDQQLKAGDNPYLRYNHADAEFQERLQEDTSFGGNLGRAVFQAKKRVLEPLGLVEEGAKTAPGKKRPVEPSPQRSPDSSTGIGKKGQQPARKRLNFGQTGDSESVPDPQPIGEPPAAPSSVGSGTMAAGGGAPMADNNEGADGVGSSSGNWHCDSTWLGDRVITTSTRTWALPTYNNHLYKQISNGTSGGSTNDNTYFGYSTPWGYFDFNRFHCHFSPRDWQRLINNNWGFRPKRLSFKLFNIQVKEVTQNEGTKTIANNLTSTIQVFTDSEYQLPYVLGSAHQGCLPPFPADVFMIPQYGYLTLNNGSQAVGRSSFYCLEYFPSQMLRTGNNFSFSYTFEDVPFHSSYAHSQSLDRLMNPLIDQYLYYLSRTQSTGGTAGTQQLLFSQAGPSNMSAQARNWLPGPCYRQQRVSTTLSQNNNSNFAWTGATKYHLNGRDSLVNPGVAMATNKDDEDRFFPSSGILMFGKQGAGKDNVDYSNVMLTSEEEIKTTNPVATEQYGVVADNLQQQNTAPIVGAVNSQGALPGMVWQNRDVYLQGPIWAKIPHTDGNFHPSPLMGGFGLKHPPPQILIKNTPVPADPPTAFNQAKLNSFITQYSTGQVSVEIEWELQKENSKRWNPEIQYTSNYYKSTNVDFAVNTEGVYSEPRPIGTRYLTRNL

SEQ ID NO: 500 - protein, 738 aa, Artificial Sequence
  source: /note="Description of Artificial Sequence: Synthetic polypeptide"
MAADGYLPDWLEDNLSEGIREWWDLKPGAPKPKANQQKQDDGRGLVLPGYKYLGPFNGLDKGEPVNAADAAALEHDKAYDQQLKAGDNPYLRYNHADAEFQERLQEDTSFGGNLGRAVFQAKKRVLEPLGLVEEGAKTAPGKKRPVEPSPQRSPDSSTGIGKKGQQPARKRLNFGQTGDSESVPDPQPIGEPPAAPSSVGSGTMAAGGGAPMADNNEGADGVGSSSGNWHCDSTWLGDRVITTSTRTWALPTYNNHLYKQISNGTSGGSTNDNTYFGYSTPWGYFDFNRFHCHFSPRDWQRLINNNWGFRPKRLSFKLFNIQVKEVTQNEGTKTIANNLTSTIQVFTDSEYQLPYVLGSAHQGCLPPFPADVFMIPQYGYLTLNNGSQAVGRSSFYCLEYFPSQMLRTGNNFSFSYTFEDVPFHSSYAHSQSLDRLMNPLIDQYLYYLSRTQSTGGTAGTQQLLFSQAGPSNMSAQARNWLPGPCYRQQRVSTTLSQNNNSNFAWTGATKYHLNGRDSLVNPGVAMATNKDDEDRFFPSSGILMFGKQGAGKDNVDYSNVMLTSEEEIKTTNPVATEQYGVVADNLQQQNTAPIVGAVNSQGALPGMVWQNRDVYLQGPIWAKIPHTDGNFHPSPLMGGFGLKHPPPQILIKNTPVPADPPTAFNQAKLNSFITQYSTGQVSVEIVWELQKENSKRWNPEIQYTSNYYKSTNVDFAVNTEGVYSEPRPIGTRYLTRNL

SEQ ID NO: 501 - protein, 738 aa, Artificial Sequence; identical to SEQ ID NO: 499
  source: /note="Description of Artificial Sequence: Synthetic polypeptide"

SEQ ID NO: 502 - DNA, 2214 bp, Artificial Sequence
  source: /note="Description of Artificial Sequence: Synthetic polynucleotide"
atggctgctgacggttatcttccagattggctcgaggacaacctctctgagggcattcgcgagtggtgggacctgaaacctggagcccccaagcccaaggccaaccagcagaagcaggacgacggccggggtctggtgcttcctggctacaagtacctcggacccttcaacggactcgacaagggggagcccgtcaacgcggcggacgcagcggccctcgagcacgacaaggcctacgaccagcagctcaaagcgggtgacaatccgtacctgcggtataaccacgccgacgccgagtttcaggagcgtctgcaagaagatacgtcttttgggggcaacctcgggcgagcagtcttccaggccaagaagcgggttctcgaacctctcggtctggttgaggaagctgctaagacggctcctggaaagaagagaccggtagaaccgtcacctcagcgttcccccgactcctccacgggcatcggcaagaaaggccagcagcccgctagaaagagactgaactttgggcagactggcgactcagagtcagtccccgaccctcaaccaatcggagaaccaccagcaggcccctctggtctgggatctggtacaatggctgcaggcggtggcgctccaatggcagacaataacgaaggcgccgacggagtgggtaatgcctcaggaaattggcattgcgattccacatggctgggcgacagagtcatcaccaccagcacccgaacctgggctttgcccacctacaacaaccacctctacaagcaaatctccagtcagtcagcaggtagcaccaacgacaacgtctacttcggctacagcaccccctgggggtattttgacttcaacagattccactgtcacttctcaccacgtgactggcagcggctcatcaacaacaactggggattccggcccaagaagctcaacttcaagctgttcaacatccaggtcaaggaggtcacaacgaatgacggcgtcacgaccatcgccaataaccttaccagcacggttcaggtcttttcggactcggaataccagctgccctacgtcctcggctccgcacaccagggctgcctgcctccgttcccggcggacgtcttcatgattccccagtacggctacctgactctgaacaatggcagccaatcggtgggtcgttcctctttctactgcctggaatatttcccttctcaaatgctgagaacgggcaacaacttcaccttcagctacaccttcgaggacgttcccttccacagcagctacgcacacagccagagcctggaccggctgatgaatcctcttatcgaccagtacctgtattacctggccagaacacagagcaacgcaggaggcacagctggcaatcgggaactgcagttttatcagggcgggcctaccaccatggccgaacaagccaaaaactggctgcctagaccttgcttccggcaacaaagagtctccaagacgctggatcaaaacaacaacagcaactttgcttggactggtgccaccaaataccatctaaatggaagaaattcattggttaatcccggtgtcgccatggcaacccacaaggacgacgaggaacgcttcttcccttcgagcggagtcctgatttttggaaaaactggagcagctaataagactacactggaaaatgtgttaatgacaaatgaagaggaaattcgtcctaccaacccggtagccaccgaggaatacgggactgttagcagcaacctgcaggcggctaacactgcagcccagacacaagttgtcaacaaccagggagccttacctggtatggtctggcagaaccgggacgtgtacctgcagggtcccatctgggccaagattcctcacacggacggcaactttcacccgtctccgctgatgggcggctttggactgaagcatccgcctcctcagatcctgatcaaaaacactcctgttcctgctaatcccccggaggtgtttacgcctgccaagtttgcttctttcatcacacagtacagcaccggccaggtcagcgtggagatcgagtgggagctgcagaaggagaacagcaagcgctggaacccagagattcagtatacctccaattttgacaaacagactggtgtggactttgccgttgacagccagggtgtttattctgagcctcgccccattggtactcgttacctcacccgtaatctgtaa

SEQ ID NO: 503 - protein, 737 aa, Artificial Sequence
  source: /note="Description of Artificial Sequence: Synthetic polypeptide"
MAADGYLPDWLEDNLSEGIREWWDLKPGAPKPKANQQKQDDGRGLVLPGYKYLGPFNGLDKGEPVNAADAAALEHDKAYDQQLKAGDNPYLRYNHADAEFQERLQEDTSFGGNLGRAVFQAKKRVLEPLGLVEEAAKTAPGKKRPVEPSPQRSPDSSTGIGKKGQQPARKRLNFGQTGDSESVPDPQPIGEPPAGPSGLGSGTMAAGGGAPMADNNEGADGVGNASGNWHCDSTWLGDRVITTSTRTWALPTYNNHLYKQISSQSAGSTNDNVYFGYSTPWGYFDFNRFHCHFSPRDWQRLINNNWGFRPKKLNFKLFNIQVKEVTTNDGVTTIANNLTSTVQVFSDSEYQLPYVLGSAHQGCLPPFPADVFMIPQYGYLTLNNGSQSVGRSSFYCLEYFPSQMLRTGNNFTFSYTFEDVPFHSSYAHSQSLDRLMNPLIDQYLYYLARTQSNAGGTAGNRELQFYQGGPTTMAEQAKNWLPRPCFRQQRVSKTLDQNNNSNFAWTGATKYHLNGRNSLVNPGVAMATHKDDEERFFPSSGVLIFGKTGAANKTTLENVLMTNEEEIRPTNPVATEEYGTVSSNLQAANTAAQTQVVNNQGALPGMVWQNRDVYLQGPIWAKIPHTDGNFHPSPLMGGFGLKHPPPQILIKNTPVPANPPEVFTPAKFASFITQYSTGQVSVEIEWELQKENSKRWNPEIQYTSNFDKQTGVDFAVDSQGVYSEPRPIGTRYLTRNL

SEQ ID NO: 504 - DNA, 2214 bp, Artificial Sequence
  source: /note="Description of Artificial Sequence: Synthetic polynucleotide"
atggctgctgacggttatcttccagattggctcgaggacaacctctctgagggcattcgcgagtggtgggacctgaaacctggagcccccaagcccaaggccaaccagcagaagcaggacgacggccggggtctggtgcttcctggctacaagtacctcggacccttcaacggactcgacaagggggagcccgtcaacgcggcggacgcagcggccctcgagcacgacaaggcctacgaccagcagctcaaagcgggtgacaatccgtacctgcggtataaccatgccgacgccgagtttcaggagcgtctgcaagaagatacgtcttttgggggcaacctcgggcgagcagtcctccaggccaagaagcgggttctcgaacctctcggtctggttgaggaagctgctaagacggctcctggaaagaagagaccggtagaaccgtcacctcagcgttcccccgactcctccacgggcatcggcaagaaaggccagcagcccgctagaaagagactgaactttgggcagactggcgactcagagtcagtccccgaccctcaaccaatcggagaaccaccagcaggcccctctggtctgggatctggtacaatggctgcaggcggtggcgctccaatggcagacaataacgaaggcgccgacggagtgggtaatgcctcaggaaattggcattgcgattccacatggctgggcgacagagtcatcaccaccagcacccgaacctgggctttgcccacctacaacaaccacctctacaagcaaatctccagtcagtcagcaggtagcaccaacgacaacgtctacttcggctacagcaccccctgggggtattttgacttcaacagattccactgtcacttctcaccacgtgactggcagcggctcatcaacaacaactggggattccggcccaagaagctcaacttcaagctgttcaacatccaggtcaaggaggtcacaacgaatgacggcgtcacgaccatcgccaataaccttaccagcacggttcaggtcttttcggactcggaataccagctgccctacgtcctcggctccgcacaccagggctgcctgcctccgttcccggcggacgtcttcatgattccccagtacggctacctgactctgaacaatggcagccaatcggtgggtcgttcctctttctactgcctggaatatttcccttctcaaatgctgagaacgggcaacaacttcaccttcagctacaccttcgaggacgttcccttccacagcagctacgcacacagccagagcctggaccggctgatgaatcctcttatcgaccagtacctgtattacctggccagaacacagagcaacgcaggaggcacagctggcaatcgggaactgcagttttatcagggcgggcctaccaccatggccgaacaagccaaaaactggctgcctggaccttgcttccggcaacaaagagtctccaagacgctggatcaaaacaacaacagcaactttgcttggactggtgccaccaaataccatctaaatggaagaaattcattggttaatcccggtgtcgccatggcaacccacaaggacgacgaggaacgcttcttcccttcgagcggagtcctgatttttggaaaaactggagcagctaataagactacactggaaaatgtgttaatgacaaatgaagaggaaattcgtcctaccaacccggtagccaccgaggaatacgggactgttagcagcaacctgcaggcggctaacactgcagcccagacacaagttgtcaacaaccagggagccttacctggtatggtctggcagaaccgggacgtgtacctgcagggtcccatctgggccaagattcctcacacggacggcaactttcacccgtctccgctgatgggcggctttggactgaagcatccgcctcctcagatcctgatcaaaaacactcctgttcctgctaatcccccggaggtgtttacgcctgccaagtttgcttctttcatcacacagtacagcaccggccaggtcagcgtggagatcgagtgggagctgcagaaggagaacagcaagcgctggaacccagagattcagtatacctccaattttgacaaacagactggtgtggactttgccgttgacagccagggtgtttattctgagcctcgccccattggtactcgttacctcacccgtaatctgtaa

SEQ ID NO: 505 - protein, 737 aa, Artificial Sequence; identical to SEQ ID NO: 464
  source: /note="Description of Artificial Sequence: Synthetic polypeptide"

SEQ ID NO: 506 - protein, 737 aa, Artificial Sequence
  source: /note="Description of Artificial Sequence: Synthetic polypeptide"
MAADGYLPDWLEDNLSEGIREWWDLKPGAPKPKANQQKQDDGRGLVLPGYKYLGPFNGLDKGEPVNAADAAALEHDKAYDQQLKAGDNPYLRYNHADAEFQERLQEDTSFGGNLGRAVLQAKKRVLEPLGLVEEAAKTAPGKKRPVEPSPQRSPDSSTGIGKKGQQPARKRLNFGQTGDSESVPDPQPIGEPPAGPSGLGSGTMAAGGGAPMADNNEGADGVGNASGNWHCDSTWLGDRVITTSTRTWALPTYNNHLYKQISSQSAGSTNDNVYFGYSTPWGYFDFNRFHCHFSPRDWQRLINNNWGFRPKKLNFKLFNIQVKEVTTNDGVTTIANNLTSTVQVFSDSEYQLPYVLGSAHQGCLPPFPADVFMIPQYGYLTLNNGSQSVGRSSFYCLEYFPSQMLRTGNNFTFSYTFEDVPFHSSYAHSQSLDRLMNPLIDQYLYYLARTQSNAGGTAGNRELQFYQGGPTTMAEQAKNWLPGPCFRQQRVSKTLDQNNNSNFAWTGATKYHLNGRNSLVNPGVAMATHKDDEERFFPSSGVLIFGKTGAANKTTLENVLMTNEEEIRPTNPVATEEYGTVSSNLQAANTAAQTQVVNNQGALPGMVWQNRDVYLQGPIWAKIPHTDGNFHPSPLMGGFGLKHPPPQILIKNTPVPANPPEVFTPAKFASFITQYSTGQVSVEIEWELQKENSKRWNPEIQYTSNFDKQTGVDFAVDSQGVYSEPRPIGTRYLTRNL

SEQ ID NO: 507 - DNA, 2217 bp, Artificial Sequence
  source: /note="Description of Artificial Sequence: Synthetic polynucleotide"
atggctgccgatggttatcttccagattggctcgaggacaacctctctgagggcattcgcgagtggtgggacctgaaacctggagccccgaaacccaaagccaaccagcaaaagcaggacgacggccggggtctggtgcttcctggctacaagtacctcggacccttcaacggactcgacaagggggagcccgtcaacgcggcggacgcagcggccctcgagcacgacaaggcctacgaccagcagctcaaagcgggtgacaatccgtacctgcggtataatcacgccgacgccgagtttcaggagcgtctgcaagaagatacgtcttttgggggcaacctcgggcgagcagtcttccaggccaagaagcgggttctcgaacctctcggtctggttgaggaaggcgctaagacggctcctggaaagaagagaccggtagagccgtcaccacagcgttcccccgactcctccacgggcatcggcaagaaaggccagcagcccgccagaaagagactcaatttcggtcagactggcgactcagagtcagtccccgaccctcaacctatcggagaacctccagcagcgccctctagtgtgggatctggtacaatggctgcaggcggtggcgcaccaatggcagacaataacgaaggtgccgacggagtgggtagttcctcgggaaattggcattgcgattccacatggctgggcgacagagtcatcaccaccagcacccgaacctgggccctgcccacctacaacaaccacctctacaagcaaatctccaacgggacctcgggaggcagcaccaacgacaacacctactttggctacagcaccccctgggggtattttgactttaacagattccactgccacttctcaccacgtgactggcagcgactcatcaacaacaactggggattccggcccaagagactcagcttcaagctcttcaacatccaggtcaaagaggtcacgcagaatgaaggcaccaagaccatcgccaataacctcaccagcaccatccaggtgtttacggactcggaataccagctgccgtacgtcctcggctctgcccaccagggctgcctgcctccgttcccggcggacgtcttcatgattcctcagtacggctacctgactctcaacaacggtagtcaggccgtgggacgttcctccttctactgcctggagtacttcccctctcagatgctgagaacgggcaacaacttttccttcagctacactttcgaggacgtgcctttccacagcagctacgcgcacagccagagtttggacaggctgatgaatcctctcatcgaccagtacctgtactacctgtcaagaacccagtctacgggaggcacagcgggaacccagcagttgctgttttctcaggccgggcctagcaacatgtcggctcaggccagaaactggctgcctggaccctgctacagacagcagcgcgtctccacgacactgtcgcaaaacaacaacagcaactttgcctggactggtgccaccaagtatcatctgaacggcagagactctctggtgaatccgggcgtcgccatggcaaccaacaaggacgacgaggaccgcttcttcccacccagcggcatcctcatgtttggcaagcagggagctggaaaagacaacgtggactatagcaacgtgatgctaaccagcgaggaagaaatcaagaccaccaaccccgtggccacagaacagtatggcgtggtggctgataacctacagcagcaaaacaccgctcctattgtgggggccgtcaacagccagggagccttacctggcatggtctggcagaaccgggacgtgtacctgcagggtcctatttgggccaagattcctcacacagatggcaactttcacccgtctcctttaatgggcggctttggacttaaacatccgcctcctcagatcctcatcaaaaacactcctgttcctgcggatcctccaacagcgttcaaccaggccaagctgaattctttcatcacgcagtacagcaccggacaagtcagcgtggtgatcgagtgggagctgcagaaggagaacagcaagcgctggaacccagagattcagtatacttccaactactacaaatctacaaatgtggactttgctgttaatactgagggtgtttactctgagcttcgccccattggcactcgttacctcacccgtaatctgtaa

SEQ ID NO: 508 - protein, 738 aa, Artificial Sequence
  source: /note="Description of Artificial Sequence: Synthetic polypeptide"
MAADGYLPDWLEDNLSEGIREWWDLKPGAPKPKANQQKQDDGRGLVLPGYKYLGPFNGLDKGEPVNAADAAALEHDKAYDQQLKAGDNPYLRYNHADAEFQERLQEDTSFGGNLGRAVFQAKKRVLEPLGLVEEGAKTAPGKKRPVEPSPQRSPDSSTGIGKKGQQPARKRLNFGQTGDSESVPDPQPIGEPPAAPSSVGSGTMAAGGGAPMADNNEGADGVGSSSGNWHCDSTWLGDRVITTSTRTWALPTYNNHLYKQISNGTSGGSTNDNTYFGYSTPWGYFDFNRFHCHFSPRDWQRLINNNWGFRPKRLSFKLFNIQVKEVTQNEGTKTIANNLTSTIQVFTDSEYQLPYVLGSAHQGCLPPFPADVFMIPQYGYLTLNNGSQAVGRSSFYCLEYFPSQMLRTGNNFSFSYTFEDVPFHSSYAHSQSLDRLMNPLIDQYLYYLSRTQSTGGTAGTQQLLFSQAGPSNMSAQARNWLPGPCYRQQRVSTTLSQNNNSNFAWTGATKYHLNGRDSLVNPGVAMATNKDDEDRFFPPSGILMFGKQGAGKDNVDYSNVMLTSEEEIKTTNPVATEQYGVVADNLQQQNTAPIVGAVNSQGALPGMVWQNRDVYLQGPIWAKIPHTDGNFHPSPLMGGFGLKHPPPQILIKNTPVPADPPTAFNQAKLNSFITQYSTGQVSVVIEWELQKENSKRWNPEIQYTSNYYKSTNVDFAVNTEGVYSELRPIGTRYLTRNL

SEQ ID NO: 509 - DNA, 2214 bp, Artificial Sequence
  source: /note="Description of Artificial Sequence: Synthetic polynucleotide"
atggctgctgacggttatcttccagattggctcgaggacaacctctctgagggcattcgcgagtggtgggacctgaaacctggagcccccaagcccaaggccaaccagcagaagcaggacgacggccggggtctggtgcttcctggctacaagtacctcggacccttcaacggactcgacaagggggagcccgtcaacgcggcggacgcagcggccctcgagcacgacaaggcctacgaccagcagctcaaagcgggtgacaatccgtacctgcggtataaccacgccgacgccgagtttcaggagcgtctgcaagaagatacgtcttttgggggcaacctcgggcgagcagtcttccaggccaagaagcgggttctcgaacctctcggtctggttgaggaagctgctaagacggctcctggaaagaagagaccggtagaaccgtcacctcagcgttcccccgactcctccacgggcatcggcaagaaaggccagcagcccgctagaaagagactgaactttgggcagactggcgactcagagtcagtccccgaccctcaaccaatcggagaaccaccagcaggcccctctggtctgggatctggtacaatggctgcaggcggtggcgccccaatggcagacaataacgaaggcgccgacggagtgggtaatgcctcaggaaattggcattgcgattccacatggctgggcgacagagtcatcaccaccagcacccgaacctgggctttgcccacctacaacaaccacctctacaagcaaatctccagtcagtcagcaggtagcaccaacgacaacgtctacttcggctacagcaccccctgggggtattttgacttcaacagattccactgtcacttctcaccacgtgactggcagcggctcatcaacaacaactggggattccggcccaagaagctcaacttcaagctgttcaacatccaggtcaaggaggtcacaacgaatgacggcgtcacgaccatcgccaataaccttaccagcacggttcaggtcttttcggactcggaataccagctgccctacgtcctcggctccgcacaccagggctgcctgcctccgttcccggcggacgtcttcatgattccccagtacggctacctgactctgaacaatggcagccaatcggtgggtcgttcctctttctactgcctggaatatttcccttctcaaatgctgagaacgggcaacaacttcaccatcagctacaccttcgaggacgttcccttccacagcagctacgcacacagccagagcctggaccggctgatgaatcctcttatcgaccagtacctgtattacctggccagaacacagagcaacgcaggaggcacagctggcaatcaggaactgcagttttatcagggcgggcctaccaccatggccgaacaagccaaaaactggctgcctggaccttgcttccggcaacaaagagtctccaagacgctggatcaaaacaacaacagcaactttgcttggactggtgccaccaaataccatctaaatggaagaaattcattggttaatcccggtgtcgccatggcaacccacaaggacgacgaggaacgcttcttcccttcgagcggagtcctgatttttggaaaaactggagcagctaataagactacactggaaaatgtgttaatgacaaatgaagaggaaattcgtcctaccaacccggtagccaccgaggaatacgggactgttagcagcaacctgcaggcggctaacactgcagcccagacacaagttgtcaacaaccagggagccttacctggtatggtctggcagaaccgggacgtgtacctgcagggtcccatctgggccaagattcctcacacagatggcaactttcacccgtctcctttaatgggcggctttggacttaaacatccgcctcctcagatcctcatcaaaaacactcctgttcctgcggatcctccaacagcgttcaaccaggccaagctgaattctttcatcacgcagtacagcaccggacaagtcagcgtggagatcgagtgggagctgcagaaggagaacagcaagcgctggaacccagagattcagtatacttccaactactacaaatctacaaatgtggactttgctgttaatactgagggtgtttactctgagcctcgccccattggcactcgttacctcacccgtaatctgtaa

SEQ ID NO: 510 - protein, 737 aa, Artificial Sequence
  source: /note="Description of Artificial Sequence: Synthetic polypeptide"
MAADGYLPDWLEDNLSEGIREWWDLKPGAPKPKANQQKQDDGRGLVLPGYKYLGPFNGLDKGEPVNAADAAALEHDKAYDQQLKAGDNPYLRYNHADAEFQERLQEDTSFGGNLGRAVFQAKKRVLEPLGLVEEAAKTAPGKKRPVEPSPQRSPDSSTGIGKKGQQPARKRLNFGQTGDSESVPDPQPIGEPPAGPSGLGSGTMAAGGGAPMADNNEGADGVGNASGNWHCDSTWLGDRVITTSTRTWALPTYNNHLYKQISSQSAGSTNDNVYFGYSTPWGYFDFNRFHCHFSPRDWQRLINNNWGFRPKKLNFKLFNIQVKEVTTNDGVTTIANNLTSTVQVFSDSEYQLPYVLGSAHQGCLPPFPADVFMIPQYGYLTLNNGSQSVGRSSFYCLEYFPSQMLRTGNNFTISYTFEDVPFHSSYAHSQSLDRLMNPLIDQYLYYLARTQSNAGGTAGNQELQFYQGGPTTMAEQAKNWLPGPCFRQQRVSKTLDQNNNSNFAWTGATKYHLNGRNSLVNPGVAMATHKDDEERFFPSSGVLIFGKTGAANKTTLENVLMTNEEEIRPTNPVATEEYGTVSSNLQAANTAAQTQVVNNQGALPGMVWQNRDVYLQGPIWAKIPHTDGNFHPSPLMGGFGLKHPPPQILIKNTPVPADPPTAFNQAKLNSFITQYSTGQVSVEIEWELQKENSKRWNPEIQYTSNYYKSTNVDFAVNTEGVYSEPRPIGTRYLTRNL

SEQ ID NO: 511 - DNA, 2217 bp, Artificial Sequence
  source: /note="Description of Artificial Sequence: Synthetic polynucleotide"
atggctgccgatggttatcttccagattggctcgaggacaacctctctgagggcattcgcgagtggtgggacctgaaacctggagccccgaaacccaaagccaaccagcaaaagcaggacgacggccggggtctggtgcttcctggctacaagtacctcggacccttcaacggactcgacaagggggagcccgtcaacgcggcggacgcagcggccctcgagcacgacaaggcctacgaccagcagctcaaagcgggtgacaatccgtacctgcggtataatcacgccgacgccgagtttcaggagcgtctgcaagaagatacgtcttttgggggcaacctcgggcgagcagtcttccaggccaagaagcgggttctcgaacctctcggtctggttgaggaaggcgctaagacggctcctggaaagaagagaccggtagagccgtcaccacagcgttcccccgactcctccacgggcatcggcaagaaaggccagcagcccgccagaaagagactcaatttcggtcagactggcgactcagagtcagtccccgaccctcaacctatcggagaacctccagcagcgccctctagtgtgggatctggtacaatggctgcaggcggtggcgcaccaatggcagacaataacgaaggtgccgacggagtgggtagttcctcgggaaattggcattgcgattccacatggctgggcgacagagtcatcaccaccagcacccgaacctgggccctgcccgcctacaacaaccacctctacaagcaaatctccaacgggacctcgggaggcagcaccaacgacaacacctactttggctacagcaccccctgggggtattttgactttaacagattccactgccacttctcaccacgtgactggcagcgactcatcaacaacaactggggattccggcccaagagactcagcttcaagctcttcaacatccaggtcaaagaggtcacgcagaatgaaggcaccaagaccatcgccaataacctcaccagcaccatccaggtgtttacggactcggaataccagctgccgtacgtcctcggctctgcccaccagggctgcctgcctccgttcccggcggatgtcttcatgattcctcagtacggctacctgactctcaacaacggtagtcaggccgtgggacgttcctccttctactgcctggagtacttcccctctcagatgctgagaacgggcaacaacttttccttcagctacactttcgaggacgtgcctttccacagcagctacgcgcacagccagagtttggacaggctgatgaatcctctcatcgaccagtacctgtactacctgtcaagaacccagtctacgggaggcacagcgggaacccagcagttgctgttttctcaggccgggcctagcaacatgtcggctcaggccagaaactggctgcctggaccctgctacagacagcagcgcgtctccacgacactgtcgcaaaacaacaacagcaactttgcctggactggtgccaccaagtatcatctgagcggcagagactctctggtgaatccgggcgtcgccatggcaaccaacaaggacgacgaggaccgcttcttcccatccagcggcatcctcatgtttggcaagcagggagctggaaaagacaacgtggactatagcaacgtgatgctaaccagcgaggaagaaatcaagaccaccaaccccgtggccacagaacagtatggcgtggtggctgataacctacagcagcaaaacaccgctcctattgtgggggccgtcaacagccagggagccttacctggcatggtctggcagaaccgggacgtgtacctgcagggtcctatttgggccaagattcctcacacagatggcaactttcacccgtctcctttaatgggcggctttggacttaaacatccgcctcctcagatcctcatcaaaaacactcctgttcctgcggatcctccaacagcgttcaaccaggccaagctgaattcttccatcacgcagtacagcaccggacaagtcagcgtggagatcgagtgggagctgcagaaggagaacagcaagcgctggaacccagagattcagtatacttccaactactacaaatctacaaatgtggactttgctgttaatactgagggtgtttactctgagcctcgccccattggcactcgttacctcacccgtaatttgtaa

SEQ ID NO: 512 - protein, 738 aa, Artificial Sequence
  source: /note="Description of Artificial Sequence: Synthetic polypeptide"
MAADGYLPDWLEDNLSEGIREWWDLKPGAPKPKANQQKQDDGRGLVLPGYKYLGPFNGLDKGEPVNAADAAALEHDKAYDQQLKAGDNPYLRYNHADAEFQERLQEDTSFGGNLGRAVFQAKKRVLEPLGLVEEGAKTAPGKKRPVEPSPQRSPDSSTGIGKKGQQPARKRLNFGQTGDSESVPDPQPIGEPPAAPSSVGSGTMAAGGGAPMADNNEGADGVGSSSGNWHCDSTWLGDRVITTSTRTWALPAYNNHLYKQISNGTSGGSTNDNTYFGYSTPWGYFDFNRFHCHFSPRDWQRLINNNWGFRPKRLSFKLFNIQVKEVTQNEGTKTIANNLTSTIQVFTDSEYQLPYVLGSAHQGCLPPFPADVFMIPQYGYLTLNNGSQAVGRSSFYCLEYFPSQMLRTGNNFSFSYTFEDVPFHSSYAHSQSLDRLMNPLIDQYLYYLSRTQSTGGTAGTQQLLFSQAGPSNMSAQARNWLPGPCYRQQRVSTTLSQNNNSNFAWTGATKYHLSGRDSLVNPGVAMATNKDDEDRFFPSSGILMFGKQGAGKDNVDYSNVMLTSEEEIKTTNPVATEQYGVVADNLQQQNTAPIVGAVNSQGALPGMVWQNRDVYLQGPIWAKIPHTDGNFHPSPLMGGFGLKHPPPQILIKNTPVPADPPTAFNQAKLNSSITQYSTGQVSVEIEWELQKENSKRWNPEIQYTSNYYKSTNVDFAVNTEGVYSEPRPIGTRYLTRNL

SEQ ID NO: 513 - protein, 736 aa, Artificial Sequence; identical to SEQ ID NO: 13
  source: /note="Description of Artificial Sequence: Synthetic polypeptide"

SEQ ID NO: 514 - DNA, 2217 bp, Artificial Sequence
  source: /note="Description of Artificial Sequence: Synthetic polynucleotide"
atggctgctgacggttatcttccagattggctcgaggacaacctctctgagggcattcgcgagtggtgggacctgaaacctggagcccccaagcccaaggccaaccagcagaagcaggacgacggccggggtctggtgcttcctggctacaagtacctcggacccttcaacggactcgacaagggggagcccgtcaacgcggcggacgcagcggccctcgagcacgacaaggcctacgaccagcagctcaaagcgggtgacaatccgtacctgcggtataaccacgccgacgccgagtttcaggagcgtctgcaagaagatacgtcttttgggggcaacctcgggcgagcagtcttccaggccaagaagcgggttctcgaacctctcggtctggttgaggaagctgctaagacggctcctggaaagaagagaccggtagaaccgtcacctcagcgttcccccgactcctccacgggcatcggcaagaaaggccagcagcccgctaaaaagagactgaactttggtcagactggcgactcagagtcagtccccgaccctcaaccaatcggagaaccaccagcaggcccctctggtctgggatctggtacaatggctgcaggcggtggcgctccaatggcagacaataacgaaggcgccgacggagtgggtagttcctcaggaaattggcattgcgattccacatggctgggcgacagagtcatcaccaccagcacccgaacctgggccctgcccacctacaacaaccacctctacaagcaaatatccaatgggacatcgggaggaagcaccaacgacaacacctacttcggctacagcaccccctgggggtattttgacttcaacagattccactgccacttctcaccacgtgactggcagcgactcatcaacaacaactggggattccggccaaaaagactcagcttcaagctcttcaacatccaggtcaaggaggtcacgcagaatgaaggcaccaagaccatcgccaataaccttaccagcacgattcaggtatttacggactcggaataccagctgccgtacgtcctcggctccgcgcaccagggctgcctgcctccgttcccggcggacgtcttcatgattccccagtacggctaccttacactgaacaatggaagtcaagccgtaggccgttcctccttctactgcctggaatattttccatctcaaatgctgcgaactggaaacaattttgaattcagctacaccttcgaggacgtgcctttccacagcagctacgcacacagccagagcttggaccgactgatgaatcctctcatcgaccagtacctgtactacttatccagaactcagtccacaggaggaactcaaggtacccagcaattgttattttctcaagctgggcctgcaaacatgtcggctcaggctaagaactggctacctggaccttgctaccggcagcagcgagtctctacgacactgtcgcaaaacaacaacagcaactttgcttggactggtgccaccaaatatcacctgaacggaagagactctttggtaaatcccggtgtcgccatggcaacccacaaggacgacgaggaacgcttcttcccgtcgagtggagtcctgatgtttggaaaacagggtgctggaagagacaatgtggactacagcagcgttatgctaaccagcgaagaagaaattaaaaccactaaccctgtagccacagaacaatacggtgtggtggctgacaacttgcagcaaaccaatacagggcctattgtgggaaatgtcaacagccaaggagccttacctggcatggtctggcagaaccgagacgtgtacctgcagggtcccatctgggccaagattcctcacacggacggcaacttccacccttcaccgctaatgggaggatttggactgaagcacccacctcctcagatcctgatcaagaacacgccggtacctgcggatcctccaacaacgttcagccaggcgaaattggcttccttcattacgcagtacagcaccggacaggtcagcgtggaaatcgagtgggagctgcagaaggagaacagcaaacgctggaacccagagattcagtacacttcaaactactacaaatctacaaatgtggactttgctgtcaatacagagggaacttattctgagcctcgccccattggtactcgttacctcacccgtaatctgtaa

SEQ ID NO: 515 - protein, 738 aa, Artificial Sequence
  source: /note="Description of Artificial Sequence: Synthetic polypeptide"
MAADGYLPDWLEDNLSEGIREWWDLKPGAPKPKANQQKQDDGRGLVLPGYKYLGPFNGLDKGEPVNAADAAALEHDKAYDQQLKAGDNPYLRYNHADAEFQERLQEDTSFGGNLGRAVFQAKKRVLEPLGLVEEGAKTAPGKKRPVEPSPQRSPDSSTGIGKKGQQPARKRLNFGQTGDSESVPDPQPLGEPPAAPSSVGSGTMAAGGGAPMADNNEGADGVGSSSGNWHCDSTWLGDRVITTSTRTWALPTYNNHLYKQISNGTSGGSTNDNTYFGYSTPWGYFDFNRFHCHFSPRDWQRLINNNWGFRPKRLSFKLFNIQVKEVTQNEGTKTIANNLTSTIQVFTDSEYQLPYVLGSAHQGCLPPFPADVFMIPQYGYLTLNNGSQAVGRSSFYCLEYFPSQMLRTGNNFSFSYTFEDVPFHSSYAHSQSLDRLMNPLIDQYLYYLSRTQSTGGTAGTQQLLFSQAGPSNMSAQARNWLPGPCYRQQRVSTTLSQNNNSNFAWTGATKYHLNGRDSLVNPGVAMATNKDDEDRFFPSSGILMFGKQGAGKDNVDYSNVMLTSEEEIKTTNPVATEQYGVVADNLQRQNTAPIVGAVNSQGALPGMVWQNRDVYLQGPIWAKIPHTDGNFHPSPLMGGFGLKHPPPQILIKNTPVPADPPTAFNQAKLNSFITQYSTGQVSVEIEWELQKENSKRWNPEIQYTSNYYKSTNVDFAVNTEGVYSEPRPIGTRYLTRNL

SEQ ID NO: 516 - protein, 736 aa, Artificial Sequence
  source: /note="Description of Artificial Sequence: Synthetic polypeptide"
MAADGYLPDWLEDNLSEGIREWLNLKPGAPQPKANQQKQDNARGLVLPGYKYLGPFNGLDKGDPVNEADAAALEHDKAYGQQLKAGDNPYLKYNHADAEFQERLQKDTSFGGNLGKAVFQAKKRILEPLGLVETPAKTAPGKKRPVDPSPQRSPDSSSGIGKKSPHPARKRLNFGQTGEAESVPDPQPIGEPPSDPSSVGSGTMAAGGGAPMADNNEGADGVGNSSGNWHCDSTWLGDRVITTSTRTWALPTYNNHLYKQISSQSGATNDNHYFGYSTPWGYFDFNRFHCHFSPRDWQRLINNNWGFRPKRLSFKLFNIQVKEVTQNDGTTTIANNLTSTVQVFTDSEYQLPYVLGSAHQGCLPPFPADVFMIPQYGYLTLNNGSQAVGRSSFYCLEYFPSQMLRTGNNFQFSYTFEDVPFHSSYAHSQSLDRLMNPLIDQYLYYLSKTQGTNATVQGAKLQFSQAGPSNMRDQARNWLPGPCYRQQRVSKTANDNNNSEYAWTGATKYHLNGRDSLVNPGPAMASHKDDEEKFFPMNGTLVFGKNGAGNSNVDIENVMITDEEEIRTTNPVATEQYGVVSDNLQSSNTRPITGDVDSQGVLPGMVWQDRDVYLQGPIWAKIPHTDGHFHPSPLMGGFGLKHPPPQILIKNTPVPANPATTFTPGKFASFITQYSTGQVSVQIEWELQKENSKRWNPEIQYTSNYNKSVNVDFTVDTNGVYSEPRPIGTRYLTRNL

SEQ ID NO: 517 - protein, 736 aa, Artificial Sequence; identical to SEQ ID NO: 92
  source: /note="Description of Artificial Sequence: Synthetic polypeptide"

SEQ ID NO: 518 - protein, 736 aa, Artificial Sequence
  source: /note="Description of Artificial Sequence: Synthetic polypeptide"
MAADGYLPDWLEDNLSEGIREWWDLKPGAPKPKANQQKQDDGRGLVLPGYKYLGPFNGLDKGEPVNAADAAALEHDKAYDQQLKAGDNPYLRYNHADAEFQERLQEDTSFGGNLGRAVFQAKKRVLEPLGLVEEGAKTAPGKKRPVEQSPQEPDSSSGIGKTGQQPAKKRLNFGQTGDSESVPDPQPLGEPPAAPSGLGPNTMASGGGAPMADNNEGADGVGNSSGNWHCDSTWLGDRVITTSTRTWALPTYNNHLYKQISNGTSGGSTNDNTYFGYSTPWGYFDFNRFHCHFSPRDWQRLINNNWGFRPKRLNFKLFNIQVKEVTTNEGTKTIANNLTSTVQVFTDSEYQLPYVLGSAHQGCLPPFPADVFMVPQYGYLTLNNGSQALGRSSFYCLEYFPSQMLRTGNNFQFSYTFEDVPFHSSYAHSQSLDRLMNPLIDQYLYYLVRTQTTGTGGTQTLAFSQAGPSSMANQARNWVPGPCYRQQRVSTTTNQNNNSNFAWTGAAKFKLNGRDSLMNPGVAMASHKDDEDRFFPSSGVLIFGKQGAGNDGVDYSQVLITDEEEIKATNPVATEEYGAVAINNQAANTQAQTGLVHNQGVIPGMVWQNRDVYLQGPIWAKIPHTDGNFHPSPLMGGFGLKHPPPQILIKNTPVPADPPLTFNQAKLNSFITQYSTGQVSVEIEWELQKENSKRWNPEIQYTSNYYKSTNVDFAVNTEGVYSEPRPIGTRYLTRNL

SEQ ID NO: 519 - protein, 736 aa, Artificial Sequence; identical to SEQ ID NO: 518
  source: /note="Description of Artificial Sequence: Synthetic polypeptide"

SEQ ID NO: 520 - protein, 736 aa, Artificial Sequence
  source: /note="Description of Artificial Sequence: Synthetic polypeptide"
MAADGYLPDWLEDNLSEGIREWWDLKPGAPKPKANQQKQDDGRGLVLPGYKYLGPFNGLDKGEPVNAADAAALEHDKAYDQQLKAGDNPYLRYNHADAEFQERLQEDTSFGGNLGRAVFQAKKRVLEPLGLVEEGAKTAPGKKRPVEQSPQEPDSSSGIGKTGQQPAKKRLNFGQTGDSESVPDPQPLGEPPAAPSGLGPNTMASGGGAPMADNNEGADGVGNSSGNWHCDSTWLGDRVITTSTRTWALPTYNNHLYKQISNGTSGGSTNDNTYFGYSTPWGYFDFNRFHCHFSPRDWQRLINNNWGFRPKRLNFKLFNIQVKEVTTNEGTKTIANNLTSTVQVFTDSEYQLPYVLGSAHQGCLPPFPADVFMVPQYGYLTLNNGSQALGRSSFYCLEYFPSQMLRTGNNFQFSYTFEDVPFHSSYAHSQSLDRLMNPLIDQYLYYLVRTQTTGTGGTQTLAFSQAGPSSMANQARNWVPGPCYRQQRVSTTTNQNNNSNFAWTGAAKFKLNGRDSLMNPGVAMASHKDDEDRFFPSSGVLIFGKQGAGNDGVDYSQVLITDEEEIKATNPVATEEYGAVAINNQRANTQAQTGLVHNQGVIPGMVWQNRDVYLQGPIWAKIPHTDGNFHPSPLMGGFGLKHPPPQILIKNTPVPADPPLTFNQAKLNSFITQYSTGQVSVEIEWELQKENSKRWNPEIQYTSNYYKSTNVDFAVNTEGVYSEPRPIGTRYLTRNL

SEQ ID NO: 521 - protein, 736 aa, Artificial Sequence
  source: /note="Description of Artificial Sequence: Synthetic polypeptide"
MAADGYLPDWLEDNLSEGIREWWDLKPGAPKPKANQQKQDDGRGLVLPGYKYLGPFNGLDKGEPVNAADAAALEHDKAYDQQLKAGDNPYLRYNHADAEFQERLQEDTSFGGNLGRAVFQAKKRVLEPLGLVEEGAKTAPGKKRPVEQSPQEPDSSSGIGKTGQQPAKKRLNFGQTGDSESVPDPQPLGEPPAAPSGLGPNTMASGGGAPMADNNEGADGVGNSSGNWHCDSTWLGDRVITTSTRTWALPTYNNHLYKQISNGTSGGSTNDNTYFGYSTPWGYFDFNRFHCHFSPRDWQRLINNNWGFRPKRLNFKLFNIQVKEVTTNEGTKTIANNLTSTVQVFTDSEYQLPYVLGSAHQGCLPPFPADVFMVPQYGYLTLNNGSQALGRSSFYCLEYFPSQMLRTGNNFQFSYTFEDVPFHSSYAHSQSLDRLMNPLIDQYLYYLVRTQTTGTGGTQTLAFSQAGPSSMANQARNWVPGPCYRQQRVSTTTNQNNNSNFAWTGAAKFKLNGRDSLMNPGVAMASHKDDEDAFFPSSGVLIFGKQGAGNDGVDYSQVLITDEEEIKATNPVATEEYGAVAINNQAANTQAQTGLVHNQGVIPGMVWQNRDVYLQGPIWAKIPHTDGNFHPSPLMGGFGLKHPPPQILIKNTPVPADPPLTFNQAKLNSFITQYSTGQVSVEIEWELQKENSKRWNPEIQYTSNYYKSTNVDFAVNTEGVYSEPRPIGTRYLTRNL

SEQ ID NO: 522 - DNA, 1803 bp, Bovine adeno-associated virus
acggcgcctgcggcaaaaaagaggcctctagagcagagtcctcaagagccagactcctcgagcggagttggcaagaaaggcaaacagcctgccagaaagagactcaactttgacgacgaacctggagccggagacgggcctcccccagaaggaccatcttccggagctatgtctactgagactgaaatgcgtgcagcagctggcggaaatggtggcgatgcgggacaaggtgccgagggagtgggtaatgcctccggtgattggcattgcgattccacttggtcagagagccacgtcaccaccacctcaacccgcacctgggtcctgccgacctacaacaaccacctgtacctgcggctcggctcgagcaacgccagcgacaccttcaacggattctccaccccctggggatactttgactttaaccgcttccactgccacttctcgccaagagactggcaaaggctcatcaacaaccactggggactgcgccccaaaagcatgcaagtccgcatcttcaacatccaagttaaggaggtcacgacgtctaacggggagacgaccgtatccaacaacctcaccagcacggtccagatctttgcggacagcacgtacgagctcccgtacgtgatggatgcaggtcaggagggcagcttgcctcctttccccaacgacgtgttcatggtgcctcagtacgggtactgcggactggtaaccggaggcagctctcaaaaccagacagacagaaatgccttctactgtctggagtactttcccagccagatgctgagaaccggaaacaactttgagatggtgtacaagtttgaaaacgtgcccttccactccatgtacgctcacagccagagcctggataggctgatgaacccgctgctggaccagtacctgtgggagctccagtctaccacctctggaggaactctcaaccagggcaattcagccaccaactttgccaagctgaccaaaacaaacttttctggctaccgcaaaaactggctcccggggcccatgatgaagcagcagagattctccaagactgccagtcaaaactacaagattccccagggaagaaacaacagtctgctccattatgagaccagaactaccctcgacggaagatggagcaattttgccccgggaacggccatggcaaccgcagccaacgacgccaccgacttctctcaggcccagctcatctttgcggggcccaacatcaccggcaacaccaccacagatgccaataacctgatgttcacttcagaagatgaacttagggccaccaacccccgggacactgacctgtttggccacctggcaaccaaccagcaaaacgccaccaccgttcctaccgtagacgacgtggacggagtcggcgtgtacccgggaatggtgtggcaggacagagacatttactaccaagggcccatttgggccaaaattccacacacggatggacactttcacccgtctcctctcattggcggatttggactgaaaagcccgcctccacaaatattcatcaaaaacactcctgtacccgccaatcccgcaacgaccttctctccggccagaatcaacagcttcatcacccagtacagcaccggacaggtggctgtcaaaatagaatgggaaatccagaaggagcggtccaagagatggaacccagaggtccagttcacgtccaactacggagcacaggactcgcttctctgggctcccgacaacgccggagcctacaaagagcccagggccattggatcccgatacctcaccaaccacctctag

SEQ ID NO: 523 - DNA, 1617 bp, Bovine adeno-associated virus
atgcgtgcagcagctggcggaaatggtggcgatgcgggacaaggtgccgagggagtgggtaatgcctccggtgattggcattgcgattccacttggtcagagagccacgtcaccaccacctcaacccgcacctgggtcctgccgacctacaacaaccacctgtacctgcggctcggctcgagcaacgccagcgacaccttcaacggattctccaccccctggggatactttgactttaaccgcttccactgccacttctcgccaagagactggcaaaggctcatcaacaaccactggggactgcgccccaaaagcatgcaagtccgcatcttcaacatccaagttaaggaggtcacgacgtctaacggggagacgaccgtatccaacaacctcaccagcacggtccagatctttgcggacagcacgtacgagctcccgtacgtgatggatgcaggtcaggagggcagcttgcctcctttccccaacgacgtgttcatggtgcctcagtacgggtactgcggactggtaaccggaggcagctctcaaaaccagacagacagaaatgccttctactgtctggagtactttcccagccagatgctgagaaccggaaacaactttgagatggtgtacaagtttgaaaacgtgcccttccactccatgtacgctcacagccagagcctggataggctgatgaacccgctgctggaccagtacctgtgggagctccagtctaccacctctggaggaactctcaaccagggcaattcagccaccaactttgccaagctgaccaaaacaaacttttctggctaccgcaaaaactggctcccggggcccatgatgaagcagcagagattctccaagactgccagtcaaaactacaagattccccagggaagaaacaacagtctgctccattatgagaccagaactaccctcgacggaagatggagcaattttgccccgggaacggccatggcaaccgcagccaacgacgccaccgacttctctcaggcccagctcatctttgcggggcccaacatcaccggcaacaccaccacagatgccaataacctgatgttcacttcagaagatgaacttagggccaccaacccccgggacactgacctgtttggccacctggcaaccaaccagcaaaacgccaccaccgttcctaccgtagacgacgtggacggagtcggcgtgtacccgggaatggtgtggcaggacagagacatttactaccaagggcccatttgggccaaaattccacacacggatggacactttcacccgtctcctctcattggcggatttggactgaaaagcccgcctccacaaatattcatcaaaaacactcctgtacccgccaatcccgcaacgaccttctctccggccagaatcaacagcttcatcacccagtacagcaccggacaggtggctgtcaaaatagaatgggaaatccagaaggagcggtccaagagatggaacccagaggtccagttcacgtccaactacggagcacaggactcgcttctctgggctcccgacaacgccggagcctacaaagagcccagggccattggatcccgatacctcaccaaccacctctag

SEQ ID NO: 524 - DNA, 1173 bp, Bovine adeno-associated virus
atggcgctggtaagctggctggtggaacatggcatcacttccgagaagcagtggattcaggagaatcaggagagctacctgtccttcaactccacgggaaactctcggagccagattaaagccgcgcttgacaacgcgtcaaaaattatgagtctgaccaaatctgcctcagactatctcgtgggacagactgttccagaggacatttctgaaaacagaatctggcagatttttgatctcaacggctacgacccggcatacgcgggctctgttctctacggctggtgcactcgcgcctttggaaagaggaacaccgtctggctgtatggacccgcgaccaccggaaagaccaacatcgcggaagccatctctcacaccgtgcccttttatggctgtgtgaactggactaatgagaactttccctttaatgactgtgtggaaaaaatgttgatctggtgggaggagggaaagatgaccagcaaggtggtggaacccgccaaggccatcttgggggggtctagagtacgagtggatcaaaaatgtaaatcctctgtacaagtagactctaccccggtgattatcacctccaatactaacatgtgtgtggtggtggatgggaactccacgacctttgaacaccagcagccgctggaagaccgcatgttcagatttgaactcatgcggcggctcccgccagattttggcaagattaccaagcaggaagtcaaagacttttttgcttgggcaaaggtcaaccaggtgccggtgactcacgagtttatggttcccaagaaagtggcgggaactgagagggcggagacttctagaaaacgcccactggatgacgtcaccaataccaactataaaagtccggagaagcgggcccggctctcagttgttcctgagacgcctcgcagttcagacgtgcctgtagagcccgctcctctgcgacctctcaactggtcttccaggtatgaatgcagatgtgactatcatgctaaatttgactctgtaacgggggaatgtgacgagtgtgaatatttgaatcggggcaaaaatggctgtatctttcataatgctacacattgtcaaatttgtcacgctgttcctccatgggaaaaggaaaatgtgtcagattttaatgattttgatgactgtaataaagagcagtaa

SEQ ID NO: 525 - DNA, 1833 bp, Bovine adeno-associated virus
atggctaccttctatgaagtcattgttcgcgttccatttgatgtggaagagcacctgcctggaatttctgacaactttgtagactgggtaactggtcaaatttgggagctgcctcccgagtcagatttgaatttgactctgattgagcagcctcagctgacggtggctgacagaattcgccgcgtgttcctgtacgagtggaacaaattttccaagcaggagagcaaattctttgtgcagtttgaaaagggatctgaatattttcatctgcacacgctcgtggagacctccggcatctcttctatggtccttggccgctacgtgagtcagattcgcgcccagctggtgaaggtggtgttccagaacattgagccgcggattaacgactgggtcgccatcaccaaggtaaagaagggcggagccaataaggtggtggattctgggtatattcccgcctacctgctgccgaaggtccaaccagagcttcagtgggcgtggactaacctcgaagagtataaattggccgccctcaatctggaggagcgcaaacggctcgtcgctcagtttcagcttgagtcctcgcagcgctcgcaagaggcatcttcccagagggacgtttcggctgacccggtcatcaagagcaagacttcccagaaatacatggcgctggtaagctggctggtggaacatggcatcacttccgagaagcagtggattcaggagaatcaggagagctacctgtccttcaactccacgggaaactctcggagccagattaaagccgcgcttgacaacgcgtcaaaaattatgagtctgaccaaatctgcctcagactatctcgtgggacagactgttccagaggacatttctgaaaacagaatctggcagatttttgatctcaacggctacgacccggcatacgcgggctctgttctctacggctggtgcactcgcgcctttggaaagaggaacaccgtctggctgtatggacccgcgaccaccggaaagaccaacatcgcggaagccatctctcacaccgtgcccttttatggctgtgtgaactggactaatgagaactttccctttaatgactgtgtggaaaaaatgttgatctggtgggaggagggaaagatgaccagcaaggtggtggaacccgccaaggccatcttgggggggtctagagtacgagtggatcaaaaatgtaaatcctctgtacaagtagactctaccccggtgattatcacctccaatactaacatgtgtgtggtggtggatgggaactccacgacctttgaacaccagcagccgctggaagaccgcatgttcagatttgaactcatgcggcggctcccgccagattttggcaagattaccaagcaggaagtcaaagacttttttgcttgggcaaaggtcaaccaggtgccggtgactcacgagtttatggttcccaagaaagtggcgggaactgagagggcggagacttctagaaaacgcccactggatgacgtcaccaataccaactataaaagtccggagaagcgggcccggctctcagttgttcctgagacgcctcgcagttcagacgtgcctgtagagcccgctcctctgcgacctctcaactggtcttccaggtatgaatgcagatgtgactatcatgctaaatttgactctgtaacgggggaatgtgacgagtgtgaatatttgaatcggggcaaaaatggctgtatctttcataatgctacacattgtcaaatttgtcacgctgttcctccatgggaaaaggaaaatgtgtcagattttaatgattttgatgactgtaataaagagcagtaa

SEQ ID NO: 526 - DNA, 2211 bp, Bovine adeno-associated virus
atgtcttttgttgaccaccctccagattggttggaatcgatcggcgacggctttcgtgaatttctcggccttgaggcgggtcccccgaaacccaaggccaatcaacagaagcaagataacgctcgaggtcttgtgcttcctgggtacaagtatcttggtcctgggaacggccttgataagggcgatcctgtcaattttgctgacgaggttgcccgagagcacgacctctcctaccagaaacagcttgaggcgggcgataacccttacctcaagtacaaccacgcggacgcagagtttcaggagaaactcgcttctgacacttcttttgggggaaaccttgggaaggctgttttccaggctaaaaagaggattctcgaacctcttggcctggttgagacgccggataaaacggcgcctgcggcaaaaaagaggcctctagagcagagtcctcaagagccagactcctcgagcggagttggcaagaaaggcaaacagcctgccagaaagagactcaactttgacgacgaacctggagccggagacgggcctcccccagaaggaccatcttccggagctatgtctactgagactgaaatgcgtgcagcagctggcggaaatggtggcgatgcgggacaaggtgccgagggagtgggtaatgcctccggtgattggcattgcgattccacttggtcagagagccacgtcaccaccacctcaacccgcacctgggtcctgccgacctacaacaaccacctgtacctgcggctcggctcgagcaacgccagcgacaccttcaacggattctccaccccctggggatactttgactttaaccgcttccactgccacttctcgccaagagactggcaaaggctcatcaacaaccactggggactgcgccccaaaagcatgcaagtccgcatcttcaacatccaagttaaggaggtcacgacgtctaacggggagacgaccgtatccaacaacctcaccagcacggtccagatctttgcggacagcacgtacgagctcccgtacgtgatggatgcaggtcaggagggcagcttgcctcctttccccaacgacgtgttcatggtgcctcagtacgggtactgcggactggtaaccggaggcagctctcaaaaccagacagacagaaatgccttctactgtctggagtactttcccagccagatgctgagaaccggaaacaactttgagatggtgtacaagtttgaaaacgtgcccttccactccatgtacgctcacagccagagcctggataggctgatgaacccgctgctggaccagtacctgtgggagctccagtctaccacctctggaggaactctcaaccagggcaattcagccaccaactttgccaagctgaccaaaacaaacttttctggctaccgcaaaaactggctcccggggcccatgatgaagcagcagagattctccaagactgccagtcaaaactacaagattccccagggaagaaacaacagtctgctccattatgagaccagaactaccctcgacggaagatggagcaattttgccccgggaacggccatggcaaccgcagccaacgacgccaccgacttctctcaggcccagctcatctttgcggggcccaacatcaccggcaacaccaccacagatgccaataacctgatgttcacttcagaagatgaacttagggccaccaacccccgggacactgacctgtttggccacctggcaaccaaccagcaaaacgccaccaccgttcctaccgtagacgacgtggacggagtcggcgtgtacccgggaatggtgtggcaggacagagacatttactaccaagggcccatttgggccaaaattccacacacggatggacactttcacccgtctcctctcattggcggatttggactgaaaagcccgcctccacaaatattcatcaaaaacactcctgtacccgccaatcccgcaacgaccttctctccggccagaatcaacagcttcatcacccagtacagcaccggacaggtggctgtcaaaatagaatgggaaatccagaaggagcggtccaagagatggaacccagaggtccagttcacgtccaactacggagcacaggactcgcttctctgggctcccgacaacgccggagcctacaaagagcccagggccattggatcccgatacctcaccaaccacctctag

SEQ ID NO: 527 - DNA, 4694 bp, Bovine adeno-associated virus
gtggcactcccccccctgtcgcgttcgctcgttcgctggctcgattgggggggtggcagctcaaagagctgccagacgacggccctctgggccgtcgcccccccaatcgagccagcgaacgagcgaacgcgacaggggggggagtgccacactctctagcaagggggttttgtaggtggtgatgtcattgttgatgtcattatagttgtcacgcgatagttaatgattaacagtcatgtgatgtgtgttatccaataggatgaaagcgcgcgaatgagatctcgcgagacttccggggtataaaaggggtgagtgaacgagcccgccgccattctctgctctggactgctagaggaccctcgctgccatggctaccttctatgaagtcattgttcgcgttccatttgatgtggaagagcacctgcctggaatttctgacaactttgtagactgggtaactggtcaaatttgggagctgcctcccgagtcagatttgaatttgactctgattgagcagcctcagctgacggtggctgacagaattcgccgcgtgttcctgtacgagtggaacaaattttccaagcaggagagcaaattctttgtgcagtttgaaaagggatctgaatattttcatctgcacacgctcgtggagacctccggcatctcttctatggtccttggccgctacgtgagtcagattcgcgcccagctggtgaaggtggtgttccagaacattgagccgcggattaacgactgggtcgccatcaccaaggtaaagaagggcggagccaataaggtggtggattctgggtatattcccgcctacctgctgccgaaggtccaaccagagcttcagtgggcgtggactaacctcgaagagtataaattggccgccctcaatctggaggagcgcaaacggctcgtcgctcagtttcagcttgagtcctcgcagcgctcgcaagaggcatcttcccagagggacgtttcggctgacccggtcatcaagagcaagacttcccagaaatacatggcgctggtaagctggctggtggaacatggcatcacttccgagaagcagtggattcaggagaatcaggagagctacctgtccttcaactccacgggaaactctcggagccagattaaagccgcgcttgacaacgcgtcaaaaattatgagtctgaccaaatctgcctcagactatctcgtgggacagactgttccagaggacatttctgaaaacagaatctggcagatttttgatctcaacggctacgacccggcatacgcgggctctgttctctacggctggtgcactcgcgcctttggaaagaggaacaccgtctggctgtatggacccgcgaccaccggaaagaccaacatcgcggaagccatctctcacaccgtgcccttttatggctgtgtgaactggactaatgagaactttccctttaatgactgtgtggaaaaaatgttgatctggtgggaggagggaaagatgaccagcaaggtggtggaacccgccaaggccatcttgggggggtctagagtacgagtggatcaaaaatgtaaatcctctgtacaagtagactctaccccggtgattatcacctccaatactaacatgtgtgtggtggtggatgggaactccacgacctttgaacaccagcagccgctggaagaccgcatgttcagatttgaactcatgcggcggctcccgccagattttggcaagattaccaagcaggaagtcaaagacttttttgcttgggcaaaggtcaaccaggtgccggtgactcacgagtttatggttcccaagaaagtggcgggaactgagagggcggagacttctagaaaacgcccactggatgacgtcaccaataccaactataaaagtccggagaagcgggcccggctctcagttgttcctgagacgcctcgcagttcagacgtgcctgtagagcccgctcctctgcgacctctcaactggtcttccaggtatgaatgcagatgtgactatcatgctaaatttgactctgtaacgggggaatgtgacgagtgtgaatatttgaatcggggcaaaaatggctgtatctttcataatgctacacattgtcaaatttgtcacgctgttcctccatgggaaaaggaaaatgtgtcagattttaatgattttgatgactgtaataaagagcagtaaataaagtgagtagtcatgtcttttgttgaccaccctccagattggttggaatcgatcggcgacggctttcgtgaatttctcggccttgaggcgggtcccccgaaacccaaggccaatcaacagaagcaagataacgctcgaggtcttgtgcttcctgggtacaagtatcttggtcctgggaacggccttgataagggcgatcctgtcaattttgctgacgaggttgcccgagagcacgacctctcctaccagaaacagcttgaggcgggcgataacccttacctcaagtacaaccacgcggacgcagagtttcaggagaaactcgcttctgacacttcttttgggggaaaccttgggaaggctgttttccaggctaaaaagaggattctcgaacctcttggcctggttgagacgccggataaaacggcgcctgcggcaaaaaagaggcctctagagcagagtcctcaagagccagactcctcgagcggagttggcaagaaaggcaaacagcctgccagaaagagactcaactttgacgacgaacctggagccggagacgggcctcccccagaaggaccatcttccggagctatgtctactgagactgaaatgcgtgcagcagctggcggaaatggtggcgatgcgggacaaggtgccgagggagtgggtaatgcctccggtgattggcattgcgattccacttggtcagagagccacgtcaccaccacctcaacccgcacctgggtcctgccgacctacaacaaccacctgtacctgcggctcggctcgagcaacgccagcgacaccttcaacggattctccaccccctggggatactttgactttaaccgcttccactgccacttctcgccaagagactggcaaaggctcatcaacaaccactggggactgcgccccaaaagcatgcaagtccgcatcttcaacatccaagttaaggaggtcacgacgtctaacggggagacgaccgtatccaacaacctcaccagcacggtccagatctttgcggacagcacgtacgagctcccgtacgtgatggatgcaggtcaggagggcagcttgcctcctttccccaacgacgtgttcatggtgcctcagtacgggtactgcggactggtaaccggaggcagctctcaaaaccagacagacagaaatgccttctactgtctggagtactttcccagccagatgctgagaaccggaaacaactttgagatggtgtacaagtttgaaaacgtgcccttccactccatgtacgctcacagccagagcctggataggctgatgaacccgctgctggaccagtacctgtgggagctccagtctaccacctctggaggaactctcaaccagggcaattcagccaccaactttgccaagctgaccaaaacaaacttttctggctaccgcaaaaactggctcccggggcccatgatgaagcagcagagattctccaagactgccagtcaaaactacaagattccccagggaagaaacaacagtctgctccattatgagaccagaactaccctcgacggaagatggagcaattttgccccgggaacggccatggcaaccgcagccaacgacgccaccgacttctctcaggcccagctcatctttgcggggcccaacatcaccggcaacaccaccacagatgccaataacctgatgttcacttcagaagatgaacttagggccaccaacccccgggacactgacctgtttggccacctggcaaccaaccagcaaaacgccaccaccgttcctaccgtagacgacgtggacggagtcggcgtgtacccgggaatggtgtggcaggacagagacatttactaccaagggcccatttgggccaaaattccacacacggatggacactttcacccgtctcctctcattggcggatttggactgaaaagcccgcctccacaaatattcatcaaaaacactcctgtacccgccaatcccgcaacgaccttctctccggccagaatcaacagcttcatcacccagtacagcaccggacaggtggctgtcaaaatagaatgggaaatccagaaggagcggtccaagagatggaacccagaggtccagttcacgtccaactacggagcacaggactcgcttctctgggctcccgacaacgccggagcctacaaagagcccagggccattggatcccgatacctcaccaaccacctctagcccaattctgttgcataccctcaataaaccgtgtattcgtttcagtaaaatactgcctcttgtggtcattcggcgtacaacagcttacaacaacaacaaaacccccttgctagagagtgtggcactcccccccctgtcgcgttcgctcgttcgctggctcgattgggggggtggcagctcaaagagctgccagacgacggccctctgggccgtcgcccccccaatcgagccagcgaacgagcgaacgcgacaggggggggagtgccac

SEQ ID NO: 528 - protein, 390 aa, Bovine adeno-associated virus
MALVSWLVEHGITSEKQWIQENQESYLSFNSTGNSRSQIKAALDNASKIMSLTKSASDYLVGQTVPEDISENRIWQIFDLNGYDPAYAGSVLYGWCTRAFGKRNTVWLYGPATTGKTNIAEAISHTVPFYGCVNWTNENFPFNDCVEKMLIWWEEGKMTSKVVEPAKAILGGSRVRVDQKCKSSVQVDSTPVIITSNTNMCVVVDGNSTTFEHQQPLEDRMFRFELMRRLPPDFGKITKQEVKDFFAWAKVNQVPVTHEFMVPKKVAGTERAETSRKRPLDDVTNTNYKSPEKRARLSVVPETPRSSDVPVEPAPLRPLNWSSRYECRCDYHAKFDSVTGECDECEYLNRGKNGCIFHNATHCQICHAVPPWEKENVSDFNDFDDCNKEQ

SEQ ID NO: 529 - protein, 610 aa, Bovine adeno-associated virus
MATFYEVIVRVPFDVEEHLPGISDNFVDWVTGQIWELPPESDLNLTLIEQPQLTVADRIRRVFLYEWNKFSKQESKFFVQFEKGSEYFHLHTLVETSGISSMVLGRYVSQIRAQLVKVVFQNIEPRINDWVAITKVKKGGANKVVDSGYIPAYLLPKVQPELQWAWTNLEEYKLAALNLEERKRLVAQFQLESSQRSQEASSQRDVSADPVIKSKTSQKYMALVSWLVEHGITSEKQWIQENQESYLSFNSTGNSRSQIKAALDNASKIMSLTKSASDYLVGQTVPEDISENRIWQIFDLNGYDPAYAGSVLYGWCTRAFGKRNTVWLYGPATTGKTNIAEAISHTVPFYGCVNWTNENFPFNDCVEKMLIWWEEGKMTSKVVEPAKAILGGSRVRVDQKCKSSVQVDSTPVIITSNTNMCVVVDGNSTTFEHQQPLEDRMFRFELMRRLPPDFGKITKQEVKDFFAWAKVNQVPVTHEFMVPKKVAGTERAETSRKRPLDDVTNTNYKSPEKRARLSVVPETPRSSDVPVEPAPLRPLNWSSRYECRCDYHAKFDSVTGECDECEYLNRGKNGCIFHNATHCQICHAVPPWEKENVSDFNDFDDCNKEQ

SEQ ID NO: 530 - protein, 538 aa, Bovine adeno-associated virus
MRAAAGGNGGDAGQGAEGVGNASGDWHCDSTWSESHVTTTSTRTWVLPTYNNHLYLRLGSSNASDTFNGFSTPWGYFDFNRFHCHFSPRDWQRLINNHWGLRPKSMQVRIFNIQVKEVTTSNGETTVSNNLTSTVQIFADSTYELPYVMDAGQEGSLPPFPNDVFMVPQYGYCGLVTGGSSQNQTDRNAFYCLEYFPSQMLRTGNNFEMVYKFENVPFHSMYAHSQSLDRLMNPLLDQYLWELQSTTSGGTLNQGNSATNFAKLTKTNFSGYRKNWLPGPMMKQQRFSKTASQNYKIPQGRNNSLLHYETRTTLDGRWSNFAPGTAMATAANDATDFSQAQLIFAGPNITGNTTTDANNLMFTSEDELRATNPRDTDLFGHLATNQQNATTVPTVDDVDGVGVYPGMVWQDRDIYYQGPIWAKIPHTDGHFHPSPLIGGFGLKSPPPQIFIKNTPVPANPATTFSPARINSFITQYSTGQVAVKIEWEIQKERSKRWNPEVQFTSNYGAQDSLLWAPDNAGAYKEPRAIGSRYLTNHL

SEQ ID NO: 531 - protein, 736 aa, Artificial Sequence
  source: /note="Description of Artificial Sequence: Synthetic polypeptide"
MSFVDHPPDWLESIGDGFREFLGLEAGPPKPKANQQKQDNARGLVLPGYKYLGPGNGLDKGDPVNFADEVAREHDLSYQKQLEAGDNPYLKYNHADAEFQEKLASDTSFGGNLGKAVFQAKKRILEPLGLVETPDKTAPAAKKRPLEQSPQEPDSSSGVGKKGKQPARKRLNFDDEPGAGDGPPPEGPSSGAMSTETEMRAAAGGNGGDAGQGAEGVGNASGDWHCDSTWSESHVTTTSTRTWVLPTYNNHLYLRLGSSNASDTFNGFSTPWGYFDFNRFHCHFSPRDWQRLINNHWGLRPKSMQVRIFNIQVKEVTTSNGETTVSNNLTSTVHIFADSTYELPYVMDAGQEGSLPPFPNDVFMVPQYGYCGLVTGGSSQNQTDRNAFYCLEYFPSQMLRTGNNFEMVYKFENVPFHSMYAHSQSLDRLMNPLLDQYLWELQSTTSGGTLNQGNSATNFAKLTNKNFSGYRKNWLPGPMMKQQRFSKTASQNYKIPQGGNNSLLHYETRTTLDRRWSNFAPGTAMATAANDATDFSQAQLIFAGPNITGNTTTDANNLMFTSEDELRATNPRDTDLFGHLATNQQNATTVPTVDDVDGVGVYPGMVWQDRDIYYQGPIWAKIPHTDGHFHPSPLIGGFGLKSPPPQIFIKNTPVPANPATTFSPARINSFITQYSTGQVAVKIEWEIQKERSKRWNPEVQFTSNYGAQDSLLWAPDNAGAYKEPRAIGSRYLTNHL

SEQ ID NO: 532 - protein, 736 aa, Artificial Sequence
  source: /note="Description of Artificial Sequence: Synthetic polypeptide"
MSFVDHPPDWLESIGDGFREFLGLEAGPPKPKANQQKQDNARGLVLPGYKYLGPGNGLDKGDPVNFADEVAREHDLSYQKQLEAGDNPYLKYNHADAEFQEKLASDTSFGGNLGKAVFQAKKRILEPLGLVETPDKTAPAAKKRPLEQSPQEPDSSSGVGKKGKQPARKRLNFDDEPGAGDGPPPEGPSSGAMSTETEMRAAAGGNGGDAGQGAEGVGNASGDWHCDSTWSESHVTTTSTRTWVLPTYNNHLYLRLGSSNASDTFNGFSTPWGYFDFNRFHCHFSPRDWQRLINNHWGLRPKSMQVRIFNIQVKEVTTSNGETTVSNNLTSTVQIFADSTYELPYVMDAGQEGSLPPFPNDVFMVPQYGYCGLVTGGSSQNQTDRNAFYCLEYFPSQMLRTGNNFEMVYKFENVPFHSMYAHSQSLDRLMNPLLDQYLWELQSTTSGGTLNQGNSATNFAKLTKTNFSGYRKNWLPGPMMKQQRFSKTASQNYKIPQGRNNSLLHYETRTTLDGRWSNFAPGTAMATAANDATDFSQAQLIFAGPNITGNTTTDANNLMFTSEDELRATNPRDTDLFGHLATNQQNATTVPTVDDVDGVGVYPGMVWQDRDIYYQGPIWAKIPHTDGHFHPSPLIGGFGLKSPPPQIFIKNTPVPANPATTFSPARINSFITQYSTGQVAVKIEWEIQKERSKRWNPEVQFTSNYGAQDSLLWAPDNAGAYKEPRAIGSRYLTNHL

SEQ ID NO: 533 - protein, 736 aa, Bovine adeno-associated virus; identical to SEQ ID NO: 532

SEQ ID NO: 534 - protein, 600 aa, Bovine adeno-associated virus
TAPAAKKRPLEQSPQEPDSSSGVGKKGKQPARKRLNFDDEPGAGDGPPPEGPSSGAMSTETEMRAAAGGNGGDAGQGAEGVGNASGDWHCDSTWSESHVTTTSTRTWVLPTYNNHLYLRLGSSNASDTFNGFSTPWGYFDFNRFHCHFSPRDWQRLINNHWGLRPKSMQVRIFNIQVKEVTTSNGETTVSNNLTSTVQIFADSTYELPYVMDAGQEGSLPPFPNDVFMVPQYGYCGLVTGGSSQNQTDRNAFYCLEYFPSQMLRTGNNFEMVYKFENVPFHSMYAHSQSLDRLMNPLLDQYLWELQSTTSGGTLNQGNSATNFAKLTKTNFSGYRKNWLPGPMMKQQRFSKTASQNYKIPQGRNNSLLHYETRTTLDGRWSNFAPGTAMATAANDATDFSQAQLIFAGPNITGNTTTDANNLMFTSEDELRATNPRDTDLFGHLATNQQNATTVPTVDDVDGVGVYPGMVWQDRDIYYQGPIWAKIPHTDGHFHPSPLIGGFGLKSPPPQIFIKNTPVPANPATTFSPARINSFITQYSTGQVAVKIEWEIQKERSKRWNPEVQFTSNYGAQDSLLWAPDNAGAYKEPRAIGSRYLTNHL

SEQ ID NO: 535 - DNA, 2214 bp, Artificial Sequence
  source: /note="Description of Artificial Sequence: Synthetic polynucleotide"
atggctgccgatggttatcttccagattggctcgaggacactctctctgaaggaataagacagtggtggaagctcaaacctggcccaccaccaccaaagcccgcagagcggcataaggacgacagcaggggtcttgtgcttcctgggtacaagtacctcggacccttcaacggactcgacaagggagagccggtcaacgaggcagacgccgcggccctcgagcacgacaaagcctacgaccggcagctcgacagcggagacaacccgtacctcaagtacaaccacgccgacgcggagtttcaggagcgccttaaagaagatacgtcttttgggggcaacctcgggcgagcagtcttccaggccaaaaagaggcttcttgaacctcttggtctggttgaggaagcggctaagacggctcctggaaagaagaggcctgtagagcagtctcctcaggaaccggactcctcctcgggcatcggcaagacaggccagcagcccgctaaaaagagactcaatttcggtcagactggcgacacagagtcagtcccagaccctcaaccaatcggagaacctcccgcagccccctcaggtgtgggatctcttacaatggcttcaggtggtggcgcaccagtggcagacaataacgaaggtgccgatggagtgggtagttcctcgggaaattggcattgcgattcccaatggctgggggacagagtcatcaccaccagcacccgaacctgggccctgcccacctacaacaatcacctctacaagcaaatctccaacgggacatcgggaggagccaccaacgacaacacctacttcggctacagcaccccctgggggtattttgactttaacagattccactgccacttttcaccacgtgactggcagcgactcatcaacaacaactggggattccggcccaagagactcagcttcaagctcttcaacatccaggtcaaggaggtcacgcagaatgaaggcaccaagaccatcgccaataaccttaccagcacggtccaggtcttcacggactcggagtaccagctgccgtacgttctcggctctgcccaccagggctgcctgcctccgttcccggcggacgtgttcatgattccccagtacggctacctaacactcaacaacggtagtcaggccgtgggacgctcctccttctactgcctggaatactttccttcgcagatgctgagaaccggcaacaacttccagtttacttacaccttcgaggacgtgcctttccacagcagctacgcccacagccagagcttggaccggctgatgaatcctctgattgaccagtacctgtactacttgtctcggactcaaacaacaggaggcacggcaaatacgcagactctgggcttcagccaaggtgggcctaatacaatggccaatcaggcaaagaactggctgccaggaccctgttaccgccaacaacgcgtctcaacgacaaccgggcaaaacaacaatagcaactttgcctggactgctgggaccaaataccatctgaatggaagaaattcattggctaatcctggcatcgctatggcaacacacaaagacgacaaggagcgtttttttcccagtaacgggatcctgatttttggcaaacaaaatgctgccagagacaatgcggattacagcgatgtcatgctcaccagcgaggaagaaatcaaaaccactaaccctgtggctacagaggaatacggtatcgtggcagataacttgcagcagcaaaacacggctcctcaaattggaactgtcaacagccagggggccttacccggtatggtttggcagaaccgggacgtgtacctgcagggtcccatctgggccaagattcctcacacggacggcaacttccacccgtctccgctgatgggcggctttggcctgaaacatcctccgcctcagatcctgatcaagaacacgcctgtacctgcggatcctccgaccaccttcaaccagtcaaagctgaactctttcatcacgcaatacagcaccggacaggtcagcgtggaaattgaatgggagctgcagaaggaaaacagcaagcgctggaaccccgagatccagtacacctccaactactacaaatctacaagtgtggactttgctgttaatacagaaggcgtgtactctgaaccccaccccattggcacccgttacctcacccgtcccctgtaa

(The sequence listing continues in the following parts.)

1. An AAV particle comprising a capsid and a viral genome, said viral genome comprising a 5′ inverted terminal repeat (ITR) sequence region, at least one promoter sequence region, a polyA sequence region, a 3′ITR sequence region, and at least one payload region comprising a first nucleic acid sequence encoding an antibody, an antibody fragment or an antibody variant, wherein the 5′ITR sequence region comprises SEQ ID NO: 13519 or 13520, wherein the 3′ITR sequence region comprises SEQ ID NO: 13521 or 13522, wherein the at least one promoter sequence region comprises one or more of SEQ ID NO: 13523-13534, and wherein the polyA sequence region comprises SEQ ID NO: 13576, 13577, or 13578.

2. The AAV particle of claim 1, wherein the 5′ITR sequence region comprises SEQ ID NO: 13519, the 3′ITR sequence region comprises SEQ ID NO: 13521, and the polyA sequence region comprises SEQ ID NO: 13576.

3. The AAV particle of claim 1, wherein the 5′ITR sequence region comprises SEQ ID NO: 13519, the 3′ITR sequence region comprises SEQ ID NO: 13521, and the polyA sequence region comprises SEQ ID NO: 13577.

4. The AAV particle of claim 1, wherein the 5′ITR sequence region comprises SEQ ID NO: 13520, the 3′ITR sequence region comprises SEQ ID NO: 13522, and the polyA sequence region comprises SEQ ID NO: 13576.

5. The AAV particle of claim 1, wherein the 5′ITR sequence region comprises SEQ ID NO: 13520, the 3′ITR sequence region comprises SEQ ID NO: 13522, and the polyA sequence region comprises SEQ ID NO: 13577.

6. The AAV particle of any of claims 1-5, wherein the at least one promoter sequence comprises SEQ ID NO: 13523.

7. The AAV particle of any of claims 1-5, wherein the at least one promoter sequence comprises SEQ ID NO: 13524.

8. The AAV particle of any of claims 1-5, wherein the at least one promoter sequence comprises SEQ ID NO: 13524 and 13525.

9. The AAV particle of any of claims 1-5, wherein the at least one promoter sequence comprises SEQ ID NO: 13525.

10. The AAV particle of any of claims 1-5, wherein the at least one promoter sequence comprises SEQ ID NO: 13526.

11. The AAV particle of any of claims 1-5, wherein the at least one promoter sequence comprises SEQ ID NO: 13527.

12. The AAV particle of any of claims 1-5, wherein the at least one promoter sequence comprises SEQ ID NO: 13528.

13. The AAV particle of any of claims 1-5, wherein the at least one promoter sequence comprises SEQ ID NO: 13529.

14. The AAV particle of any of claims 1-5, wherein the at least one promoter sequence comprises SEQ ID NO: 13530.

15. The AAV particle of any of claims 1-5, wherein the at least one promoter sequence comprises SEQ ID NO: 13531.

16. The AAV particle of any of claims 1-5, wherein the at least one promoter sequence comprises SEQ ID NO: 13532.

17. The AAV particle of any of claims 1-5, wherein the at least one promoter sequence comprises SEQ ID NO: 13533.

18. The AAV particle of any of claims 1-5, wherein the at least one promoter sequence comprises SEQ ID NO: 13534.

19. The AAV particle of any of claims 1-18, wherein the viral genome comprises at least one intron sequence region.

20. The AAV particle of claim 19, wherein the at least one intron sequence region comprises any of SEQ ID NO: 13540-13554.

21. The AAV particle of claim 19, wherein the viral genome comprises at least one exon sequence region.

22. The AAV particle of claim 21, wherein the at least one exon sequence region comprises any of SEQ ID NO: 13535-13539.

23. The AAV particle of claim 21, wherein the viral genome comprises two intron sequence regions and two exon sequence regions.

24. The AAV particle of claim 23, wherein at least one of the intron sequence regions comprise any of SEQ ID NO: 13540-13554 and at least one of the exon sequence regions comprise any of SEQ ID NO: 13535-13539.

25. The AAV particle of any of claims 1-24, wherein the viral genome comprises a filler sequence region.

26. The AAV particle of claim 25, wherein the filler sequence region comprises any of SEQ ID NO: 13579 or 13580.

27. The AAV particle of any of claims 1-26, wherein the viral genome comprises a tag sequence region.

28. The AAV particle of claim 27, wherein the tag sequence region comprises any of SEQ ID NO: 13571-13575.

29. The AAV particle of any of claims 1-28, wherein the viral genome comprises at least one signal sequence region.

30. The AAV particle of claim 29, wherein the at least one signal sequence region comprises any of SEQ ID NO: 13555-13570.

31. The AAV particle of any of claims 1-30, wherein the first nucleic acid sequence is selected from the group consisting of SEQ ID NO: 1740-1840, 1984-1992, 1996-2014, 2021-2041, 2048-2073, 2099-2120, 3912, 3913, 4002, 4003, 4053-4055, 4872-4874, 5684-5697, 7399, 7401, 7412-7414, 7576, 7602-7616, 7622-7632, 7697-7702, 7772-7780, 7788-7791, 7803-7804, 7813, 7820-7823, 7882-7884, 8042-8047, 8061-8067, 8375-8404, 8454-8490, 8545-4569, 8620-4645, 8717-8770, 9237-9271, 9470-9474, 9480-9529, 9585-9636, 9803-9988, and 10210-10392, said first nucleic acid segment encoding one or more polypeptides, wherein the one or more polypeptides are independently selected from the group consisting of SEQ ID NO: 1841-1983,1993-1995, 2015-2020, 2042-2047, 2074-2098, 2121-3911, 3914-4001, 4004-4052, 4056-4871, 4875-5683, 5698-7398, 7402-7411, 7415-7575, 7577-7601, 7617-7621, 7633-7696, 7703-7771, 7781-7787, 7792-7802, 7805-7812, 7814-7819, 7824-8041, 8048-8060, 8068-8174, 8221-8374, 8405-8453, 8491-8544, 8570-8619, 8646-8716, 8771-9236, 9272-9469, 9475-9479, 9530-9584, 9634-9802, 9989-10209, 10393-10916 and 13165-13518, and fragments thereof.

32. The AAV particle of any of claims 1-30, wherein the first nucleic acid sequence is selected from the group consisting of SEQ ID NO: 1740-1840, 1984-1992, 1996-2014, 2021-2041, 2048-2073, 2099.2120, 3912, 3913, 4002, 4003, 4053-4055, 4872-4874, 5684-5697, 7399, 7401, 7412-7414, 7576, 7602-7616, 7622-7632, 7697-7702, 7772-7780, 7788-7791, 7803-7804, 7813, 7820, 7823, 7882, 7884, 8042, 8047, 8061-8067, 8375-8404, 8454-8490, 8545-4569, 8620-8645, 8717-8770, 9237-9271, 9470-9474, 9480-9529, 9585-9636, 9803-9988, and 10210-10392, said first nucleic acid segment encoding a bispecific antibody derived from SEQ ID NO: 1841-1983,1993-1995, 2015-2020, 2042-2047, 2074-2098, 2121-3911, 3914-4001, 4004-4052, 4056-4871, 4875-5683, 5698-7398, 7402-7411, 7415-7575, 7577-7601, 7617-7621, 7633-7696, 7703-7771, 7781-7787, 7792-7802, 7805-7812, 7814-7819, 7824-8041, 8048-8060, 8068-8174, 8221-8374, 8405-8453, 8491-8544, 8570-8619, 8646-8716, 8771-9236, 9272-9469, 9475-9479, 9530-9584, 9634-9802, 9989-10209, 10393-10916 and 13165-13518, and fragments thereof.

33. The AAV particle of claim 31 or 32, wherein the first nucleic acid sequence is codon optimized.

34. The AAV particle of any of claims 31-33, wherein the first nucleic acid segment encodes one or more polypeptides selected from the group consisting of an antibody heavy chain, an antibody light chain, a linker, and combinations thereof.

35. The AAV particle of claim 34, wherein any of the polypeptides encoded by first nucleic acid segment of the payload region is humanized.

36. The AAV particle of claim 34, wherein the linker comprises any of SEQ ID NO: 1724-1739 and 13151-13162.

37. The AAV particle of claim 34, wherein the first nucleic acid segment encodes from 5 to 3′, an antibody heavy chain, a linker, and an antibody light chain.

38. The AAV particle of claim 34, wherein the first nucleic acid segment encodes from 5 to 3′, an antibody light chain, a linker, and an antibody heavy chain.

39. The AAV particle of claim 34, wherein the first nucleic acid segment encodes one or more antibody heavy chains.

40. The AAV particle of claim 39, wherein the first nucleic acid segment encodes one or more antibody heavy chain sequences listed in Tables 3-16, and fragments thereof.

41. The AAV particle of claim 34, wherein the first nucleic acid segment encodes one or more antibody light chains.

42. The AAV particle of claim 41, wherein the first nucleic acid segment encodes one or more antibody light chain sequences listed in Tables 3-16 and fragments thereof.

43. The AAV particle of claim 34, wherein the first nucleic acid segment encodes one or more antibody heavy chains and one or more antibody light chains and, optionally one or more linkers.

44. The AAV particle of any of claims 34-43, wherein the linker comprises any of SEQ ID NO: 1724-1739 and 13151-13162.

45. The AAV particle of claim 31, wherein the first nucleic acid segment encodes an antibody, having at least 95% identity to any of the sequences selected from the group consisting of SEQ ID NO: 1740-10916 and 13165-13518.

46. The AAV particle of claim 32, wherein the first nucleic acid segment encodes an bispecific antibody, having at least 95% identity to any of the sequences selected from the group consisting of SEQ ID NO: 1740-10916 and 13165-13518.

47. The AAV particle of any of claims 1-46, wherein the payload region of the viral genome comprises a second nucleic acid segment, said second nucleic acid segment encoding an aptamer, siRNA, saRNA, ribozyme, microRNA, mRNA or combination thereof.

48. The AAV particle of claim 47, wherein the second nucleic acid segment encodes an siRNA and said siRNA is designed to target the mRNA that encodes the target of the antibody encoded by the first nucleic acid segment.

49. The AAV particle of claim 47, wherein the second nucleic acid segment encodes a microRNA and said microRNA is selected to target the mRNA that encodes the target of the antibody encoded by the first nucleic acid segment.

50. The AAV particle of claim 47, wherein the second nucleic acid segment encodes an mRNA and said mRNA encodes one or more peptides inhibitors of the same target of the antibody encoded by the first nucleic acid segment.

51. The AAV particle of any of claims 47-50, wherein the payload region of the viral genome comprises a third nucleic acid segment.

52. The AAV particle of claim 51, wherein the third nucleic acid segment encodes a nuclear export signal.

53. The AAV particle of claim 51, wherein the third nucleic acid segment encodes a polynucleotide or polypeptide which acts as a regulator of expression of the viral genome in which it is encoded.

54. The AAV particle of claim 51, wherein the third nucleic acid segment encodes a polynucleotide or polypeptide which acts as a regulator of expression of the payload region of the viral genome in which it is encoded.

55. The AAV particle of claim 51, wherein the third nucleic acid segment encodes a polynucleotide or polypeptide which acts as a regulator of expression of the first nucleic acid segment of the payload region of the viral genome in which it is encoded.

56. The AAV particle of any of claims 1-55, wherein the viral genome is single stranded.

57. The AAV particle of any of claims 1-55, wherein the viral genome is self-complementary.

58. The AAV particle of any of claims 1-57, wherein the capsid is a serotype selected from the group of consisting of SEQ ID NO: 1-1261 and 10928-13139.

59. An AAV particle comprising a capsid and a viral genome, said viral genome comprising at least one inverted terminal repeat (ITR) region and a payload region, said payload region comprising a regulatory sequence operably linked to at least a first nucleic acid segment, wherein the first nucleic segment is selected from the group consisting of SEQ ID NO: 1740-1840, 1984-1992, 1996-2014, 2021-2041, 2048-2073, 2099-2120, 3912, 3913, 4002, 4003, 4053-4055, 4872-4874, 5684-5697, 7399, 7401, 7412-7414, 7576, 7602-7616, 7622-7632, 7697-7702, 7772-7780, 7788-7791, 7803-7804, 7813, 7820-7823, 7882-7884, 8042-8047, 8061-8067, 8375-4404, 8454-8490, 8545-4569, 8620-86458717-8770, 9237-9271, 9470-9474, 9480-9529, 9585-9636, 9803-9988, and 10210-10392, said first nucleic acid segment encoding one or more polypeptides, wherein the one or more polypeptides are independently selected from the group consisting of SEQ ID NO: 1841-1983, 1993-1995, 2015-2020, 2042-2047, 2074-2098, 2121-3911, 3914-4001, 4004-4052, 4056-4871, 4875-5683, 5698-7398, 7402-7411, 7415-7575, 7577-7601, 7617-7621, 7633-7696, 7703-7771, 7781-7787, 7792-7802, 7805-7812, 7814-7819, 7824-8041, 8048-8060, 8068-8174, 8221-8374, 8405-8453, 8491-8544, 8570-8619, 8646-8716, 8771-9236, 9272-9469, 9475-9479, 9530-9584, 9634-9802, 9989-10209, 10393-10916 and 13165-13518, and fragments thereof.

60. The AAV particle of claim 59, wherein the capsid is a serotype selected from the group of consisting of SEQ ID NO: 1-1261 and 10928-13139.

61. The AAV particle of claim 60, wherein the regulatory sequence comprises a promoter.

62. The AAV particle of claim 61, wherein the promoter is selected from the group consisting of human elongation factor 1α-subunit (EF1α), cytomegalovirus (CMV) immediate-early enhancer and/or promoter, chicken β-actin (CBA) and its derivative CAG, β glucuronidase (GUSB), or ubiquitin C (UBC). Tissue-specific expression elements can be used to restrict expression to certain cell types such as, but not limited to, muscle specific promoters, B cell promoters, monocyte promoters, leukocyte promoters, macrophage promoters, pancreatic acinar cell promoters, endothelial cell promoters, lung tissue promoters, astrocyte promoters, or nervous system promoters which can be used to restrict expression to neurons, astrocytes, or oligodendrocytes.

63. The AAV particle of claim 59, wherein the viral genome is single stranded.

64. The AAV particle of claim 59, wherein the viral genome is self-complementary.

65. The AAV particle of claim 59, wherein at least one region of the viral genome is codon-optimized.

66. The AAV particle of claim 65, wherein the first nucleic acid segment is codon-optimized.

67. The AAV particle of any of claims 59-66, wherein the first nucleic acid segment encodes one or more polypeptides selected from the group consisting of an antibody heavy chain, an antibody light chain, a linker, and combinations thereof.

68. The AAV particle of claim 67, wherein any of the polypeptides encoded by first nucleic acid segment of the payload region is humanized.

69. The AAV particle of claim 67, wherein the linker is selected from one or more of the members of the group given in Table 2.

70. The AAV particle of claim 67, wherein the first nucleic acid segment encodes from 5′ to 3′, an antibody heavy chain, a linker, and an antibody light chain.

71. The AAV particle of claim 67, wherein the first nucleic acid segment encodes from 5′ to 3′, an antibody light chain, a linker, and an antibody heavy chain.

72. The AAV particle of claim 67, wherein the first nucleic acid segment encodes one or more antibody heavy chains.

73. The AAV particle of claim 72, wherein the first nucleic acid segment encodes one or more antibody heavy chain sequences listed in Tables 3-16, and fragments thereof.

74. The AAV particle of claim 67, wherein the first nucleic acid segment encodes one or more antibody light chains.

75. The AAV particle of claim 74, wherein the first nucleic acid segment encodes one or more antibody light chain sequences listed in Tables 3-16 and fragments thereof.

76. The AAV particle of claim 67, wherein the first nucleic acid segment encodes one or more antibody heavy chains and one or more antibody light chains and, optionally one or more linkers.

77. The AAV particle of any of claims 67-76, wherein said linker is selected from the group consisting of Table 2.

78. The AAV particle of claim 59, wherein the first nucleic acid segment encodes an antibody, having at least 95% identity to any of the sequences selected from the group consisting of SEQ ID NO: 1740-10916 and 13165-13518.

79. The AAV particle of claim 59, wherein the viral genome comprises 2 ITR regions.

80. The AAV particle of claim 59, wherein the at least one ITR region is derived from the same parental serotype as the capsid.

81. The AAV particle of claim 59, wherein the at least one ITR region is derived from a different serotype as the capsid.

82. The AAV particle of claim 59, wherein the at least one ITR region is derived from AAV2.

83. The AAV particle of claim 59, wherein the at least one ITR region is 100-150 nucleotides in length.

84. The AAV particle of claim 59, wherein the at least one ITR region is 102 nucleotides in length.

85. The AAV particle of claim 59, wherein the at least one ITR region is 140-142 nucleotides in length.

86. The AAV particle of claim 59, wherein the at least one ITR region is 140 nucleotides in length.

87. The AAV particle of claim 59, wherein the at least one ITR region is 141 nucleotides in length.

88. The AAV particle of claim 59, wherein the at least one ITR region is 142 nucleotides in length.

89. The AAV particle of claim 59, wherein the viral genome further comprises an intron or stuffer sequence.

90. The AAV particle of claim 59, wherein the payload region of the viral genome comprises a second nucleic acid segment, said second nucleic acid segment encoding an aptamer, siRNA, saRNA, ribozyme, microRNA, mRNA or combination thereof.

91. The AAV particle of claim 90, wherein the second nucleic acid segment encodes an siRNA and said siRNA is designed to target the mRNA that encodes the target of the antibody encoded by the first nucleic acid segment.

92. The AAV particle of claim 90, wherein the second nucleic acid segment encodes a microRNA and said microRNA is selected to target the mRNA that encodes the target of the antibody encoded by the first nucleic acid segment.

93. The AAV particle of claim 90, wherein the second nucleic acid segment encodes an mRNA and said mRNA encodes one or more peptides inhibitors of the same target of the antibody encoded by the first nucleic acid segment.

94. The AAV particle of claim 59 or 90, wherein the payload region of the viral genome comprises a third nucleic acid segment.

95. The AAV particle of claim 94, wherein the third nucleic acid segment encodes a nuclear export signal.

96. The AAV particle of claim 94, wherein the third nucleic acid segment encodes a polynucleotide or polypeptide which acts as a regulator of expression of the viral genome in which it is encoded.

97. The AAV particle of claim 94, wherein the third nucleic acid segment encodes a polynucleotide or polypeptide which acts as a regulator of expression of the payload region of the viral genome in which it is encoded.

98. The AAV particle of claim 94, wherein the third nucleic acid segment encodes a polynucleotide or polypeptide which acts as a regulator of expression of the first nucleic acid segment of the payload region of the viral genome in which it is encoded.

99. An AAV particle comprising a capsid and a viral genome, said viral genome comprising at least one inverted terminal repeat (ITR) region and a payload region comprising a regulatory sequence operably linked to at least a first nucleic acid segment, said first nucleic acid segment encoding a bispecific antibody derived from SEQ ID NO: 1740-10916 and 13165-13518 or portions or fragments thereof.

100. The AAV particle of claim 99, wherein the bispecific antibody comprises a light and a heavy chain selected from two different starting antibodies sequences listed in Tables 3-16.

101. A pharmaceutical composition comprising an AAV particle of any of the preceding claims in a pharmaceutically acceptable excipient.

102. The pharmaceutical composition of claim 101, wherein the pharmaceutically acceptable excipient is saline.

103. The pharmaceutical composition of claim 101, wherein the pharmaceutically acceptable excipient is 0.001% pluronic in saline.

104. A method of producing an antibody in a subject in need thereof, comprising administering to said subject the AAV particle of any of claims 1-100 or the pharmaceutical composition of any of claims 101-103.

105. The method of claim 104, wherein the level or amount of the antibody in the target cell or tissue after administration to the subject is from about 0.001 ug/mL to 100 mg/mL.

106. The method of claim 104, wherein the antibody is encoded by a single first nucleic acid segment of a viral genome within said AAV particle.

107. The method of claim 104, wherein the antibody is encoded by two different viral genomes, said two different viral genomes packaged in separate capsids.

108. A method of expressing an antibody in a cell or tissue comprising administering the AAV particle of any of claims 1-100 or the pharmaceutical composition of any of claims 101-103 via a delivery route selected from the group consisting of enteral (into the intestine), gastroenteral, epidural (into the dura mater), oral (by way of the mouth), transdermal, intracerebral (into the cerebrum), intracerebroventricular (into the cerebral ventricles), epicutaneous (application onto the skin), intradermal, (into the skin itself), subcutaneous (under the skin), nasal administration (through the nose), intravenous (into a vein), intravenous bolus, intravenous drip, intra-arterial (into an artery), intramuscular (into a muscle), intracardiac (into the heart), intraosseous infusion (into the bone marrow), intrathecal (into the spinal canal), intraparenchymal (into the substance of a tissue, e.g., brain tissue), intraperitoneal, (infusion or injection into the peritoneum), intravesical infusion, intravitreal, (through the eye), intracavernous injection (into a pathologic cavity) intracavitary (into the base of the penis), intravaginal administration, intrauterine, extra-amniotic administration, transdermal (diffusion through the intact skin for systemic distribution), transmucosal (diffusion through a mucous membrane), transvaginal, insufflation (snorting), sublingual, sublabial, enema, eye drops (onto the conjunctiva), or in ear drops, auricular (in or by way of the ear), buccal (directed toward the cheek), conjunctival, cutaneous, dental (to a tooth or teeth), electro-osmosis, endocervical, endosinusial, endotracheal, extracorporeal, hemodialysis, infiltration, interstitial, intra-abdominal, intra-amniotic, intra-articular, intrabiliary, intrabronchial, intrabursal, intracartilaginous (within a cartilage), intracaudal (within the cauda equine), intracisternal (within the cisterna magna cerebellomedularis), intracorneal (within the cornea), dental intracoronal, intracoronary (within the coronary arteries), intracorporus cavernosum (within the dilatable spaces of the corporus cavernosa of the penis), intradiscal (within a disc), intraductal (within a duct of a gland), intraduodenal (within the duodenum), intradural (within or beneath the dura), intraepidermal (to the epidermis), intraesophageal (to the esophagus), intragastric (within the stomach), intragingival (within the gingivae), intraileal (within the distal portion of the small intestine), intralesional (within or introduced directly to a localized lesion), intraluminal (within a lumen of a tube), intralymphatic (within the lymph), intramedullary (within the marrow cavity of a bone), intrameningeal (within the meninges), intramyocardial (within the myocardium), intraocular (within the eye), intraovarian (within the ovary), intrapericardial (within the pericardium), intrapleural (within the pleura), intraprostatic (within the prostate gland), intrapulmonary (within the lungs or its bronchi), intrasinal (within the nasal or periorbital sinuses), intraspinal (within the vertebral column), intrasynovial (within the synovial cavity of a joint), intratendinous (within a tendon), intratesticular (within the testicle), intrathecal (within the cerebrospinal fluid at any level of the cerebrospinal axis), intrathoracic (within the thorax), intratubular (within the tubules of an organ), intratumor (within a tumor), intratympanic (within the aurus media), intravascular (within a vessel or vessels), intraventricular (within a ventricle), iontophoresis (by means of electric current where ions of soluble salts migrate into the tissues of the body), irrigation (to bathe or flush open wounds or body cavities), laryngeal (directly upon the larynx), nasogastric (through the nose and into the stomach), occlusive dressing technique (topical route administration which is then covered by a dressing which occludes the area), ophthalmic (to the external eye), oropharyngeal (directly to the mouth and pharynx), parenteral, percutaneous, periarticular, peridural, perineural, periodontal, rectal, respiratory (within the respiratory tract by inhaling orally or nasally for local or systemic effect), retrobulbar (behind the pons or behind the eyeball), soft tissue, subarachnoid, subconjunctival, submucosal, topical, transplacental (through or across the placenta), transtracheal (through the wall of the trachea), transtympanic (across or through the tympanic cavity), ureteral (to the ureter), urethral (to the urethra), vaginal, caudal block, diagnostic, nerve block, biliary perfusion, cardiac perfusion, photopheresis and spinal.

109. The method of claim 108, wherein the delivery route is intramuscular.

110. The method of claim 109, wherein the intramuscular administration is to at least one limb.

111. The method of claim 108, wherein the delivery route is intravascular.

112. The method of claim 108, wherein the delivery route is intrathecal.

113. The method of claim 108, wherein the delivery route is intracerebroventricular.

114. The method of claim 108, wherein the delivery route is intraparenchymal.

115. The method of claim 108, wherein the AAV particle is encapsulated in a nanoparticle.

116. The method of claim 108, wherein the AAV particle is delivered by a device.

117. The method of claim 116, wherein the device is a gene gun.

118. A method of preventing a disease or disorder in a subject comprising administering to said subject the pharmaceutical composition of any of claims 101-103.

119. The method of claim 118, wherein the administration is at a prophylactically effective dose.

120. The method of claim 119, wherein the dose is from about 1 ug/mL to about 500 ug/mL of expressed polypeptide or 1x10e4 to 1x10e16 VG/mL from the pharmaceutical composition.

121. The method of claim 120, wherein the pharmaceutical composition is administered once.

122. The method of claim 120, wherein the pharmaceutical composition is administered more than once.

123. The method of claim 120, wherein the pharmaceutical composition is administered daily, weekly, monthly or yearly.

124. The method of claim 120, wherein the pharmaceutical composition is co-administered as part of a combination therapy.

125. A method of treating a disease or disorder in a subject in need thereof comprising administering to said subject the pharmaceutical composition of any of claims 101-103.

126. The method of claim 125, wherein said disease or disorder is selected from the group consisting of diseases caused by John Cunningham Virus (JCV), influenza, hepatitis A, hepatitis B, hepatitis D, hepatitis E, respiratory syncytial virus (RSV), herpes simplex virus 1, herpes simplex virus 2, human cytomegalovirus, Epstein-Barr virus, Varicella zoster virus, Coronavirus, Poxvirus, Enterovirus 71, rubella virus, human papilloma virus, Pseudomonas Aeruginosa, Streptococcus bacteria, Stapylococcus bacteria, Clostridium Tetani, Bordetella, Mycobacterium, Francisella Tularensis, Toxoplasma gondii, Candida yeast, ricin, Bacillus anthracis, shiga toxin, shiga-like toxin, botulinum toxins, chikungunya virus, dengue virus, trypasnosoma cruzi, rabies virus, Plasmodium falciparum, ebola virus, Marburg virus, West Nile virus, Yellow Fever virus, Japanese encephalitis virus, St. Louis encephalitis virus, rotavirus, Norwalk virus, Campylobacter jejuni, Clostridium difficile, Entamoeba histolytica, Helicobacter pylori, and Enterotoxin B, Parkinson's Disease, Dementia with Lewy Bodies, multiple system atrophy, decreased muscle mass, decreased muscle strength, decreased muscle function, spinal muscular atrophy, Alzheimer's Disease, Huntington's Disease, multiple sclerosis, amyotrophic lateral sclerosis, stroke, migraine, pain, neuropathies, psychiatric disorders, cancer, ocular diseases, systemic diseases of the blood, systemic diseases of the heart, systemic diseases of the bone, immune system, autoimmune disease, inflammation disorders and inflammation.
